United States Patent Application Publication US 2014/0325702 A1 - sequence listing, part 25

SEQ ID NO: 34708 - DNA, 814 bp, Heterodera glycines
tataaagtgatagattttgaatgttatcaaaaaccatagagggggaccctattgttttgtaaaaaatttttttggataaaaatcgtgaaaatactttttattcaccataattgtgctattaatacttaattttcatcattatgtgtaaaaaaacaaaaaaaaattttgaccaaaaaaaagttgaaaaaattttcaaaacctgtcactttccatatagcgtcttattttctatatgcaattttttaaatttcagattgatgttgaaatattattgagacaagtcgagacggtaattcattttatattaactgcttttttatccataatttttacaaaaggttcgtgaaaaagtcgacgatgttgggacagcaaacaccgagaagcaattggtacaaacctaccgaaatttggaggtggaactgaaggagttgattgaaatgaccaaaaagcgagtccgggacgtcatagacccggcgatgcaagacgacatgcaggcggtcatttccgtgctgaacgcgaccacgccgataatgttcgcttcatcaatggtccgtgtcttcgccttttatttcttatccgctcccatttttaggcggtcgcttcacatcccaaactcgaaggcttatacataaaccgaaagtttgcagccgaagagatccatcgtgctctcggttgtctgaatgatgtgctccagagagagctaccgactgaagaccttgccatttcgcaacatggcggcatcaaccaactcgtcctcgacttcgacaaattccaagtgctcccatttcctcttgatttttttcgaatgcttttt

SEQ ID NO: 34709 - DNA, 907 bp, Heterodera glycines
ttttattgttgtaggctaatatttttttacttttgaccggtgctcgtttttcaaaaaattcaatgggaaactagggggtaggggggggtagaggtgggcaaattttgtttttgtttttttgaaaattctgtttgaaatttttgttattcatattttgcacaaaaattggtaggcaaagtcatgaaaacatttttttaggaattcctaatgagatttgctgtaaaaatgatacttgaaaaaattctccagccctcaaatttcagaaaaacctgaaaatttgtctactttgatttatttcattttttgattgcgcacgcttttcgcaaaaaattagctggcgaaacgagggggctggagatgacgacaggcaggcataggctgcaaatttttttttttttttttgtaaattctgtttgaaatttttgttcatcatattttgtcccaaaattggtaggcgtcgtcattaaaaaattacggaatttttaatgaaattgctgtaaaaaaataatttaaaaaaaaagttttgtcaaaccctcaaaattcagaaacacctaaaaaatcagaaatttttgtatttttcagaatgattttaccacaaattttttagcccatcacttacaaacactgcttgctcccaataaaatttagtttcatcatgaaaatcaaattttttattaaatttccttaaatgccataatttcttattaatattagaatatgtatttatcgtatttgctctaattatcccccatgggggattatttttcaacctcctcgtagactcggggataattggagaccgggggattaagatagaaggattattcttcaaacccctcctagactgggggataattggagattgggggattaatggaattggggggatattagagcaaatacggta

SEQ ID NO: 34710 - DNA, 949 bp, Heterodera glycines
  unsure (1)..(949): unsure at all n locations
aaaattcattgctttcattatgttaatacatgttacatgttacatgctcagagaggaaattcatgaactccctccgttttcatgtaacatattttgaagcgggtgcgaagcaccgaggccacgaagtgttcttacgagcaccacaaatttagaaatgggcgcgaagcgcccatcttagggcgtaaagctgcctacaaccccttaataacttttcaaaaattcattgctttcattatgttaatacatgttacatgttacatgctcagagaggaaattcatgaactccctccgttttcatgtaacatgtaacatattttgaagcgggcgcgaagcaccgaggccacgaagtgttcttacgagcaccacaaatttagaaatgggcgcgaagcgcccatcttagggcgtaaagctgcctacaaccccttaataacttttcaaaaattcattgctttcattatgttaatacatgttacatgttacatgctcagagaggaaattcatgaactccctccgttttcatgtaacatgtaacatattttgaagcgggcgcgaagcaccgaggccacgaagtgttcttacgagcaccacaaatttagaaatgggcgcgaagcgcccatcttagggcgtaaagctgcctacaaccccttaataacttttcaaaaattcattgctttcattatgttaatacatgttacatgttacatgctcagagaggaaattcatgagctccctccgttttcatgtaacatgtaacatattttgaagcgggcgcgaagcaccgaggccacgaagtgttcttacgagcccctcaaattttagaaatgagcgcgaagcgcccatctgtanggctggcagctgcctacaaccccttnataactttttcaaaattcattgctttcattatcgtgatacatggtacatgttacatgctcagagacgagattcatga

SEQ ID NO: 34711 - DNA, 1021 bp, Heterodera glycines
  unsure (1)..(1021): unsure at all n locations
tgcaggtctacagggctatnagggaagctattcccgaaggattcggtctccccataaatctgggcgcatcggctcggggggactgccccgaaaacaaaaaaatcgattttttcaagtgtccgtttggggtactcaaacaattatggggagcaaaaatccaacgcagaattaaagtacaggctatagggaagctattcccgaaggattcggtctccccataaatctgggcgcatcggttcagggggactgccccgaaaacccaaaaaaaaatttttttggataaaaattatttaaatgaactgactagataatatttaaaataggttattactcttcctttcagtatccctgcaaagtttggtgcgcttctgatcagtttctgaaaaaaaagttaagcctaaactttttggcctgtttaaaaaggaattaaaaattttattcatctccctttttgatagaaaaagcatcagagtgcctaaactaacctgtaaataaagttttgtgtgtttcagagcactttctgaaaaaatacttatgaattaattttgcaaaaaataaataattaatgaaaaagtcagaatttcgaaaaattttaaaaacaacaagcgttggcattttttcaggttaagttagtcctttacaatggagaaggcctgcaaaatttggagagattatatcgatgttagtgcgctaggttcgatgaaactttttaaaatataagcctaaactttttggcctgtttaaaaaggaattaaaaatttttaaaaattttattcatctcccttttgatagaaaaagcatcagagagccttatttaactttaaattaacatttggtgcgtttcagagcagtttctgaaaaaatatttatgaattaattttgctaaaaaaataaaatagtgaagctttaaaaataataaaaattttaaattcagaatactggagtagcatcatagcagtgcttttcttgtcttttgatgtctcgcaaaatctggttccttctgatcagtttataaaaaaaa

SEQ ID NO: 34712 - DNA, 1694 bp, Heterodera glycines
  unsure (1)..(1694): unsure at all n locations
catgctaaaatagaagaatatttgtaatttttgttttacattagcttttccaaattttgaacaaaaggcgtgcgcccggccaaaattttgggccggaacagcgccgcgcggtaaaactggcttttttgcatcgggcggcacgggcgcggtcaattgtctatggccggtctcgggccgggtacttcaaaactccggtcttaaaaaattaatagaataattaattttgggctttgtcattaaaaatgaattaaaaaaacaactataatttgaaataaaatttaaagtcgttcttaataaatggccgtgggtgacacggagatccttacataattgttttttaagcataaaaaaatatttttttagtcggatgataaaaaaccaaaattaaaaaacattaattctcattaggtgctctttcccaattaatgatatgttgacaaaaaatctgcttacaatttgtgagcaaaactttcatgtgatttttgcatgagaatcccattttaataccaactgtttacgtcaaaataaaaaagccaaataaataattaacaaaaagtaaatatttaaataatattagatattggatgaaaaaaatatatatataaatcctttataattgacataaaattactttatttacccaccaactatgaaaaccatcttttttacatttattcttcttcttcttttgccaaattgctgcattgcaaaatcacttaacctttgcaccgtttatgacaaaatggaatcggaatatgaaataaaaattaatttaagtgcaattaaagtcagaggcaacgcagaatttaaagacacaaatttgcatcaaaatattcaaaacggagaatgtttgtggcgtttcggttccggacgacattgagacgaatttggttgaattcgtatttgacattggcattatgccattgcaaaacaatgtgtttaattcggagaaagggcaacaaagtgggaaaacaacgcgtgatgatgattacatttttgaagtaccaacagaccatgaccatggaaatgccatgaggagcagcagaacggtgccaattaccgtatacgaggcacacaaactgaacggaaagccaattgtgatcaatttgggcaaaattgatccatatggacagtttttgaatcggcgtttatttgttgagagaaaaaacgatttgggcagaaattaccacgcacttttgtatgcaattgcaacaaaaaatggtgaaacggaagaaaagaaagtttttgttggatttgcccaactggtgagggccaatggagaaacttccacttctgagcagcggcaggtgaattaacagataaatttctttttttaatgagactaaaagttctgcgatttatgagtcctaatgaagaaattcgaaagtgaactgttcgtctatggttccgacaggaaaggggcaatatcctcaaaatagggggcaaaatcgcatccataaaccaaatccaatttcggttctcaatgtcccgaatctttggttcccatttgcagtgccacatgaatccttttttcaataattttagcatgttttaataagtgcttcgtcaaattcccccatgattgaactgctanaaatttcggggggtggaaggggcattcaatgatagggaatctaggggacggaggcatcgatctttcgtcggtctctaattgtctgttctctatgtctctt

SEQ ID NO: 34713 - DNA, 1403 bp, Heterodera glycines
  unsure (1)..(1403): unsure at all n locations
ggggcctcaaaaattcccatgagtaggcagagaagaagtcagaattctccgaacaatttttggttaggatatatgtaaaaagtcatttcgtccaaaagttcaggcggcaaatattncatattattatttgttgtggtaggaatntgggcaatttttcgtgtttcggtgaggggacaattttaatgggactgacttaggatgtgttcgacaattattttaggatatntaaagagacacaatgccaaagattagcaatgaaaattgctcaattggttttttaaaatttaaattcaacttacttggtcggctgacatgaatggagttaggtatttggataaaaaatgatttatgactcttaaaatcgttttgttagttaaacatattatatttggataaataaaattgacgaaaaggcaacgaatgaaaccatgcttaacaagttaaaacttgttctcgcgggggtttgggacaaattatcacgatttgagaacatttttgaccaatcctatgtaaaagtcgaacaaaaagctgaaaattcaaattttcaagcttcttttttttgttcaaattttacatatcgcccgtttttagtatttcacacaatttcttgtaagcgcattaattaaaattagagtgccacgggaccgggaatttttgccaaaaccgggaccgggacttgccgggacctgagaagccgggaccgggacctcgattttttttcgggaccgggaccgggaccgcaagaaaaaccgggaaccgggaccaaccgggaaattttaaaaattcaaaaaaattttaaaaatttaaaaaaaaattcaaattttaatttatatcaagtgaaaataatacaaaattatttggttttttatttaataaattaaattaatgaaaattttcaaacaaattttcttcaattatttcaagcaactaaatcatcgaatattaatagaaattcagatttgattttcacatcacttttttcggagcgctttttcaaaaaacttttgggaaagaagggggtccggcggtgccgataggcgccgccgggggaaattttaaaaatttgggtgcaatttgttagcagattttcaacaaaaaaanggttggtttttgcgattattaagctcanattggtaggattttcatttaaaaatgataaaatatgtatcaattttaaaaaaactatgagtaatcatattttctctataggaaacccaccagtatacaaaaaaaatgaaaataatctaattttctgtagagggattgaacaggggaaagaagaagggaaagtcaggnagactagcattangccattgcacacttaggcagtgttactttaaaangatataattattatttcttttttatttttccctttgactcaattttcttccctaattttt

SEQ ID NO: 34714 - DNA, 1231 bp, Heterodera glycines
  unsure (1)..(1231): unsure at all n locations
catataattntagaccacgaggatacaaaattgcataaaaataanaattcatagtcaaagaatgnaagttttcagtgttcggtgtcagagccttgtgaggtattggttactggcgggccaagcttaattaggtattggctaccggagagccgagccttgcgaggtattggttactggcgggccaagcttaattaggtattggctaccggagagccgagccttgtgaggtattggttactggcgggccaagcttaattaggtattggctaccggagagccgagccttgcgaggtattggttactggcgggccaagcttaattaggtattggctaccggagagccgagccttgtgaggtattggttactggcgggccaagcttaattaggtattggctaccggagagccgagccttgtgaggtattggtgaccggagggccgagcttaattaggtactgactaccggagagccgagtattggctaccgaaaattcatcttttattattttccttgtttttatacatttctaaaatccttgcggctgtaataattagttacttacttaaaaaaggtttatcgctacccaaaaagttgcattctttttcagatattttagaattaattaccatatttcctagccatcaataccataactaagttaatctgtcaacaattatcatactcatttagtgttcatcatttcctttgtctcagcttcaagtattctgcttcattgaattacagcaaaaatgtggcacataatttaagttccatcataacccttctttcccccagaaatattcagtttgtaaaaattaaagaataattggttataattataattaatgcagatgtcataccctattagcaatttggagtattttagcatggggattcgaccccatgctaaaatacaaatgtaaaacatctcgatcaaaactttgttaataattttcccgcattttaatgattaattggctcttaattaaattacccaaaaattgatttaacaactgttactattaattaaaattatttgattttttcttacttcccacttataatatgttcaaagcttcactacaccttctcatctaaaaacaatggcatatagatagtgattatttgattaatttgttcttaattaaattacccaaaaactgatttaacaactgtcactaataattaaaattctttgattttttcatacttcccacttataatatgttca

SEQ ID NO: 34715 - DNA, 1847 bp, Heterodera glycines
caacataatgtacccatagaaaaattgggtcagtgcttcagcaaaactttttttttacctttgcataacgcggcgtttcaatggcccattggcgaagcagtcgtttctcaattttggcacccgagcgccatgaacaaccgttgtcatcaatctttaatgaaaaaaaaattgtaatttgcggtggtagagaatgaagcaaccagaaattgaaaacgaaaaaatgaatgggaaaaaatggggattttttaaaattatacaattttaaagacttcgtcaaaattctcagaattttctttctccggcggtgcctataaaaactaagctatttttaaatttttttgaaaagcgcaataaaaaacggtcgctcgcccccccccctcgccgaagcaataagggtcttctgggtacggcactttaggtcacctgttcatcggccaacacagtgccgtcaactgggtcccagttcacttcggaaagcgtcttcctgacgaatccatgcctgaagagttggataaaaatccactgggtccagcgaaagtaatctggtcggcatgtgaaaatctcctggaattgaaaggggggagaaatcgcagtttcggtacaattggacgagtgacaaaggagggcactcacgcgattccaatcgaaattgacgccagtttttgacaactgtatgcgcatctcctcaatgtttctagaaaaatttgtttaaattccgttacaactatgcatatcattgcaagagtgtcgacatttttcccccgccctccgaattttttttggaaaattgtatgaaattaaaaaatatattagaggaggaattccttggaaaattggggtggaacgagctgctccaccagaattgtattgtttccttagactcccaaaatttcatttttggtgtaaacgttagtgccaatttggcataaaacattagtgccgccaactcacttatacgtccattcggcggggtcaattccacgctcacgtgccgcattttcggccggcagtccgaacgcgtcccatccaatgggatggatcacttggtgtcctttcaacctgtggtaacgactgatcacgtcggacagtgtgtacacgcgcagatggcccaagtgcagccgcccggacggatatggaaacatgggcaaaatgtatttggaccgcaaattgcgacacaatttcatggtaaaagacaaaaaaaaagctaaaaattgaagcgtgattagactgaaaaccgaaattttttgtttaataattttcacaaaatagcatggaagcttttttcgccgattttttgaaaaataattcatcataaaatttaaaaacgttagaaaaaaactttctttaaatttctcggcgcggctttttactcggcaccataccaatttgtttttaggctcgtgccgactttggtggtccaaaaattggtagctttgcgatatggaaaaaagcggaagtatccaagatattaaaatgaatctgtgtgcatatttgtttaccgtttgactctcctttttctctcacctgtatttattccacaaaaatacaaaaaaaatggctttgcttttgattttgtcacaaaaaaagggggaggaaaaagagtgggaaagaaagtgtcgccgtcgtcgtctgtccgttttcttttccatccaagcaaacagatcacatatccacgaattaattcacaaaaacaaaaaaaagatgttcctccgcccctctagcgccagccaagccaagtcctcaccaactcacacagtaatcaggcatgcgcatacaatcgggtccactgaatttgcatggctcaattatagaatttttaggcttcaaatcatacataaaccactcaa

SEQ ID NO: 34716 - DNA, 1025 bp, Heterodera glycines
  unsure (1)..(1025): unsure at all n locations
tttggggtggaaatcatcgataattgaagtattctgttattgtagtcccgtcagaggtcgaaaatttttacgaattgaaaaaaggcctcagaaaatttttctgacgacttttatactcagcaattttttgcgattcttgattttcaaaaattttaataaaactttcagaaaataattttatagttttttaagtaacgtaaacatatgccacgtgcttttcgaaacatttaatgtttaaatcactacttaaatctaaactttgtccctaaaggaaccaaacctaggtaatgcctaagaattttttaaaaattttaaaaatgtacatgagttgctcaagacgattttggcacttggcgaactgcaaacatgacaaattatgattttccatttcgcattcacggcacatttcgtatttacatgaagggcatttcaaaagcttttctttttgcttctcactcatatcaacggcaaagtcacattttgggcatcttttttgtttaaaattaatttatattaagaaaatagcaaaatttcttaggaaaaaacaggactcaaatatcgagttgcaggtcagaaaaaaaaaattaaaatttctccaaaaaaaaacaatgtgtcaaaacatttcctgctggttaaaaatttttaaaagcttattttcacctattttggcgttttgcacaaaatttgttaacaaaaatgcaataaaataaaaaaatacacccgtaagaatcgacccgaaaattttcaaaaatacacccctaagaaatgaaaaatttctcaaaaatttatctccaaaatttatttatttatttcttgacaagaatttgtgattttaaaaattttttagctcaatactgatttgggctaatttttttacttttttgaataaattttgtctttttacacccctanattcggaactttttggcacctattttccatttttagcacccattttggggcttttttagagncctaagcctacctattttggcagtttttagcacctataaatatcagcccta

SEQ ID NO: 34717 - DNA, 1149 bp, Heterodera glycines
ttccgttccttcccttctctccttctcttccctttctttttctttcatcctttcgtcaatgtttcttccaccgttggcttctccgttcttctcttccattgttttgcttccattcattccattcccatactttttccttccttccgtccctcttccatcagtcgtctcctcttcccctttggttcctcttccgttcattcttccattcatttctcttccatttgtccccctcatctcctcttccgcccttttctctcgtccattcatttctcttccatttgtccccctcatctcctcttccgcccttttctctcgtccattcgtttcccttccattttctctccccctcatctcctcttccgccattactcctcttccattcgtttctcttccgtttgtccccctcttgccctcctccactcttctctcttcttccattgtccctctgtccgtctcttccacctgtcttcctcccctcctcttcatcccttcctccttttcctcctcctcttcgctctctctccgttctcccctttttcccagaagacctctctcaaggacgagcaatttgtccgctaaaaatgagcacttttattccgttgatatactcaaaaagaattaccaaattggaatttatctgtgcgcatcaaataccaaatgaggaaagcaaacgccgtgcacaaaagcaaagtgccgaagattgcgccaaaaattgccaacgccaaattggagggatcgatgcacggcccaacggggggaattgccgccgcatcatcggcaggaacggaataggcactttggaccattagcggacttaaaaaatggcaaaagtaaattaaaatcggacggattaaaagaaactcaaacgaataaattggggaggataaaaatttgcaaagatacaccaatgaatgagtgaattgtcgagaatggaaatgtgggaatgttttgacacagtccgaagagaccgaaagggcgcagggggaggggacgaaactgaataaatgggggggggaaggaggggtggtcaaggccgctaaacgggggggggggaccgggagagattggatcaaacggagaggggcgggggttgttgttgtacggaaaatttggtttaaaactggcggatcagcacaatgcatccaatgt

SEQ ID NO: 34718 - DNA, 946 bp, Heterodera glycines
ttctgttttggtggttcctcctccttctttttgctctttttcgctgtcctccttcaaaatgttgttgctccttctgtactgctccagcacagtcaaatgatgcgacttcagatgactcttcaacgtactggtcggcttcaagttcttttgcgccggtcggcggtatggacagtggcggcaactgatcgcattggcatcaaaccgatagaagtaatggtagtcgattccctgaacaattagggtttggtctacatctaatactttgtatatatttttgtttaccctttccttcggcctcaacattttctgctcggtgccataaaatgatggcaattggccactttcaatcgattcgctccctttttccaaatttgtctccaattgtttcttcgaatggtttttgatgctttttcttgacagtttttgtattatctttgtgctacttttgtttgttttttggctcattaattcattcattttttgctctcttaaaattattattttttaataataattattttccccatttttacctcgcttctttttctttcaaaatggcattttttagttgtgcccaagtgtccaattgttgatttttcagcttttcgtgcatcagttgaaggcaattatccttataaagattcactagtggaaagaataacttctgcattatctaaaaaagaattaaatttcacaataagtgattgtaataggtgagaaaagtactcaaagtcaaaaattatctaaatttgctaatttaaaaaaatgaacaaagatttttctggtaaaattctgttagtttagaaagtggcattgaaattgaaattagatgcaaaaatttataaattatattattaaaaaaatgttaattataataaatcattttttcaaaataatgattttattggaaaaattttttgtttttctaaaacaaatttttagtgcc

SEQ ID NO: 34719 - DNA, 919 bp, Heterodera glycines
gagggggaattggctaatcccgaattcttccaattccccctctccccctatttgtcccggacgaatcggttcacccttccccagctaatcacacatattacacattatatatttgtattgatcaaccttccgaataaggatattattccatcccgctcgtgtaattatggggaggggctaagcaacgaatgccaaagggcatccgacatattcaattacatagagtcttagcggaacccaaaaaagttcaaatcaaataaataattaaagataattattttatttaaataattattgcaagaaatatttatggagcaataattaaatggtaattttgctcaattcaatcaaatttatcattcattattcattcttttccagacaattttactgggtaatagagaaattttgggccactgattgaataatgcaaaaaatgatagatatatggcttttaattccgattgcaaaatttcaaaaagttacgacaagtttcaaaaaaattattatgaccaaaagaacccaaaaaatcttgttattcgaacatttttggctgccataaaatttttgaaagtaataataaatttttgaaattttgcagggtaataaagaatacttagggttggttatcaaatgaaatcaaggaataaaaatttggttgctaagcaaatttttaatttttttaaataaagttccattttttaaataagcgcctatcccagtgcctccgttaaataggttctaacctatcacactgcacgttaacttttggcctttttaattttcttgaaaccttttaaaatccgttggctttaattcaactttttaatttaaaatatattataaccagccagcaggagtaaattaaattaaaaatttcccataaaaaaattgacaaattttctgaaattctttgtta

SEQ ID NO: 34720 - DNA, 1695 bp, Heterodera glycines
tctgtatgcgctggttgcccaaatgattggcggtcagcagaccggcacccaaactcagaatttcggtgggcgtgttgaacatgatggacacaatgcgttgcatttgatcactgatcaactcataagacacgggaatgaatatggccacaaagccgaagaaaaagctgaaaaacatcttgtcacggttggagtgccagtggcatggaagggataggcatagttggagttttggaattttttgaagagcctcggatttttattttcgaattggcattttgactataattccgaccgatggagtgattgagttggacgaatgattactttaacactattaaccgtatgtattttaacttttaaatgttgattgcttccacctaaaaccttgtcagtcctttcgtattgttaattggtctttaattatcagaagattagtctcagggtgcggaaataccgaaaaaaggaatttaaattcccccccccccccactgattgattgatcaaatgttatcccatttaacctgatcactgcaccaagacccatcgagttgtaagccatcgatgtgatcgagtcaatttgcatgccgtccgccgcacgaagacgacagtatcctctgaccgttttcgcatttaccgtaccagtgatcaattggtctttggtcggtgcgggaaagaagccaatgccgatcagtttgtagaaggcagcactgcgcagcttgtgccatttctccacttggagaggcaccatcgcagccgaagttgaggcggcaatctgacagatacggatttaaaaaaaatatttaaataaatttaaataaattttaaaacaaaatcctttaagtgtcatggttttttaaatttagtgaaaattattattttaaatttttggttaatatttttgatgataaattgagccgtcaaaattgaatttagttcaaaaaatatttcttgaaaactctatttatttattttttttttcgggtggaggaatttttcgtcaaactgcacctgatttgtaaaagcgttgagtgcaaatacgccaatgtatccaccaatgtttccggacctaaacaattattaatgtctttttaagttttccgctgaagccccctccccccataaaaggtaggaaacagattattggcaaaaactccgacctgattaaaccaactaaaaaccgttataagataagttacagtagtcgcaattttgtcccttacttaatgaattgggcgccgggcaacagtgccatgacaatgttgttggggatggcgccaagcgcggcaatgccaccagaaatcaccgattccttcaggtcctccttgaactgcttgaatgtgcgcggcaaaagcgatttgccctccaacgcgccaagcgtccgtttgatgacgaaggaatcgaacgtttcggcaaacagcggggttaatgagtcgaggagaaccatcacaataattgtcaccggatgaaattggcctaattggcaaaggaagtaatgattagatgggaaggggggggggggatttgcttaaaaacgctctcagattctcaaaacatttttaaaaacggcgccatagacatcgctttatgcacatagcccagttggtttatccttttttgccattcaataacattcaaaaatgtatttatttattgggaggtgttttcaatcaacctaatataattttctttccttgt

SEQ ID NO: 34721 - DNA, 926 bp, Heterodera glycines
  unsure (1)..(926): unsure at all n locations
tattcccagttttttttntatcgggacaagtccatccgcttatgaggcggattcctaccggggtgctttcccccatttttcttcattttcattgatttccaattcaaaatcgttacgctgatcccagtaaaataagtaaaatagttggcatagacaaaaaaaaagcaaaatagatgaaaaaaagtcgctctaacaataggtcgaaaattgttggaagctgttttttgcatttatcctagaaaaaatagtttaaaaactaaaaatccgttccctgattattttttaattttatttttctaaattaaatgcattcaaattttttggatttaattttacagcagcagcagcagcagtacagcacgttcagtccaccggaaccgcaccaccaccagcaacagcatcagttgcagcagcaggcgaccgccccgtcctttcagcacattgacgcgtcgccgacaccgttgcggcaaccgcagcagcaaccgttcaatccgtttttgcgggaccatcacctgcagcagtcgatgcgcggcggcttgacgcctgtcgggcagcgcatgccgccaccgtatttggcacattaggccgggggcaatgcgtcatcatcatactgtatttggatgccaaatttgaatgatggaggcaggagactgtattctctggatggacagtacttatccaaatttttgtgaagactgtacttgggcggttttgtctgttttttaattaggaaaacccgaaatttgtacggcattcatacacgcatcgttcaatacagtttcaacaattttctggcgttttcatttctcatcactttaatttctcgaacaaaatccatcattttcatttccaatattattagtcttccgaaatggaattaattaaaataaatggtttttgtttttaacattttctcaactttacta

SEQ ID NO: 34722 - DNA, 767 bp, Heterodera glycines
  unsure (1)..(767): unsure at all n locations
atatctcaattngatcgtccaaagtaacaaggattttttgtgttttatcagttggtgccgtgcggtttcttgtttaattgcggtgccgcgcagggatatggcggatttgttatcgatgttcgaccaatgcatttaaattatcaataaaacagaattttattttataaacaataaattggtatgattagttttatattttttgttgaatttattaaaaaattttttaatggcgggaannanaaaanannaannnannannnnnnnnnnnannnnaannnnctnntcggagagnnnnnannnnnnnnnnnnnttcgactcctcgactcaaaattgtttttaaaggtctgaaaaatgaaatttaacattaaatgcanattannctaaggaataaaattaataaaaaaaaatcaaaatatgtaacaaaactngggtttttgcatntttagatattannnnnnnnaacttcatctgcgctaatgaccggcctttgctgcttctactaattattgtgaaagcgcgccgaaaaatttatatggaacggtaaatctgaatttcatataatattcatcatttagtccaaaaatgattaattgtttgaaataattgaagaaaatttgatttcaaaattttcattaatttaattagctttaacttttgggttttataaaataaaaaaataattttatattattttcactttaaaaaaaattaaatttcaattttttaaaaattttaaaaatttttttgaattttaaaaatttaatttt

SEQ ID NO: 34723 - DNA, 470 bp, Heterodera glycines
tttttgaaaaattcttattttcaagaaaattcttagaatttaaggcttttattgttagagagatataaggtcatcatagattaataaaaaagggggcggaggagggcatcagtagagaccaattaggcgcgcaacaaaaaggcccagccatgtaaattgacggcaaaaaaaaaaatttttttttgaatttcataatcaaccgaccgcaattgttgaaccaaacgcgggcgtggagtcgcgaaaaatgggctccggactttggagcgcaagcataaaaatgagcacagtgccaactgaaaaaggaaggcaatgtaaaaaaaaggaatgacacattttatggcaacaaaaaatatttttatttagtttttcagcaatttttggaaaagtttttgaaaaatcttagcaattcaccataagaattttcaaaaactttcaacttttcttctttcatgaatttgaaggggtggggt

SEQ ID NO: 34724 - DNA, 1008 bp, Heterodera glycines
atgggagagagaaacatggcattcacaaaaaaataataatatttaactattttataaaagttttgctgccggaagaattccaaaaaagtctattgaatagtctttttcataacttattgaatttttggctaaaattagtaatttttgagattttaaatgttttgcatttggaaacataccgctgcgataaaccatgttttgtcgccaagttcagaaacaataataacagaaagggaggcaataaaagcatggtaaaagccaaactttgaaggtgcgtagaacatactgaaaatgtgaggaaaataaattaaaagggcggaaaaaataggaaaagcaattaaattcacgaactaatcgggaaatcgaggtcaacaattaggtatttattacctattcacgtttaaacggccaaaacaactctttataaaagaagaaacgaaaacaaaaagcatttggaattttggaggggaaaaggaaaagaaagcaatgcacaatttggaaacgaaaagccaaagtgcgagtgccaaattgcacaaattacgaattacctgttttttgtcggcgtacgccgcacaaaacgcgacggatcgaatttcgttgttgtgtctcgtcatgttcactttttgtttgcctttcctccacgcgccgatcgcacgtgcttttttcgctccctgtttctgttctccctttgcctttgctctctctttttgttccaatatttcgttcaattcgttcgttccgttgttttttcagcccatttctcattacacctttttttattcgtaaattactactaccaaagaggtattttaatttcaaaatgattgcctcaacagtccattcatccgtataatttgatttaatagaaaatgggccaagctctaagtgaaccgatcacaaccaaaaacagcgcctcttgttccaatgatcgctattttgtcggcgggtaatttttggtattgatccaattttaaatgcggatcttccctttgatttaggttcttcttc

SEQ ID NO: 34725 - DNA, 996 bp, Heterodera glycines
actttagaagaagaaaaaagtatgggaaggcacaaccaccaggccaccgacgctcacattggctttacattctttgaaaatgatattgaaaaggcaaaaaggaaaagcttcatatctcggccagaagcttcatttagcaaaaataaaaaaaaaatttataatacaaagggggggggtaatctacctaccctgaaagtttcattcggaagtcccatggtcacttgggtacctctcctttgtcagattcgtgattagcgacctttaaaaccccggataaaaaattatcatggttttttatcttaaaaaatttttgcaaaacaaaagggtccccccttttgtttcaaaatctgtcactttgcatatagtgccaaatactttattttttttttattaaattttcatcaatttccttcactaattttcactcaaacccctattcttaccagtgcttattttttccagttgaccgcaagcccgtagccagaaaaaatttcggagcggggaatccgaagacttttttttttgctcttcgggtcattttccgggggggttgttgggccattgagttttgacgaactttttgaccttctgaattgtctgatcctgatcagcggctctgatcagatcctcattgacaatcgggagccctttttcgatggcgttcagcacaaaacttccagcagtgctaatacttgccacaattcgttcatcgtccggaagtggcgtttttgcgatcagtcggtacaaaacatcggcatgtccaaattctgacgtgcttttgtattcgatgttgaagtcgtaccctaaaagtatgatggcccagcgctgcaatcgatttgtggtgcaagcttttatccccctttttgttgccaaaaatggccaacaaaggtttgggatccggtttgcagtgaaaaatgccgtccaaccaaaaatttgtggaacttttttactgcataaatcagaagctaaccctccttttcattttgggaataattc

SEQ ID NO: 34726 - DNA, 986 bp, Heterodera glycines
  unsure (1)..(986): unsure at all n locations
aaaaaagagaatatccatttttctggggataacctctaaatataaaaatcctctagtgaaataaaatggcgattgtgcacagccctccgtctcatacgcaagcgcttttgtgaggtataaaatttctcaaaaaaagagatagccatttttctgggatagagtataaatttaaaaattccctcaaaaataaaaggtctattgcgcaccgccctccctatcatgctcgagagcatttgtatgtgtataaaatttatcaaaaaaagagatagccatttttctgggataacctctaaatataaaaatcctctgtgaaataaaatggcgattgtgcacagccctccgtctcatacgcaagcgcttttgtgaggtataaaatttctcaaaaaaagagatagacatttttctgggatagagtataaatttaaaaattccctcaaaaataaaaggtctattgcgcaccgccctccctatcatgctcgagagcatttgtatgtgtataaaatttatcaaaaaaagagatatccatttttctgggataacctctaaatataaaaatcctctgtgaaataaaatggcgattgtgcacagccctccgtctcatacgcaagcgcttttgtgaggtataaaatttctcaaaaaaagagatagccatttttctgggatagagtataaatttaaaaattccctcaaaaataaaaggtctattgcgcaccgccctccctatcatgctcgagagcatttgtatgtgtataaaatttatcaaaaaaagagatagccatttttctgggataacctctaaatataaaaatcctctgtgaaataaaatggcgattgtgcacagccctccgtctcatacgcaagcgcttttgtgagggaaaaaatttctcaaaaaagagatagacatttttctgngatagagtataaatttaaaaattcccctcaaaatanaaggtctattgcgcaccgccctcctatcatgctcgaga

SEQ ID NO: 34727 - DNA, 674 bp, Heterodera glycines
tttatttaaaaaattaaattataatgtaaataaacacaccccttactgaaatttgagtctataaaattttaacaatgtttccatttcctgactaaattaacgaactgtttaaactataataaaacatgaatataaaaaactcgttaataaaaagtaataaagcatgaaaatgaaaaaaaattttatttttaaattgaaaattgaaaaatcaaaaatataattagaataatataaaaaatattaaaaataaaaatatagctttaaaaagaacataaaagtcaaagaattattttagaaattttttaagtctaccaaatataataataaaaatttggatattatcttaaaaattaaaaacgaacgatattaacgatatccgaaaattgaattattcctaaactagagtagagcgggaccgggaattttgggcaaaaccgggaccgggacttgccgggacctgagaagccgggaccgggaccgggacctcgatttttgttcgggaccgggaccgggaaccgggaccaatcgggaatttctaaaaattcaaaaaattaaaaaaaaaatcaaattttaatttatttcaagtgaaaatattaaataattaaatttttatttaggtttttatttaataaaacccaaaagttaaagctaataaattaatgaaaattttcaaa

SEQ ID NO: 34728 - DNA, 985 bp, Heterodera glycines
cttttctgttagtcatttctcattggtgttgacgatccaatattcagtgtacaaatttgttaaacctctcaacattttaaatcaaaatcctaataaaaatttcgttgaatttcttcgcctcttatttgtgcaaaattttcgaaaaagtaatttactatttaaaattaaaaaattcagaagcaaattcaataatttttttatttttaaatgcatttttaccagatgaattatgattaaatttttgcgtttcgaattcattttggaattaagaaaaataaaaattgataatcatttgatcatttttagcgcactttaagcaccgccgttaggcagcgcagttccaaaatttattccatgcaacagatattatgggcaggacacgccaagtacctcaaacttgggtaattaaaccgaagaaagaagtgcagtggggaagaatgacgcccaaaatgaaggaaatattcgatgctgtgcgaactctttgtgacccctctctgactctgccatgcagcagttgaccatttttacactatttttctctcactcatcgtctgctcgtctctcctttattataagctattttcctaagccaacaacgcccttttctccctcttttctgttagtcatttctcattggtgttgacgatccaacattcagtgtacaaatttgttaaacctctcaacattttaaatcaaaatcctaataaaaatttcgttgaatttcttcgcctcttatttatgcaaaattttcgaaaaagtaattttctatttaaaattaaaaaattcagaagcaaattcaagaattttttttatttttaaatgcattttttaccacatgaattatgattaaatttttgcgtttcgaattcattttggaattaagaaaaataaaaattgataatcatttgatcatttttagcgcactttaagcaccgccgtaggggcagcgcagttccaaaatttattccatgcacagatattatgg

SEQ ID NO: 34729 - DNA, 267 bp, Heterodera glycines
agtcttctaaatgcccctccctccaaatgtcccctccaatctcccaacatccccaattcatccgacaaccatcgctctctttctcccccccccccttctctcttaccgtaattccgccaacaaaagggaaggagaaggcccaatgactctcctctcatctcatcatcaaaactgaagagcaatgaagatggatggactggggtggggatgggatggcggatggatgatgatgatgctggaggaagggaggggagagggggtggccag

SEQ ID NO: 34730 - DNA, 906 bp, Heterodera glycines
  unsure (1)..(906): unsure at all n locations
cactccgcctgcaaatgccccattcgccactgaacagcatgacagcaaaccccagtctggaggctagcaggccaacgtacagcaacaaacgggtgaatgcagaccagatacgccagctctgtccgtttccacctcatcggtttcacgtcctctttaactctctcttcaaagtgctttgcaactttccctcacggtacttgttcgctatcggactcgtggccgtatttagtcttagatgaagtttaccacctgatttgggctgcgatcccaaacaacccgactccaagacacgtaaagatgggtaggcaccgccagttggacaggtcttgcaccttctctggagccccggtcaagggaaacttgaacaagcgggccaacccaagctcacggtctatacgctacacctcgcaaccccagaggagctgcgattcagcgctggactcttcccagttcactcgccgttactacgggaatcctcgttagtttcttttcctccgcttactgatatgcttaagttcagcgggtgttcacgtctgagttcaggtcgaaaaatcaaagcaggaatgccagtaatccaggcactccgccacagcatgcaaagcattggtgcgcttgagttacggtccgtaaaacgcgaattagaaccacaagttcgcgccagcacaccaaaaccccacagccgagctgagcaagtaacgtaagaacacgtacaagtacatgatcccacgaagcaacgcacaagcagtgcattttatggtaacgaccctgaaccaggcgtgccaatggatgtaactccaatggcgcaatgtgcattcgaatgttttgtgttcaaggtttctgcagttcgcactaattatcgcagntggctgcgttcttcatcgatccacgagccgagtgatccaccga

SEQ ID NO: 34731 - DNA, 864 bp, Heterodera glycines
taaatgtttcaataattccattttcaaggaggagactaaacaggcccaattcctcgcgttggccgtcgtttactttctgtccgttttgatggtcagccgttaccgggacattcttgagccaccgctacccccgccggccacatcgtcccacaaaacgtcggccagttcgaggacggaaaacagtccaataaatgaggagggatcaccatcgatgggccggaatgagggacaacagagcaaaaacggttagaaatcagagggaaatggggaaagtcaattatacggaataaataccggatatgcaatttttcatctatttttcgatttcgcattttaaattatttccaatttttaatttggcatttaatggaagaaaattgaaattctttgattttattgttagacgaaccgacgtcgtcattaattggtgcttcttcaaatgcagctaatggtaacgaaaatgatggtggacaaaatcatcgagacgacggcaaacgcaacggtgaaaacggcaaagaaacagcggacggcacagagacaaacgatggcacagactcagaaaaagcgatgcgcggtgggactgaggaagggacggaggatggcacgattgaccatgagagtgaagcaaaagacaaccgggatgccaaaagggcgacggcaaacggagacggcacggagaagggaatagcggccatccgatgcgcagccaatgcgacggaggaagtgatcattgctaaacaagtacggaccagcgcatttggcgaagagagcaaatgtccaattcaccaaattttatttatatatttttaaactcatgattgaacgaaaatgaatcatccaaattttgttcattttcaatgcacc

SEQ ID NO: 34732 - DNA, 1092 bp, Heterodera glycines
aagtgacccaaattgggcgagggctatcgccgcgcaaacatttttctgcccgacgtgaactgtgaacggagctgcgacagcacgtatcgcgacaacatggccaaactgcgcaacttgtgctggtcggtttcagcaatgaccacaaattggtgccgaaggaaacggcggtgggttcagtggcaaatgagcaaagcaaaagacaaattggcacaatttagccaaaattggcggatttgtggattgatcaattaaataccagaccaggcattatacagatgcccaaaaaacccagaagataggtccaaatacagatcagtagtgttttttacaatctgtgcctcgttaattggtcattaattaatctttcagtggttcggtttctacaccgacaacgacacacaaacgatagtgccaatggagcagactgaactttacaagcaggtcattcactcatcactcactcaccgatcaatgaatcaatcggaatatgaaacacaattaaaccgatcaaaaactgatcagaaaagcattgatttactttttaggatcgcattggactgaaaacgctgaacgagtcgaaccgtctccattttctgactttcaacggcgaacatctccaaatacccaccgatgtatgcgtatgagggggtttttagaaggaaaacaaaatacgaaaatgaaacacgaaaccaattaaaaatacaaaaagaaagaaaatacataaaataaaaaacaaacccaaacaaaccacaaaaagaaaatatcaaataaaaacacaaatacgaaatcaaataaaatacaaaaagaaaataataaaaaacaaaaccaaataaaaatacaaaacaaataaaaaacgaaatacaaaccaaataaaaatacaaaaagaaagaaaatgcaaataaaataaaaagcaaacccaaacaaaccacaaaaagaaaatatcaaataaaaacacaaatacgaaatcaaataaaaatacagaaccaaataaaaaacgaaatacaaaccaaataaaaatacgaaaagaaatgaaaatacaaataaaataaaaatacgaaaagaaatgaaaatacaaataaaataaaaaataca

SEQ ID NO: 34733 - DNA, 752 bp, Heterodera glycines
ccccccctgggaccgtccctggaggggggggggggaggcaaaaacaacagtcatacaaaaacaaactaataaatggaaagtgacgtgaagagaaatattttccttggtaaggactgctggggaagagattacacaatcatttgggacaatctttcaaaaggaggcgaacaccatcaaaatgaatgtgacagtgagcattattcttccctttgaattaaggcgactacgccgttcagcctcacacggacccgctgagactggcgaacccccacgcctaaggaagggagcgaagaaggaattcgatttaattaggtcgcttgtaaatgtcttatttaaattcgttttgattctgttttccatgcgaatcaaaagttgtaaattgaaaataattctctattcgtgtcaaaatgacaataaatatttgttgtgcttatttaccgacgtcacacaaattcactgtcaggaaaaatggtgatgctaacagtgctaaaaaaggcaaggagaaaggagcaagaaatgcgagtgctcattctcggcctggacaactcgggcaaaacgacttttttgaagagaatcagtggagaagaaattggtgaaatcgcaccaacctttggttagtgcaatttaatgggggtcaaggcagttcgtacaatgttattgtattaaaacccgggattgtcaattgattggactcataaaatactttggactcataaaagtcgattggagtcacaaagtgcattagagccaaa

SEQ ID NO: 34734 - DNA, 675 bp, Heterodera glycines
aattggtaatggataagactttgaagtttaatgatttcatcccgctgataaatgtttacacgggagttcatcaagcacaattcgatcagaaattttgcgaactaattctttccatgttctgtcaaccattaaaaattaaaataatttttttttgaactaaccaaaaaaaatacaaatcgcatggctgaacaaaagccagtacaaccaggtgggattgtctggatgcaaatattgtccctgccaccctctttagttgatgaagagcaaacatttttgtgttttacatatttttaatttgcattcactgtcgtaatggagtctgtatcgtttcggcgcgaccgtttcggcgcgaccgtttcggcgcaaccgtttcggcgcagccgtttcggcgcagtgtcgtttcggcgcaagggtcgtttcggcgcgaaaccaaaaaaagggtcggaaaaagtcttgactcaaacttgaaaaactatttcacagcttacccaaaattctgaaaaaattcctatttatataacttttgataatgatcaaaaaagtctcttacatcattaaaaacccgtttttcgtgcgtattaggccatagcaagttagcaaaaaaaaaaattataggcatatgtctcaaaatccgggctgaaattttttcggaaaatttcgggatttcaagccatt

SEQ ID NO: 34735 - DNA, 822 bp, Heterodera glycines
aaaaatgtaggcttaacttttttagtgaaaattcgctctctcatattttttgctaattgagcagaagcgtaccaaactttgcagggatactccccggtaaaggactaacttacactgaaatgagcgccgagctagctggctcaaaaaaattttcgaaaatctgagtctttcgtttttatttattttttgcaaaattaattcttaaatattttttcagaaagggttctgaaacgcaccaaattttatttacatgttagtttaggcactctgatgctttttctatcaaaaagggagatgaataaaatttttaaaaatttttaattcctttttaaacaggccaaaaagtttaggcttaacttttttttcagaaactgatcagaagcgcaccaaactttgcagggatactgaaaggaagagaaataacctattttaaatattatctagtcagttcatttaaataatttttatccaaaaaatttttttttgggttttcggggcagtccccctgaaccgatgcgcccagatttatggggagaccgaatccttccggaatagcttcactatagcctgtactttaattctgcgttggatttttgctccccataattgtttgagtaccccaaacggacacttgaaaaaatcgatttatttttgttttcggggcagtccccccgaaccgatgcgcccagatttatggggagaccgaatccttcgggaatagcttccctatagcctgtactttaattctgcgttggatttttgctccccataaattgtttgagtaccccaaaacggacacttgaaaaaaatcgatttattttt

SEQ ID NO: 34736 - DNA, 885 bp, Heterodera glycines
ttttaatcaagcaacgagattttcaacaagagaaaaaatatataaattttttggacatttatataaaaatgtataaaagagaaaaaactaaaaaaattaaaaatcaaaatttatttaaaaaataagcacattgaagctatagttttcttcactttatatgaaaaaattataacaactttaatttgttttatattcattaaataaagcaaaatttattaaaaattcaacattcaattacttgcgctatgtaaaaacacaaaaaaataaaaaatgaaaattaactgaaaaactaaacaggaaaatttaataattccttgaaaaacctttttacgaccgaattgtacgcctttttccaaactcttaaacaaatttcacaatgcaaaatcaaaaaatttaagggtaaataggcgcaatttttgtataatcaatatcaaaaagtatcaatcgagaatgataggaatttcgattgaatgcctttgattgccgagagattacgaaattaaaaattttattaaatgaatatagagaaaattcaataaaaatttaaaaatttattattgtagaatatttaaataaaaatcgagcaaaaactaggtattatgaataaaaatacactcaatccaatcaccttgatgtttatacaataaaagaaaattaaagcatttcaaatatttttaaataatgaaataacttttaaaaagtgatttgaatttgatacgtgctgattcgatccacaaaaactcagtgattgataaaaataatattatctacttatgcgattcactaaattcatgtttaaaatcaataacactcatattatatattttagcgctgcctcgtaaatgtaaaattaatattcatatgatgaatattttatatattttt

SEQ ID NO: 34737 - DNA, 955 bp, Heterodera glycines
ctaatcactgttgtacctcttctaatcactgttgtagcacttttaatcaccattgtacctctcctaatcacagttgtacctcttttaatcacagttgtacctcttctgatcactgttgtacctcttctaatcactgttgtacctcttctaatcactgtttacctcttttagtcactgttttacctcttctaatcactgttgtaactcttctgatcactgttgtacctcttctaacacatcttccaacaatttttgtacctcgtctgagctcaacaacatttaaattcgggcgcgaagcgcccgtttggcctctacaaaattaaacaacgtgcgcgaagcgcccgtccaagcccaacaaaatttgaaaaacgggcgcgaagagcccgactgaggccgcgaagcggcctaacaagctaaaaaacgggcgcgaagcgcccgtcttgagcctcgatgtggactaaaaacccctaataattttttaaaaattcaaaaaaatcactccaaaccctgaccaaaaagtttccgctggtaggattttaagttgaagtgttggctaaaagttaaaaaaaattccaggccgctatctctaaccccctgggctgggtgcttctagaacttttcagtaccaactttgtccagttcagtccccgttgaataactcattaggctttgacctgagcgcagggtggacagcagacttattgtagagctttaaaagcccaatttttccagattttaaaatttcgaaaattttcaaaatttttcgagctaggcctaaaaaacggttttcgggtttttgattttagtattttttaacgaattttcccagaaaaacgaagaccacttccaaaacatagtttttcgagctctatcgattggtgatatttttgaaaaaattcgattttttcccgaaataaaaaaatttttggcctgagcggaacatttgagtcccggg

SEQ ID NO: 34738 - DNA, 1112 bp, Heterodera glycines
aattggggacaaatcggaattgcattcaaaaatggattaaacaatttgatctacaaaaattcaaattaaaattggagtaagccatggaacaattaaaaaatggaagaaacaatttggcattcgatatatgagaataacggagaaagaaaaaatgaaaatttattggcaaataaaaaaagaaaaaccaaaagtgagtgataatgaaattgctaaaattgtgaacacttcaaatgcgaatatttgtaattggaagaaacaatttggagaagaaatgtttgagaattgaaaacggatgattttttaagaaaattagtgacaaagaaattgctaaaacattgaaaattcgtcaaaatagcctccgaaaatggaagaaacagtttggaagagaagaaaaataagaaaaaatatttgaaaattgattagaggaagaaaagtttagaaattttttgaaaaatattagatttttcattaaatctgaatccaatttgtaaatcgcattaatttgctgattattattttagtgatcgtcgtcaaagttttataaaatcagttccttcatctatgggagacaacattgagcaatgagtcgatcaggttgcttgatcagtcagtccttaacaccatgggaaattttctttcgactgagaataactgaaaacgataaagtatttgcaataagaaagttggttgagggagaaaattttcaatttttttgaaaaatattaggcatttcttaaaatccgaacagaatttgttaatttaataattgttagctaatcaaaatataatgtgaaacctgaaaaagtgtgacaagtaaagtctaaaaatattgaaagtttatcgacagggattgtgactggacaattcgacagtggacaatccgacagaggtggacaatcggacagagatggacaattggacaatggacaatccgaaagagatggacaatcggacagagatggacaattggacaatggacaatccaacagagatggacaatcggacagaggcggaccaatcggacagagatggacaattggacaatggaccaatccgacagagatggacaatcggacagagatggacaattggacaatggacaattcggacag

SEQ ID NO: 34739 - DNA, 1228 bp, Heterodera glycines
atagggttgtaaattatatggactaaaaaacccgaaaaatggacataaaatattgactaaaaaagcacgaaatatggactaaaaagctcgaaaatggccaaatatggaccaaaatatggactaaaaactgccaaaatatgtggtttaaaccctcaaaaatttcaaaaaatgtgtatgtattcattttgcataaataaacttaaaaaacaataaacgaccaaaaaattgatttaaaacataaaaatgcaaatttatttattgtcgtccatcgtataaaaaaatttccaagtttgccaaaattttgaaaaaaaaaattcatttaaaaaaaagaaaataaaaatgccaaaatgacgacgaaaactcaaatttttcggattttttgggctgtaatttttaaaaatttccaaaaagtctatctttaggggtgtattttttcgcttttcttgcatttttcttgtgaaaatttgccaaaaatggccgaaatatggactaaaaagacaaaaatggcgaaatatggatttattcccgaaaacccccaaaatatggatttatatggactaaaaaccttcaccaaatcaaaaaattttaacgtagaaatgctatttttggtcccctttcttcatagcatatgagcagaaaaaatatgttaatccatataatttacaaccctatgtatgaatgaacgttaaaaatttagccttaagcaattttaatagtttttttgcatctttcaaaacagggattgcacataattacgatttccaaattaataaaattgtcggaattttttaaattcttttctgaattttttgccttcaaaaagattattttaaactataaatttgctatttttttttgtatatactttgtactttattcacagattttttatttcaatttcaatttttttattccatttgccgcaccttcgcaaatgccaaaatcgaagcgcgacagagttggtcagcaatttattattcttcaaccaatttcgtctttaattcattaatttttgtttcttctttcagtttctcaacataaaaatgaagaagaagagccgcgagggcaaacaaaacacttttaaagaggcggggaaaaattcttttttttcgttttttgataaatttcaacaaagaatttcaggtcagagaatgcgttgaacagtacaaacatttgttggtcttcttgatggagaattgcgctctacaaggctggcggaggttaaaaa

SEQ ID NO: 34740 - DNA, 926 bp, Heterodera glycines
aatagaagtttaatttttatttgtcccatgcattttctgggaaatcttttcgcgaaaagttgaaaaatttcaaaacggcagacaacagatgcatttcaaacaattcaacaatataatataaaatttaggcaaaaatttttgttccttcctctttggaaatggtcttaaattttgcttgtaaatattcagataacaagttttttttactgaaaattttttacacactacaggatgaaacgcaataaatcatgtttgtagacaaaagaaattggcgaaaaaaattgcctcaacaatcagtggtgaaactgaaagaaaaaaacttccccaaaaaatcggagcttttccgacggcatcagctgcatttccaacagttcaacagtataaataaatattaggcaaatgaaaaatttttttccttcctctttagaaactgtctaaaaatttttgttgttaatattcagaaaacgtgttttttttactgacaatttttttcaagagaaggatatgaacaatcacttataaggctcatgcttggagataaaggaatcggaaaaaaaaattatctcaacaatcagtcgtgaaacagttcaataattcggaagcagtgccatattgggaaaagatgcacaagtagagtaggctcgaaataaaggcaactgccgaagattaacaaaaattcaaatttattggccccgttctgctttgacaggccatatctcgccagggagtggcggtagaccctttgttgatacatttgaaaatgtagagcgcgtctagctcattcgaataacatcaaactggtttgtttttgtcacgaaacaacccgctgatggccacgtcgaagaaaagtcccaaatttgacatccataaacctcatttttcatcagccagcgtgttaaagcaacccgaactgataggaatttaat

SEQ ID NO: 34741 - DNA, 957 bp, Heterodera glycines
  unsure (1)..(957): unsure at all n locations
agacaagctttcgtggcctatttatcttntgggattgcattctggctcaatctcatttgccaatctttttaaaaaaattgatttaaaattcaaaaaacactaaaaaataaaattgaagaagaaatattctaaaaaattaagaaatttatttctgcttattattttaatttttttttttgcttgattcgagatcatatgcaacttatttaacacatttgtgtggtggaaatgccagtaatatttttaaaaactataatttaatttatttattttaaatcagggttcgtccccaattgcatcgctgacagattatcagatatcgtggacgaatatcgcaacccgaccaaatctgtcagggattgcccggacaatttaagaatttagggcatgaaattttcataaaaaactcgcgaaaattaagcaaaaaaaaaaaatttcaaatgcaaaaaaagtaaaaaattataattaaaaatgattaataattttaaaattaaatagtttaattaatattgcacacacttgcacaacgtttgtccgtccttcagtgccgtgtgaaaattgtcccaagcgccgtcagtactgaatttgccgcccaataattcctttaaccattccagcaaaagctcgccctcccgttcattgtatttgttggtttgctaatttgaatgaatgaaattgatttaaaatttttttaataatttaattatataaaaaagtttttattatttatttaaaaattttactttgctcatttcactaactctaagcccacttgccgatgaacgaaaagccattttaaaacgcagaattttttgttaagaaaatattaaaagcaaaaatgatttttacatttttctcattaattaatgagaatggtatgaaaaaataattaactatttttaaaaatgtaatanaatataaaattaattaagcattttatgcattgaaagattgatt

SEQ ID NO: 34742 - DNA, 856 bp, Heterodera glycines
aatatgattaaattttagcttgtgctcgcacatcgtgccattctttcggcgtcttccgatgtttttgaggcgatgtttcaaaaggaagcgacggaaaatgcaaatggcaaaattggtgcaaaaagtagggaaaaatatatttttgaaaaacaaacaatctttaaagaattcgtcaaaatgaaaaatgcaattttaattcactttaatttttaaaataattttagcttctgctgaaaaggatggccctgtgctgctcactgacgtcgatgctgaagcgtttaaagtgatgttgcgcttcatttattcggatgatttgagcgaattgaatgggcaaaacgcaaccgaagtgctttatgcgggtgaataattaaatttaatttggtttaattaaatttttaaattagcattaaaattcaatgtcatcggattggtcaaagctttggccgattttcccattccaaaattgaccaatgttttcgctgcgctttccttcgctcgctttaatgacctgttgaaggtgggcaaaagcattcgtttaattattttattttatagggttttgttcaacaatgttttgaatacattgataaaaatgcggacgatttgttcaaatcggagaaatttttgcaaattgagcaaaatttattatgcgaaatttttgaacgtgaccaattgcaaatctgtggagaaattccaatttggaaagcagtaaattttattatttataaaatatttttactgtatttttttgggcactccgttgggctgacggaaaatgccgtcaaaatggcatcgaatgctcggcacagaatcgtcgtgccatgctcggtcctgcgctgttcaaaattcgctttcc

SEQ ID NO: 34743 - DNA, 528 bp, Heterodera glycines
ggaataaaagatttttgaatttggcgccttcgtttcaatactcatttttttttataatgataggcatttttattcaaaatgatgatatatgatcacagaaacgaaaagaaatcaatttcgataacagaatttgtttgtcttcctcattttttttacaaaaattggtagataaaaaaaacaacttttacataaatttagtcagacaaaaccttggcatcccttgccaaaatatgaaagtgattcacaacgaatcgaaggagttcaacccgtgcattgacaaaacaatcagcagaagagcgaccatcggaaagaaaaggagcagcagagaaagtgcggccaatgccctgcgacgacgggcgaattcgccgaaagggtcggcgaagatcaaaagcggaggggtggcgaggtgggcgggcttcagcactacacaaattgggtaattagtgcatgatcaatcaatcacctcttttgccgggatttcccctcgctcaccgcccgcagtcccatggaccaaaaatgtcggcgaca

SEQ ID NO: 34744 - DNA, 1608 bp, Heterodera glycines
  unsure (1)..(1608): unsure at all n locations
atagggaaaagagaggaaaaaataaaaatgaaaaagaggaaatagggcgagaaaaaggggaaaagggaggaaaaagcgagaaaaaaaggaaaagaggaaaaagtgagagaaaaaggagaaaaaaggagagaaaagagggaaaaatggaaaatagggaaaaaagaaatagaggaaaagagagaaaaaagacgaggggaaaaggtagagaaaagggaaaagtgtagaaaaataggtaaaaaggagagaaaaggaaaaaaaaatatggatggagggggagaaaaaaaatgtcccaaatgtttgcattcccgacccatgattttacctcatgaagcgcgccaagttgtcgccaaaaagagatgaaatatttttttttttgagtcaagagcataaagtaaaatacaaaataaaggggtgattggctattgaattaaagatagtggtgggagaagtgaagcgaggagaagcaaaggattagcggacaaaatcgcaagtgttcgttcgctcaacactcggagattgatttcggagataagaggaggaggggaaggcaggcgagaagcagtgagggaaatccgcgaaatgcctgagggcaattgttcgcgcaaaaattggagattgaaatcggagattagaattgtgcggagaaaggagggaggggaattgacatgaactgaagggaattgcatggggaagggtggataaagggactaagctctcgctgggggggggggagaaagggacgcttatcaaaaccatgaagtatgaccggttaattgaattaactgctggggagggggtgaaaggaaacaacgggtagtccgtgacggcctggatgagggggcagtagctcgcgaaaatttggagatttaaatcggagattaggattaagtgaaagagcgagggaacaagcagtcgggtccaagtgacaccagacaaaggacggtcggcgtttggtaggaaaagctgagaaggggagggggttttgattgatgaaccatcaaattatcgcataatatgggcaaacattgtacaacgggatcctaggctccgtctagacaatatgcccggaggcgcaaaatgcggggtatttaatgcgtgatttgaacgccaaaaatcacatctgacaacgactccaccggtcaattgcccaacatcaacaactgacaaagcactccaacacattgacaacaatcaataggccaggacaacaaacgacaacccttggcgggcaaaaaacaatgaaaaagaaaaattatttaattttaaatacatttagatattatacaaatttaaaaatatttgaaatttttagctccaagactccggttagcacaacattgactacaaagtacaactcatacatctgcgtggacagccgtgccaaaaaacaaacgacaatccccggcggacaacggtgaggtagaaaaaataaggagaattttaacaattttttggcgtacataanatcgctgagtctaaaatgtttttttaattttatttttttcaatgttttctttttaacattntgtttttttttttacttttanatttgtccttttacaccccaaaaggctgaaatatgccaatattcgtcagcatttcgtactt

SEQ ID NO: 34745 - DNA, 61 bp, Heterodera glycines
acacgagacaaaggtcctaacagactcaatatagtatttaataacttagcgtatgaggaag

SEQ ID NO: 34746 - DNA, 972 bp, Heterodera glycines
accaaaaaatgtaagttcaaaaactgtttaaacgcttttctaatttttcaagctaatttagaatatttagtgctattgaatgatatcaaattgcattcaatttggacaactaggcggagttgttatacccgaagccccggagcaatattattcatattttcagcattaaaactctattaaaatgtttactctgatgggaattaattctgccggcctaatgaatggaaatccgaaattgtatccggtgcacaaaatgatcacatctgcactgaattcacgtccatcttttacacaaattgagtgttcgccaatggtggaaatgtcgtcctattaaatatttctatttttattattattaataataatattataattaatttcatacggtaattgtaatacggccactggccaacagattggccaaacagtcgttcactgctgggtgctgttgaaagaagcgatgtgctggacgaagcccgtacatgtcatggtccctggatttcgatgttattatgttttctcgaaatcttattctggaaaattattaaataccaatttttttctcatcttcttatttatttgaattcaaaaaagaatttttcacaaatagaataaaaaaataaaattatttttcttcaaaatttatttttaaaaatccattaaaatatggtaattggtaagaaaataatattttttattggatcatttgaaaaacttattattgtaatatctatttttgcttttaggctgaaagttctaattttgaaggttctagactttttgccttaataaaaatctctaaaataactcaatttaacatctttattttcaaactattatcaattttatcattttttaaaataatttctttattgaataaaatttttgaattttcttattgctgtcactactgtttttaattattattctatgcataacattctctgttgcatcgatgctcatgaaaatcgt

SEQ ID NO: 34747 - DNA, 1180 bp, Heterodera glycines
  unsure (1)..(1180): unsure at all n locations
aatactttcctccccttcctgtttcgtgatgttcagatgcatccattgcattccccctagaccatttacttttcncacgggaaatgcaaaaattggcatccgccggagggatttcccttcgcatccgtaaaaattggcattagtctcatttctgcttttgtgcagctctgcattcgaaaaggtgaactgcaacatggccgtgtgtgtgtacccccgggggccgacttgttgtggcaatttcacaccggcgacagtgaacaaccaattccaatgcgtatgagaaagggcacaggggaagaagtgatggcacaacactgtcagatgaaaatttgtttggtttttgtttattatttaattggataatgggcaaaatgattgaaaaagccgtggccaatttggcccaatttgcttttgtctctccctctctctctctctccctttttcgcctctttccttcgctctctcatcgtttcttcccccattttctattccacaaattcttcagcaatttccgtaacagttgaggccgttttcttgtgattttgttcttcctcagactggctcattttgcaaattgccgctcaaataatccgccgctttgttcctacaaatgaatgcctttttctgtcaattgatcggattgaaaacccacccgatggctcttcccatcattcctcccatcggtcccattgccattgtgccaatcgctgcgcccaccccgggcgccgccactttcagcgcccgcggcgccagttcccgcgccacaggattagcgtaagaaatcgccttgcccccgacgcctctcactccctcccctatttttgaccagccctgacttgtccatcccttgctggctattttttcattattctcctttttgctattcgttttctcttccttagtagcactatctttggtttctgtctctttctctttccaactcactctcttttccttctttttctccttctgactgtctccctttttccccctttctctcctccccttttcttcttcttctttccaattaactcttttttcctcctctgtctcctccttccagttgtctctctcttccttcccctttcttttcttctcccacctctttcttctttgcttcttttctgctgttctttctaagtctgtattgttttcctcatcaccgttttgtttcttttct

SEQ ID NO: 34748 - DNA, 803 bp, Heterodera glycines
cgtctctgaagcagcggctgagcgacgcgggcgtggactttaaggaggacttggagaaactgagggagctgaagattctggtcgattttgacgagcagggctatttgctccaaatattttcaaaggtaaatttatgaaaggggaaaacccgaaaatgaataatgaagcctaactgatcaattagttgattaattaagccatgccaagaccgccccacccttttcctggaaatcatccaacggcacaaccaccaggcaagtgggcacaatgccaatgtcgtcggcgttaggttgccaatgccaaaatgaccaattccccccagggctttggcgccggcaacttcaaagcgttattcgaaagcatcgaggcggaacagaacgaacgtggcaatttgttctacaaagacgtggcggtgggaggagaaaaaatcgaagcgaaaaaaagcgaatgaaaacggacgaaagaaaagaaagaaagacagcactaattgaaaaccaatgagaataataagaaacaaaatatttatcaaaaaaatgcaaataaaaagtgaacgaaaaaaaagaaaaaaaattggggaaaaaaattgaattggaatttgtcggcattttcattgttaaattattttcgataaaataccgtattccgttccaaaattgaaatagcatatgtaaaaaaaaaagagtagagcggaaccgggaccaaaacacggacaactgagtacaactgagtaccgaggtcccggttttgaccgggaccgggaccagtcccgggttttttcccggttttcccagccaaaaattccc

SEQ ID NO: 34749 - DNA, 931 bp, Heterodera glycines
ttcagaaaatggccgagggaaaacactcagtcaacgacaaaaacggcacttccgttttgcagaaaagcgacactcgcaccgattgcatcgatttgcgatgtgacggtcccatcgatcagtgcacggaaatgctagcgggaaaggtaaatgggaaatgaactgttagaaagcgttttaatgaatgttgtttttctttacagatatttgacctttccttttggaacggtgccgaacaatttttggctcaacccgcccctttggggggttacgaaatgtaatttttgctcttttggctgctaatgacgaaaattcagagttcggaatgcgctttctcagcacattcgccacctgctgggcgagtccgtcccctccgatcaacttttgctcgtgccaaatgcgtccgtcgctttggagctgttcgtccgctgctgctgttcacccggcggtgatttcctttggctggcttttcttcaccctcccacagatgtcgtcctttgtccaattccctttgccgatgaattcctgtcggaggaattccgttcaaattcctccattgactttgttacggtcaatttcccggtacattttggcccttctactgatcagaggcgcttcctatgatttccagtggaattcgtctcttttgaactgtgccgaattacaacagacaacggaagggctggggaaggtgggccgtgtcattggtccgttggctgatcagccgaatcagaggacgaaaatcattgaaaggaggcggaacaaaatgagagaaactctttaaatttcgaattgatccaacggcttaaaaataatctccgccacctttcttgcttgaaatcagaaaaaattggaaactttcagaaaatgtttgtgttatgtttgttcaaaaacgagtatgtgccccttctgttgcacaaccccaaaccccaat

SEQ ID NO: 34750 - DNA, 722 bp, Heterodera glycines
gagcggaatttttaagatttccggtcccgtacttcttctccagcgcaattctttaccggagcggaatttttaagactttcggacccgtactttatgacccagcgcaattctttaccggagcggaatttttaagatttccggtcccgtacttttggcccagcgcaattcttcaccggagcggaatttttaagatttccggtcccgtacttttgacccagcgcaattcttcaccggagcggaatttttagatttccggtcccgtacccagcgcaattctttaccggagcggaatttttaagatttccggtcccgtacttttgaagcgcaattctttaccggagcggaatttttaagatttccggtcccgtacttttgacccagcgcaattctttaccggagcggaatttttaggatttccggtcccgtacttttgacccagcgcaattctttaccggagcggaattgttaagatttccggtcccgtacttttgacccagcgcaagtctttaccggagcggaatttttaagatttccggtcccgtacttttgacccagcgcaattctttaccggagcggaatttttaagatttccggacccgtacttatgacccagcgcaatgctttaccggagcggaatttttaagatttacggtgccgtacttatgactcagcgcaattctttaccggagcgtgatttacggtcccgctcgcgctcccggaaa

SEQ ID NO: 34751 - DNA, 996 bp, Heterodera glycines
acgcgaaggaaattgcggaactttcgttcgctttcctccgcacggtgtccaacttccgcgtcgaccacctcccctccgaacgcgtcaatctgcgcatcggcttccattccggtccctcccctcccctcccatttcaaatttggcattttcaggcccagcagtcgctggcgttgtcggtctgacgatgccgcgctattgcctttttggggattcggtgaacaccgccagccgaatggaatccaacggaaagggtaaaattggggggggggggggggggagaaaaaaaatgtgcaactatttaatttagaaaaaaacagaaaactttttagttttagaaaaaaattggaaacaatttaatttatgatactaaaaaattcgaaattttttaagaaaaattaagaattttcagcgccttagtaaaaattttttttaataataaagaatttgttcagcatttaaaatggttggttggtgataaatgttgtagaaaaatcggattccaaataagtttaaggctattgcttctcaattttctggtcgaaatgccacggcgattttgggaatgatttcatttttaaaaatttgtttcctaatttgttttcttgtttttttccaaaatttaatgtcaaattaacttgggtctccgtttgttgtttacattggcatttcttcaaatgttggcatgtgccatttccgttcctgttcaaaacttcagaaatgctcgactcctcccgttcaatccattaataactctcgaactttgcttctgcagcacattactcttattttagtgcacttaattttataaaaatgcttgtaaaatttcaaggacaattgagacgaattttcaaggaaaataataaaacctttaagaaattcaaactattgcaatatgtgtaaatataatttataaattagctcggtaaaaaacaatttgattttaattaatgacaaaaaaacgaatcccgaactcatgagcaaattgtttttttcatg

SEQ ID NO: 34752 - DNA, 673 bp, Heterodera glycines
  unsure (1)..(673): unsure at all n locations
ctctctctttttctctctcttcctctcccgtttcctctctctctatcgcactctctaccgctctctctctctctttttgtctctccatctctctcttctctttctctctctacacaacctctctctctctccctctctttctttctcaatctccctctcttttttcctttcctcttttctattctctcatcacatctctctctatctctctccttttctctagctctcctcacttttggtcatattttttgcagattttcatcaaaaattcccaattttgtaaaattgttatttttctggattttaggaaaaatttagcaaaattgtttggaaaatttggatgaggtaagtcttggaggggtaccaacaagaaaaaccgaaattttagcaaaaatactattttccttaaaatttcgggtgcggaagggtcttgggggggggggggggtacgtaccagggatgtgcctaggtttcgcttttcgcatttcgcctttcgcattattcgcattttttggcgtttcgcatttcgcatttcgctttttggcgcgaaatgcgacttttacacccctaagaattggattanattcccataaaatttttcaaaattttacctataaattggctaattttcagtgaaaaacagtttataaatgatcaaaatttcctatttttt

SEQ ID NO: 34753 - DNA, 726 bp, Heterodera glycines
aatatttggtaggtgttatgtggtgataccctccttcaccttagattttttgtaatttttttctgctgtattgtaaaaaaaaaaatgaaaatttgaaccttcattatcatcatcttaaatatcgaagaaaaaaaatagggagccgggtcacaaaagcaagagcaagtatgaaaattaaaaaaaaatttttttttgctttatctcgaaatagaaaaaaattacggggttgctgacctaataaattttcttaaaagatcaattaatgtattcatttggctaaattggccaaatgtgtacggctcggcctttacattttttaatagttttttttttaattagattcgtgttcgggcaatcaattcggtgggctgcagtgcatggtcacagccggtcagcttcaagacttgtgttcccggattcccaggctcgccgacaagcatcaaaatcacaaaatgtgagtctcaacggtgcctgatggattttgttcgttaatttaaaaaaaccatccaaaaattttcaaataaaaaaaaccattcatgcttaatatcattcgataggcctcccttacaaattaatgttcgctattaacctgcattaacgaaactttttttgtgctaatagagattattcaaggctatcgaaaggactaagaataaaatttattggttcttttcagcaattttataaacctttttttaatttaaaaattcaaattgtgagtaaaac

SEQ ID NO: 34754 - DNA, 1335 bp, Heterodera glycines
ttttatgtgcacggagaaagggaagaggaggaggaggaggtagaggagcacttggaaagagagtattacggaacgcaagttggtgcagggagcggcggaagaacggcgcaatttgctggaaggcgccggaaggacggcgccgccgacccgcgccgcccgaggcgccatcggcccgaatcgcgtgcctccgactcggcaagcattcactttttgacggacgaccgggaggagacgaggggagacggagccacgcgatgggaggcgaaggatcgggcggagatccatctgagaaaggtcggggaaagcaaaagcccaggaagcagtcaacagctcttcacttgctgtgcttttcgcgctttaagccttaagctgccccttttcccgcttttccccctctttttgccctccctttccccatttgtttggggcgcatcactttcattttcttaaaacttcctccattaccctccgccgtttgttcctcaattatattcatttctcggcccctcttttccaaatttgccgttcctcctctccccctccccttccctccctccgcttcgttcttcgcttttcgtctcccgtctctccgccctctctttttttaaatcgccaatggcacgtcaaaagtttttttaaagcaaaagaaaacgaaaggaaagaatggattttccagattgaaagattttttctaaaacaaaaagtaattaggagttttaaattggacgaattgccttcattcgcttcttcctctgcttccttcaattcttttttcagtctttttcttttccgtctctcatcccttcgcaatttccattcctccctcctttctctcttttccctaacttaactctctttttcctctttgttctctcttcacccaattccccccgccttttatttcccctttttccacttttctcctcctccccccccctctctctctcttttctctctctctctctctcttgttgcttctcatatccctccctctcttctgttccctcactctctttgtcccttcccattgcctcattttttattcagccgcttttccgccataatccaccgttgcggatgggcgaagtggactattcgccgaatgacttccgtcaggcgagggcggccattgaagacgcagcaacacgacaacaaaacgatgggccatcgagcggggggaggagaagcgcagggagcggacggagagtgcggcattttggggacacaacagtggtcgggcaataggacaaaaggggcgacggggaaattggggggaagggggggggggtaaaatggggaattaaaaaaggggatagagggggcgggggggatttg

SEQ ID NO: 34755 - DNA, 874 bp, Heterodera glycines
tgaaaatgttgcactttccattaaattttttccagccaaagactgtttcgccgccgaaattcaaaccgattggcgaactgtcggactatcaacagcaaatcaacggatcgaaaggcatgcagggtttgtctattccttttactacttgtgtactatttttcttgaatttcagaattttcaaacattcgattggccactcctccgcctcaaccgtcgccaatgcttcacaatgttccgttacctccagcgatcagtgtcaacgatatgatggtggaccgcaattacattgcaaaggtgcgttgccacttttattaatgtttatattagtaaatgtctcatttttcgcttttcggacacacaaattttcactcgctatccattaaaggggatacgaattacagaggagcgggatggttggcagggttagacgcaatcgcgttatggattacagaaattacgaaaacccagtcacgttgagccctgttgtacccgttgcacatgtttcattcggtttcaaaaccctattccgtttcatttctctgatttcattagtccgaccattttaaacaattttgtattccaattttttccaacgttctcagggagtctcttcgccgaagttcaaaccgattggcgaactgtcggattaccagcaacaaatcaatggatcgcaaggtaaatgcgttacattcggatgctgttgtaccagttttcttatttgaattttgttttagaagtttcaaacattcaattcgccactcctccgccgcaaccgccgccggtgcttcgcaatgttccgttgcctcccgtgacgacgaataacaacgaaatgatggtggaccgcactttgccgaaacacacagcaaaggtggca

SEQ ID NO: 34756 - DNA, 1537 bp, Heterodera glycines
attaataattaatttccatgaataatggaagaaattttaaaaatttattgtactatttcaattgttcttttcaagggttactgtaggagtgtttaaatttatctttttttttttctatatcaaaaaatgaattcttgaaccccataaaatgtccgaagataaaagagggtcaattccgtgaatatttcaagaccattttcacgaaatttgtcaccatgtctcccaaatcgggggggggttttatgtgtttgtcgcgcttatggcactttttggagtaatttgtacgatcgtccggttggctttgtttaattctgcagattattaggcatagattaagatgatctaatttttttatatctataggctcttcatcaacgcatatatcacacaatgcactaacttcattgtcaattataataaacaaattcactctatagaatcatcaaaatatgctaccgatggtagtgtagtactaagcaatgaattccaatcattagataaatctatcaacccatcgtatatgatctgttcatgtttaatctttgctatctcattcatttcctttatttatcatagtcaatccaatcctctcttcgctctcgtattcattatttctttaatatacttttacaaattcgtgggatataacatagtccatcttggtagattaaataaaacgaaaattagatatgataacttgttaattaagaacaaaatatctctctctcttattttagtttatcattaattagatgttctttaaaaaatgcatcagcatcaattagtcacatttattaaactctctaggaaaaaaacccaagaaattacacctcattcacaacactatgtatgagttctaagggatttattgacatttgcattgacattcattccattttattttattttactttacatttcatattgttgtatttttttacattatttattttgattttttttatgcgccacataagagcactaatgtgcctgtggtttgctcaataaatataaatagagagaaattacaaagaaaaagagaaacgacgagatagtactaggcttttctctgcacagtggagttgacccatagtgcactatcatttcggtttcagaattaaaaagaaactttcaaaaatgatatcacaagggaaaacactagagaccggacttttgaaagtacccggaccgggcttagataattgaccgggaccgggctgctcgttcaaaaaaagcccgttttaccgggcgtcccggggccggttcaaaattttgcttgggattaattgtttatagtaaaatgacgagtgattttaattccaaaagaataaagctaaaattcttcaatccgaatcttttttcaaaaaactttgaggaacagggggagggagggaggtccgggagtattgtttttgtcgaaaaaatgaccaagttttgtacttttttaaattttgtctttttgagccttttttaagagaacacggatttttaggggccgttggtaaagttttatacatttctacatacatttaagcaa

SEQ ID NO: 34757 - DNA, 834 bp, Heterodera glycines
attttctttttgtatactcattggtttcctatcgacaaattatgattcctcaatttttttaattgtattttatcatttttaaagcaaaaatcagccatttttgttgaaaatctgttaacaaatcactcaaattttcaaaatttcccccggcggcgcctatcggcaccgccggacccctcctttcccaaaagtcttttggaaaaagcgcgccaaaaaagtgatgtgaaaagcaaatctgaatttttataatattcgatcatttagtccaaaatgattaattgttgaaatgattgaagaaaatttgatttgaaaattttcattaatttaatttagctttacttttggattttattaaataaaaaacaaaattaaaatttaattttgtattattttctattgaaataaattaaaactatatattttttaaatttttttgaatttttgaaatttcccggttggtcccggttcccggtcccgaagaaaaatcgaggtcccgatcctggcttctcaggtcccggcaagtcacggtcccggttttggcaaaaattcccggtcccgtggcactctacctttttgaataaattttgtcattttacacccttaagaagaggtttttagtagagatcggaccggtcggtttttcggtatttttcgattttcgttttaggtttttgaccgaaaaaaccgaccgagaaatttttgagtttttcggtttttttcggtttttaaccgaaaccgttcgaccgaaataatcaaaaaaccgaaacaatcgaccgacttttatgaaaaatcattttcttaacaaaattcattaaaaattcttaaaattttccc

SEQ ID NO: 34758 - DNA, 1017 bp, Heterodera glycines
  unsure (1)..(1017): unsure at all n locations
taaagtaccannttttgggcgccaaaatcaatgggcacagctttgtacaaaacggaatttcgtacaaaaatttatttttttttttgaaatttcaagtgaatttttttttgttagaaaattggaaaataataaaaaaaaattatataaaattaacttgtacaaattccattgtataaacgaagtggcatgaaatttccaatttcagtcataaaattaatccaatatatttcccaattgaaatttagagagaattttccgagaaaaattcaaaaaaaaaaaacaattttttttaaattttgaaattatttttttacacccaaaaaaacaatattaaaaaattatttaagcaacttgttattaaaggcaaaatcattttatgaaacaaataaatgcaatttttgaatcgaatttcaaagaaaaaaataatttctttaaagggaaaattcaaaggcctgaaaattaattcactgaaaaattaaaaaaatgaaattttcgaaaaaatatttgtttttttggcacacctggtcccgattcttgatttcctcgtatggcaatctggaggtgagcagttcgtacacgcatatgccgaaggagtacacgtcggaccgggtgctgtacggctcggggccgtccatgcgaatcacttcaggggcctggaaaaaacggtcaatcaatggcaatttggacacatttttttaaattttacaaataaaacctcgaattttttttcctaaaaaatattcaacaatttttttgcctgaaaattgaacaaaaaaaaattttttttttttttttgctaatgttcaagttttataatagcaatattctatttcgcaagtgccctatctaacaataagtaaaacatagtgccaactttatgccagtaaatttttatgactaatttaaaaaaaaattaccccgttttggcatttttcctacaattcgggaaaattttaggcatagcaaaaaatgtttttctccggggataaacaacattttttttttttttgctttttt

SEQ ID NO: 34759 - DNA, 935 bp, Heterodera glycines
aattgcaatgtccgatcccaatcacggcaaattttcaccggtttaccaacccctttcggggaaggacaagcacgctgattttgccagtgtagcgcgcgtgcagccccggacatctaagggcatcacagacctgttattgctcaatttcgtgcggctgaacaccgaaaatccctctaagaagttgtgcccacagaagcaatgagccaactatttagtaggctagagtctcgctcgttatcggaataaaccagacaaatcgctccacgaactaagaacggccatgcaccaccatccaccgaatcatgaaaaagctatcaatctgtcaatccttacggtgtccgggccgggtgagtttccccgtgttgagtcaaattaagccgcaggctccactcctggtggtgcccttccgtcaattcctttaagtttcagctttgcaaccatacttcccccggaaccggaagactttcgtttccgggaagctccccaccagggcgaataaatccgccggcggatcgctagttggcatcgtttacggtcagaactagggcggtatctgatcgccttcgaacctctgactttcgttcttgattaatgaagacattcttgccaaatgctttcgctgtagtccgtcttgctacggtccaagaatttcacctctcacgtagcaatacgaatggccccgtttgtctctgttaaccattatctcggtcagcaaaaccaataaaatcggaccgaaatcctcttctattattccatgcacgaacattcaagcgaaacgcctgtttgaagcactctgatttgttcaaagtaaactcgccagcccaccgacgccgaccggtaaagccaacgccggggaaagaccggcagaaagccaaccaaccagtaacacacaaagtgtgcaccggacgctagcacagatccactacgagcttttt

SEQ ID NO: 34760 - DNA, 1099 bp, Heterodera glycines
  unsure (1)..(1099): unsure at all n locations
tttgcgagtcagttttgtcgacggattactttacggactgacaaaatgcgtgattcnttcacannttcctttgaagtagagggattgncttttnccgtttccaaacaaaaaaatccgccttgtttcgtctgctcctcgagtcgtttcccggttttttgttcaccctttttgtcgacagtccgttgaaagttgggggatgtttcccgtttaccggaatgtcgctttggctcgtctaatcgtgggttttactttacccgtttacaatttttagctgtccacagtcggttgattaggctcttctcttgttgggaatttgttttccctttttccgatttcttcaacacttgtcgagggatttactttcccttttttcaattcgaggccacgtcaaatttcttattgtccactgctgattcaccggtgccaggagcgccaagtcgtaaaaaaacagatatgattgttgtcagggggcttttaataatgttgttgcactgcccacggcaaaagacaacagcccaaagcaaacacaaaacaatacagcccaatgccgaagatgattatcgtttaattccaaataaaattagggcgaggacaatcaataggaaaactgcgacagcataaactaacaaccaacactccacaaaaatcacaaacaaaaatgaaacaaaataaataacaaaacgccaaatatattttaaaatcacaatattagcacaaagtgaatcaaacaccctattagtgctttgctgtgccgagaaccggcaggcaatggatggctttaaatctgcaagaaattaaattggcaataagtggttgtaaaaaacttgtgtaaggaattattttttgaagtgaatcaaacaccctattagtgctttgctgtgccgagaaccggcaggcaatggatggctttcaatctgcaagaaattagattggcaatatgtggttgtaaaaaacttttgggtatggaattattttttgaagtgagtcaaacaccctattagtgctttgctgtgccgagaaccggcaggcaaaggatggctttcaatctgcaagaaattagattggcaatatgtggttgtaaaaaacttgtgtaaggaat

SEQ ID NO: 34761 - DNA, 851 bp, Heterodera glycines
  unsure (1)..(851): unsure at all n locations
attgctctccgcgcccctctgcccatgctngggaaaaatttctcgcaaaaaagagatagccatttttctggcatagagaataaatttaaaaattccctgtagaatagaatggccattgctctccgcgcccctctgcccatgctgggaacatttgtatggtacaaaatttctcgcaaaaaagagatagccatttttctggcatagagaataaatttaaaaattccctgtagaatagaatggccattgctctccgcgcccctctgcccatgctgggaacatttgtatggtacaaaatttctcgcaaaaaagagatagccatttttctggcatagagaataaatttaaaaattccctgtagaatagaatagccattgctctccgcgcccctctgcccatgctgggaacatttgtatggtacaaaatttctcgcaaaaaagagatagccatttttctggcatagagaataaatttaaaaattccctgtagaatagaatggccattgctctccgcgcccctctgcccatgctgggaacatttgtatggtacaaaatttctcgcaaaaaagagatagccatttttctggcatagagaataaatttaaaaattccctgtagaatagaatagccattgctctccgcgcccctctgcccatgctgggaacatttgtatggtacaaaatttctcgcaaaaaagagagccatttttctggcatagagaataaatttaaaaattccctgtagaatataatggccattgctctccgcgcccctctgcccatgctgggaacatttgtatggtacaaaatttctcgcaaaaaagagatagccatttttctggcatagagaataaat

SEQ ID NO: 34762 - DNA, 1245 bp, Heterodera glycines
ttaatttcacaataattaaagtcattttgattgttcgtttagtaattaattttttaataaatattcgatttataattttatttatttttttatcagagtaactttgttaaaatttaattttcatgctcaaaaattttctatatccttttaacaatagtttaaattttacataaaggtattttatattcataatttaattatttacaaagattcacaaaaaaaatttagtttattatttaacctttttggctcattaagcatttaattttgtttttaattttcatcgaaaacgattaattctttaagtaaaattaaaattttatttttttaataagcataaagcgtatgttttcttgtttttaaatgatgctattataataaggtgtattaatatatttaatttaatttttaatttaacgtattttttcctatccggttctttattgtcattttatctatattaaattcttttattttattgacttgtttgtttagctgatacgttttaatatttttaaaaatttttacgatttatcgtccaaattcttattataaaattataaaagttttctaaaatattatcaaataataataaaatctttaactttttcatttatttcacccaaaaattaagaaatcgaatttaataatcttatttgtttattaatgtcttttttagtataaacagaaggctctccgtaaatgttgtctgtaaatactgaccatatccgacattttttgaatttggaatgccttaaatagtaatttttggtaattttttaagaaattgtaaaaatatacttaaaaaatatttttcataattccaattcgtaaaaatatacttaaaaaatatttttcataattccaattctcttgattccagtgtattattacgtttgatgtgttttaatgaattaagctttccattcctcaaacaatccaattgcgatttttatttataatatgctcatcttcattgtgaacaattttttcttattttaaaattatccattatgcttattttacaatagtatttttattaaattaaactcattaattttacacgaaaaataattaaagaaattattttttattaaattttacattttgttttcgcgtttcacctccgcatctttgaatgttgagactttattcaacgaatttttcaaaaaatgaatgttcttttaaaaatttatttaaagaaactaattttttgattattttttgttattttttatttttttt

SEQ ID NO: 34763 - DNA, 1422 bp, Heterodera glycines
  unsure (1)..(1422): unsure at all n locations
gtactgtatggacgtgtttgtaccgtaccctctctcttaacttcgtcgattgtttgtttttacctctcccaaacccgggctgcagcttggcaaagttgccaaattccatgtagtccagtagaaaaagtatagtcagccgtgtcttacggtacagctgcaactcattccattcgtttgcgatcagataagtacgccttaaagttgagggagaggaggggcgtaggacgacggacaaagcgcaacaaaaatggcaaatttaaagtatttaatgtcatttaacctaatttaaagcttaattttaattaccaaatgaccaccgacgagtgttggctgtcctttgctttttgttctccttttgcctcgtcaattggccttttctgttcagtgtttttaagagcgcgtggcctttaccaatcgatgaaaaatgtttggacaagagtcaaacagctgaaaaattaattggaataaaaaaaagaaaatttaaaaaaatcaaaaatttaattcgaccaacaccaaagtgtgggccaaagacagcgccttaagtgccacggcagagaccaaataggcgacgaaagagccttcttgggaatcggccaacggcacgtaaaactgagaattgaaaacaacaaaatattgaaaataattaatggttagaattaaatgccatgggaagagagaaagtggcaaaattgagaaaaattcataaaatggcggaatggaaagaattattaattagnggaagatgttaaaacaaatttcaacaaaatgtgcacaacaaataccaagtgactttgcattttgtaggcgaaagtcagccaaacggagatgatggccatgacgagcagaaaaacgttgccaatgccatcggcagcgtacagcaccaacttgagaatggtggacgcgtcaatgatcaatttgcccgaacgacggccccaactgaaaaattgactaattttttacagaaaaaacagttgtaaatttgctgatcaaatctgatcagtgagtgagtggttcggtgcgattcagccgaggtggaagggaactaatacatcttataattatgatttgctttgaccaaaccattaatctgtggtcgaatgggtttagcttttaaatttcgaaaattaaaatggggattcataaatttcaaaaaaaaaataaaggtaaataaatgtttaaagaaatctgacaatggaactctctcatctgtcattgacacaaaatattgtccaataatttaattgccattggttttatcctattttctgagctgaaatcaaacatttacaattagttctattttcctattttaggtcctttttatgggggggggagtagatttatggtcctaaattctatattttggcagttggggaacccagcaaaaacacacaaaatgacctgtaggcgcgcactgccgcc

SEQ ID NO: 34764 - DNA, 1259 bp, Heterodera glycines
acacttgaaaaaatcgatttttttgttttcggggcagtcctcccgaaccgatgcgcccagatttatggggagaccgaatccttccggaatagcttccctatagcctgtactttaattctgcgttggatttttgctccccataattgtttgagtaccccaaacggacacttgaaaaaatcgattttttttgttttcggggcagtccccccgaaccgatgcgcccagatttatggggagaccgaatccttcgggagtagcttccctatagcctgtactttaattctgcgttggatttttgctccccataattgtttgagtaccccaaacggacacttgaaaaaatcgatttttttgttttcggggcagtccccccgaaccgatgcgcccagatttatggggagaccgaatccttcgggaatagcttccctatagcctggactttaattctgcgttggatttttgctccccataattggttgagtaccccaaacggacacttgaaaaaatcgattttttttgttttcggggcagtccccccgaaccgatgcgcccagatttatggggagaccgaatccttcgggaatagcttccctatagcctgtactttaattctgcgttggatttttgctccccataaatgtttgagtaccccaaacggacacttgaaaaaatcgatttttttgtttcataaatatttttttcagaaagtcatgcgcacccgtccgatctggcaagttaagcaacgattgctgactagccaaaaggttcggtgccgtgatgaaacgaaccagcactgcttaccccgcggcacccggcacggtcccccgaaggaatggatttaattaaattctctccttcggggatttttttccattaggtcgtccgttagcgttcgattgctctagtcaatttttcaaaatttttgttgaaatatttgtcgtgctctgaagggcgtgggagggggggggggggggcgaaggcccaccacgaggccgcgaagaggccgagtgagtaccttcggtgcaggaaaattattaaattttaaaattttttaattgctttttaaatatgccaaaaaatgtaggcttaacttttttagtgaaaattcgatcactcatattttttgctaattgagcagaagcgtaccaaactttgcagggatactccccggtaaaggactaacttacactgaaatgagcgccgagctagctggctcaaaaaaatttttcgaaaatctgagtctttcgtttttatttatt

SEQ ID NO: 34765 - DNA, 762 bp, Heterodera glycines
ttgatcttttcatgagtcaattactaattactttaatacataacgcgctttggaatgcttaagtaaatcgatttatactccggagcattttttgactaaaaataaagatttaaatattttcattcccacttcttttgttgtgggaccagcaggaggaagggagaaagaatcattccttctccgaaactaactttttcgaaatttggcccaaaaatcctcaaaatcagtcaagatatatatggtcttcgggtcctttcctctagcctctccgatttttttttcaagttatgggggtcttgtttttgaatgttatcaaaaaccaccaaaaacattttaatttaaactaatacatttttgcttggcttattgtttttcatttctccaaatatttttgtccccaattggtgcggtgcacatgttttttgtttttatcagttgcatatgtatgcacacagcattcatacatatgtgagtgtgtgtgtgttgtatgttttcgctcttatcattccaaaaatgggggcggagggcgtacatttgaccccgccccattccccgtcccctcggggcacttttggagaagcgaaaacatttcccatattttcattacctccctaaaacactttctcggttcaaagcagaaataacagctccacagtttggactccctcccccttccgccccaaaaaaatattttgtccaaaacaaattttttctatttctatcacatcaaagccccctcctacccccccccccccgccccgt

SEQ ID NO: 34766 - DNA, 80 bp, Heterodera glycines
ccagatgcagtggcgcgaagcgttacgcctgatgcaacccctccccgatttcaccccgcaatacgttgtgcatgacgcac

SEQ ID NO: 34767 - DNA, 878 bp, Heterodera glycines
ggggatcctcttagaagtccattttacttaagacaaacaagggaattcttaaacccatccaatcgaccattagtagaaaaaagtgattattacgagcaacaaaaaaggattatagcattcaaaccctggcattgtaccgttttgcaaaatgccatctgggtcattttgcactcttgcacttttggcatcaatttttaataacactgaacacttgcaaatttatttgtatatgaaaaatttcaaactaaaaccaaagtgcagaagagtgcctcattggtgtgccatttgccaattgtataaagccttcgcttgtgccctctcccactcagtggcgaatacgtcagcctttgttggctttccgtggtgccatttttggcaaaaaaaaccttgtatttgtgattgccatgttccgagtttacgaaacagtcgtagcagagcacacaagtcgagtcggtcgcgcactgtttgcaagtgtaatttggttctccgttcttgaagattttgccacagatttggccagcccgtgtctttgactcgtcaatgtccactgactcgcgcagccgacgcagcgtcgtgtccggatggccgtcgtccgtggtggccaacgacggactgtcggcacaaaacatggcggccaaagggtagagcacattgctctctgaaacaattaatgtggacgatgagaatggacaaattggagtgaataaaaacaatgaataaacaaaccaatttttgcttcgtccaccaccgcttcccatggcttgggcaaatgtgtcgggaaaacactgtgtgaggctgaaatccaatgtttgtagagcaactcggaggcatcactccaacacgcctcacgcgttaatctctgcagttcatcaatcatt

SEQ ID NO: 34768 - DNA, 1002 bp, Heterodera glycines
tataaaagggaaatgacagaagcctcgaatgttagttatattgcgtgtcacacaatctcttcctgagaaaatttctaaaaaagtgtgccgaaaaaaagagatagtcgtttttacatacgaatattgaaaagaaggcgtaaatggctctgaagcgtccataggccgcagaccacaaagtaaaatgggacaacattcataaaaaaggttggcctcaaaagggcccattcccaagctaatttcggaatttgctgataaaatcaaatagcctaaattatatacgcattataaaaaggaaatgacagaagcctcgaatgttagttatattgcgtgtcacaaaatctcttcctgaaaaaattttcaaaaaagtgttccgaaaaaaagagatagtcatttttacatacgaatattgaaaagaaggcgtaaatggctctgaagcgtccataggccgcagaccacaaagtaaaatgggacaacattcataaaaaaggttggcctcaaaagggcccattcccaagctaatttcggaatttgctgataaaatcaaatagcctaaattatatacgcattataaaaaggaaatgacagaagcctcgaatgttagttatattgcgtgtcacaaaatctcttccggaaaaaattttcaaaaaagtgttccgaaaaaaagagatagtcgtttttacatacgaatattgaaaagaaggcgtaaatggctctgaagcgtccataggccgcagaccacaacgtaaaatgggacaacattcataaaaaaaggttggcctcaaaagggcccattcccaagctaatttcggaatttgctgataaaatcaaatagcctaaattatatacgcattataaaaaggaaatgacagaagcctcgaatgttagttatattgcgtgtcacaaaatctcttccggaaaaaattttaagaaaagtgttccgaaaaaaagagatagtcgttttctcgggtggggtattgaaaagaaggcgtaaatggatctgaa

SEQ ID NO: 34769 - DNA, 858 bp, Heterodera glycines
ttatttaaataataattttaaaaaggaataatgaattcagatcttttttaattctcaaaactctcgaatgctctatggatagaaaggaattttagatgggctaaaaactttagcttaaccaaaaaaattattcaaaaaaaaaactctatttttaagggagctccccttttctgtgcatagaagataaaaattcggaagaaaaaacggatcgagtccaaaaaatactaattcttgattcagaatttaaaatttttttttttgaaaattccaatccatccgatttcaatgctccgcacaaatgtgaaagagcgtgtggaggagagagagcctttgttttccaaaattgcttctccgttgactgtgtaaaagctgccactgtgtgtgtgtatacatatttgcttaggcaaaaattttctcaattttgggctaagccaaccgttccggaaaattttgccggaaattcgtcctaactcagtagtgactggcgatgggccaatatttggggagaatttggtggaccagaatcccgcgagaattagcataaaattgacgcaaaagaatggaaggaatgcgtgtgaaacggcggttggaatttaatatttttttcatttttcttaattactaatttaagagaatttttaatttatggccggtcgattgactgaacacacagaacagaatatttttaattggatcaataagaatgatcaatttgaagaagaatggagaaacaaataaagtgcatcaggacagtgaatcaactaattgaattaaatatacaaaaaattttttgtaaaaatattaatattttggatagaaatttattaaatgtttagaatttattcaataatttatttt

SEQ ID NO: 34770 - DNA, 1339 bp, Heterodera glycines
  unsure (1)..(1339): unsure at all n locations
agcgcgttccactggcatgtgtgtactctacttaactgcatcccatttntacngaatggctgcgaattaatatattntagcaattatgattaaggtttttgatcaaacaagaaattcgttgtagaattatttttttataataaattaaataattgaattatttttttaattataaatataaatgttttttaaactcttcgctatgttccgctccttgtgtattttgggattttatacatatatatgataaattattgcaggaattcaataaattaaatagataattttaaaaattcttatcgtaaattttatatgatttattttattttttacgtttatttatttaataagataatattttgaagattcattaatttccatatttctcatgcggtgtcttgaattataacaaattcttgactttaaattattaaattttataaaaagtgacgaaagtccgaattaacaacgcaaataaatcatccatatttaaaaaataagtaaatgtagttttttaatgtcaattcattcaaaaaattagtttttatttgttttctgtatagatgtaaaagtttgtgaatgtgatatattttttactaatatgtcaacctttactgtataattaattttaattagtttgttttctaatcgtttctttttattattttcctggcatgtataagattaagctgtttatgcaccttatgcttataaattattgattgcttacccacgcattcaacagcttatcagttttattttgaattgaaatattttttgtaatattttttattgttgctttatggaggtttataaggccgagcacataagctactttgagttgcatttaaaatttttattatttaaaataatatcgtataaaagaatcattgtttaggtacaatatatttatgatttttgaaatagggtgattatattgttttttttttattaatttaaataattttatgagcggtattggtttttcattagccgttaccggtaatcaccggtactggaaaaaccggtaccggtaacaaacaacattttcagtcggtaccggtaaatggtcattttttatcttaaattttttgaacatttctaattctataatttatttataattgtctatatttttagtaaaattgcatattttaaagatctgttttcaagtaatattaaatacgttaggtacctgtttaccgctctactctattatcggaaccattcatcgtcatcttttgtgtctataatataatccatatatttttattcataaaattaattatcctttatataactaaatgaaattgattttttcaaaatggtttgtttttaa

SEQ ID NO: 34771 - DNA, 722 bp, Heterodera glycines
  unsure (1)..(722): unsure at all n locations
ttgttttaaggggagggggcgagctgctcacagatttacttctttagaattttcaatttaaaatggtaaacataaatggacatcactcactgaccaatggcaaatcatcatcattttggctacccaatggccaacaatgtcgtagccagtctccatcagttccaacgattggccacaaatcggtcggtcgggccacccggcaatcacaatgggaatcagcgaggaactgacaataaacgtggagatgaacaagttaaataatgctgccgtccacaaataaatgatttttaattttataaattacaaatcaaaaattcacctgaaccacgtgtcgagcacgtccgggtcctgtagaagcggagagtccgcttcatcagaggccaattgagcgcgcgcatcggcctcggattcggccacaatccatcttaagagaaaggtgaatggatatttgaccgtttaaatgagcaaaacatcaattagttagttacacattatttgtacataaataatcattattattgccatttttgtttaccttttagacttctctacgaaatatgccggaattcggtgtccccaaacgatctgacggctcaaattccatggttctttgaattttgtgaactcctcggtgatccctttgttcatcggaggtttgaaattgaacttaaatgattttganggtacttatatggttcgtacgccataaatttaaatatatt

SEQ ID NO: 34772 - DNA, 722 bp, Heterodera glycines
  unsure (1)..(722): unsure at all n locations
attctcatttttaaattttttatagatttttaaatatttcggatttttttntggcttaccaaaacttcatcgaacctggttctttctattctctttcaaatcgccccaaattttttttacagcttaactaggccctattaagcttatttccagaaaatctcgcatgaattctcatttttaaattttttatagatttttaaatgtttgcattttttttggcttaccaaaacttcatcgaacctggttctttctattctctttcaaatcgccccaaattttttttacagccacgaggccgcgaagcggccgagtgagtaccttgggcgcaggaaaattattaaggaggagggttcattatttatttatttttgcaaaattaattcataaatttttttcagaaactgctctgaaacgcaccaaaatttatttacaagttgaataaggcactctgactcttatattatcaaaaagggagatgaataaatattttaaaaatttctaattcctttttaaacaggccgaaaaagtttaggcttaactttttcagcgggtttaaaaaatctagaaaaattagtaagcatttgtagtgctccgatacgtatctctgcaaaatttggtgagcccctgatcaattacaaattatttatggacgatcaaattttttgaaatttttttaagtgcaaaagtgggtgggtgtctgcaaaaaattttcaccgggttta

SEQ ID NO: 34773 - DNA, 297 bp, Heterodera glycines
ccaacaagcaaatttttgacagaagcggcaccaatttggagttgtctatttcatcaaatgaacagccaatttgggatgtttttaccagtgaaatttggcccgtttttgcaacaaacattcgccatttgacctttgacgagcgcgatcatttggacaatttgcgtcgccgcacttcaccgacaattctcgctgatcttgatcaattgaatgcaatcgatattgttaatttgttgcccgatgcaattgatcagcttgatgggccaaatgcaatttctgctggtcacgcgctgtccaaat

SEQ ID NO: 34774 - DNA, 1377 bp, Heterodera glycines
tttcgctttcgccctttcgttttttgggctggaagaaggaaaaaaaagtacccccctaaaagatacagtttatttttttgcaagtcaatttctcgaaaaaaaatttttttgccacaataatattttaatataataaaatttttaatttataacggaaaaaataaacaataattttcaaaaaatgcaatatcgttttataaatatttatatacaaaaatctacgattaaaaattgattatcgtcaaaaattaatccaaaatttgaaatttgttggtgagtatctttaaaataatgtaaaacgtatgtaaaaaatttccaacggccctaaaaatccttattctcttaaaactgtcattttggcaaaatcataacaaaaagtttcaagaaatttatgacaaaatatgttcaagaaaacttgcttttttgagtttctcaagtcataatttttttaaacttagtgaattttttgtaattttgcaggataatagaaaacaaaagatcaaagataatttgggcgaatgaataattttggattaaaaaacttcaagttgtcgacttgaagaagaactaaacaaacggaattcctttcataaaataaacatcaaactaatgggataaaaaataaaattcatattaataattcacctatctaaatcttcatctccataaacgaccctagtccctccgcggcagggtctgtatcgtttcggcgccgccgtttcggcgccagcccttgtttttggactataactttttttgttgtcgatcaaatctaacaatcttggtatcattcgaaagctgaacatgtttagaagctatttctaagcaattgcttagcgattagtcgcttactaaaaaagttctaactgaaaattgcaaaaaagtcaaaatttttgtgattttttcttaataacttctttacaggtcaaattttttttttggttttttggggggaaatgccgaactcctatattagtttccacccgataaatcgctgctatgaaacttgaggtgatacccataatttctgtgagatggtccgaaaaataacttctaaaagtttagtcaaaaagcctccatgctaaaatcctagagcaggattcgtgatggattactcgaagggttaatgctgcttgtacattctcctgctgttttagttgctggattcacataataattgcggtgttgtttggaacccgatgactgcgctttgttcaacttaccggaaaaagggactggggcccgggataagaacggagagctaatgagttgcgttgcacggcaggatctgctggagacaaaaccgggacagatgtgcatggatgggcacattgtgccgtacccatcgatctgatccgactgatctgaaattgcgtc

SEQ ID NO: 34775 - DNA, 855 bp, Heterodera glycines
gagagcgagagagaaggcgagagatagagcgacagtgatagtggagagagagggagagcgagagggtggagagagagagagagcatgccttcacttctcgcctttgacttagaactttgaaaatcgtccgtcatcagccgttggtcaaacacgggcggaagtgtgacgtcaccagtggggcgtgaaaagggaataaagatcatcgccaaaaaacgtctcaccaattaattaaccaattaattgatcattgaggcgcctgccgacagatggagcgatgagcaaagcacacaaaaagtgccgttggcgaccatggggaaaggggcgggggcgttgtcgtcgaccaaagatttgaaaatgtgcaaaaattgcaaaatcatggatcgtccaaaggccaatttcaatcattaaacagaataatgcaacaaaaaattgttgttttattggcgttttctgtgctatgttcagcaaatggggagggggcataggttaagcaaaaatcattgataataaatttaaaattgcaaaaaaaaaaaaggaattctttggcgttctgacgccaacccccaggggaatcggccaaagataaaaatacgttttaaaaataataaattaaatcgacaaaatttattagccattcaaaatgtttggaataattgtaataaattaaaaattgcaaaaaaaaagagtaattctttggcgttctgaccccacgaatcggccaaagataaaaagcattttaaaaatatgaatttaaaaacgagaaatttattacccattcaaaatcattggaatatgtaattgtaacaaatttaaaaaaagggaaaaaaactttggcgttctgtcccttcccccctc

SEQ ID NO: 34776 - DNA, 1068 bp, Heterodera glycines
  unsure (1)..(1068): unsure at all n locations
aaatttttatttcctatntagtgtattcttacatattncagcatttttatacatatttattacatatttcgcaaattttcttacataaaattagcagccctattaattaatcatntaaaaaaataagtaaatgttaatttatccaaaagttaaattcttccttaatccttcttactcttttagaaatattttcttaatttttctatggattttcgagatcagttagctcggttctgtaaattccaaagtgtcaagagtgaacaaatccataagaactttaaaatatgaattttatattgatgtagaaacttttcgggtttatggatctaaattttgggcgcctgtaactggggataggatcttggcatttttaccagtttaatgaccagcaaactcattttatgttgttcaatcactacagactcaacacttcactgtttggtctttctttgtttcggggaatcgtccaactcgccgctttttgttttacgactttcttgccgccatatttttcgatgcaataactagtcatcactccattaatttgacaattattcaataatattttattccgaaaaaattataaaataacttaatcacgtgtcaataagtgactggaatttagagcaggccgcgatttgaggagcaaaatgccgaaaaagacgtgccaatgacatatgtttgaagcaattggagtccccaacggcgcggaaaagcatcgctgggaaaaataaatatgaattaaaattataattcgaaaataaaatatatttaaataaagatgaaaatttatgaatacagacaaaagtttcttcaattgtttaggagtgccaattgtttacatatgtattattgtctaagattttgtatttattttgagggaccaaccataacaaatttaaatggtttttatttcacaattcagaattttgagatgctaaatttttgtgaaaattcggcaaaaaaaaaacgattaaatttgtaaaaaattcaatcatcattaataaattttgagttttattaaatgaaatataataataataaatttgcaaaaagatatgcataaca

SEQ ID NO: 34777 - DNA, 964 bp, Heterodera glycines
  unsure (1)..(964): unsure at all n locations
gtcaaaaaatcattagaaaagagaaaattcaatgtaaaaaatcgataccgttcttttccactttattgggtcatcgttttgccgttaattgttttatgccccccacccctcattaataataataattattaatgactctcagagacagcagaaagttcattcatttctccttcatttttttcttccttactgcgtcccatggcactttaattttccaagggcattttacgcgtcccattattttacgcgtctatcccatggcattttccgcgtcccatccaatactgacgacacaaatatttttttaacattgtttaattcgatagccctatgtaacaaattttaccatttttgtctttatattctgatttcgataatttttcgatgacatgcctaattcatgctcgcgtattttaatgtcaaatacaaatttgtaattaaaaaaattcgatttataaataatccaatccctaattcaaacccaatccaatccaatatctgcgccttccattataaacagggggctgcacagatgtgctcatttagcatcattttgctaatttcaaggggtcaatgataatttttcttttgaaatgatgctttgctgatttatgaagattttttgaaaaaaaaatcctccaaaatgaccgatttaaatttggattatattgcagtcaacgagagccggacttttgcaaatttcggattaggataagagtattcaggactctcttggtccgtttcacaaaaattttgacccgaacattttttgagttctaaaattattttcgatttttttgaaattcaaaagcttgtttatatgccaccatggaaaatccaaaagaaaagccatgtgaaaattatgattcaatggcaaatgagtgattttggtggcttttcgtacganaatcattnttttttgtgccagcatttttcataaataaaaacgtaataaatcattaaa

SEQ ID NO: 34778 - DNA, 1041 bp, Heterodera glycines
  unsure (1)..(1041): unsure at all n locations
tttgaagaatttttgagaaattatacccttaatcttgaaaaatgtatgtccatgtttttgccattttatgtcaatattttgaggtttttgcaattttatgtccatattttgcgatttgttttccatattttatggccatctttcgtgattttatatccatataatttgacgccctagtcataattagaacaattaattgtcgcatggacaaatttttttacttcaaaatgttaaagcacagctattccactgaaatggacggaccttaaataatttctctgcttcaaaacttcgtgaattttttttttagacgattttaaaacaaaaataaaaaattttgttttgttgcgtagcaactgcactagtaccgaaactaatgctataacttgatcaatattaaaccaaataaagcaattttagtctcattttgaagggaaaattctaatgaatatattttagtttcgtttttttacgttcaatacaattttacccttaaaatgacggtaatttagtagaatgtttgccctggtaaaaatcaatcaaatgaaataaattttacacgcaaaagaaattttgactaaactttacaaaaaaaaacttcaccggtaatagtgaagctgatgttccctttaattttaaaatttttcaaaaaattctcaaaaagtatgattcttagagttttcgggatcactgatcactaatatttaaatccatttcggccaattgcgaacctcgaaattcgacttttaaaaagagtcgaaaattcagaattcaaagataaataaagcttaaaatatgcattttcacttcatttcacatttaagcaaacaaaatcattaaggagcattttaagcatcgaaatattcaaaatgtcatcaaagtacattttataaaagaaggagaagagagttttttagtgttcgattatttttcaaaaaaaattgcaaataggctccacaggattttgaaaattttttaaaaaatttgtgaaagtctctccaaaaaaaattattgcaatttttgaagaaatgactcnntaga

SEQ ID NO: 34779 - DNA, 990 bp, Heterodera glycines
  unsure (1)..(990): unsure at all n locations
aaaatgaataaaaaaaacagcaaaaaaaaactccgattccccccccccccacaattttatgaaaatgcgagaaaaagaaaaaagataaaggctaattcgccaaatcttcgtttcaaacgattattctgataagaaacaacccgaaaagcgtatcaattagtcaatttaatagggtaaatcttggaaaattaaaaaaaaaatcccgaaaattctccaaatttttcggtacccacttctcgacatgcccactctgaaaactccccctgctctccaacattgaattattcgcttttgtctgcgaatggcggacaaaaaatgttcgtccaattttaagtatattattttttcccttggccatgaaaagttcagaaattaaaaaccatctgatcatttaatcttagtgaacgatctaacattaattgaatgtttgatgatcctttgaacaaacgcaattcacacttttatgaaagagaaatggaaaaagaaaggagaattctttttttaatttattaaaattatgaattacattttcttgaatataattttgtcaaataaaactatgagtatgctcaagaaatggactgtcctcgggaaaatgcgccctgttaacgcctttttgggattaaattcatgaaaatttccggcggaatttcgttggttattacttttggtctgctaaaaaacagtttcctgttttcaaatgggtttgagtgagaacgatcgtcccaaaatggcctcttctcgtcccggactgactaatgctttcttccgctgccttttttatatggcggcgagcgcagcgcaaagagtcgcgggactttggcaaccgacgggtgggccgcgtctgccgtcatgtgcacttatcagtcgtattaccacgattcttatctcgcggcggagttcgagaaacggagagccatagcatatttatggaccatggggacgaaacgcgggaccattgggcaaatggngcgggggaggagcagcgaa

SEQ ID NO: 34780 - DNA, 1440 bp, Heterodera glycines
  unsure (1)..(1440): unsure at all n locations
tctagaagtctaaataaatttaatctnttggataatataaagttttacataaaatggataatgaacaatgagaatgataaatcgtaataccaaaggataaaaatcactcgtaaaatcaaaaggtatttattaaaactcaaatatcatattaaaaaaaattatcgtattttataaatttaaaaattttaattattataacaaataagtatgtatataaaatttgggaaataattcacgcaatagcatccaatgatataaagaaaaacaattaagaaaggaattaatataataaaatagtagatggaagcttaaaatatataattaaaaaaatcaaaaattttaattcattaattaaatccaagtttaaaaaagaaacacaattgcagtagtatggatattattaaatttatgttggaaaaaatataaatgattataaacatatttttgctaaattatatctaattcaattatataaactcattcatggggattttttgataattggtaaagttttgaacctttgggtattttggaaaagaacaaaatttgtccaaatttgcagaaattttcgacatgatttcttttctctttcattcttccaatgtttattaccaattttcctaaatttgcttattgcctttgtttacccattattcaatggctacaaacttttttttatacatgcattttaaaatttcatttctctgatttttgtttattcttcacttttttacttcttaaattattgtgcgacaaaaacaaaattggtgtgaccacttttctaattttttgaaaaattttaaaagtcaaaaattgtttcaatggggattttctggcactttgaacacgagtctgacatctaatcgatcaatttttaacacaaaaaattcttataaaatcgaaagttcaaatttcgttttttttcgtctaaaaaagcttaaatacacggaggaatactgaaagccgtcactctatttaatcatgtttttgacttttaaaaattaaaaaaattaagaaaattgtattatatcatctgaactagtacgcatttttcaattttcacttattggaaaattaccccttttattgatttttaagattaaataaataaaatttttcaaaacgacttaagaaaaaatttcaacattgattttggaaattttttcagaaaccaattaaaggcattttaattccgtgctgaagcatttattaaaaactgccatccttgaaaattaaaaaatattttaaaaatttcgagattactttcaagaaatttgagaaaattaaattttcaaaaaactttatgaaaaattcttagagaaaattagaattttctaaagaaatatttctaaaataaaaaatctaacacataaaaaattcataactttgctcaacttcaaccactttaatatttcatggtatcattcaatatttaagtgt

SEQ ID NO: 34781 - DNA, 1051 bp, Heterodera glycines
tagtcattttttctgagatataagataaatttaaaaaattctctgtgaaattaaaatggcgattgcgcaccgccccttcctatcatgctcgagagcatttgtaacgtataaaattctcaaaataagagatagtcatttttcttggatataagataaatttaaaaattctctgagaaattaaatggcgattgcgcaccgccctccctctcacgctcgagcgcttttgtaacgtataaaatttctcaaaataagagatagtcatttttcttggatataagataaatttaaaaattctctgtgaaattaaatggcgattgcgcaccgcacttcctatcatgctcgagagcatttgtaacgtataaaatttctcaaaataagagatagtcatttttcttggatataagataaatttaaaaattctctgagaaattaaatggcgattgcgcaccgccctccctctcacgctcgagcgcttttgtaacgtataaaatttctcaaaataagagatagtcatttttcttggatataagataaatttaaaaattctctgtgaaattaaatggcgattgcgcaccgcacttcctatcatgctcgagagcatttgtaacgtataaaatttctcaaaataagagatagtcatttttcttggatataagataaatttaaaaattctctgagaaattaaatggcgattgcgcaccgccctccctctcacgctcgagcgcttttgtaacgtataaaatttctcaaaataagagatagtcatttttcttggatataagataaatttaaaaattctctgtgaaattaaatggcgattgcgcaccgcacttcctatcatgctcgagagcatttgtaacgtataaaatttctcaaaataagagatagtcatttttcttggatataagataaatttaaaaattctctgtgaaattaaatggcgattgcgcaccgcacttcctatcatgctcgagagctttttgtacgtaataaattcttcaaaataagagataagcattttttttgcaaattaaaataatttaaaaattct

SEQ ID NO: 34782 - DNA, 1169 bp, Heterodera glycines
  unsure (1)..(1169): unsure at all n locations
aggtatgggtcttcaaaattattcacatagaatgacacttaatcaattagtcgctcaagtgattgactgaacatattattatctcagtatcacttccgaaatcaaaagagaagtaaattcttttttgtaggatgtcctgtagattggttttcttgctcctgtcattatatgtgttatgtagcacctgcaattcaacttttcacaacaaagtttaaaggtcgggtgggttgcttgctncgcgtgggcattttgtgccctgtccgctgatcggagtacgtcatcaccggctggtgatcgctggctgatcagctgccgcggaacgtgtgatcagtacaaatgaaaggcgaacacatttaaatccggattttttttgctcgtcgcatgaaaggggtggaaataatcaaaagtgatcaaacggtcacgggattaatcctccggtcttgcgccatgcattattaccaatgatggttcatcctaattttgaaaacgatgatgatgaatttatgttccctgtttttgcgatttgttggcgcagaggtaatttgcattcatttgcgcgacagttgatcagtcactattcggcgaatacaccaaccaaaacagcaaccccgaacaatcgctgcctctgatcagtggtaactttttaattttataaattcaatttttagtcttttgttccatccgtctaccgcctcaaagtgattgattgatctgaacatgaacagtgcagtgccattttataaggggagagcctaggccgttgattctaaagatcacaattgtttttaatttttcggtatatcctagggataaattctctgtcatgacaaaatgccgtctttcaccccagctaagggccatagatagataagggacagaatcatttgtgcctggacacatttagagaaagcaaaaaaatgtatatttgtaattggtaatgatgctcaagatgacgaatttccggagactcgagaccgacatcgcgactcgatcccgagaccaagactctcaagcataaattactaattgtcgcttgataaaccactaaagcacaggaagctaggtgtgggatttaaaacaaatttttaaataattgcatcattatttaataaaaaaaacacaattatattaagtaaaaaattgatttgaataatcctactggtgagaaa

SEQ ID NO: 34783 - DNA, 841 bp, Heterodera glycines
  unsure (1)..(841): unsure at all n locations
ggggactgccccgaaaacaaaaaaaatcgattttttcaagtgtccgtttaggggtactcaaacaattataggggagcaaaaatccaacgcagaattaaagtacaggctatagggaagctattccggaaggattcggtctccccataaatctgggcgcatcggttcggggggactgccccgaaaacaaaaaaatcgattttttcaagtgtccgtttggggtactcaaacaattatggggagcaaaaatccaacgcagaattaaagtacaggctatagggaagctattccggaaggattcggtctccccataaatctgggcgcatcggctcggggggactgccccgaaaacaaaaaaatcgattttttcaagtgtccgtttggggtactcaaacaattatggggagcaaaaatccaacgcagaattaaagtacaggctatagggaagctattcccgaaggattcggtctccccataaatctgggcgcatcggttcggggggactgccccgaaaacaaaaaaatcgattttttcaagtgtccgtttggggtactcaaacaattatggggagcaaaaatccaacgcagaattaaagtacaggctatagggaagctattcccgaaggattcggtctccccataaatctgggcgcatcggttcgggngggactgccccgaaaacaaaaataaatcgattttttcaagtgtccgtttggggtactcaaacaattatgggggagcaaaaatcccagcgcagaattanagtacaggctatagtggagctattcccgaaagggatcgtctccccataaatctgggcgcatcggntcgggggggactgcccc

SEQ ID NO: 34784 - DNA, 167 bp, Heterodera glycines
aaaatttgccttataaattagctgaacgtattaacattgagttaaaatatgccaccattgctccttttgtcattgcttttcttttgctttcctccacttcgttcattggttcgttttttggctttttctgtcacttgtgtttcaagtttttttctcttaggttgacg

SEQ ID NO: 34785 - DNA, 928 bp, Heterodera glycines
cgatatttattctcatgggttcttgggaaagtactcaggacgtttttggatttttgtaaaccatcagctgatataaagaaaagcattgttgtctgtccttttccaattatattgccatttcggcatcggtctaacaaagctgcgcatggctttgggaaattcctcaggaattaattttcgttgtctaaagaaatgcgctagtgtcgggcattttgacattaaaaagccattaaggcaccgttgtagcaatgatgcacgtggtccttggaaattcctcaggaattaatccctgaatttcttctattttcttatcactcacaaatcactgtgggaaaattaagatgattctgatgattagcgttcttgttcgattttggcgctagtgcgatatttattctcatagttcttggaaagtactcaggaagtatttcgatttttgtaaataaaccatcagctgatataaagaaaagcattgttgtctgtccttttccaattatattgccatttcggcatcggtctaacaaagctgcgcatggctttgggaaattcctcaggaattaattttcgttgtctaaagaaatgcgctagtgtcgggcattttgacattaaaatgccattaaggcaccgttgtagcaatgatgcacgtggtccttggaaattcctcaggaattaatccctgaatttcttttattttcttatcactcacaaatcactgggggaaaattaagatgattctgatgattagcgttcttgttcgattttggcgctagtgcgatatttattctcatggttcttggaaagtaatcaggaagtatttcgatttttgtaaataaaccatcagctgatataaagaaaagcattgttgtctgtccttttccaattaatattgccatttcggcatcgggctaacaaagctgcgcatggcttt

SEQ ID NO: 34786 - DNA, 647 bp, Heterodera glycines
agtcccagtgattgaaagcctgagaattgagtcccagagattggagtgccggagatttgagtcccagtgattggaaagcataagaattgagtcccagagattggagtgccggagatttgagtcccagtgattggaaagcataagaattgagtcccagtgattggaaagcataagaattgagtcccagtgattggaatgccggagaattgagtcccagtgattggaaagcataagaattgagtcccagagattggaaagccggagatttgagtcccagagattggaaagcagaagggttgagtcccagtgattggaaagtcataagaagggttgagtcccagtgattggaaagcataagaattgagtcccagagattggagtgccggagatttgagtcccagtgattggaaagcataagaattgagtcccagtgattggaaagcataagaattgagtcccagtgattggaatgccggagatttgagtcccagtgattggaaagcctgagaattgagtcccagagattggagtgccggagatttgagtcccagtgattggaaagcataagaattgagtcccagtgattggaaagcataagaattgagtcccagtgattggaaagcctgagaattgagtcccagagattg

SEQ ID NO: 34787 - DNA, 1504 bp, Heterodera glycines
  unsure (1)..(1504): unsure at all n locations
ataaaattgctgcttcattttattttgtttcttttaggtataaaaaaaggtattaattaaaaataggaaattttttggaaaatggagcctatgagactgaaaggagttaaagcctctgtttttggtctgtgaaatttctggcattcatttgaggtcttggccttgaatttcgtacaaattatgaaattaagtaaaattgcattcaaaacaaaaatccttttcaaggtggtaattcgaaaattatttggacaatataaagcaaaaaatttaaaaaaacatcgaaaattcttttttctttaatttttttttacttaataagaaaaaggtatgacacaataaattcgtttagagagaatttaactcataaaaatgtaagaaaaatttttgagaattattaggctaaagcgaaaacaattcatcaaatgcacatttatggaaaaaaattttctgcccggagaaattcatttacaaaattaaaaacgctttttgctgtaaaaatagtgaattcagtcagtcatcagtgtcattggcagcagtcatcagttgtcacacataaacataaataaccaaaagtgatgatgatgatgatgggtgaaaaatgaatgttcatatgtacatacaaaaaaccaaaattgtatagtttggtcagggatgggatccgtccttgaatggcaaggacgtccttgaaattgggccctctttcttgaaaataaaaaatgtaaattttaaatgtccttgaatttcatgaattttccccactatgtccttgcaaatcggcatacccgtccttggaaaccgacttcggacgataccatccctgagtttggttaatggatttgagagaataaattggatgaacgaaatgagtaaaaatggacgaaacgaacgaaagaatggtggggcacatttggagggggggggggggatggcattggccacttgacaccaaccccaccaaaaattggtggcacaaaaagagaaggcgtgggtggaacaatagcatagaaaaattatatgaatttgtaatgattagagtgtggattttagttattaaatttttttttctgcaacattattttgatgagatatgcacgaaaagcatatttttagtccgaaaatgttttattttaaattcgtcactaggatattatgtacgtcactattttggcgtttcgtcactattttgaattttttgagaatttcttttcaaagaaaaaacattcccgaaggattaaactttcattaatttattttttaatccaaaaaacacctacacctaaattcttcaaacacagaataaaatttcttattaattaattttaaatttttaaaatccaaaatttaaatataaaaatccaaaaatgatttgccttttttaaataactttccgacttttttagccaacaggaaaagttctttttttttttaatgtaaaggtggcattcttggaatttttgggaaaatccccanaattaacatacctatacaaaatatgcaaaatata

SEQ ID NO: 34788 - DNA, 1336 bp, Heterodera glycines
ttgccccaaaagcgatcagaacagtgaacagaaggaaagggcgctgaatggcactgtttttggcggtgaaagttgaattgtccgacgagtttggagaagtcgcattcggagaggaggcgacggaagcgattggcacagaagcggaagaattcgaaacggaagaagcaaatgaaaaaaagacgtgaaacaaagtcgaaaaggcaaggggggaggaaagaatcagatgaaaaagtggaagcattagaggaggacgaacggggggggggagtgaagcaattgcaaaaaagtgccaacatccgatgccctctcatcttgggcactttgtacacgggctcctcctcgacctcttcccggcgacacctacatttcctgttgcgcatctccagcaatttcactaaacaattaaagaatttatgcaagaaagaaaatataatggtaattaggtaatagaattgtacgggagcgggacacttttctgttttcccagccaaaaagtcccggtttttcaacccaaaaagtcccggtcccggttttgcccaaatttccggtcccgactttagaaaaagcacggcggaaaaagtgttttttagaagcaaaaaagaaaggtcgtcgcccggaaggtacccccacccgcaatccgaaattctaggaccgttcctgccccccccccattccgcaaaacatgaaaaaagacatttcagtttttctgaaatttagcgttttgcattaatggagggcgtccttttggatgcatttccattccttctcactttttcatttggcgcttaattgtccggactgtgcttgccggcattcgaatttttcgtgcgatatccgacactgccattccatcaaggagatgcgcttgaacttgggcccttcgggttggagtaattgaacgtggcctgccgactcttccttaacaaacaaatttaagcgatacaagcaaatggtcgccttttgaattccattgaaaaccaaagggaggaccttttggttgccatttgtaatatgccaggtgggtgaaaaaaatagggatacgatttttaaactctaaaaactgccaatataggtaatctttaggctctaaaaaccccaaaaataggcactaaaaaacatcaattaggtgagtaaaatgaaaaattctcttcaaacaaaataaaatatgtcaattctatattgagataaataatttttgaaaaatattgatcatatggcccagagccgaaaatggccaaaaaaaaattgtaaaatttaaaaccaccaaaacacgatttcatgaatttcaggccactgaggactcaggaaaaatagacaaaaaaaaaactaaaatagg

SEQ ID NO: 34789 - DNA, 916 bp, Heterodera glycines
  unsure (1)..(916): unsure at all n locations
agtaaaaatatttaagcnaaagattcaagaaaaacaaaaaaaaagtttgctgggctgttggaccggaaagataactctaatctcgtttttttttaaaagtttttcacattaattttcaaggatttatgcaataaaatgtgtctctaatttattagttatttttacctgaattattgttgcacattacttttccatggaaaaacataaaaaccataaaaattgaaataatcatttttaatgaaaatttaatgtaaataactaaataaaaattttataaaactgcattttatttatgtgtaagggatgttattttgttgtttatccaactctttccggcttacgtggaaattaaatcagagaaataaataaataaatatggaaaaaacaaaataggaatcaattttattaatttacgtcagttttttttaattaaaacaaaaaatattttgttgtttaatataagcagaagttgcgcttaatttgccaatgtttgtttcaaagttgggttttggtgatcctgattttgtaagtaaaaacgtcgaaagtgagcacatgccaaaaaaaatggcaattatttatcagggaagggtaaaatagatagaaattttaaaaatttctacaaaacccttaacattatatgttaaaaaacatttgtattcagtgtatcgaaatagtaaagtgcattataataaataaattttgagtagtctcgggatagttctcggggccaagatttttgggaaaacatgggaacgggaatgacacaaaatttgggacacaggcccatgattttcaaccgggaccatgattaatcaattttttccaaggaaaatcgaactttattttcattatttttcattttaaaagaaactttgcttcagattgttgcattattccctccgcctatgcttaaaat

SEQ ID NO: 34790 - DNA, 1283 bp, Heterodera glycines
  unsure (1)..(1283): unsure at all n locations
gggcctttttattatgattacaacaaatcagcatgccgtctcgctgatatggtatgtttcagttaagtttacccgatctacaaatttcggcactgtctatttgtaaaagcgaatcaaattcctttggattccaaagtggaattacagaattgcgacggcaaatcctaaatagacaacgacgctttcattataaagctntaagggaggaaaagtaatacgaatatttcaatttcttacttatccgaatagacaaagataggttacacacgaacatttttatagaaattccggctgaaactaaaatccctcttttggtcttaacctatgatttttggcccattatggatgaattaagtatagaaggcgtcgcagaaatacattcatattttctaaattcgggtttcagaaaattaagatttaaaaagaggctgaattgcagatgcttttcaaattttgggtgtatccgaatagaaagaagttggaaatcagtacttttcacgcctataaaattcgggccgaaaaatattggtgtttgtgactagaaaaatagcagatgcatatcaaatgactacagaaaataacagcctccaagaaaataattgctttgcacaagcaatattttgtagagcccatcaaacacattgtgcttataggaaaggcagaattatacaataggggcctttttattatgattacaacaaatcagcatggcgtctcgctgatatgtatggtatgtttcagttaaggtttagccgatctacaaatttcggcactgtctattttgtaaaagcgaatcaaattcctttggattccaaagtggaattacagaattgcgacggcaaatcctaaatagacaacgacgctttcattataaagctttaagggaggaaaagtaatacgaatatttcaatttcttacttatccgaatagacaaagataggttacacacgaacatttttatagaaattccggctgaaactaaaatccctcttttggtcttaacctatgatttttggcccattatggatgaattaagtatagaaggcgtcgcagaaatacattcatattttctaaattcgggtttcagaaaattaagatttaaaaagaggctgaattgcagatgcttttcaaattttgggtgtatccgaatagaaagaagttggaaatcagtacttttcacgcctataaaattcgggccgaaaaatattggtgttttgtgactagaanaatagcagatgcatatcaaatgactacagaaaataacagccctccagaaaataatt

SEQ ID NO: 34791 - DNA, 1096 bp, Heterodera glycines
  unsure (1)..(1096): unsure at all n locations
ccccccccccccttcagagcacgacaaatatttcaacaaaaatttttaaaaattgactagagcaatcgaacgctaacggacgacctaatggaaaaaaatccccgaaggagagaatttcaggttaagttagtcctttacaatggagaaggcctgcaaaatttggagagattatatcgattttagtgcgctaggttcgatgaaactttttaaaatataagcctaaactttttggcctgtttaaaaaggaattaaaaatttttaaaaattttattcatctcccttttgatagaaaaagcatcagagagccttatttaacttttaattaacatttggtgcgtttcagagcagtttctgaaaaaatatttatgaattgattttgctaaaaaaataaaatagtgaagctttaaaaattaataaaaaattttaaattcagaattactggagttagcatcatagcagtgcttttccttgtctttttgatgccctcgcaaaatctggttcgcttctgatcagtttataaaaaaaaagttaagcctaaaatttttcgcatatttaaaaagcaattaaaaatttttagattttttattcatctccctttttgatagtgaaagcatctgagtgcctaaaataacttgtaaataaaatttggtgcgtttcagagcagtttgtgaaaaaatatttatgaattaattttgctaaaaaaataaaatagtgaagctttaaaaattaataaaaaattttaaattcagaattactggagttagcatcatagcagtgcttttccttgtctttttgatgccctcgcaaaatctggttcgcttctgatcagtttataaaaaaaaagttaagcctaaaatttttcgcaaatttaaaaagcaattaaaaatttttagattttttattcatctccctttttgatagtgaaagcatcagagagccttatttaacttttaattaacatttggtgcgtttcagagcacgttctaaaaaatatttatgaattaattttgcaaaataataaataattaatgaaaaagtcagaatttcgaaaaattttaaagacaacaagcgttggcattttttcanggttaagtta

SEQ ID NO: 34792 - DNA, 1088 bp, Heterodera glycines
aagaaaatattaaagtctggtaaaaaaaattttactaaaagttgattttttataaaattgaatttgaaactgatttttggtttaaaaaataatccgctaccaataatgtaccggaaaaattggtaattttctgaattgtaaaatttaagtgaacttttttaatttgacaattttcgttacattttgtggcgtattttcttaatttaatttttgggaaattatgggtggagaggtcaggcagtgccgatgagcgctgccggtttaaaaattaaaatgttcagtgaaacttgttaacagattctgtccaaaaatgaaaaatactttggccaattttgggttttagctgctaaaaaagaagaaaacaattagagaaaagattaataataaattattttacaaaattaaatttggagaattataaagaataattgttctataatgagtaagtcttggaaaatataaaataaaaatgcactaaaattaaaaacaaataaaatagtaataaaaactatcaagtaaggctttaatgtaaagtaaaaataactcttaataaaaaatacaaataaatagatttttagcagaacaataaattcttgtaattttaagaaaaaccgttaaaatatgatatcacaaataatattatttcgatttgtttagcttttatacaaatttacgcaagaaaaattttaataatcatttaaatgattttttattatcttattatgtacaacaggaaaagaaaataaagaataatgtcaagcgtttgcagttcgcataacccaaagtaaaacaaattatgatttaaaaaatatactcactctataaatgattggagaatttaaaaagaaggatttgtgcattgtgtaaataaaaaagtttataataaacaaaaattgctttttattttaatttttttctcaattaacattataaagcaataaaataaaaaatatataaatgaagatttgaaacaataagtgatataaatgcacagatattaaatttcgaaaatacagcattaattaatccttttttataaatgaatgctaaatcctaattttctttatataattctaaatatttttttt

SEQ ID NO: 34793 - DNA, 1418 bp, Heterodera glycines
  unsure (1)..(1418): unsure at all n locations
atattaggtaattgtcaagtgtacaaatcttaaacaaatcaacccatttcgctgtttgtcaggttatcactcagctgaaactcgagaatcagactctcagggcgttgttccacggattttccctcccctcgacgaaacaacctcaaatttcgacttccaaaatgcaccagaattgtctcaacaattgtgatccttcctcaaatggagacaatttgaaagctgtcaaaaaagcgacagaaatacattagcaaaatcgaagaatgttttgtttttttgtaaattgattttggctgtaataatttatttgaccattgcattttgacttttgaaagtcacttgatgaaaatgaccgatttgcgctgtaaattctcctcttctctgattaaagctagacttttgaaacatacaagatttattaggttaattaattgccgttaaatgccctgccaattccatgtaattgttatagataattatcattttgctcgattgttcattggttgtctttcgttccgtctcattttcttattggtcgtgttttcggatgtattccagcaattcctccacgtcttccttcgagcccaaaaagatgggcgctctttggtggatggacttcggctgtatgtccaaaatcgggcatttccccgagtgggccttccccccggcgttttccatgacaaatgccatcggattgcattcgtaaaggaggcgaagtttcccatttggcgcatctgtccaatcgtttgcttcaaatgggcttctcattcgtcgcttttcccacctgtggtcgcgggatacatgaaaatgccgccgtacaacaaagtgcggtgaacatcggctacctcaaaaaacgcacatttcgccagaatattacgccaattctgaattaccatcgacccgacatagcgctgtccgtacgccgatttgccctcttcggggaatttgcgcgatcggatgtattcggtgatcccttgaggttattcattccctttccccagtaaattgtccgaccaaatcaccgacctttggaccatttcttggcatatccctcatttatactgtaaattttgcccttcttcggcactcgcatcgccggatttgtgagaataaattcgccaatgctctgaatggagcaaaaaaaaagggattcgtaatttaattaggatttgtaattagtgattgataggggtgggccaattggacgacactgaccgggtccaaagtgaacccatcgacacggcccggggtcgacagcaccaccatagtggccgacccgtacaatggctttggtgcggttgtgaacaatgaatgaaagtgcgttnggatggttttcttaccgtaccccgcagctaccattttccgtccttaagattttttgatcagttgagaaagtgatttggcattctgcccctttgcct

SEQ ID NO: 34794 - DNA, 1061 bp, Heterodera glycines
  unsure (1)..(1061): unsure at all n locations
gggcaattgtgaagatcattggtcccgaaattttttaatntaatttttttatcttaaaattttttaacacttttctaggggtgttttgaggcgctgagcatgaatccggcctccatttcgaccaattccgaatccctaacccgaacaaaaaatccaaaattcaaaaacaccgaaaacactaagaaccgggatcgagccatttccctaccgccacttccctaccgccatgtccctactaaggcatttgggccatttccctaccaaagtatgaatattaataaacagtacgattaaaacaagcaagaaaattaaataacattttatctgtttcaaatcacggtctcatttcataatttcgagaaattccgatcaaaaaggtaatgataaatagatgattaaagcgctgctcaagtggaaaaacattggggtctccattgttaagtggtaaataattttgaaccatcgtgagaattcggcggtctgattcgcgatatttctttgccttttgcggtggttcttgtccagttgaacacttcgcgaagtcatcatcggataacttttgatcctttagaaggtcaatgaaatgccaaatcgatggatgtgaacaggcaaatgcgcattgcaggcgtctgttcgcggcttctgaatggttattcgtccggtcatcgccttgcaatgttcgagtgtaaacactccaaatgtttgggtcaaatcgcgggcgtgttcggatccatcatgcttaagacgacccgtgtagttcatgatgaacctaatatataattaaagaacaataaatagtaaacaatttgtgagattgtcaatttaccagtcaaggacgggagtaagttcgtcgggaagagccatgtccagagcaatgattccagcctgtttcagcccaaattcagaaattttttgtgaaaattttggacgaggtggaacagacatccgtgcacttcagtgaatgggaagactacattaagcagcagtaattgccgctgtctcgaagtccatcgacacgctgaacgggttgaagtctgccacacagcaacgagcatacgaaa

SEQ ID NO: 34795 - DNA, 865 bp, Heterodera glycines
  unsure (1)..(865): unsure at all n locations
attttatgctaattctggctcttttctaagaactcgtgcgttaaatataaaagcaaggaagtattatgctcgcctttgcagcctctgtacggcactggggccaacactttatgtgtcgttaattttatgctaattctggctcttttctaagaacccgtgcggaaaataaaagcaaggaagtattatgctcgcctttgcagcctctgtacggcactggggccaacactttatgtgtcgttaattttatgctaattctggctcttttctaagaacccgtgcggaaatataaaagcaaggaagtattatgctcgcctttgcagcctctgtacggcactggggccaacactttatgtgtcgttaattttatgctaattctggctcttttctaagaacccgtgcggaaatatacgtgcaaggaagtcttctgctcgccattgaagcctctgtacggcactggggccaacactttatgtgtcgctaattttatgctaattctggctcttttctaagaacccgtgcggaaatatacgtgcaaggaagtcttctgctcgcctttgcagcctctgtacggcactggggccaacactttatgtgtcgttaattttatgctaattctggctcttttctaagaacccgtgcggaaatataaaagcaaggaagtattatgctcgcctttgcagcctctgtacggcactggggccaacactttatgtgtcgttaattttatgctaattctggctcttttctaagaacccgtgcggaaatataaaagcaaggaagtcttctgctcgccattgaagcctctgtacggcactggggccaaccctttatgtgtcngtattntatgctaattctggctcttttc

SEQ ID NO: 34796 - DNA, 223 bp, Heterodera glycines
cttttcgcattgttttggcaatgaatgccaattcagcaccaatgaatcggcatgaacgaggcttttcgagcaaatttcacatcggacaaaattcacgggaattggccaattcaatggatcaggctcatggtggtaatgccaatggaaatgccgaagacgacgaccatttggactatgaatggattttcaacccggtcattccgtcgttggattttatatttga

SEQ ID NO: 34797 - DNA, 756 bp, Heterodera glycines
agctaaaaactgccccgataactctctttgtcgacgagaaaattggtcatgatccaattgaccccccccccccccttctgccggtgcaaaagtaatgcctcaaaatgtttaatcgaccaaaattcaattttatgttgagataaaattctgaaaaaattcctgctaagcttacttttgatctgatcaaaaaagtcttttggaccaacttgatcagatcactccttcatggtgatctgaaaagtcaaaaatggcttgaaattgggaaaatttttgaaaaaaattcctagggggttgggaaaatttttctggaaaatctgagtaggcctatcagaaagaggacaaaattctctaccgaattgcctttggcatgactggttttttttgaggcaatacttttgcacctgactatagttagcaatgaaattccatttaaaataattttatcaaagcagaaaccaatgtgaaatcattcatattattttatcattaaaaagcccaatacatattataaatgtttacagactctcaaattgtacaacacaaaataccaaaaaaatgctaaaatatttaactggtgtaaatgaatcaaatagaataatttactgcggtgattttaacgccccaaatattgattggaacacaaataaattattggcaaaaaatgatccaattgcaaatgccttcattgactttatagaccaaaatcaattattacagcaagtaaaggagccaactcgagaaaatttcattttggat

SEQ ID NO: 34798 - DNA, 928 bp, Heterodera glycines
aaaagtttattgttttgaatttttcacaacttatttaaaaaagccaaaaaatccggatccaattttaaaaacgaaaatagtgcacaaaaagaagccgcctcacggcggggcttaaaagcattgtacatcataattaaaagcgaaaataattttcgtatattttttcacaatttatttcaaaagacaacaaaaaattgataaaatgttgaaacgaaatagtgcacaaaaagggagggatggttagacgaaaagaggaatttttagaaaagaacgcaccccatctgatattcccatttttctgtttcacaactggccaacggcgactgtgctcattgacacgtagttgtccaattaaggtacttggactttccacagtaaaatgtggtgcaaattttggaactgtcccgcctcacggcggggcttaaaagcatttgtagcgcaataaaagttttttgttttgaatttttcacaatttatttaaaaaagccaaaaaatccggatccaattttaaaaacgaaaatagtgcacaaaaaggagccgcctcacggcggggcttaaaagcattgtacatcataattaaaagcgaaaataattttcgtatattttttcacaatttatttcaaaagacaacaaaaaattgataaaatgttgaaacgaaatagtgcacaaaaagggagggatgcttagacgaaaagaggaatttttagaaaagaacgcaccccatctgatattcccatttttctgtttcacaactggccaacggcgactgtgctcattgaccacgtagttgtccaattaaggtacttggactttccacagtaaaatgtggtgcaaattttggaactgtcccgcctcacggcggggcttaaaagcatttgtagcgcaataaaagagtttattgttgtgaatttttcactatatatataaa

SEQ ID NO: 34799 - DNA, 1467 bp, Heterodera glycines
  unsure (1)..(1467): unsure at all n locations
tatttgaaagctgtgaaaaagaggcgaaaatatatctcctcaccatgaaaaaatgagaatttgtgtaatgctcaaaaggcatgatagtaacaggaattatgggtgaaaatggatgaaaaaatgtgaaatctgtatcattgtataatgagataattaaacgatattatgtttaccaattgtgataataaggtaatgaaattaagtgaaaatgctgtcaaaacaggtgaaaaagtcaacatgtcaatgtgaaaaaacataagaactcaaaaaaaaactcaaaacaggttaaaaaaagggcagaacaggtgaaaaatattgtcatagcaggtgaaaaaaagggtcagaacaggtgaaaaatattgtcatagcaggtgaaaaaaagggctgaacaggtgaaaaaatgtcatagcaagtgaaaaaaagggcagaacagttgaaaaatattgtcatagcaggtgaaaaaagggcagaacaagtgaaaatagtgataagaagcctaaataaaatcatatcagatgaaaaaaaggcctgaacaggtgaaaaaaatcagaagaggtaaaaaatattcatatggggtgaaaaagaccagaacaggtgaaaatagtcatagcaggtgaaaatgtcagaacaggtgaaaattattgtaataacaggtgaaaaaagctcagaaacaggtgaaaaacaggtgaaaatggtgataagtgtataggatgtaattcttacgagagtgacgggtattgttgtgtaatgatatgtcagttttttttcaatcacatttcaaaagcggcgttttcgcccgtgccagccaaaaaaaatagtgacagccaaaaaaatccgccattacgaaattcttttcaaacctatcaatcaaaaattttggtcgctcccaaactttcaaattgtttctctctcagtgcggtgacattcaccttctcacctgtcaatcaaatttgagtcttttgggctccatgcgtctggttttcccttttaatttgtcagccatgcaccaaaaaaaagaaaatacgtcccctctctgcgtgcgtgtcctcagctgcaatcacattttcgtcaccaaccaaaactcaaatttttgttctctcgcgttgacatttcccttctctgttatcaatcaaattcgtctttgccagccttcatcttcccttttatgtaccaccccttcttccaacattcaaaaatcgatccgcgcctcgtcccctaattgccccgcccttcacatctgtgccagaaattggcgtcctttcattcactcttcttctctctctcaaaaatcaacttttcaacaaattttcttttacttncacttattcgcctttttattgcttcaattttgtccttttgtcatttttgttttctctctatcctttttttttgtcgtgacctttcgtctccctttgaatttatttcatttcttctcaaaaatgtctcgtttctgccctctcgttgaaa

SEQ ID NO: 34800 - DNA, 1099 bp, Heterodera glycines
gcatgtattatgacggaaatcctcagaaattgatgagtcgcttcatgtccaagcatcctaaatatatctttcataaaaatatcatagcaaaagaatcaaaaccgacttcctttgccatttgattgataattttattgcaatatatacaaattaattttctccttttcgtactaattcgaattttaaaattttgttgccgtaataacagactaccacgacgcgtcaccaatttattttagaatctgatgataaaatcaatgcgatacaaatgattgggttttaattctaagccgttcgattaaatgcctacttcgaatatttgactgttataggcaaaggatttctaagaaaagaatattgtacggttcccaaagagcatgtatttatgacggaaaatcctcagaaaattaatgagtcgcttcaatgtccaaacatcctaaatatatcttttcataaaaatattcattagcaaagaattcaaaaccgacttccttttgccatttgattgataattttattgcaatatttacaaattaattttctccttttcgtactaattcgaattttaaaattttgttgccgtaataaccgactaccacgacgcgtcaccaatttattttagaatctgatgataaaatcaatgcgatacaaatgattgggttttaattctaagccgttcgattaaatgcctacttcgaatatttgactgttataggcaaaggatttctaagaaaagaatattgtacggttcccaacgagcatgtatttatgacggaaaatcctcagaaaattaatgagtcgcttcaatgtccaaacatcctaaatatatcttttcataaaaatattcattagcaaagaattcaaaaccgacttccttttgccatttgattgataattttattgcaatatttacaaattaattttctccttttcgtactaattcgaattttaaaattttgttgccgtaataaccgactaccacgacgcgtcaccactttattttagaatctgatgataaaatcaatgcgatacgaatgattgggttgtaactctaagccgttcgattaatgcctactgcgatatttgatgttataggcaa

SEQ ID NO: 34801 - DNA, 1308 bp, Heterodera glycines
  unsure (1)..(1308): unsure at all n locations
cgaaaattttcaanggaatgaaaggtgatcaattaaaaaaagaaataaataatttttaacttttctcctacccaataaaatatgtattatcaaaagacaataacaaaaacaaataaatttccaagtcgtgaatcgaaaaccgagactctcacacatcctagtaattatttcccttattttattcaaaagaatggataagacaacaaataataattaatattccagaataaaaaatttccaccttacttagtaaagaaatcgcaatttatcacaaattttttaactaattaatgaacccaacaagacaataaattctttttacttcagaaaagggaacacagatataactaaattattaaaaaagaaaagaaatattaacttaaaaataaatgataatttatttcttaatagccattctttaaatattccaaattttgacacttctaaaattagtttaatttgtcatataaataattttgaattattaaaaaatctatgaacgaataatttaacaaacttctacattaaaaaatgacagaataaaacagtaaatttgataaacatccaaaaacaattacttattatttgtctttatttttttaaatataaatatatatattaccgatttaaaaatttatttttaataatacactgataaaaaaagagaaaattcgtgaataaatattcaaaatacataaatatacaatgaattattattttaattattttttattcaaacttttttatcaaattaattaattttttacaattaaaatctaaaaaaataaataaaaaatatttctaaaaggataaaacaataataaataaattattttctgtgatccaattacataataaggttcaaaattaaccctaaaaacagcgcgggaacaccgcaccttcaccgcctgctcacaatcagtctttttcttctgcaacaatcggagtcgatttgctgccagccgaagatttgttttcagttggaagtagagtgccacgggaccgggaattttgggcttaaccgggaccgggaccttttcgggttgaaaaaccgggaatttttggctgggaaaaccgggaaaaaaccgggactagtcccggtcccggtaaaaaccgggaccttgatactcagttgtactcagttgtccgttaccaggtcccggtcccgtggcactctagtttggagtattgagtgccccacgagtaatatattttcgaaaaataatcgcgacataattaaaatttatattaatcctattcgtggtgaaccgaaatttatattttggcaataaaagcgggtctcaatcg

SEQ ID NO: 34802 - DNA, 1234 bp, Heterodera glycines
ttcgctatgcctttttccgcttccttttgctcattaaatgccaatgccatcatttcgctgtttgtttttgcgcttttttgtcttcacatttcgttctcatcccccgcaaaaaacagcaaacgtcaacgcatcatcaggtgttttttgggttttgttttgtccccccccctcttttctaaattttcaaattattcgctttttttttgtcagaattccaattgtccgtcccaaaatgccatcatttaaacattttacaaatcgcagcgtcgtaatggacgcgcaaagtttcctgaagcgaaagtttggcggtctgacaaaacaccggcggaatttgaatgggccaataagtggcaattcgatgggccaatggtcgcccccttccgatcaaaatgagccaaattcgctgcaactgatcgattatggcaatgtccgttcccattcatatcttttcattgtgtggcctcatcctgttcattttcagacccaatatttcggcaccattctgatcggtttccccccgcagcaattccaagtgctcttcgacacaggctcctccaacctggtgaggatggcattgccctgttggcattatgctgctaacggtcactcccttttcagtgggtcccctgcaaagggtgcaatgactcggcatgctcaacacatcgccaattcagctgccacaattcagtcggctgtcaaatggccggccaaaactttgacattgtctacggcaccggctcggcttcgggtgttctgctgcaggacatcgtttgtgtaagaataaaagttagcgattattttggcaccgtaaaagaataattttatgtgagtttggcaatttgagtgtcaatttgtgcacaaatacaactcaaaagtttggctgttcaatgagtgaacctggagacgttttttcggtaaaactaaaagttatttcatgtccaaaccaccctttgagcaaagaatgccgccttcgatggcattttggggatggcgtggaattcaatttcgactgacgcggcggtgcaaccgttggcccaaatatttgaaaatgaagattgcgatgagaaagtgttcgccttttggttggttgcgaaggaatcgaatcgccaaaagcctgaataccaatgaccccatcaaaggctgaacaaagatgactttggggacgacccgcgaggggcgaaaggcggacaaatgacatgtgtgcacagacaaaagccgatataaggtacgaaca

SEQ ID NO: 34803 - DNA, 713 bp, Heterodera glycines
atccatcggcggccaattccgaaccccgggcccgaattcatcaaaaagtcgaaagtccaaattttcgaatttagcaattttggttcaaaaacagcataaaagatctcttttaatttccatgcacttaaaccgattttgaaccaaaacactattgtactttcgaaaatttggactttcgactttttgttcgaattcgggtccggggttcggaataaattttttgggaaattttcttaaaaatccatcccccaaattttttttcttgacaaattttttgttttaaaaatgttcggtatttggtaagaaaatattagaaaggaaatgtgcctcatttacaactgcaatcattgaataaaaattatttttgctcaatttttggctgaaaattatgtcactattttggcattttttcctcactattttagttaactatttcgagatttttcgtcactaaaagtcacgaccctaacgatgacttttataatgcctatttcggggtttttgttcttaatacctaaatgcctatttttgtgactatttcgccatttttagcgactattttcaaggttttcggaaaaatccttaacaaaaatgcaataaaaacgaaaaatacatccctaagaatcaacccaaaaaaaattcagaaaatacacccctaagaattgaaaatttccccaaaaattgattccctaaaatataacttttagtttaaa

SEQ ID NO: 34804 - DNA, 849 bp, Heterodera glycines
  unsure (1)..(849): unsure at all n locations
ctcccattcgtccggctgagcgtgcgacggcgaaaaccaaagcgaatttggctgaccgtcggttggccgtttgttcaccggatacattaaagtgccttttaaggaagtgacaaaagagaaaataggaagacgaacagattaagccggaggcggacatggagtggtggtggacgagctcaccaagggatttgaatttggcactttcagtgataaacagctgaacgaggtgggaggggaaatgccattggcagggtaaacgaagtgatgggaaatgatcaaacccgaaaattggcatcgaaactgatacggtaatggtagacacgacctaataaaggaaggtactgtaggggaaggcgaaagaaacggtcgaatttttatttgtttttaattttaatgcctttgccttctctttatgcactttcatttgaaccttcgtgtcgcagagagatggaaaattggccggggttcgtctccgattccctcaccaaaaatgagccgttaatgcccgagccgagtaactgctcggcctccgcccgggtgactttgccgtggtaccagctgagattggaaaagtcaacccgtggcgtggccatccatgaccaaaaacctgtgtttgtccaaagaatttgccggggcaatgtaaaggcttggcacccatccgatctgtccgtattggctggaggaggaggccaacgaggaggaggaggagccgagcgtggncgagcaagtggccaagttggactggacacttggactggccaacttggcagaggcacaacgacggaccaactgcacttcgcaccactcccctgcttttgttgtangacaaaacgcggacctaaagcgatg

SEQ ID NO: 34805 - DNA, 877 bp, Heterodera glycines
attgaattatcagccaaatgaccatataaagtcccgaccctagacttttaatatggaaaatgctacaaagcttatgtttatgaatgataagcaaagtccccctgctaacattgatgaaatcaatgggtaacaggttggattcgctaactgttcaatgcaaaaatagcattcgatgagctcacactcatcaactgctggacataaaatgtcctttttgaacatgtgtttcgaatccatccaaaaatgaccttggcattggtagtcatttatgaggatttcctttggtagctcataagtgagcttctttacattctcatgaatgtaacagttctctgcacagcagagctcaactttattaatttcctttggaatctttgctttaacgcctttgttaaagcaaagaagtttgcactcattgcattgattggttggataagcatttgtttctgttccccccttaacgggaagagggaacaaacatgctaaaattacagtaaacgccattatttgcaaaatatggcgcgctgtacaaaattgagggattgcccctctttgccttccttcttgaaagcaaggcgtgctctgatcctcaaaacaaagtaataatactttgagttggatcattagccaagcaatggttttacgcccaatagaaaggcttttaaaattgagtgaaccatcacgcttatgctgatgtaaaaacaaagcgtcaatgctatgattgattgctctgttcgatgaggaagaatttcttcccatttattatcaattctattaatacaaatggaaaaaactgaatggctcacaacaccattcatttttatgcaacatccacaaattttcttatctgcgggagttagtttcggtatcttctgct

SEQ ID NO: 34806 - DNA, 348 bp, Heterodera glycines
cgattttatttgctgcattaaaaaatttaaaagttggatagaaatttaaaattctttcctttttattaataaaaaagtatttgtaaaattttataaagtttttttcatgtaaaagtagtgttggcatttaaaaattgtacgttttaaggcttaagtcagcttaaattttgttaactttaaaaaaaaatttttttaagcaaatttaattttcaatggcatcgccctcccccccggaaaaaaagagaaaactttcctccgccgaccaatgcttaatttcttctcctacaattggtgaaaatcagcagcaatcgtcgggtttattagtgacagcttttggaaaacagaaga

SEQ ID NO: 34807 - DNA, 896 bp, Heterodera glycines
ttcccttgtggggtcttttggtgtgtctcctctgcttttggtcagaaattaaattccattttttagcgtttcgtccgcttttccaatagtagctaatcaatcaaacattgtcccctccgctcatcaatcaatcaaaaaaccaatttagccaaaaagtatttcaattgacgcgtttatcctccggcgataatccctccctccgtcgtattattctctgatcatcgatttatttgtgttttgggagtaaaaacagtgcatcattcggccgggggggggggaaatttggcggtgattcggagggaatttcctccgtttgcccctcctcagccagcccaccgcttcagcggcgacagtgagggcaaatggggcggggacaacaaacgatcgaaggggggggggaggcaaagggagggatggggtgagagggcaaccgacgcccccctccccccaccacccggcgggggttgtaccgctaagagatgaaagagcctcctcgttcaccttttttgctcctcgcttcggcacaattggacttttcttgcggcttaatctgaagttgcatcgtcttgagataggaattttgctttttgatggctattattgctaacatgaggagaattttttgaccgcatttttaatgctcaaccgcttcatctcctttctgatgccgatgaattatgatgaggtggaagactttccatgttcgataattaatgtccataaaaccgaatagtcagcaaatagtacaaaagccaatcaattacaaatttcaaaagaagggtgtcaacaacattaatccaataacaacacacactgcatcccggcttttggactaatccccccgtccccctccgtttttcccaaaattttccagtccctaacctaccccagtatta

SEQ ID NO: 34808 - DNA, 668 bp, Heterodera glycines
  unsure (1)..(668): unsure at all n locations
cagtatgcaatgaggattttgtattcatataattttcagtgtttttcctttatttacctattcatacctatcagggatgacacagatttccgacttccgaaaaattttagatgtaggaatttcgattttttgaccaatttcaaaacccggacccgaattcgaacaaaaagtcgaaaattcaaaattttcaaaattcacttttatgttcgtacctgtataaggaaatttttggaaatttcttttgaagttttgccaattaaaatgttttattttaaattgtaaatttatttttctatttactttctacttaatttttacttccaaataaaatttgaaatcataaaatttggtcattttgaacaaaatcttaaatttatcgctttttctttttgctaatcctaatattgtaattacttaaggtgcaaatgaccatttccatttttccgcgtatttgtccctcttttcctccttttctccggcattttccttcttcgtccgctaattcgctcgcttttcgtcgccacttttctctgaccggcccccgtcacagctttttcttcgattatttcactanagttcgattttgaagttataaaaaaggaaaagtcgctaaacgagtgaatccaaaggatttagcaccccaagggacatgcccctctccgcgacta

SEQ ID NO: 34809 - DNA, 895 bp, Heterodera glycines
tctgtcgacaatcccgtggaggtgcccgacgttgaaccaacggcgtttaaagtgatgctcagtttcatttacgcggacgatttgagcgaattggacggagacaacgcaatggcagtgctttacgcgggtcaaatattttaatttatatggaaattttaggactatttttagtaaaaataccgtttccgtcccttttattttgataataattgtttttaagctagaaagtacggcatcgatgcattgatcagtcattgtgtgcaaattccaattcaaaatctgcccaatgttttcttggccattgcccatgctcgtcttttcagcacgggggtgggaacaatgattattttctgtctggatatgggcttggttattctattaaattttttttaatactttgatatgtatactccccccccctttttttgcaaaaattattttacaaaaatgaaaatatactcctttcggttttgtgaggaaaattagtcgaccgcaagaggaagggcagaaaaattccaaaatttttcacttgcatcgcctataacaatcatacatttgtcttaacagagttggcttgaaatcgcaaaacatcgacattaacacaacaatgttatgctatttaggactttgctcaccaatgtttgcgttacatatgtcaaaatgcggaaacattgttggaatctgaggaattcttgcaaatcgatcagaattcactgagtgaaatttttaacgcagcgatcagttggtgatcaggcagtgaattagaaatttggaaacctgtaatttgcatttttattttattttattgtaagtgatttggtagctttctaagtaagacataccgttggggggatgaaaagttccgtcaaaatgccatcgaatgttcctctgagaa

SEQ ID NO: 34810 - DNA, 1007 bp, Heterodera glycines
taatgccaaaacaaaacgaaatcgttttaaaatattcctttctggacttgacttggtttcttgatatcgaagctgttttctacgctatttctaaaacggttataccaaaccccagatttttgaatccggttttcagaaaaaatgccttgtggtgaaaacaatatttcacatttcactccataactttgtgagttcggcacggatcgagaccgggataagaccattggaaagagcagctcgagctctacaagaaggtatggaaagaaaaaatagttatttctgggactttttcagaaatcagaattaattctccaatgtggcccaaattttaggcccccagccacagccccttgcttctcccagttttaagtcttggatttgtcaaataaattcaagacttcaaattaataatcaaaaattctcttaaaatttttttgaacccaattcaaaaaaggaaaaaaatttgcagtcaaaaaattattcgaatttctccaattttgtttccataatttccgaaagttattcggtatcataatgccaaaacaaaacgaaatcgttttaaaatattcctttctggacttgacttggtttcttgatatcgaagctgttttctacgctatttctaaaacggttataccaaaccccagatttttgaatccggttttcagaaaaaatgccttgtggtgaaaacaatatttcacatttcactccataactttgtgagttcggcacggatcgagaccgggataagaccattggaaagagcagctcgagctctacaagaacgtatggaaagaaaaaatagttatttctgggactttttcagaaatcagaattaattctccaatgtggcccaaattttaggcccccagccacagccccttgcttctcccagttttaagtcttggatttgtcaaataaatcaagacttcaaattaataaacaaaaattctcttaaaattttttttgaacccattcaaaaaaaggaaaaaatttgcagtcaaaaa

SEQ ID NO: 34811 - DNA, 836 bp, Heterodera glycines
attacattcagacgaagaaccaaagttagccatcactttgctttctatgagctgaaaaggtttaatcagagagaacaatggctaacaaaaagccgaaaaaagagtgaaagggcggaaacgaattttatctgattcccaacgccccattaattaattaattaccattgaatgttttcattatcattgtgaaaagactcaaacgcaaagaatgcaccgccaaaagggtaaatttacccgggaaaatccccaacaaatgagaaaatgatggatggctggggaataaacaatcgaatgacaattaatgaaaaaccaccaccttttgatttgggattgcaattttattaatttattttaaagaccaattattgggctaaaattcattcttttacccctccacttaagcgctgccggcaaatttgttaattgattagcaaaaatggcatttatggagatgttaataacaaaaatggcatttatggagatgttaagggagtgtccaagaagttgattagattttaatgatttatattagctgactccaaaatcagcagcacattcccccccttaaaaactcacattccccggggacagtgaaaccattcttttgggctgagcaactcgtgtagttttgctgattgtgagatcaaataaagcactccttaaatgcattttttgatttccctttaatggaacaaaaattataaataataatattatattatatagtccaaaatgacaaatgaaaatatcgaaagaaagtgaaaaatgaacggaaagaaaacaaatcaatgtttatgaatgataatgggggagggaattggagggggggggggggg

SEQ ID NO: 34812 - DNA, 824 bp, Heterodera glycines
cctcctcgtccctctttttcttcctcctctctccattctcctcctccctgtttttcttcctcttcatcctccttcatgtttttcttcctcctcctccctccctttccatttatccatccatccctttgctcatccccaccatctgtcattgctccatgtttcccctcaccttccccccccccctctcccgtcattttgcgtgtcgctttctacgccggtggccaagacaaggagaagcttattgggggaagggaatgaatgggaggagcctgggcttgacttggccctgcctccatcaaatttgcgttcgtccaatttggccaaccttcgcatacagcggatgaaaaacatccacccgaattgggccaaatcgattaagccataattatctctccaaatcgaagaatttttaagcaatcgtcgatcgattctattattggtgttgtggacaatttgtctttatacagaagaacaaaattcgtctagtaaatcccaaataaaattgagggtaaacttttattccaatgccctcagaaagcgttagggaattggccaatcccaaaacgactgctcttccgttcccgaggacaacgcaccatcccgagaacgactgactcagtcccgatctcgtctccgtctcccatttttggcactgccgactcagtccgtcttcttctgatggactgtcggcgggttctctctgtgttttgtcccttcctttccatctcttcgtcatttgcattgctcaattccgatgctgctgctgctggcattggcacttccaatctctcctctgctcaaccgatcccttcgcttccctcccc

SEQ ID NO: 34813 - DNA, 929 bp, Heterodera glycines
caaaaaataaataaattagtgaacctttaaaaattcatacgaaatttaaattcataggtactactgctaaatcaacgcagagacgcctttccttgacctttttaggctcctgcaaaacctggtgcacttctgatcactactcgaaaaatgagtaaattaattttcactaaaaagttaagcctaaactttttggcctgtttaaagaggaattaaaaattttttaaaatttattcatctccctttttgatagaaaaagcatcagagtgcctaaaatagcttgtaaataaaatttggtgcgtttcagagcactttctgaaaaaataattatgaattaattttgcaaaaaataataaataattaaataaaaacgaaagactctgattttcgaaaaaatttttaaacccagctagctcggcgctcatttcagtgtaagttagtcctttaccggggagtttccctgcaaagtttggtgcgcttctgatcagtttctgaaaaaaaaagttaagcctaaactttttggcctgtttaaaaaggaattaaaaatttttaaaaatttattcatctccctttttgatagaaaaagcatcagagtgcctaaaatagcttgtaaataaaatttggtgcgtttcagagcactttctgaaaaaataattatgaattaattttgcaaaaataataaataattaaaataaaaacgaaagacttttgattttttgaaaaaatttttaaaccccagctagctccgcgctccatttcagtgtaaagttaagtccttttacccggggagtttccctcgcaaagtttggggggcctttctgatcatttttctgaaaaaaaaaagttaaacccaaaactttttgggcctgtttaaaaagggaatttaaaaatttttaaaaatattttttcttcccctttttttaaaaaaaaaa

SEQ ID NO: 34814 - DNA, 903 bp, Heterodera glycines
  unsure (1)..(903): unsure at all n locations
acaaatgcttataaattttcttagaattttttgcctggacgtcacagttcttcacacttaccacaccagcattatttttttttaattatttttttcattttatcacccaacgttctagactgatcagaagctcaccaaattttgcagggaaactgctgagaacccttcaaatgcttataaattttcttagaattttttgcctggaggaacacagttcttcacacttaccacaccagcattatttttttttaattatttttttcattttatcacccaacgttctagactgatcagaagctcaccaaattttgcagggaaactgctgagaaccctacaaatgcttataaattttcttagaattttttgcctggaggaacacagttcttcacacttaccacaccagcattattttttttaaattatttttttcattttatcacccaacgttctagactgatcagaagctcaccaaattttgcagggaaactgctgagaaccctacaaatgcttataaatttttcttagaattttttgcctggaggaacacagttcttcacacttaccacaccagcattattttttttaaattattttttgcatttgatcacccaacgttctagactgatcagaagctcaccaaattttgcagggaaactgctgagaacccttcaaatgcttataaattttcttagaattttttgcctggaggaacacagttcttcacacttaccacaccagcattatttttttttaattattttttgcatttgatcacccaacgttctagactgatcagaagctcaccanattttgcagggaaactgctgagaacccttcaaatgcttataaattttcttagaattttttgcctggaggaacacagttcttcacacttaccacaca

SEQ ID NO: 34815 - DNA, 1107 bp, Heterodera glycines
tgaattttttttcagtgggaggtggctgagaatgccgggcacccggtagcatctgtgtattactactatacgatgaaaaatatacggtaatgttttttcgacctgacgatccgctgacatccatttttttcaggtttcgtgcctccatcacagtgatagtgatagttcctgatgcgggtcggtatcgaattgaaaaacacaggtcgccaagacgcgattcctacaaaaaaaagggaaaattaaaaaaaaaaatttagtcgcccaaaaaaacattaaattcaggaaaaattacgagcctcccaccccccccccccccccgtttttggcatagtaaaaaaatttatcgaaaaaatctgaaaataaagtgacaatttttttcctggaaaatcagtaaaaataaataagatgcaaaatttaaaaaattttaatgcaaaaaaaaaaaactcaaaatttacaacaaaaaatattcatactttcccagtaaatttgtttttggttgggaaaaaaggctcaaacaatatatttttttaaatttctcaccaaaaaaatttttgccttttcaaaaccgaaaaaggaaaaatattttataacctcaatctggctaaatatgtatatattttgtaatttttgtctggacaaaaaaagatcaatagcatgagatgccataaagtgagtaaatagcttcaaatatttgatgtaggttttatagaaattatttttctttccttatagaaagaaaatagagtcattaatggaaatatactatttgggtcgtgtcattccgtctcaagaaagatcgattcgaatttctaaatatattagtagggtggcgtcatagcgtcacaaaaaatatcgattcgagatatcgggaaaatgatcaaaatggcaataaaagcttggtgtaaataaatttaagaaaattatgcaataataaaatttgagatttttcatcacttttttctttttatttatttacttttatctttttcgaaattaaaataattaaatagattctatttaccatttaaaattgtaagcgacaaacaaaatttaattcaaattgtacattttttaattaatagattgttttgttcttttttattgaaa

SEQ ID NO: 34816 - DNA, 881 bp, Heterodera glycines
  unsure (1)..(881): unsure at all n locations
ctaatttaccccagaaaaatatttttcacacccttntttcgatcccaaaaaaatttttgaaaatttctagggggcctagctcgaaaatttttgaaaatttccctacatatagtataccattagatagagcttaaaaagctctacaattttgctctaaggcattttttgtctaaaaccgacgcctgacgagttatgggcccgggactcaaatgtcccgctcaggccaaaatttttttctatttccgggaaaaaatcgaaatttttccgaaaaaaataccagtcgatagagctcgaaaaactatgttttggaagtggtctccgtttctctgggaaaaatcgttaaaaaatcctaaaattcaaaaacccgaaaaccgttttttaggcctaactcgaaaaattttgaaaattttcgaaattttaaaatttcaaaaaatcgagctttgaaagctctacaataagttcgctgaccaccccccgctcagatcaaaccctggcgcggtattcacctggtactgaagtgtactttttgagcacgcttcagttgccattttttgcaggccaggggtttgctcaaaaaaaattttaaaaaataccaccttgtagaggacccttaggcggagtgccctttcagcgggcactttttgattcgagttttacaaaaaaagttaggggccttcaaatgcaaacaaaagtgacaaatcagtccccggtactcagttggcgctcggatcaaaaaacctatagttttcccgaattctcctcaaaaagttgtaagacccttccaccactttcagggcgctcccggccttcggccgggagattttgttttttgaaacgaaactccttgtcaatataacatatatagtaataaatagccgacg

SEQ ID NO: 34817 - DNA, 902 bp, Heterodera glycines
ctggttcacatcattggtcccattaaaaaaaaaggcaaaacattttgttttttcgattctaagaactactcgggggatatccaggacgctgatcgcatatcagacatcagtattgtcatataattcatataatctatactttttgtatcgcagattaaacgaccgaaataagttttatttgctctatctgctattgacaggactttcatttcaaaaattctcatcaaacaatatcagacctaaaaaccaatttcaactctgcaaaattaggataaaatacaaaacgttgtcccaactagggctccaatttatagttttttctctattttttcctgagctccccgtggcctgaaatgcacgaaaaacatgttttttttcggctgttattaaactacttttcgtgttattagcaactattttctagttttttatttttagcaactaaaaaacaataaaatttttgaaaaaaactattttcaactattttggcgttttgcccagaatttgttaacaaaaatgcaataaaaacgaaaaatacacccctaagagtcgacttaaattttttcaaaaaatacacccctaagaatcgacccttaaaattttcaaaaacacacctctgagaaatgaaaaatttatcaaaaattcatctccaaaatttatttatttatttattacaagaatttgtgattttaaaaattattattctcaatactgatttggcctaattttttcctttttttgaacacatttggcattttaccccccccaaattcggaactttttttgcaactattacccatttttaccaactattttggaggttttttaaaaattaaaaacaattattttggcagtttttagcaactataaaacgaacccccaatccccaccgttttaaaacc

SEQ ID NO: 34818 - DNA, 1390 bp, Heterodera glycines
tgctgcgttaccgagtacaccataatgtactgtttgcatatggtaacaaagcaaatattaaatacgcactcaagtacccttttaaagggccaggacattgttatgtcgagtgcaaacaagagtccggcaataaaatcggaattgatgagccggctcaatatgccaagatgaacttccgtggtgcaacggaagcatatgccattgttcattcactgccatttgccaaactttcacatcaggttgtcaaacttagcatccatatgcctaatcaacaaccgattgtgtacagggcttttcagctggtgagcaaagctcaacaaatccagcaaggcgaactgccagagacgcaatgttctgcctattggaaacaatggcaaaatgaatggaagcatgatccgaagctcaaggacatgctttttgaaaaagtccctgagcattttatatgggcaaaggacaaatggaacaaaaggaaatataacctaacaaagagaccaccaatcggtcgaattgttcctgtacccccatcggacccggaaaggttcgcgctctattcacttatgcgtcactttcctggagacccagaccatcttaagatggttaatgggttgctttgtacctcattcactgaggctgcaataatgcatggtcttcttgaagacgacaaaatggagagcttctttgcccgtcggattcgtgaggcccaactcatcatcattgatgagatcaccatgcttcacaacacggtgattgaggtcatcgaccgagtgtgcaaagagatggcaattcgccagcacaaggatctcctcttcggaggaaaaacggtcattttcagcggtgacttcaaacagtcgctgccggtcgtgcctcatgaaggcttaaccgctcaggtaacagcctgttttcaaacgtctccgttgtttggtcaattcaccacgatgaaattgaccatcaaccagagactgggccaaggtcagcaagcgtacttgcaaatgtgccgccaaatcgggctcggagaaaccggagagcacttctggattcctccgcagttcctcgttaagagcaaggaagagctgatagattatgtctatcctaacttccaacaactccttggcaatgacaaagagctgctcaatcgtttgattctcgctccgcacattgacacgtgtgatgaagtcaacgagatcatgatggcgaatgtgccaggtcaagtgcgggaatacttgtccacggataagccccttgacgaccgcccactggacatcgatgagatcgagtccgaagtggctgcgttgaaccggcgcacagactcgggcatgcccccgcacagtctccggcttaaagtcggacttaaggggccttcttatcaatagaagtgataaggaaggactga

SEQ ID NO: 34819 - DNA, 873 bp, Heterodera glycines
  unsure (1)..(873): unsure at all n locations
ttttcgggaataactcgctgggtgttgcgctcagcgtgttggcgccgctgaactttttgtacagcttgccgagctctatcttgtcaattttttaaatttctgaaattttcagaaattttcgagctaggccccctcatcacttttgaggtttttgaattttagtattttttgcagatttttctcggcaaaaacaagaccactttcaagcaaccgtttttcacgctctatcgattggtggcattttcagaaaaatttttcaaaatttttttggaaatagaaaattttccggaaatgagggcttatttcagtttggggtctataagttgtcaggagttgattttagcaaaaaatcttctttgacaatttttgtagggaattttaagccctatataatgtgctttatatcatctcattatcacgagtttaaaaaaagttataaaattaattgtgatttttaaattcaaaaccataggggggaccccatggttttgcatttcatgaaaaatttttttgctcctaaattagccaaaatgcatttttatggcctaatttaaggtgctgaacttgattatatactttattttgggtttcagacagttttggtaggtgtttaaaattttttgaaaaatcggcaaaatttgagccccggaaaatcccagtgaaattttgaaaattcataactctcttcgtttttggtcaaatttagtggaataaagtttgaaaaataacaaaaaattaggagaattttatgagatttatttggaatttttatcttccaaaataaaaaagttatttnagaatttntggaaaaatttgattttttagaaaaaaatttntaanttgnttttgaaaaagtattttataaaaataata

SEQ ID NO: 34820 - DNA, 250 bp, Heterodera glycines
tcccatttactcatttgctgctctctctctgcttgccctttccattgccccccacccatatctcttcatccgccctttcccatccccggaggggtcggtgcctgtccgcgccggcctccgcattgccccacgggcggtggcggcggaggccttcccccgctgcaccaccacctcattctttgcatcccccaactacacacacacacacacacacactgaatgagggaggggagggagtgggcgtcggcgg

SEQ ID NO: 34821 - DNA, 845 bp, Heterodera glycines
  unsure (1)..(845): unsure at all n locations
taaaaattgttttttaaaagttttttatcggtaataaagataaataaattttattcaaaaaattaaatccaaaatatgaaaaataaatttgatcaaattcttataagtttgctatctatttttaaaattgtataatatttaaaaataaataaaggtgattaagcctttgacaaataatttaaaatcaaatttatttaaaccaattttattctgaaatatacatattttattttttattttaaaaatatttacgaatgatttaataacatttattttaaaatacacaagaaaaaattgtttcatttaattcaaaatttttaatatttcattaaaatatattaatcttattgagattttattgtaaaattaaaaattattttcaaattaattttttattgaatttaccaaatttattttaaatcaaatttcaaaaaattcgtattgaaagttccagtcgacgcttccgtcgcgaggacgcgccgtcgccgtcgctgaatttggtgacagccgccgccaacggcatggcactccaacagcagctgtcaacaaatgcaacgacgacgccaaggcgttcatctgcgtcgttgacaaacggcacaagcgccgccggcctggtgggcaccacaaattgttgcggtggagctgttggcggaagcggtcgactaataatgaatggtcagttttggatggatttgtgccattggcatgaatcaaacaaatgccaaattttttattggcatttataaatttttanaattttgacaaaatctacgggtgtagattgtgaatgatgctcgagagttcaatcccttggatacacgagtatacaatttgtcagctttttt

SEQ ID NO: 34822 - DNA, 707 bp, Heterodera glycines
ttgtaccatacaaatgttttcagcatgggcagaggggcgcggagagcaatgtccattatattctacagggatttttatatttattctctatgccagaaaaatggctatctcttttttacgagaaattttgtaccatacaaatgttcccagcatgggcagaggggcgcggagagcaatggccattctattctacagggaatttttaaatttattctctatgccagaaaaatggctatctcttttttgcgagaaatttttcccagcatgggcagaggggcgcggagagcaatggccattctattctacagggaatttttaaatttattctctatgccagaaaaatggctatctcttttttgcgagaaattttgtaccatacaaatgttcccagcatgggcagaggggcgcggagagcaatggccattctattctacagggaatttttaaatttattctctatgccagaaaaatggctctcttttttgcgagaaattttgtaccatacaaatgttcccagcatgggcagaggggcgcggagagcaatgtccattctattctacagggaatttttaaatttattctctatgccagaaaaatggctatctcttttttgcgagaaattttgtaccatacaaatgttcccagcatgggcagaggggcgcggagagcaatggccattctattctacagggaatttttaaatttat

SEQ ID NO: 34823 - DNA, 1391 bp, Heterodera glycines
ttcccaaaaaattttttttgaaaaaagcgggccctcaaaaaaaggtttttattgattttttaaatttggaaataaaatttaaaaaaagattttttgttttataattttaattattaaaaaatttgtagaaaaaattttgccattttgcaatttttttaccttttcgcatttcgctttttttcaatctcgcatttttcaattttcgcaaatttcgctttttatttttcaaatttggcccatccctgctaaaaagtaattccgtttttgcacaaaacttcccccctcccattcactattgatataaaataatgattttgaggtctgctcgcaaaacaatccaaagcctggaactgttggatgaaataagctagggaaaatgcatggcaaaaacaacacaatgtatgcagcagttgaccagttttatttagttttttatcaatttttacattttcaggaaccacagtatgagctggagtgtttgaatagctcgaacaatgtcaaggatcggggtcggggaccgggggagctcggggacggggagcaaccctaatattaataatcaataaaataaaacttcaaattaagaaattttgaatttggaagtttttgtggtccaactttcctctttttttgatcctaatttggtgtcaacttgcccttggggatcagattacggttgtacatcgattctcccttggggcccaaatggcaaaagcaattaaaatgctctttcacttcatccgaatatactttcatcatctcttttttgcaataatcacggttatttacgtcagtttcgttaaagcaaacgaatgcgtagaacactttcgcatctttttcagccttttcttaatatgggcatttgtgcagtttcgttttgaggaaaaaagaggggaaaaatgctaattgatttaaatgtgaaacggtcagcgattttttgtgagtaaaatccgagatgggcattttatttgggttttataggttaaattgcaaggttttcatttatattcattaaattttcagcttaacggcacattgaacccacaaaaatttgaacgaatattttttattttgacagtgtcagaatttgatggttgccacactctctggccgtaaaccgcttttttttcgcggcacgctttttccaaaaaacttccgtgccatccctacaagtgacaaaccagcaaaaaattcatttttttattgaaaatttcaaaaggagtcacttaaaaatagtgtgttttttactaaaattaatgatggatttttatatgaggtcattgaaacggaaaagtgccccagaatttgcacaattgtttattaaaagaccatttttttcatttacttttgtaataaaataaaataataataattttacttgtatcacataa

SEQ ID NO: 34824 - DNA, 946 bp, Heterodera glycines
  unsure (1)..(946): unsure at all n locations
aaaaaaatccaaacatttaaaatctataaaaaattaaaaatgagaattcatgcgagatttnctggaataagcttaatagggcntagtaagctgtaaaaaaaattggggcgatttgaaagagaatagaaagaaccaggttcgatgaagttttgtaagccaaaaaaaatgcaaacatttaaaaatctataaaaaatttaaaaatgagaattcatgcgagattttctggaaataagcttaatagggcctagttaagctgtaaaaaaaatttggggcgatttgaaagagaatagaaagaaccaggttcgatgaagttttggtaagccaaaaaaaatgcaaacatttaaaaatctataaaaaatttaaaaatgagaattcatgcgagattttctggaaataagcttaatagggcctagttaagctgtaaaaaaaatttggggcgatttgaaagagaatagaaagaaccaggttcgatgaagttttggtaagccaaaaaaaatgcaaacatttaaaaatctataaaaaatttaaaaatgagaattcatgcgagattttctggaaataagcttaatagggcctagttaagctgtaaaaaaaatttggggcgatttgaaagagaatagaaagaaccaggttcgatgaagttttggtaagccaaaaaaaatccaaacatttaaaaatctattaaaaaaataaaatagtgaagttttaaaaattaataaaaatttttaaattaagagttactggcgttagcatcatagcggtgcttttccttgtctttttgatgcccttgcaaaatctggtgcgcttctgatcagtttatataaaaaaagttaagcctaaactttttggcatgtttaaaaagagccaggttcgatgaagttttggtaagccaaaaaaaatccaaacatttaaaaatctataaaaaatttaaaaatgagaattcatg

SEQ ID NO: 34825 - DNA, 1356 bp, Heterodera glycines
  unsure (1)..(1356): unsure at all n locations
aggctaattttncggcaaaatcgaaaaagcactgttagagatgaaaaattttataaattgaaaaaacaaatcaattatatacatacacccgaaaagagatgcattccatgtacagtgaagacaaatatcagaaaatcgttggcataaataaaagaaaatatcgtaaaagtaaatatcgcattagcgataaatatattttatatttacaataataggctagaaaagatgtgaaaatagattattagaaaaaattcttttcaaagggcatgcttttttaaagaactgcaaattttgagcatttaataattgagataaacaggttggagcttcttccatgttagatgtctattttttgtacctatttaaggttttttatttttggaaattttcagaaaattctgtacaaaaaatacctttacaataaaacgagaacatctcctatgaatcgactaaaaaaacaaacgaaatataaatttaaaaagaaattaaattttgcttttggtattctttgcttcacttctttgtcatttctaaatatataatatttgatacaacagtacaaaaatcacaggcccacccaaaaaatggcttaacttaggggggggggggttagaacccgtcggtgttcgatcgattactgcctcctggcaaaaagcatgtcccgctcaaagtgttcgccagtcaattggcccggcaaccgttcacagttggggttgaacacggaataggcggacagttcgccctcacgtcggacgcccaggttgagcagcagcaaaagcagcgcggacagcacaaagtagacgaacccgaactgcacatgggcagcgagcagttgacctgcaaaaaacagagcgtggaaaatgggcgaaaagggaaaaaaggttttgtccaaaaaaatgccaaatttcgcttttttgagttaattatttaaaaatttataagcttggaagccggtccggcggtgccgagaggcgccccccccccggatttgcgatggaaaaagagtttaactttaactgagtttattaaaatttattcaaaaatatttggcttctgtcctttattttcgcctatgccaaaaatcgggttcaaaattaagttttctatcttaaaggtcgtaaaccgtattaaatttaagaaaacttgttcatttaagtttattaggaacaataattatgttgtttgaaagataattatttttcaaaaatttgctgacgatcaaataatcgcatacaatcactttcaatcgcttatttaaagctgtttaatttatcaagaattgaaaaaacttaagtatgcacccgattttggacataggcgcaaataattgggcgcaaatgtccgaggcgcaaatgt

SEQ ID NO: 34826 - DNA, 664 bp, Heterodera glycines
aaagagttaaaaatattatttaaataatattattctctttttataccaaactttttaaaatttggtttcatttacccaaggttcgggaacgaaacataaggtaattaataataattattatttcttcctttagaaattgcttttggcctccgaaagtggcgacttccgttggagtgaaagtgattgtgccgacgaaagtgtccaaaacaaattggtcattgcgctgctcaaaaagccgaattcgttgaaccattttcattttgtcgcattaaattcgctgttgaaaagcctcaaagaacttcggcactttttttgtcatggcaatgacaaaattgacatctttttgctgaaggagcgcttcttgttcagatttggggataaactgctggacgagttggagctgagccatcccttaattatgcacttcggtaggcaatccccgccaaattgacacaaaacataggacaattaaatgacaagacgcccttccattgttactatcattgatttaactggctgataatgtgataagaaatgatcaaataaattatcacggcgattaatccgaaagaattaattttctctaattgtacagatttgcccatttttttccaccgtttgctgctccaactgctgcactataaaacgggcacagaacaagcgg

SEQ ID NO: 34827 - DNA, 991 bp, Heterodera glycines
  unsure (1)..(991): unsure at all n locations
ctctctctcttcctctctctttctctctctctctcttcctctctctttctctctctctctcttcctctctctctctctctctctccctctctctctctttccctatatctcttcccctttcccctgttcagcttcttctccacgcccgcttcttcttcctcctctccctcttcctccatttgcccctctcttacgccctttgttcgctgttcggtgcccttggctttgtattcgctaatttggcggtgtattcactgcgcgtgcttttcaattggtactttcttcgtccaactttgtgcgcgcaatttgacgaaaataatgataacgacggtcaaaaaatgccacggcaatcgcaaaaagaaatgcaaatgtaccgacagttgctgcccggtaaaaaattgtgagtttttggaatttgccttatttattcgaaattaaaattcggattggacggcaacattctataatataccaattttacttttttgttaattccctggtaaactgacaaaatgattcattggatgattatcgttgtccttttggttggcatgcgtttatttttctgtcgtttgtttggtgtcctcctccaatttgttcctccgattgcttttcatttcctctgaaatcccttttcagttcgtcgctgcttctcttcactttgctcgtcctttccatttcgcgttttgtcctcggccaaactttaaccattccttgccaatttggtcatttaatcctcggcgccttattattctgtctaaacgcattcgctttcttcgtttgggaatacaaaccgtcgatgttggattttggagagaaaaaatccaaatgataatttatattttggataattaagctttcattttatactctgctttcattgttaattcctgttttttgtacattgataaagttttcataaacatgttanaaggtgtgaaaccaagtgcatttagcgttttgtacactttggtcagtgccaagggcgtac

SEQ ID NO: 34828 - DNA, 1626 bp, Heterodera glycines
tttcaaatttgttttgattttttcgcatttgttttttcaatttataggcccaatctccaattcttaaaatgggccggtgaataagagtttacgataatctggtccaatttcaagcctatatttttgggtatttctatggatggttggcatcttcagctaattcttggcacatcccggatccctttctttttagacatttttccattccttttttaatattttttatattcttttcttcattttttattttatcaaattgtgagtgtatttttcttactccatttaatagtttttcatgccaaaatatgatttctggttttcccgagttcctatcctttatattttgagcttcaaccattgtattgtgtgctgagaatgaaaaatctttggcctcattagtcaacctaattatatccttaattacttcttcaacagcccttcgggagatatccatttgctgtttttcttcttttgtgagacaacaacaaccctccccccttaccaccaaaaagaataaaattaacacagttaaaaaatacatttttattttaattatcatcaaagatttttatttatagtttatcaaatcatctttttcttccttcttttcttaaatgttcatcttctgaataaaaatataatttttttcatggagtatttgcctaccgcaatggtaatgaaaaggttgtcattttcatcgaaattctttcttccaaaaggttgacatcccggtatgattgttgtcggcgcataaactcattgaaaacaacatccgccgtaatctgtcccggtgggcgtccaggtattatcactggatctgacaaggtgccgcaatacaaatccacggtcattttctcaattttccaccccaggctcatccgctttctttgcctcatttatgagttttgctaatatttttttgaaatttttttcagagttttcatttggcgggtttttgaagtaaaatgttgaaacattttgtttgatgcccatttttttgttttcttttacatgagtttcaacttcttcataatacttgcccaaatctgggctcttccggaaataattccgagtatttttagaacgacgcagttcttttgggacttgttggaaatttttcgccatcttgaaaaaataaataacaaactattattgtgaacaaatattctaaatatgaataaacattaaaatcattaacaagaattaaaaatcaatttaataatatccaaaaggcaacacattatagtcatcatcaattatccccttcttctgcactggcgaatattctttcttcacgtcccgcgagagcattctgctatcccttgtcggcccaatcttctcaggatagcgaaacacttttttaactccttccgtgtagctcaagaccattgacttgaactcctcataatccactctattgtccttattcagtgtaaacccccggattttcgtcttgtaccagatcaccccatcctttttcctcttaagcttcaaggcgtattgttttggacccgccgacacatactccagaatgtaactgtctgaatattcccgagtcatctccctgaacaaatgttcatagaaaatttttttaaaaaatatgatgttaccccaaaaatttccctt

SEQ ID NO: 34829 - DNA, 1064 bp, Heterodera glycines
ttttagacgcaaattttccaatatttttggcagatgcttggctcgagtgggcccaatgtgtgtgaaaaaagcgtgatctgatcaaagcacacgcgtgcttcaaagtaataaatatgtccagtttttcttagtgccattgaagatgggatggaaatggtcccaaggcctatttttgaaaatattttatttttgtacgaaaatccttcaacaaccacttaaattgaccccaaaaatgaacacgaaattggtcattttaagcctacccatataattttgaaaactagtccggaaaaaatagcaagggcccgactccagaggtgggaaaaaatctccgtaacccggtctttgtgaaaatgtccataatctggactatgacccccatatatccggactaatagaacccaaaaacctccggaacgaaaaaatccggaatttggactatgacccaaaaaactcttaatccgaaaccggaattcggtcataattaaaaccgagacaccaaagtttccatcactaccggaattcttatgaaacatcttaattttcctaaaaatgtcatttttctatttattttttttttaatatcaaaaaaccaacaaaaaagctttaaaaattaacggagaaaaaaatgttttcttcttcttccttagcctgagtataatgtgttggaccgaaattttcttgaaaaactctcgtcgagtttttcctggttccgggcctggacaacccctgcaaaataccgaaaaattttcgttgaaactaatgcatcaaaatttttggctgaaactgattaagagtttgtcttcccgtcgtattgttccgctgaaaaaatttttttttctaattaaatctgaaaatccatccctattttttcccaaaattttgtgggtaaaaaccaaaaaaaaatgttttaggaggctgttgagcgtgagccatgccttcccgcaccgaaagcgttatgtttgctgtccgccgcgttgcgcgccctgtccgatcgttgcgcggacaatggccaacgcgtgcaaatgctcaatgaggcggtgcgactttgccacgaggcgttg

SEQ ID NO: 34830 - DNA, 1095 bp, Heterodera glycines
  unsure (1)..(1095): unsure at all n locations
gaggcggagaaactctnttgttaaaatggaaaaagcatcatgccaatgccaactttagggtttaacaatggcacgcaaaaggcaaaagaaaagcgaggaggcaattagcaaaaagaatgaactaattgacctaaaaaagatgaaaaacagaaattgattcatctcaaaacaaaaaaacattttatcagattgaagtgagttctctttttcaattttttttttttgcattttttgggtgccattttgggtatacgtgccctttgtcacattgcatgaataaatgatttttatccgttaaccattatatataaatgccagtttcaaaaatgccattttcacaagtccgatgggtcgtccgattggatttcgccgcccgcccctccggcagaatcggccgatgattcgtttgacttcgtcaattgcctttgttgattctcatcggccatcatcggctgctgctttttcaccagttcgactttgtgcctgttgcataaacccttgtggcaaatttcgcacttcggcgtgcccttctccgccgcgcaaaacgggtccaagtcgctgtgcgtgcaattgcctccgtccggcgcgcacgaattgaccacgaagatttggtcgccactccctgctgggcaatgaaattaattttaaatattttcaaattatgtatttaaaattaaatttcaaattgaaagtgccaccatcgatgcatgaatacgtctgacagccggcaaacgacccgcgacagtcgtgctcattcatccggtcgcccttcttcatgttgaacgtgttccacttggtcattttcgcgacaaggccacccgaagggatgttgcgatggcgcatgccgtaaaagcaattatcggctgaagaagagggaaataatgccaaaacgacgaagcgaatgttggcacccagagaatatttaaaaataatacaggaggtaattaattcatttgatttacttggactaaaataaaatttaatttatttttgttttaaaatgtaaaccaaaaaaaatggggaaactagaggctaaaaaaccggaaattcctttccacccaagcaattaattaatgcgctaattaagttcaaaca

SEQ ID NO: 34831 - DNA, 1197 bp, Heterodera glycines
ggggagtcggagaaaattttgctaaggtggtcggccgcccggatgaccttttttttgcgatttaaagccattttacgagcgagggtggggagaagtccgacccccttcccccccccccctaaaaaatgtatggtaattagttcagaaattcattaaaagttccggtattttctccggtgttgccaatttgcatcgccgcctaataaatattcataatttttttacaattgacactggtttgatcattatttaaggaaaacccacaaacaaattggacttagttttatcaaaacccaaaattcccggtctcgtacaactttatttttagacatgcaaaaattgccgtcagctgttaccgctctactcagaaacgggttcatctccacatcaatgaaacagtcgacggtggacagtttgatttggtcgatgaccaaagcgaagcgacagaggctacaagtgaccaaataattgaaattgcataaccaagtgtatggcatttgctcaattaaattttacaatcgcaggtcaaaaatggattcctttcccatttctacgacatttcccaagtgatcaccggctctttgaccatgggactgctcggcggaagcgacaaagagttccaagaactctgtgcctattttaaggttccacaattcaatctctgcgtttaatgaataatggacaattaatttcaggagcaagtttgtgcctttgttgtcgatattttcaacccggacaaagtccggtttacaacggtcgaacatttaacggaagacgtgaagaaactgttaatgtatcgaattggcttaataaaggtgggcgtttcattagttttgtctgtctacgatttacacaaccatacataaaaaaggggggggggaggtcggccaaaatgtttgcgaggggggtcgaccgcctatatattttgacgaccttttttttttgtttgctttccaaaaccactttcttgcggcacgcttttccaaaaaattttcggaactgggaggggcggagccggtaggcgccaccgggaaaaatttttgaacacaatggattttgaaatttagctatttttacagcttttgctccgcccctggccgccagcaaaatgtttctttgtaatttggcgttggaatttaaaattaatatgttgctttcgttatgataatttggcgttaatttaaatttggcattgct

SEQ ID NO: 34832 - DNA, 853 bp, Heterodera glycines
  unsure (1)..(853): unsure at all n locations
catattacgtgattagtttgaataatttttctaaaaaaatacttacatttttctttactatttaaaatatgaattatctttgaaatgtttttttaattattattttttagttaatattcatgatgaatgaattaatattttctttttttgctgatttattctcatgacaaattctctccacacgcatagaattgttttgactctctgatatgtgttaattttatttatctttaatataattgaatttaagaaaaaaaaaacaattaatcttttaaataatttcttctgctttttgttaagggttattttactcattggagaaaatataaaaaagtgaaatataaatttgatatattttgtttattcgagtatttatataggaatatattttaaattcgcattaaattaaaatattggtatttatagtagaaatgccaatttattttttcaagattatttaaacctaataatatgtttttcaacttaaattttatgattaattaattcaagagatataaaaataattgtatttaaattaaaataaaattgtattaaatattgtgtttaaattactgtattattttttattttgattatataatcgtatatttaattttcccttgaatattttcaatgttattagctcttctacttcatagatatcttggcagcattagactaatattattaaataaatcaaagtttttaagttttatttattaatcattttgtaaatattaaatttgaatattgattctttgtaaaaatatttaaaataataaattaaaaccgttaaataatattacgaaaaatttttatatattaattgtttaatcanaaaatctttaaattt

SEQ ID NO: 34833 - DNA, 880 bp, Heterodera glycines
ggggacctctagagcttggcccctttttctttgattctttggcattctttccctttcaaataatttttgggcgcatttaatccgtttgaatgattcattcccttttcgtccaaatttgttcccatcggtcactcattcattcatttattctgtcacggtttgtccatgcctttgccaatgccatcggattaaagcatttgaatggctttggctttggcattggctttcttcctttggcacttcgtttccgttttgcctattctgccatctcacttcttttttctcatttccgtccctttcatctgtcacttcgttttgcatttctgctcattttctcattatttttcataatttctttcttttcaggggagaaaacagttacaaattgaaggagaaagtcgcgctgcaatttttgtggctttctgccaacaattgcacccattcctttctgatcggttggccccccacgcgcaattacattgcccattttaggtgacccctccggcgtttcttccttttttaattgaatttttattgttttttagctccgagcgcgagaaaagcgattggttcgacaaactgagcacacttctcaagcagagtttgagctcgaaaagcacaacagtgggcgtatttgtgcagatcgaagggcgccatcaggtgaaatggggaaacgaaacgccaaaggaattgaattggaattagaaacactcgttaattattcccatcagcaccaatcgtaatgaccattcatcacccacccactcccctcgaccattcgaatcgaactccttttggcagtcccaattatacacaatggggggaagctctaaaagagggagacaaatttttggcaaaaaaatacaattttgacaatttt

SEQ ID NO: 34834 - DNA, 808 bp, Heterodera glycines
aaaaaattgaaaattttgaaaatcatgtttcccgctcccttctcccaggggtattattttgtaaagtctttttttccccaataaacttttcaaaccccatttttcgcaccggtgaaatgttttttttatcgaattctgaaccgttttgagtagattagactagaaaaaattgaaaattttgaaatcatttttcccactcccttctcccaggggtattattttgtaaagtctttttttccccaataaacttttcaaaccccatttttcgcaccgtgaatgttatttttattgaattctgaaccgttttgagtagattagactagaaaaaattgaaaattttgaaatcatgtttcccactcccttctcccaggggtattattttgtaaagtctttttttccccaataaacttgtcaaaccccatttttcgcaccgtgaatgttatttttattgaattctgaaccgttttgagtagattagactagaaaaaattgaaaattttgaaatcatgtttcccactcccttctcccaggggtattattttgtaaagtctttttttcaaaataaacttttcaaaccccatttttcgcaccgtgaatgttatttttattgaattctgaaccggtttgagtagattagactagaaaaaattgaaaattttgaaatcatgtttcccactcccttctcccaggggtattattttgtaaagtctttttttccccaataaacttgtcaaaccccatttttcgcaccgtgaatgttatttttattgaattctgaaccgttttgagtagattagactaaaaaaat

SEQ ID NO: 34835 - DNA, 1052 bp, Heterodera glycines
ttttaggtacttgtgggttatttgtgctcagattttcaaaaaaaaattttttgagaataaacttgttttagggtttccggggtcggaaaaaccgattctggcatctatattggcccaattcgaaccccaaacccggattcgaacaaaaaagtcaaaatccatttttcaaaaaaaaatcacattttatacacaaaattgagtcatggcctttttttggttatacacggcgagtcaattttgggctccaagtgcaaataagtttattacatttcaataattttaaatataaaatattttaatacattttgatcgaataaacgtaaaaacgattagaagaaatttaggtaatactaccgatggtccccccccctttttggaaaaatgttttttctgttctagaaagtcgtgaaaacacgtttatggggtttttagggtcgttggtcacgaatctaacattcattttgatcaaattctaatcctggagccgaattcgaacaaaaagtcgaaacctcgatattttcaatacaggtttttatagctatacctgtgcacaatgtaccattttttgatggttcactggtgtttgtctatatctcatgtatcaaaacctgaactgaccgatgatgtaattagtgcgtggagtactgggagaacatggagctggcaactcgaatgatcagtcgcaggatgggattgtggacgacaaacaacgcatcttggggtgggtgtgccctgttgaggtcgactaacttctcatctgctacttgtaggatgtgaagggaaattgagtgaccgtttatgagaattcatgaacgcagtcatacgaccacggcttaatagtttttacaacgcgcgctacatgcactcactcgacggacgtgagctttacaaactgccgttgcggatcgagccggtggccggcgtctttgcggaaaaggcatagaggataatattcctgtgcttcgagatgttcctcgtcccgattcatcctttttccatggcgatttctcaaaatgaccgtcccgcgagtcagcctctccaactgactgaga

SEQ ID NO: 34836 - DNA, 1406 bp, Heterodera glycines
taattaaatcagaacttcaattttttaaatccacccaaaatgccgattgaaacttttttaattcaaattttcattttgaaaaatactgaaaattttgtctgattaacaatagtttgccaagataaaatccgtgtatatcctgaggctgacactgtgtattcctgaaatctgacctctaatttttatatcccattgtataaatgccaaaaaagtcatggcaaatacaaggaacaaaatggcaccactgatcagtgcgcctctccgcccctggtgatcgtctccatttttgtgaatccgctccaatttggcgcaaacgaggactatgagcgctatccgcgcactttggaagcggacttggccaaattggagggcgtcgtggattgtgcatttgtgccaaatgccgtggaaatgttcggggaggaaaagcaaccgctgaatcacaaggatgaggaggatggcatcggcatcaaagtcagtttttggaacatatgtagcaacatccgatcatctctctattcttatcagatccaacatttaagggatgggaggagatcaagattcttttcactcagttaacctaataataattaatgagttttattaacccaataataataatgatttttaaaataaattttgcggaaagtggaataaaattgagaaaaaatccattttaaaatatgaccgatctgttaggcccacaaaaaaagataatggcatggtttaggaccaaatgaaatattaaaattaatataattatatttttatatatctattttattttcatccttttaagtcacggacacttttttaaattttaaaattttaagtccggacgcattggccgtattttggagggtgtcacacgaccgcagtaccatgacggaatgttgctgcatacggtcaaactttacaacattgtgcaaccaaatttggcatttttcgggaaaaaggatgctcaacaggtggattttcacgacgggcatttttcggcattatttttaatttttaaattaaattaaatcattttaatacagaaggtcctaattttttcgaatgctttttacatcaccgttttgaagctgttcgccatccaacaaatgaccgtggtcatgaatttcccggtccgtgttgtgccggtggaaactgaacgagacccgcacggtttggcactgtccagccgaaatcagtacttaagtgccgaagaacggcgacgggcattgtgtctgtacaatatgttggtagcggcacgcaatgccgcaacgaatggtgccggtttggcctcagttgcggcacaagcgcaacaaatgttaacccaagcggaaaagcatgacggcataaagcaagttttcatctgagcttatttaagaatgtcatgaccttgattcagggacggattattttgc

SEQ ID NO: 34837 - DNA, 1146 bp, Heterodera glycines
  unsure (1)..(1146): unsure at all n locations
taaaaaacnagagttttcaaattaaaatttgcgtattttttgttttcgnatgagaattagaaaaaaattgnctacatatttggactaccattcacatttacacaattctttgtgaatatttgttaattccatcgttaatagacaattaatttgacaattaactttatcaccatcgccagcattatcatttatcattgtcattatcacttatcacctctaatcagtgctttagtgctgactttcttcttcttcctctatgcttcttccgtcacttcctcctgctgttgttgctgctgttttggggcctgcggttggagccacgcgtacggatcttcgggctgacaatgaaaagaaattaaacagagggagagattggattagaataaaatattttagaattaacaaaacttttggaaatgtttcagccattttatcaccgataaaatgctttgttaaagatttgccattttattaatcatatttattattattattatattttggcatttctccgcacctttggggccctattcactttgtgtgccgtgaccatttggtaatgtgcgccgtcgtcctttggccccgatgggatggagtcgaggtcacgggcaaccgcactaattaattaattaataattcattttttaaattaaaacaaatgtttcaaattttacatgttcaatgctcctggcacaaattcgggtgtgtaagtgtaagtgaacgttttgcgagcacgcaacggctggtagccatggtaaattccgtccttcaattcttggtagcggctgtcaccttcgcctttgtccaccatttcaagaaatattcccttaacattaaaataaaatgaatgcattgatggcataatattcaatgaaaattcaaatcgtcgaaaaatgactcctcactttttggctaaacgcaaatcggcaaattttcttcttcggattggattttaagcgcccatcttggcacctttccttctctgttttataacatgtgtttgtttgactgtgtgaaatgcttcaaagtgaaaaaatggcgccatttgcccccttcggtttcattcgtttcagcgccataaggcatttgggggagaatggaaatggatgaacgaacaacacatgttgaggggnggggggggggaat

SEQ ID NO: 34838 - DNA, 781 bp, Heterodera glycines
cctttatgcccgcctccttctccagcaaatgtttttggcaatgtgcagcaatgggacgagcacaacgtaaacccaaacgaaagggccgacggtggacaagtaaaggacagccaaattagtctgaaaaggaagcagggaaatgtcggcgggaatcagtctcgagcagagaatggccaaggggtgccattctggcgaaaagtggcccacctgactgcgcgggtagggcattcggcgcatggaaacgtccatttcgggcaatttcttgtggcccaaaagctataattggaattggcacaaaaaattgtgatattttccccactttttccgcaaaaatttggtggagagcgaattgcacggagagaattccgctgggccaatacggcggattgtccggcacgtcgctgctgttgtccgtctgtcccgcgaatgggtcgcgatccgaatcgtagacgccgacgccgtcgcgccaaaaggcgtccaaatgccactcaatcggctcgtagaccaaactgaactcgggacgtggcaacagcaaacggtaggagaggcgccggggggacagcgaaatgccagtgaagaggagaccgcctgaggggatgccaaagtcagagggaaattaaaaatgagaaagtgaacataaatgatgcaaccacccgactcggttggtactgtataatgcccaacgccgttacagcataaggactcgaccaatggcaccctttcgcttacggtcggtcccgcttcaccccccccccccccccaatcacccaaatatttctga

SEQ ID NO: 34839 - DNA, 1076 bp, Heterodera glycines
gtcccatagggccctccacaaaacacggatgattttccgtggatcagctgacttttcaaatgcaacaacccggtatttaccggggtaaatctcatcctgaaaaacggtcatttctgtgttaataatttttaaactcacccaataattctgaacattcggcaagtgttccactccatagctatattcgttaatatcaattccacaattacgtaatagttcaacagccgcctctcgttgtctcataatattattcataaaacgattaaaaatattccgatgcacttccaaataaagctttgacgccaccaacgcataaaacaaacaaattttatccacattcgaaatccttaataaataattataatttttctttttttttctattctcgttttttctttttttttctcaaaaactcaccttatccgttggtgttccttgaatccgaagtcaaatttgtgtacatttctcggcccttctccactgggcacggtgacgcaagtaattttcatcataataggctccgacaacaaaagcgttttcttattttcatctccgtccccgctctgccctaacttattaatctcctgcataataacatccgcattgttctgcgggtacgccctgtacggtaaccaaaccggggaagcaagcccggcacccgttattgccacaccaaacatccgcactttccgcttcatcctttcttccgtagtcttaaaagccgccttaatcattgtgtcgattgcgtccctcatcgcttcgtcagggcgtctcacatccgaattgatccgaaattccgtaatgttcttcgtgaatccaaatttttcgcaaatcgtcgaccgttcgtcaattaatttataattttccatttcctcagtaaaattgttcctgaaaaattattgattacacttttctcttaaatatattattaaaaattgcttaccctatagctcgaaaatcccattttttggtcgacggaccgcctttttgcaaagtcccgttgcgttttgaagtcattttaattaaatttaatattaaggaataagagcgcacaatttttattttagcaaaatcca

SEQ ID NO: 34840 - DNA, 945 bp, Heterodera glycines
ctctcttctcaaccggacaacagacagtcggcagccatttgagcacttcgacgcgcattcgcacgcgacgaaagtcttttgagaagccgccaccggtgggaccattggacaatgtgtcggcaatttcactggacgaattttggcagaaagacgaggcataaatggaaaagaaaaagccaatgggaagaaaagggaaacgttagggaaaagcatccctccccgataggaggaaaagccgcgccgactgcgcctattccctccccgtttaggctaatgcttaaatagatagagaaaagcataaattaggcatttttaaattggaattgtccctctgccatttttaattttaaaaggaagtcactaagtaagcaattaattgagaggcacagcaaatattttaaattagcaataataataaaaaataaaaaccctttgtttaagtccaacatttgcacaaattgccattcaaatggcatttttttgagatcggaatttcagtttctttgcatttgccaagtgttggtcattcattcattcgtttccctgtgaattttccgtccgtttttcgttctttcattcccccattcatttggttttttcgtgggagattaatttgcaacttttccttcatattcttcgcttttcgattgtttattttgaatatttgaaaaagcgatgactcatccaatgcttttccatgcgcaaatttatttttagcaaatgcccaaccaaaaatcataaaaaacctgccgatcagttttagcttctgatcgggaagcatcgcaaatggaagacgacagaagagaagagcggcgggtaaccactatctttttcactcaatcgctgatcagtagttggttttgcgataacgccccccgggaaaagcgatgaaagggaaaaaagaggggaaggaagggggggggggggggccatcaatcccaattt

SEQ ID NO: 34841 - DNA, 559 bp, Heterodera glycines
  unsure (1)..(559): unsure at all n locations
agtcgccttgttgtcatctgattatttatttgtttttttaccgtttgttgtgtactcattgggccccatttccaacaaaaaaataaatgtttggcatttctcttttttaaattggttttatttaactccatcgtttttgtcaatttcctaaactaagaaaaaaagggtttttctttattagtttttaggaatttttagtgtttctactcatctataataatgactgatgcgaaatattttacgacaacaaaaaagggtgggctaaatttgccggattttatgggaatttgatgaattttatttccctatcaggtgaaatattcgaattgaaaaatgaactgaactcagacaaaaaggagaagaagcgggaggcggtgaagaaagtgatcgcgagtatgacagttgggaaagacgtgaggtgagaggacggagggattccaatgggggggttgagtcatatgggaaccatacattttttagggggggnggggggcggggtgcggacccgcccccccccccccctcaccctacgctcgcaaagagggccagcgagggggga

SEQ ID NO: 34842 - DNA, 922 bp, Heterodera glycines
  unsure (1)..(922): unsure at all n locations
atttatgtaaggcaaaacgcagaaaataattgcacgcctcgccaagaatagagaaagacttctttaatgacatttattggacgtttcagcaaagttacgcgtgtgagttatgatggtcatatttaaacgaattttttttccaaaaaaaatctgttaaaaacatgtaaaacgtatgcacatttaaaagggctccagaaatgcgtcagtgatacagtaacttccgcaataaattgcagttctgtagcgcattataaaaaatattgtataagaacggcgttatgaattgggcagttcagtttttataaaggctcaaaagtttgaaaaaatttgaaaaattaccaaaatccgagtaaaaataaaacatactgtaatttgattaatgtatgcttgtgtccatatcaatcacagactagaggacaaaacatcgtaggacggagatttttcgaccacaattttttcattttcaaccaaattaaacattcttggtatgattagaaagtgcttgacaaattcattaacttcattattttccaaatttaattattttttcgatcatatacaaaaaactagggctaaaaatataaaaaaagaagttttttgagtccttttagccacaatttttggaatcttaatgtttttttttgatattttgaaaatatttgtaaaaacatagaatttgaataccaagaatggctaataacaaacatattgcccaaaaaacatacgtcgatttcggccggcgagttttggcgcactgtatcaatacacgctttcaaatcatcatactcgaccgtattggaaaaaatgaaacaagatatatgtagtaagaaatatgnaggatttaattttaagcgtaaatgccccaaacttacagtaactcaattacagtatngtatgttttatgggtttttttttttaattt

SEQ ID NO: 34843 - DNA, 1068 bp, Heterodera glycines
aaatttttatgttctaaaattaccggtttttaccggtaccggtaccggttgaaaaagttggtaccggtaccggtaccggtttttgcagtaccggtcagtaccggtaccggtttttttgcaattaccgattaccgctcaactctagttcaaaccattggcgaactgcctcagcaacagtggccggcactgtgcgcgtgtcacgcaccagcgcatacaatgggaacggaaactgggccatgtaggagcggaaggtgcacgattgaccgtccgcagaaaagtcagcgatgcgcatgcccatgatcagggttgccagatctgaggatttatcctcattttgtggctttttgataggtcaatgaggattttttttggaaaatgaggatttaaggatttttgtggctttttgagaaattttgaggatttttgaggcttttggggaaaatcctcagaatcttttaaattttgataaattggcataatgtttggcaattatttaatttgaattttggtttttaatagagtatcaaacggaaatctcacccaaatttagccagataattacaatttttttcgaaaatccacaaaattatgaattttttaaaatgaaaatctgctaaaaatatggtcaaaattctcaattttccccctccggcggccgatttgctatttttgacatttcgcattaattgtgttttgtttctctcagttggatgaccaaatgccggaaaatgccccgctcgacttggagtacagttttgaacaggcccgtcgcattcttcaaggcgttccggaggaggaattattgcaaaaaatgtgcaaaaagaggaagaagcactctcccaaatgaagccgaaaaaaaacccgctgacgacggcgaacgctttgaaaaaacaaccaccgggaacaccaaaagggacgccgcgaaagccaacagaaacagccgaagattggggccacggaaacccaattcaagaagggcgacccggccattggggacactccgatgggattggggccggaaagggttggaaatttaaaggaaattccaaatggttttaaattgcgttc

SEQ ID NO: 34844 - DNA, 1120 bp, Heterodera glycines
gaaaagaggggggaaggagaggagagagaaaaagaggagagggagaaagatagagaggtgagagagagaaagaaagaaaagaggaggggagagaagaggagagagatagaaaagaggagggagagatagaaagagaggagagaagggagagaaaagaggagggagtgaagaggagagagatagaaagaggagagagagagaaaagaggatctagaggaagaggagagagatagaaaagaggaggaagagagagagagagaaaaagaggagagggagaaagaaagagaggtgagagagagagaagataatagtttttttcaaagctcggctagcgcgaggtgcgcgagcgaagcgagcgcgcctgcgctagtaatagagtagagagaaaaaatctcaacatctctcatttatcgtgctatttttttaaatctctgttaatagagaaaatcggctcccggtaaattggacaccagaaaattggacaccgaaaattggacaccaatggaaaaatggacaccagaaaattggacactgttgtaaataaaaatgaaaataaacaaaataaattactaaacaaaaattttggcttggcctaaaagatctttatcttaatctgccatatgttgtttataagcgtaaataatatggaaatgaatttgttattatttttgtaacttcaggagaagaaaaacatcatatcattcataaagaaataagttttattactcatttctggtgcattttttggcccattgatcaatcgtcacccatttttggtgcattttttggcccattgatcaatcgtcacccatttctggtgcattttttggcccattgatcaatcatccctcatttctggtgcattttttggcccattgatcaatcgtcacgttagagggaaaggaatgaaacgcaaacagctttatattgagcaagatgaaaatcttcgggaaatatttgcaacgcgtgccgatcgtcatcccctccaatatttgaggggaattgcctatcgaatgcctgatccactctaagtgccttaatgcattaacccatttattctactcaaatttattttcacctaattcttgattttttttaaaaaggaaatcttagtgtccaa

SEQ ID NO: 34845 - DNA, 752 bp, Heterodera glycines
agcggaacatttcagttcgactgcgcatcagcggagaaacgagtgcggtcgaggtggttcagttggtcgtcgtcagttggccatggttcgtccgcgtgtcccccccccccccgcccccacctcttctaatcactgttgcacctcttctaatcactgttgcacctcttctaatcactgttgcacctcttctaatcactgttgcacctcttctaatcactgttgcacctcttctaatcactgttgcacctcttctaatcactgttgcacctcttctaatcactgttgcacctcttctaatcactgttgcacctcttctaatcactgttgcacctcttctaatcactgttgcacctcttctaatcactgttgcacctcttctaatcactgttgcacctcttctaatcactgttgcacctcttcgcatcacttttgtacctcaaaatttaaataacgggcgctaagcgcccgtccaaggccgcgaagcggcctaacaagctaaaaaacgggcgcgaagcgcccgtatgagttcaacgaatttaaaaaatgggcgcgaagcgcccgttcaaggtcaacaaaaattgaagaacgggcgcgaagcgcccgtccaaggccaacaaaaattgaaaaaccggcgaagcgcccgactgatgccgcgaagcggcctaacaagctaaaaaacaggcgcgaagcgcccgtatgagttcaacggatttaaaaaatgggcgcgaagcgcccgttcaaggtcaccaaaa

SEQ ID NO: 34846 - DNA, 915 bp, Heterodera glycines
actttaattctgcgtgggatttttgctccccataaatgtttgagtaccccaaacggacactgaaaaaaatcgatttttttgtttcataaatatttttttcagaaagtgctctaaagcgcaccaaatttttatttacaacttaattttagcactctgatgctttagtatcaaaaaggaagatggagaaaaaattttttaaaaaatttttccttatattttggttatatcgttttgcttttggtggggtgcttggaacagtggaatcatgcgcacccgtccgatctggcaagttaagcaacgattgctgactagccaaaaggttcggtgccgtgatgaaacgaaccagcactgcttaccccgcggcacccggcacggtcccccgaaggaatggatttaattaaattctctccttcggggatttttttccattaggtcgtccgttagcgttcgattgctctagtcaatttttcaaaatttttgttgaaatatttgtcgtgctctgaagggcgtgggagggggggggggcgaaggcccaccacgaggccgcgaagaggccgagtgagtaccttcggtgcaggaaaattattaaattttaaaaattttttaattgctttttaaatatgccaaaaaatgtaggcttaacttttttagtgaaaattcgatcactcatattttttgctaattgagcagaagcgtaccaaactttgcagggatactccccggtaaaggactaacttacactgaaatgagcgccgagctagctggctcaaaaaaattttcgaaaatctgagtctttcgtttttatttgttttttgcataattaattcataaatatttttttcacaaaatgctctgaaacgcaccaaattttatttacatgctagtttaggcactctgatgctttttctatcaaaa

SEQ ID NO: 34847 - DNA, 1079 bp, Heterodera glycines
  unsure (1)..(1079): unsure at all n locations
ccgaaaaatcctgtgaccgtctctgaatcctgcataaataaatccctaanaaccccaacatactccggcgtgttgcccttgctggactggatgagttcgatgagtgggtttttgtccgtcgatttattcaacaggtcgcccccgtggttgaacagcgttttcatgcacaacggattgaccgcccgcagcgcgaccattgacggcgtttcgcccgcattgttccgcgaattgatcaacgccttgcccgcctcttgttcaagcagtgtctccaacatttgggtggacaccagggcagcataatgaagctgaaaatgggaaaacaccctggaaattatgcgattttttatttaaaaaaaagagtgtgagggtactcgaaaaagtaagaaaaaattgggcactatattaaaagtcccgcattttgaattttatcaaaaacaaaaggggtgacccttttgttttgcaaaacttttttttgtgataaaaaaccatgaaaatttgttatccggggttttagaggtcgctgatcacgaatctgacatctaatatgaggtcatggaccccaataaccccagggaataaactttcatgaatatacattaaaaatttttgcaaaccaaagggtccccctgttgttttaacttttggtaaaattcaaaatgcgggacttttaatatagtgcaaaaattgtatataaaaaatttattaaatgttttgattcttcaaatcctaaatttcctcgatcaaacctccatttttttaaagtgacacaaaatttattttcttacaattaaattaaagttctttttaaagagaattcttatgtttgcaaataattttgcaaaaaatgcaagtctaaaaaacgtcattttgaaaattttactagaaaaatctcaaagaaattttaaaaaacaaataaataatcagttttgaaccgctcagaatactttaattaaaatcacttcggaatattttcaaaatcgctgaaaattaacaaaatgtttttttgttgaaaatttaattttttttttgggggggggggggttgtttagccacccacacgaacagcctaaaaatcttta

SEQ ID NO: 34848 - DNA, 1115 bp, Heterodera glycines
  unsure (1)..(1115): unsure at all n locations
gcaaatttttatgccaactgatgatgcttcattgcaaataaaggacggcagatcatcaaaacattaaaagtnngtaatcaanaacttccgaaaaatttagactgaacgtgcataaacagaattaaaattggttatttttgaaaaaaagttactaatgaattaaatgtttcatatttttattgtcataaaaaatgtaagatagcttaaatgtatgaaaattgttcaaagttaattaattcaactcttgatatgattagatagccaaatatttctctattattttattaaattttaaaaaaagtcagtgtcaaaattgttcaatctaaatttttcggagtttttatcaccactttttgtaaatttttgttcgatttttaaaaaatatcaatgccaataggagccgcagggggaaatattgaaaattagagtgcaaatattaacaaattttgcccaaaaaatcatttttatggatttttggattgaaactttaaatatttatctacgattttgtaaccaaataaaataatttttttttggtttttggctatattttaaaaagaaaaaaaaatgaattcctttatttttgatggttggaaaattgttgtaattaaatttataaataaataattttactaatatgtaattgctagcatttctttttctgttgactttttacacgccataaacgcttgcaatcatagaatatttccattttagcattttttattcacattttcaattaatttttcatcttatgaagaagaatgaattaacaattacttacccattctgacattttaataaaattctttaatgccatttttcattttttgttatttatccctatgaatcaaaccgctcaaagcatctttcccattaaaaatattcaattaacaaacattcctttgttcgatataaaagcacagtggtaattgttgtattgtttcattaattagtttagctttttttagtcttacaaaaagatctctcactttttgtttccccattttgaagaaaaataattcttttanatcaccaaaatatttattttaattaatttaaattanataaataattaattaattntaagcacagatgtgtttttattgattaat

SEQ ID NO: 34849 - DNA, 934 bp, Heterodera glycines
ttcaatataaatacccacccaatttcgtagccgtgcataatgcccatccaacgaggccgcgggttggcggaagaacgcttcacaaaacagtacatgaacacggagctgaaaatgttttcagaactattaaatgaaaatcaattagaagcaattaagcaaattaatgccaataaaacttacacaatgtcagcaaattcaatgagggcacaagtgaagaagctgaaacgaattgcattaacaaattgtaccgaaaagggcagtgatcaggatcagaccccgaattcaaacaaaaagtcgaaaattcaaaactttcaaatttagcacttttgctcgaaaattgatttaaaaaaggtaaaattaatcagaattcatagaaacagcaaaaatgatcattaggtacagattttaatataaaagcaaattttgaaaatttcgaatcatcgacttttagttcgaatttgggtcggggttcgaaatgggacgaatttttatttatgcaaccatcaaataatcaaaaaaggcattttgctcaaattattaggacctctccttttggctcttatgcagtttgacccccataaattttttggaaaaaattgttttgttgtgaaaacaaatttcgatattttgtcggtgttttgtccactctttcccgcgtcgctttcacctttcgagatggtcaacgtcggcgcccaattgcggcgaagcaagatgtccataaaaaggacaccttgcttggtgacgttcaggtggaaaacgggcgtttcgaatttgacaattggcggagtgaatgggtagtcgcgactgaaaacgatgtccatgttgaaggtgcctccttcgtacggcgacccgggcggtccttggatggtggccgtccaatggtacaagtctctgccgccatcaattggcgctgcggtgcagcccatgatcggtt

SEQ ID NO: 34850 - DNA, 297 bp, Heterodera glycines
attagagactggacaggatttccccagggcctgttactgtaatttttttttgaaaaatacccggagtcctgttaaaacaggacatttagtccagggaactgtccaaatccatcttggaaatccgggtcactatggtgcgggtttttttcaaaaatttcgtctctaaataaaaaaaaataatccaatccaacccacgtccaaatactttgttcattataaacaaagtggcattagaagaagtgctggaagaaaagaaagttgacggatagtaccggggagggggggggggggggagaa

SEQ ID NO: 34851 - DNA, 866 bp, Heterodera glycines
atctgggcgcatcggttcggggggactgccccgaaaacaaaaaaatcgattttttcaagtgtccgtttaggggtactcaaacatttatggggagcaaaaatccaacgcagaattaaagtacaggctatagggaagctactgccgaaggattcggtctccccataaatctgggcgcatcggttcggggggactgccccgaaaacaaaaaaatcgattttttcaagtgtccgtttggggtactcaaacaattatggggagcaaaaatccaacgcagaattaaagtacagactagggaagctattcccgaaggattcggtctccccataaatctgggcgcatcggttcggggggactgccccgaaaacaaaaaaatcgattttttcaagtgtccgtttggggtactcaaacaattatggggagcaaaaatccaacgcagaattaaagtacaggctatagggaagctattccggaaggattcggtctccccataaatctgggcgcatcggttcggggggactgccccgaaaacaaaaaaatcgattttttcaagtgtccgtttggggtactcaaacaattatggggagcaaaaatccaacgcagaattaaagtacaggctatagggaagctattccggaaggattcggtctccccataaatctgggcgcatcggttcggggggactgccccgaaaacaaaaaaatcgattttttcaagtgtccgtttggggtactcaaacaattatggggagcaaaaatccaacgcagaattaaagtacaggctatagggaagctattccggaaggattcggtctccccataaatctgggcgcatcggtatcggggggactgccccgaaaacaaaaaaat

SEQ ID NO: 34852 - DNA, 901 bp, Heterodera glycines
cttcttcttgttcgtcatcatcgatgtgctgctgcaatgcgttggccaaaatgcatgaaagttttgtggccaaatttcgtgtcatccgaccgcaggccaatctgatcactttggacggggacaacaacaacgacatcattctccatgaagaagcagacgaagatgaagcaatagctcgtcagtggaattttgcaaaaaattgcattttttactgggccgtaaaatgctgtcacattgttagcacttttcgcggttttttaaatttttctaggccaactttaggagccgttgaatacgaatttgacattttttagaaaaaaaaaacaggaccacatagattcgtttttattatctactaaaattaccttaaaattaaaaaaatcaaatcaaatggaatgtaattgccccaattttgacgaaatcataatttttctgcagccaaattaattaattttcaaattttgcatgctaattgaaaatatggccattcgctaaatttttatggttatgatttgaactggaatagtgccacttttttttttttgcaaaaattcgctgtctcaacatggaatttccttttttgagagccctgtacttcttccgccggacaacagccgaggccgattggtggtggtactgctgacgaactgcaacaggaggcggaggacaacgaaagtgttttgctgaacggcgccgaatcgccgacccccggcgccggcactttgggctacgaaattttggcggaggactccaaaacgcctgccccattctatgaaatgatgagcgaaagtgagctgaatgtacgcgacggacaatcctcgttttgttttaatataaattttgcgacattttttggtttagattttttccatttttttttgaaaccacagggggggaaggg

SEQ ID NO: 34853 - DNA, 1049 bp, Heterodera glycines
tcgatttttttgtttcataaatatttttttcagaaagtgctctaaagcgcaccaaattttatttacaacttaattttagcactctgatgctttagtatcaaaaaggaagatggagaaaaaattttttaaaaaatttttccttatattttggttatatcgttttgcttttggtggggtgcttggaacagtggaatcatgcgcacccgtccgatctggcaagttaagcaacgattgctgactagccaaaaggttcggtgccgtgatgaaacgaaccagcactgcttaccccgcggcacccggcacggtcccccaaaggaatggatttaattaaattctctccttcggggatttttttccattaggtcgtccgttagcgttcaattgctctagtcaatttttaaaaatttttgttgaaatatttgtcgtgctctgaaggcggggggggggggggcgtttccctatagcctgtactttaattctgcgttggatttttgctccccataaatgtttgagtaccccaaacggacacttgaaaaaatatttttttttgttttcggggcagtccccccgaaccgatgcgcccagatttatggggagaccgaatccttcgggaatagcttccctatagcctgtactttaattctgcgtggggtttttgctccccataattgtttgagtaccccccacggacacttgaaaaaatcgattttttttttttcggggcagtccccccgaaccgatgcgcccagatttatggggagaccgaatccttctggagtaaattccctatatcctgtactttaattctgcgttggatttttgctccccataattgtttgagtgccccaaacggacactcgaaaaaaaagatttttttttgtttttggggcagtccccctgaaccgatgcgcccagatttatggggagaccgaatccttccggaatagcttccctatagcctgtactttaattttgcgttggatttttgctccccataattgtttgagtaccccaaacggacacttgaaaaaatcgatttatttttgttt

SEQ ID NO: 34854 - DNA, 660 bp, Heterodera glycines
aaataaaccgagtccaaaaatttttcggaaatcggattgaccccaaaatagtcgaaagtcggaatcagtgctatcccttgtattaactgtatttaccataaaatttttagttaaaataacgcaacgatcaccttgaccacgacaatcagcttcttctggtccaggccgagtttggcggccacggcgagtgcctccttggacgtcttttcggaaacaatgatttccaacagttgcattttgtccaccggtagaaaactttaatggaaaaaaacaaaattaaaaatttatttaaaaaaaaattaaaaaagggaatgaattgcaacggacttcagagttaaaaagctcgtatttttgatcatcaaaatgatcagaaacatttgtgggttcatccttagtccgtgcacaataaaggaataaccgctggaggatttgaaccaatgggaaatgtgaggaagaaacaaagggacgaaccaatgcaccaataagtttttttgaatagattaattgaagttaaggaaatattggcaaaaattccaaggaaaataaaatttataagctatttgactcaaggacacttatttttaaacatacttcgtcctgaaaaatgcacaaataagcgttttttttaactcccaaaatgtactgacgaatttttaaaac

SEQ ID NO: 34855 - DNA, 1699 bp, Heterodera glycines
taaaaattctaattcttttttttaggcttgtataaaatgtcatagaggtgttaaaaataatggtaaatgtagtcgttcctgtgggtatgtaagttgcttcaaaaatttcatcacatttaaaaattttagaaatattaattatactaaaaactccttgttcattaaaatggatcttgaagacaaatccggagtgatttatggaataaattgctatgaacccaccgttaataaaattataggatataatggagaagaaatcaatgtatttgaacaggaacaaaatgtatgaaaaaataaacaaaaaaaaagtgaaaatttttttagtggttggcaatcaccgatgcatttgacaaagttttatatgaagccgcccatttttttcgtctttttttaaaaactgtaagaaatttttttcaatttaatgtattgtttttttcaggatggcgcaataaatgccactgattttgaaagaacaataactaattctttcgattatttgagtgtttgaacagtgaactgaataaattttgtgttaacttaaaaaattttttgatatcattttttgttaaaaacaaattataattttaaaataaaatttttattatttttaaaggtttaaggtaaaggtaaaaaaagacaaaaattaaaggtaacgaatagctttttttcatataaaaaactagtatctattttttagcaagtatgaccgagttccttgtttttacattcggagttttggcgactgttgtttttttcattttgataaatacattgatgatagcctatggtatttatcagacattcaacacttatgtgtatgaatatggtatatttattttgagttctaaaaatttgtttaattttagaatatgacgatgaagaagaaattaatgaaactattaattcatcgccccaatattttcgttaaatgatcttatttattttgaaacaatgttgttctttgaaataatttttgttaagtgataaatattttttttttagttactcaaaataattttgtttgaattcaattaaatactttaaattgaaaatttttgtaaatatatttttagaatggaaatgttatctatattattaaactattttaaaaacaattttaaaaaggtaagtaaaaaaagactttgaatactaaaaaaattttttaaggagtcctttatatggtatgataataaacaagagctgaaaaatcgtttaaaatgccaggattctaattacaatttggctattcatttggacactagctatccctacgaagaatttttggatgtcgggggcaaagattttttatttacatttctgttttatgaaaaaaatgttcgatgttgttgtggcaatgtgatcggtacttagaacttatttcataatgggattgtacggttggagaatgagaccgaaattatcgtttatttttatcgggaaggagcacagcgatttgacagaaacaatttatatttgagccgtctctacagaatacgtatccctcttagcgcaatattgacatggcttcatagaactgagtgtctaatttcgcctgtttttataattctgaaggctttttttgtaatttatgacaggtttttttctttttttttaataataaaaatatttttttcttagggaattgttgcatcaatggaaattatttaccgatagtgcgccgacgcttaaagaaatatgt

SEQ ID NO: 34856 - DNA, 896 bp, Heterodera glycines
  unsure (1)..(896): unsure at all n locations
tgaaaataggaatttgaccatttttaatagattttcactgtagaatctggcactcttttaggtcaaattttcaaaattttaagggatttttgaatctcggtggtgccgataggcaccgacgttaattttttggattttcaattaatttgggaatttggttaaggatattttgcgttttcaagtaataaaatagagacacttattaataattacttaatgagcgatataagaaaaaatttctaaggaataaaaagtcccccacataaaaacatagatattgccataaatttgcaattggttgtttttagtagttaattttacataaaaatgaccattttaggattttttcctaaaaaagcataaatcagcaaattttctcaaaaaaccagctttgacgccttgaaaagcagaaaatattgataaatcagcagagttgggagctcattcttaaattattttttcgctaattgatcaagttttttatcttacacaattagcttatagactaaattttggcccaaagaattcacaagaattgacaagtcttacaaaaaaaaagcacaccactattatttcaagagttattactcaagcttaggttgcttaattggcaaaacccatttttttgaataagtaaattcagatgaaattttagcgtggaaatgaattgtttttgatagagatgttttttaacgttttcactattttcttttcccagtgagtaaaaaaaaaatttttcgcctttcgatagcgcctatgttgttgaataactatttttttatggatttaatttccattgggaagttaatgttaatgtcttcctaactttttgttgaccaagttcaaattaacaatttctgatcattgctgaatttttgagcanatctgaatttttg

SEQ ID NO: 34857 - DNA, 1241 bp, Heterodera glycines
gtccaacatgggaaggcggaaattgcgaggatgggtgaaaaaaaatttttaaataataaactaaattagaaaatttgaaaaatttaaatttttttaaataaattaacaaataaatattatgaattggaatccaattgtagaaataatgtaaaataaaaagaacaaaaactaattctgaattaatagcattctcatctgttaccgggccctgcttcaacgaggtaaccatttggacaccagcagcagaaattcaaaagtcaaaagaaaattcatcgttgatgctaatatggtggtaaattttggggtacataattaaaaattaattaattacatgtttaactccccagggaaattcgattgaaaaggaatgtttggaaaagatgccaaaggatggcaacaaaaatggcacaatcatttggcgcgccattaaaatgcgcacagtgccaatgcaaacgaataacaatgacaaagaaagatcaatcattttggagtcatcaattgcctttaagaaattgttagtacatattttatttattaaaatattaagcaaaaatgcgtaagtgaactcttttttgtaattttaaaatttttaatcaaaaaaaaaaattatagtaaaaagattataaattattaagctatacattgggagcaggaaaacggctttctctgcttttcgactggaataaactgtttaagccattctctcgcttttctttggaggaaaatggtgataatttaattatttatgttttaatatttcaaatttggcattctccacaattctcaaaatgccattctcagatttcgctgggcgtgccatgcaaaatgatttcctccgttcaaatggtccgtcttttttgtcggattatgccgacctttggcttcttgcgttagacatgctgccgatggcacaccaaacagcagaagagcaaagagaacagctgaagatggagctgttcatcagccgcagctccaattgctccatggaagcatgggtagaaagaaaggcaaatccgtccgatcagtgaaatccaattttttaggtatttaactattttcctttatctgggttatgtggatatataacatttagtaacaattttcccagcctaactatttgatcaaatttaattcccttaagtttgtccaaccgtcggattccgttggagcatccgatccgaaaatgccattcgacgattcggtgtgcaaactgaatccgattggaagaaaaacatgaacgg

SEQ ID NO: 34858 - DNA, 1100 bp, Heterodera glycines
ctgtgtattatcactttatttccatctgtgttccgaaataaattgaattgatggtcattaagcgtgtgtcaatttattaactgaaatttggtcctctccctccctccctctctctgtttgacgtagacatttggatggcataaagttttttggcgtttaaacattcgtcccctattagcgggtcatcacagaaaccgttggacatacggtacttatcctttttgtcatccccctgaattgttttaccttgttccccccattttcgaaaaaaatgaaaattttaaaaagtcgttaaacccagggctcggatcgacaatttttcaaaatcagaacagattttgttttgcgaaactgcctccaaattagttatttttaaaattattcgatcaataatgtattatttttttcgcctccgattgtcgaatttaacgatttttggggaggaaataagcaaatcgtaaatttcagtgcattcgggatcaaacaatgagatttttaacaattttttgcgggtgcagtttttccataaaacttctggtgaacgggcgaggggagggggtccggcggaaaactgatttgttaacagaccaaaaaaggccaatttttccaataaaaggcaagcaatgactttttcaaaggaaagatttgattgtccggcttgttatttgtgattttttgaacgagttctgtccttatttgtgaatttcgtcatttttgtaccagtgttacctatctcaggaattgaaacagaaggaagggcacactctgaatttcagtttatctccaaatttgggcggctaacattcgaattccaaacgaaatgtgtgactggtagacttataggaaggaccacttttgtctaaaactcattttgacctgaatttacaaggagtgagcagaccgagttctacgcgagctaagcctccgaccaaacagacgccaaattttaccaccccgccccccttcgtacaaaggcattgaattgaagcacatatgagcatttattaagcacaacaacaatacaattacataggcaacgattaaatatacatccatttgaagtgatgatcacagaaatttacatacagatacaacaattt

SEQ ID NO: 34859 - DNA, 963 bp, Heterodera glycines
  unsure (1)..(963): unsure at all n locations
atataatctctccaattttgcaggccttctccattgtaaagtactaacttaacctgaaaaaatgccaacgcttgttgtttttaaaatttttcgaaattctgactttttcattacttatttattttttgcaaaattaattcataagtattttttcagaaagtgctctgaaacacacaaaactttatttacaggttaattaaggctctctgatgctttttctatcaaaagggagatgaataaatattttaaaaatttttaattcctttttaaacaggccaaaaagtttaggcttatattttaaaaagtttcatcgaacctagcgcactaaaatcgatataatctctccaaattttgcaggccttctccattgtaaaggactaacttaacctgaaaaaatgccaacgcttgttgtttttaaaatttttcgaaattctgactttttcattaattatttattattttgcaaaattaattcataaatattttttagaacgtgctctgaaacgcaccaaatgttaattaaaagttaaataaggctctctgatgctttcactatcaaaaagggagatgaataaaaaatctaaaaatttttaattgctttttaaatttgcgaaaaattttaggcttaactttttttttataaactgatcagaagcgaaccagattttgcgagggcatcaaaaagacaaggaaaagcactgctatgatgctaactccagtaattctgaatttaaaattttttattaatttttaaagcttcactattttatttttttagcaaaattaattcataaatattttttcacaaactgctctgaaacgcaccaaattttatttacaagttattttaggcactcagatgctttcactatcaaaaaggagatgaataaaaaatctaaaaatttttattngctttttaaacatgcgaanaattttaggcttaactttttttttataaactga

SEQ ID NO: 34860 - DNA, 824 bp, Heterodera glycines
gtttaaatttcaaggcggggtaaaagcatgacagcgttaattttctggaccggtaaagtcgtaattacgggaacaaaaaacaattctgaaattgaggaaatgtatcatcatattctcccctatttgaaaatggctcaaaagaagttagggagacgataaaaaatttttcatttattgggacggtcccccaatttatagttctgttgggtatttattttgttatcgattacttcgcgcggcgccggcatcgcggcgcaccggtggggcggagaggaaattcatggttttggcaaattttcaaaattcagaaaaatcatcataaaaaaaaaatctcaggatttgagaaaataaaaccggcccaaaaggtttgggatcaaaaagatttaaatttgcaaaagaaaaattgaatttccttcacctgtcacttttggtgacaggtggatgattgatgaccttcccgcggcgctgcgcggcgcggagagggggagtgaaaaaaaaaatcgccagtgcggatttgaggaaattaaatctacaaggcggcagacttcaaagaaacaacccctcacatagggttcggttggcacgcacccctcctataggcttgggattgtgcgggaaaatgtccccgggcggtaacatcaaagggctgcgcccctcccataggcacgggtttgtgcggtaaacacccgtgcgcaactgtgcgcttttgacgtcttatactactcacatatatcacacatactccaaacaaaaacaaataaaataaagggtcacaaaaactaaaacaaaacgccaaaataattcaaaataacaatgatatgaca

SEQ ID NO: 34861 - DNA, 985 bp, Heterodera glycines
tccgtcattgctcaccaactgttacgcgtacagcaacggcggcacttgcatccgatgcagctgttcacgggctctctaaacctatttttatttttttctatctcttctctgaatggagttataacaatttttcacaacagttttgcatttaacagacacattctaaaaattctaattagtatggtagtccaagcctattattattttttttgactagtctctgaatgggttatcccagttttagtatcctttttgaaaaacaactattttaataactgatacggtagcccaacatccattgccccaatgtacccttcggtttgtcaacgggagcaaacaattgatgagtttgtttggtttcttttttaagcaattttccgtcattgctcaccaactgttaggcgtacagcaacggcggcacttgcatccgatgcagctgttcacgggctctctaaacctatttttattttttttctatctcttctctgaatggagttataacaatttttcacaacagttttgcatttaacagacacattctaaaaattctaattagtatggtagtccaagcctattattattttttttgactagtctctgaatgggttatcccagttttagtatcctttttgaaaaacaacaattttaataactgatacggtagcccaacatccattgccccaatgtacccttcggtttgtcaacgggagctaacaattgatgagtttgtttggtttcttttttaagcaattttccgtcattgctcaccaactgttaggcgtacagcaacggcggtacttgcatccgattcagctgttcatgggctctctaaacctatttttttttttctatctcttctctgaatggagttataacaatttttcacaacagttttgcatttaacagacacattctaaaaattctaattagtatggtagtccaaacgtattattattttttttgacttatctctgaatggggttat

SEQ ID NO: 34862 - DNA, 763 bp, Heterodera glycines
aatgtaaaaaacctataaaagttttcccgccggcacataaaaattctttttctcttaaaaaattgagtcaaaatcgcaaaactttgtcattttttggtgtaaatatgttaacaagcacacacaaatttaaaaaaaattttccccggcggcgcctactggcactgccggaccccccccccccttgtaccccaaatttttttgaaaaaatttggaccgggcccggattagtggaattttatgcaaaaaacagagtgaagcaaaggaaggccttaactatcgtaaaatttcgggttttctttttagagctccaataggcttggaaaacacggcaacctcttcctcgttttccgtgttgttactttcttttccgaatagttttcttattttttgattgaaaatttgccattttttgtggccaaagtctctttgtccaattttttttttgttttatccgacaatgaatgaaagcgtaaatcatttgtgttccttttaaggatttgcaagtgattttttcgcgcttcggcgaaattctcagctgcgaagtgatttgcgaccgtcgcaccgccgcttcgcttcaatatgcattcatcgaatttgaaaagccggaacagtgcgaggccgcctatttgaagatggacaatgtgctcattgacggtgtgcaaagtgcaaagaaagcgaagcataattgcccttcttaattaaagcaattcatatcattaggaaacggacaatttgttggggaggggggggggggggcgatgcg

SEQ ID NO: 34863 - DNA, 910 bp, Heterodera glycines
taccccgaggggacggagacgaaacaaaatgccattttcagaggagtagcgggcaaatggaggcccgttatgtttgaagaagttgaaattggagaatttttactcaacacatccttttaagaacattctccggaggaattatttgtatgcacaaattgccccggaaaattttttaagtgcttagagaatttcagaattcccgagttccaatagaaaaaaaaattaagggtacggaatccccagacatttcgtttcgggactgttccgacagactcccgagtctgatcccgtttcatcagcagatatttttgggactttccagaactcccgacgagccaatactcgagagtgggtggactcaagtctgtaaatttcaatcccactgattttttatcacataccaaaacccagaaatggtccggtcctccatcagtgggtcttgaataattaacccctttggccctacttcatctcccgaaaactgacgttatcccgtatccccaaccctaacgattcccgggatccccaacaagggcgtagcaggggggggggggagggcccgaaaatcatttttagagcataacaactgatgacagccactgtcattgtttccaaagagatttctattaccagattgccaaaaaaagagatagccatttttttggaccgtccatacctcacatatactcaaacggcccgaaaatcatttttagagcataacaactgatgacagccactgtcattgtttccaaagagatttctattaccagattgccaaaaaaagagatagccatttttttggaccgtccatacctcacatatactcaaacggcccgaaaatcatttttagagcataacaactgatgacagccactgtcattgtttccaagagattctattaccagattgc

SEQ ID NO: 34864 - DNA, 887 bp, Heterodera glycines
attttgtgttgtttttgttgaaaagcaaacatttgctgtaaaatcatctgagattcgacatcagcaccctcccagaaaccccaagatttgtgtttttattgcgaggtatcgtttgtgattccatcaaataggcatacaacaatgacgtttggaatcagaatttggacaaaaccatgacttcgcgttacgcggtcgctcgcgtttcatccttgccctatcttctatggattagcttctataaattagcttacatatgataagtttggtctaatgaaacgagggtgaatgttatcgttcatcgaatttatttcttatttaaaaatcattgtattacgaatttatttagcttttcctcgtttaacttttcctcaaccttttgcctctctttcctcccaatttttcttttaccaatgtattctttccgttttttcctcttcgtctttttgttcatccattttcgtttcattggcacggcacaaattgtgaatggtcagcagctggacagcaattcggaggtgtgtttttcgtattgtatgtcaatctcccctcctttttaagcagcttcagtctaaccaaacgtacagtgtcaccaacgtcgaccgcatgtccaatgcgttccattcgccaacggacaatcagacgacttctcttctcggagacgaaaccctcaaacccagcgacaacgaagcgaactgtacgactacggaaaatggttgcgagttgaacgatggcaaatattgtacggactgtaaaacaattggtttgccattttttgcgccccctccctcttttgggaggtggtgaaaatatgggattttcccttcccctttatacatatcttggtacttatgcagtttaggccacacaaataaaattttttttgtttt

SEQ ID NO: 34865 - DNA, 1177 bp, Heterodera glycines
tcttcggaacaatccttggttacggtgaatcaatgggagttccaaggccgaggaggcccacatgcccacattgtggcgcaaacagacctggacgcagttccatatgtcattcaggaatacatatgggcgcacattccatctttgcctgataaagatgacgacacgcccattgcaaaaatgcatcgcgaaatccgcgaaacaatgcatatgcaactgcacagatgcagtgacagttggtgtggtcctagcgacccaatttacgggcggtgcaagaaggggttcccagccccttactcaaaatgtacgattttgcgcccggacaggcccgcgatgtatttccggccttcaccatctgatggtggtgcccaattagaggtaaacggcctgatatacgacaactcacatgtcgtgccgtataatccttatattctgctgcgttaccgagtacaccataatgtactgtttgcatatggtaacaaagcaaatattaaatacgcactcaagtaccctttcaaagggccaggacattgttatgtcgagtgcaaagaagagtccggcaataaaattggaattgatgagccggctcaatatgccaagatgaacttccgtggtgcaacggaagcatatgccattgttcattcaatgccatttgcccgtctttcgcatcatgttgtcaaattggcaattcatttgccaaaccaacagcccattgtatatagggcattccagctggtgagcaaagctcaacaaatccagcaaggcgaactgccagaaacgcagtgttcagcctattggaaacaatggcaaaatgagtggaagaatgatccaaagtttaaggacattcttttcgaaaaagtcccagagcggttccgatgggcaaaggacaaatgggtcctgtacaaaaggcagcaaattaaaaggccacctatcggccgaattgttcctgtacccccatcggacccggaaaggttcgcgctctattcacttatgcgtcactttcctggagacccagaccatcttaagatggttaatgggttgctttgtacctcattcactgaggctgcaataatgcatggtcttcttgaagacgacaaaatatgggacaaaactctggcggaggcagctctgtcgcgctggacagatcagatgagatggctttttgtgagcatcctggtct

SEQ ID NO: 34866 - DNA, 1019 bp, Heterodera glycines
tgaatttttctttttaaattttttattattgctgccggtctatttaatgggtaattaataaagactcatagcttaaaatttttctttattttaatgactttgttgccagaataataagttttaatttttagtaaaaaaaaaaatcacgattctttgcaataatttgttaaatatttcataagtctttgatttgatcagccatgactatactatcactgatcagaattgcaaaaaatttaaattaaaaattatatacattttttcaattatttttaaaatgaattattttaatactaattgacgattatttgtaatttattaataatcattaataatctgatagcttctaattatatagggaaagatttcacacaagtataaattaaaagatttgtttttaatacctaattatcttttcttctatgtaattaatctgatgaacatttcgccccataattctgtacatattatccttataatccttctgctgatcaatttttttttattgatcatgcgcgaaaaccccaaattgaaattcttctgtccaactaattagttaattaattaataatggttctaatctgctgatcagccagccagccagtcaacatgcattgatcggacaattaaatcgcgttcagtcacaaattttgccggaatttctcgccttcgcccccctgccgatccccagtctgccgatgatggattggattggcgttttgtttgacaaaatttgctcccccccaacccacacttctacccccaaaaactcgactctcccccaccccgccatcatcttttcatcataacccataaaccatcaccgtttctcaatcaaatgtcctttccaatagtcacccaattaaccagaattaattaatttagaattaatctagaaaactggaggttaaaactattttatatatatatatttatcgttttgaccatggcatttaacacacaaatttttcctaattttggcactttgttattttttattcaattctttacttcaaaac

SEQ ID NO: 34867 - DNA, 879 bp, Heterodera glycines
ttcatttaaataatttttatccaaaaaatttttttttgggttttcggggcagtccccctgaaccgatgcgcccagatttatggggagaccgaatccttccggaatagcttcactatagcctgtactttaattctgcgttggatttttgctccccataattgtttgagtaccccaaacggacacttgaaaaaatcgatttatttttgttttcggggcagtccccccgaaccgatgcgcccagatttatggggagaccgaatccttcgggaatagcttccctatagcctgtactttaattctgcgttggatttttgctccccataattgtttgagtaccccaaacggacacttgaaaaaatcgatttttttgttttcggggcagtccccccgaaccgatgcgcccagatttatggggagaccgaatccttcgggaatagcttccctatagcctgtactttaattctgcgttggatttttgctccccataattgtttgagtaccccaaacggacacttgaaaaaatcgatttttttgttttcggggcagtccccccgagccgatgcgcccagatttatggggagaccgaatccttccggaatagcttccctatagcctgtactttaattctgcgttggatttttgctccccataattgtttgagtaccccaaacggacacttgaaaaaatcgatttttttgttttcggggcagtccccccgaaccgatgcgccccagattttatggggagaccgaatccttccggaatagcttccctatagcctgtactttaattctgcgttggattttgttccccataattgtttgagtaccccaacggaaacttgaaaaaatcaatttttttgtttcgggggagtccccc

SEQ ID NO: 34868 - DNA, 1112 bp, Heterodera glycines
  unsure (1)..(1112): unsure at all n locations
cgctacagcaaatgggactgccaatagggttggtttctttgccaggagttgcgtcgctactacacggagagtgggtgccaagtggccacggacattgcgatgactgtccatttgctgcgaccgatgaatcaccggtcggaaatcgcacgttttaaggtgataaataaatgaatggacggacggacaatgcaggacgaacgaccgcattttagaacatttgcgaggcgaaactgatggtacgcgggcaaatgccgttggtcaaactgagggagaaaattttctgtccgtccgacttttggtcgaacctcgaggactatgaggtgctcaaggcctccgattgctttacggtcggtttttctccattttctattctcctttgactgggttttcaaaatccaggacaaacggtcgtaaaaattcagattttgacccccctaaactcagatatttttaagtccagcgaattttttaaatttcggacaaatttttaacagttttaggagaaacgatcacaaattttgagattttgtccaaccttcaaaattcgttgcatgacaatcgtacaaaggcaactcgtagcagttttaaaaaaacacaaccaatgaatttggattatatcttttgatcgaaaaacttgaaatatatttttctaaattttttaaattttttctaaataagaattttcaaattttttctaccaaaaaattgtttagaattttctttgaaaaaatttaataatttatttgaaagttccattcagaatcgcttcacctccgcctttttcttcattcacgacaccttttacatcgaccgtcgtcaccccaattcgtccgacatcactcagtcagtcctggctaaagttgccgaacaatttttgatttgcatgttcaatttcagaccaatccgcgactttttgagccgcaagaccaaacagttcggccctcacaaagtcgaggacatggccaatgttcggatggtcgacctgactgtgcgtcttggccagccttacctcttccaacaccaaggccgatgcgaacacatgtaaaaggggacggacggaaatttggtgaccctccgaaatgngaaaaaaataaattttagagagaaaatct

SEQ ID NO: 34869 - DNA, 843 bp, Heterodera glycines
ggcaataaatggtgccatggctattggatttgccagtgtatttaccggagcaaaatcgggaattattaattttcgattatttttttaccattctccggcaaaattttgctaaaagtggcaaattggcgcggaaaatttaccaatttttaccatggcaaaaaaggggacgaatttgactttaggagcgcataatggcatttttgtcaatcttcctggcaatgaatggtgccatggcaatgggatttgccattacgcggacttatcggagcaaaaagcggtaattaccaaattccaattgctgttatattttcccgcaaaaattcgataaaaatgtacaaattagggaggaaaatttaccgttttttacaatggcaaaaaaagaaaaacttttggcatgccaacttgccagactggagcataaatttaatttttgttctcacccacctgaagcatgaaggtgaccagcataatattccctaaaaattaaaaaataataaaaacaaaatcaaaatccttaaataaaaattataaatatttttttttaaatttaaaaaatccccccccccccccaaaaaaatgctcaccaatcgttttgacggcaacaatcacacattgcacaacatgcttaagccctttggcgcgattgatggcgcggagagggctaaaatgtttttaattgaattttaaaattattttttttggcaaaatgccaatgttttctttttgcctaccgtaacactctgagcacacgcaaaattttgaccaccgaaatggcgtccgatttgagcacaaaagagacaagcgaaacagcaacaaccaaaatgtcccagcaattgaacgcat

SEQ ID NO: 34870 - DNA, 941 bp, Heterodera glycines
tattcttcaggcaaagtaaaaccctaatttttcacgttttttcccatataaagcttcaacgggcttatgcttgttcatatccaactgtcttccgcttcatcaacacaatttgatatgagaaaagtcaattgatgcagacattgcacgatgcgtcgctggtgaagtccctcctcaaaaacgcgcaaatatcgtgccgtcgatgcgagaattctcgactcttacagggttacaataccatcaacaacatcaaccatgcttaccaaaatgatcaaaattaccatacaatgttaatcctgataatatcttcaattttctcgttgaatttctcaaaaattatgtaataaacccgtagtcattcttcaatgttttgtcattttttcgttgaaaacacactgataaatatgttatggtgttaattttaaacatttttcgaaaaaaaatctgagtagaatcaattttggacaaaaacagcttgccagactaaaacgaccctctgactaaaccggccagactaaaccgaccagactaaaccgacccccaccgtatctatgtataatgttcttgcatcaaataaatcattcattttatttttatgtccttttttcgaattttcttcccaaacaaaagaaattccagattctaataagaaatgagaaatgccaactcaatatgatgtcgtcctgattcagcgatagcaaggcgagtctccatattttcttttttaattaatttcacttcagttgctgtcagtgctcaaacaaaatcggcggtggagcttcgacggcacatttcgcagtgcgccaaagacatggatgcaggtgttcgtcatcggttgttatgtcaacaaccgaatggtggttgcagctcaagccttactgcctggtaaagcttctaagtattacacagaagtccttcagcagctgaaagcgtcaattgaaccc

SEQ ID NO: 34871 - DNA, 943 bp, Heterodera glycines
aaaacgaaagactcagattttcgaaaaatttttttgagccagctagctcggcgctcatttcagtgtaagttagtcctttaccggggagtatccctgcaaagtttggtacgcttctgctcaattagcaaaaaatatgagtgatcgaattttcactaaaaaagttaagcctacattttttggcatatttaaaaagcaattaaaaaattttaaaatttaataattttcctgcaccgaaggtactcactcggcctcttcgcggcctcgtggtgggccttcgccccccccccccctcccacgcccttcagagcacgacaaatatttcaacaaaaattttgaaaaattgactagagcaatcgaacgctaacggacgacctaatggaaaaaaatccccgaaggagagaatttaattaaatccattccttcgggggaccgtgccgggtgccgcggggtaagcagtgctggttcgtttcatcacggcaccgaaccttttggctagtcagcaatcgttgcttaacttgccagatcggacgggtgcgcatgactttctgaaaaaaatatttatgaaacaaaaaaatcgattttttcaagtgtccgtttggggtactcaaacaattatggggagcaaaaatccaacgcagaattaaagtacaggctatagggaagctattccggaaggattcggtctccccataaatctgggcgcatcggctcggggggactgccccgaaaacaaaaaaatcgattttttcaagtgtccgtttggggtactcaaacaattatggggagcaaaaatccaacgcagaattaaagtacaggctatagggaagctattccggaaggattcggtctccccataaatctgggcgcatcggctcggggggactgccccgaaaccaaaaaatcgattttttcagtgtccgtttggggactccaacattatggg

SEQ ID NO: 34872 - DNA, 1054 bp, Heterodera glycines
tgtgacggcatcagcgtttacagtgccgacggcgatttggcacaaccactgcagaaatagcggaaaatgggacgaaaaacgatgacattgacggccgtagtgctgatggtgaaatcagcaaatataacgcactcggagtttggctcgagaaccgagcaagcttttcatttatcgtttaatgtatcatttttgttgctaggacccgcaaaatcttacaaaatgattcccagccctagtaatgattggagttttattgtaaaaaaattttcgcttttcacccccaccacttaattcatgaaaatttttttttcattcaggttccgccgataattttttccaaattgctcgctgttccgacaagatcgtaatgtatcactttggttgttggaacccgcaaaatcttacaaattgagccatataatgtccaaaaatctacttacaaagtaccttttttgggaggggcgcgtttaccggctgaaacataccccctcccccccaaaaaaatttttttttttattttttgttttcttaggtatttggtaaaaaatttatgaattggatattttgatcgtcgttaatgtaaatttttatggaacatggtgacaaaaccgaaaagtacaaataacctaaattgcaaaaaaacgcttatttaaaattaatgtttaccaccccaatttcttaacagattccaccgaccaattttcaattttgtggcttgctgttccagcagcagaacatgctacagagaatcacccgaaccgccgcttccctatcagcggccaattttcaaaaattggcacggtttctgggaaggttcgttgttgcaaaaaatatataggtaatattaaaaaaaaaaaaaaattcaccccgaaaaaatatgaaaaaataagcatcgctcgggaaaaattcgcaaatttgtcattgcccacgcaaggcatttgtatggcatttttgataaatttcaaattttttgattctataactatacttcttaattttttttatataaaaaatttcttatttcgaacttcagcaaaaaaattgaaattttttt

SEQ ID NO: 34873 - DNA, 821 bp, Heterodera glycines
  unsure (1)..(821): unsure at all n locations
tcccttttttttagctgattttcctggaagattggcatcaaattagagatataattagcacaaaacggacgataaaatggaaagggaaaactaaaaggaatgtttgttttcatagaatcaaattgagttcaaaagagtgccgaatccctccccagccccagccccaattttaatatttcaaatttaaaagcctaaaatttaaccctgaatagttggggtgacttttgagtcggtggtgggttcttccgctcaatttcatgtgaatttttacgatattatttctgcttccccgtccaattgggaaataaaatggcacaattataataaagtagtcgatggcagaggagggcacctgctgataaatggccatggcacggaattggccaaatgaatgacaatgaattaatttacgtgcccattttctccgcgccctccgaggcggccacagtcccgcctcggagaagtcattttgaattggcaatgccaacaatctctgttttaaggagccgacagcaggtgattttcgaggaactcattggccgggngggggggaggccattggcacaaatgcaagggaaagaaaactgacccccccccgcttaattgcctgctagatgacatggcccctaacccaatgtcaatgtcaaactgcacacattggcgttgcacctgtgccgtcgtcgtcatcgtcgtactatttcaattgggcacggcattttagagttttcgggcccaatgaagcggcaatactgctgcacatgcgcaatctgctcgactttttgcggagaactgctcgaattttcaatgccttctcctccttc

SEQ ID NO: 34874 - DNA, 925 bp, Heterodera glycines
caacacttagcgaaaacaggttagcatatctcagcgcaaagggatggcattttttttttgaacggttcaaaagttcttaaatgagatcagatggctaacgcaaaaaaaattttcccgaaattcgaccgggaaagcaattccgcagaccaatttgcagagagccccccccccgtttttgtattattacactgaatattgtaggctatttgatctgtgtgtttttattgcgctgatcaagcatttcattccgtctccgatcactgcttggtttgaccaactaatcaccgcaattttattgaacattcgcgcggcaaagaatggacccattttatattttcttttttaaaattttttcttctcttcaattttggtcagcattttaatccagacccccattcataccagtgtattttcggacccggttggacccggacctaccaggtcgggtaccgggtattggattttcaaaaaatcgggtccggtccgggtcttgaaaaaaccgggtatccgggtctgagacccggtcgggtcccggacccgaccaaccctagaaaaaaactgaacagcatcgaaataaatcaacattaaaaaattgtgtcatttctaataaattttgaaataacaatacaaaaaatatagaaaataaacaaaagcaatccataaataataatcataatgtaaaattaaacaaaaaatgatttaacattttttaaattatttataatttttctaaaaatatatgaaaatttaaatttattgatctcaaaaataatcgatttgcgaataattgtctgtaagtagaaaaaaacaagcgttgcttaaattatctatttttcatttatattatttattaaaaattgtaccgctatgcttttaaatttggaagattaagattataacccaagttatgaagttcgaaatttaa

SEQ ID NO: 34875 - DNA, 831 bp, Heterodera glycines
agacccttcgagcaccacagaacggccgtgaatttgcaaaggcgcttctacgacttgccaggccaaagaattaagcacagagacaaactacataaattaaattgccaaggaaatatttactattttacaaaaaaagtattatggacagcacttcattggttctgctgacaacgggcgtctttttgttgttgttacttttaggtcgagtcaaaagagcggtgccatttatcacaatagccaaatcatccgcaaaaagcgatggaattgtcggttcagtttcagcagttgcgagctcaatcacttcaatgcccgcctgggctgagatttaattaaagaccaaataaaaatagcacctcagtgagagtctctgtcaagtcctggtgttgtctaagtgcaagcggaaaatcaattttggactttgcctttttgtcgtcgaattttaaagaagaaggcattcgaatagtgatcgcatgtgtgtatttcattgcttgtttaattttgtcagcacagcttaagagacagacttttcgattagaaaataaaaaccaatacaattttcattgattaatttgtttttgggacgagaggaggaagctaatgagcctttgaagtttttgtgcacattatgtatttccggtttctctccaaagactaattagttgtcattaggcaaaggcatttgtacatacgccaaaattcccctgctgctgttaatcaccgtctccgccttttctctttttattggtgattttgattttcagctgcaaatcaaaagcaagcagcaataaaatagacggtacttttccgccgtccggggatagctgtccgaat

SEQ ID NO: 34876 - DNA, 973 bp, Heterodera glycines
  unsure (1)..(973): unsure at all n locations
cccgacccccttaattcctttggtatttctatttcaaaagcccaaaaattttgaataatttttttttgaatttttagcaaagaaagtgccaaccatcaccagggctggggattttcggcacttttcggaagccatcgaaaaacagcggaaacagcagctgaaaacgacgactcggcacaacagcaacaccaaaaccaacaacaacagcaaatgccactttgctgcgcattgttctgatcaaatgatcagtgatcactgatcagagattaatgttttatctcttatttttgaattaatctttgccgcgatcgctttttttgattgattgattgatgattaactccgttttgaatttaaagtttatatgtattttatttttaatttaacaataaaaaattagagccattcctttccctccgacgtctcccctttttctctctctctctcttccttctttcctctaaagatcggaccggtctgtttttttcggtatttttcggtttcggtttttaaccgaaaaaccgaccgagaaatttttgagtttttcggtttttttcggtttttaaccaaaaccgttcgaccgaccctcttgtccggtctctactttcctcccttcttttctccttattatcaattctcctcattgtctctctcttttccttttttttctctctcatgccatcttcccctctacttttttcactcattatcatttctcctcattgtcctctatgttttctcttttttctcctcctcctcctcnctcctcctctacctcctcctcctcttcctctctctcctcttcctctctctctcttcctctctctctcttcctctctctcctcttcctctctctcctcttcctctctctctcttcctctctctcctcttcctctctctctccccctctctctctctctctccatttctcgcttttctctcctccctctactccgattcccatctctaaatt

SEQ ID NO: 34877 - DNA, 1405 bp, Heterodera glycines
taccggctatagtgaagctattcacggaaggattcgcgtctccccataaatctgggcgcatcggatcagggggactgccccgaaaacccaaaaaaaaatttttaaggataaaaattatttaaatgaactgactatataatatttaaaatagggtatttctcttcctttcagtatccctgcaaagttgggtgcgcttctgatcagattctgaaaaaaaaggtaaggctaaactttttggcctgtttaaaaaggaattaaaaatttttaaaaattttattcatctccctttttgatagaaaaagcatcaaagtgcctaaactaacatgtaaataaaatttggtgcgtgtcataaccctttctgaaaaaatatttaagaattaattttgcaaaaaataaataaaaacgaaagactcatattttcgaaaatttttttgagccagctagctcggcgctcatttcagtgtaagttactcctttaccggggagtatccctgctaagtttggtacgcttctgctcagattaccaaaaaatatgagtgatcgaattttcactacaacagctaaggctacattttttggcatatttaaaaagcaattaaaagatttttacaatttaataattttcctgcaccgaaggtactcactcggactcttcgcggcctcgtgcgcggagccgttccgcgcatagtaagggttgaacagctgcgagactttttgactgctacattgcggaatcatagtggtgcaaaaatgttgccactccctcgtgagttggaagagaatcgaaatcggacaaagcctctcaactcaccaccaccggcgaagagaaacaaaagagatgagtcaccaccagtttttgatgagaacgggaacgagcttggctctcccccatcttacaatggagataaagaggatgaggaggaggaagggataatttctgagtcaccgcctcattatgaaggaatcgagactgtaacatttgacttccctcatcatacaatgaagattatgaacgtgttattgcggattcaccgcctcgttatgtagaaactcaaaacgagactataacaccaaaagtaccatctcgtcagccgcctcctaccccaagcactgctaagccggcccccctcctccaccaccaccgtctacaatttcgactcctatttcaataaagacaccggctgtccaaccaccaaagcctacagtatccacccctccacccctccaccacaaacaacaataacaaagacaccaccgccgccgccgcctactaagtcggctcacaactacaaaaacaataccaacccctccggtagcaaaacctaccacaccaacccatccggtagcaaaacctacgacaccaaccccatcggtagcaaaacctacgacaccaacccctccggta

SEQ ID NO: 34878 - DNA, 814 bp, Heterodera glycines
acagatagatagaattgtgtgatatatctgatgatgaatgtggaaaatgaacacactgttttgttgagctaaccaaaataatctttgtgccaattggccgggcaaatggtaaattttaaggacgaataaggaaggtgttttcaagggcgcatgccctaaggacgtgaaatcaaggacattttaaggtttggacaattttttaaaataagattcgaaaattgttgttttcataaaaccggcaaataactactcacaaagataaattagttgttttcaaggtcataggatccaaaagaagttaaattgcgaaattcaagtactctttaaattcgtcaggttacatttctaaatcttggtttgagaaaaacaaatgaaaaattatcaaaattttcgattttatgaacaaagattaggattttaaagaaatacaagaccaacgaatcgagtttttctgcctgttttcttgaaatttattttttaaaagaattgtatactcaaaaattaagaaattttcttaatacgggaaagcttttgaaatacaattccctaataaatttgaggttgccaatatattttttaaaatttattttcaggttaaaaaattactaatttttatattttattaaacatttttccgattttgcatttttatgctttcctaatccaccacttttttttttgtttggcggtgaaggtaaagaaatttaattggacgaagaatggaatgggcgtcccggcggggattggccggtcgaattggccggcacggcacatcatccttttgtataaaggaaatccttttcgggagaatttg

SEQ ID NO: 34879 - DNA, 906 bp, Heterodera glycines
ggtctcggtcaaagactcgagagcgtttttagtttgatcagtcttggacagcaatcgaaatggttgagaaaaatgccgccgggtatcatccgcccgtgctaacaatttcgcgttggttttttgttcactaaaattgtctgagtatcccattttggattttttaaatcctgtcttaagcatattttacaaaataataccacctccccataattctttttaaatcatttataaattttctaaaaacaaatttgcacccataaattttgcttacttatttactttaatataattgttttcttcaattattttaattaatcatttaggactttagaatgatattaataaaaaatttggttattcttgagtaaagttaagaattatttttcatcaaaatttttccatttgctgtttttttaagaaacgcccattttgtcagcctggtgaaaaaaaatattcgcataaatttatgcgttgaacatatgactataacatttattttaagctaatatacatttttaattaattataaaaggaacatgttttaaattcaaaatatttcaaaaaaaaaaaattaaacaatgtaaattccaatagctgtatgcattttgttggcataaggagcgaaaaagagaaccaaagttgtgtggcattttattaatgaagaataatcgtgccattaccacgcttttatattaagccgagaatagctgtccatagattaatcctcggataaatttccatcttatgagttagtcacagattttacgccaattttttgaattttttttatccttaatcactttcataatgattattagggtgggaatacttttatttaaatattttttcagctttattttgatgagaaatgtacgaaaaaaatcttttttttttgcggaattattt

SEQ ID NO: 34880 - DNA, 935 bp, Heterodera glycines
tgtccgtttgggggtactcaaacaattatgggggagcacaaatccaacgcagaattaaagtacaggctatagggaagctattccggaaggattcggtctccccataaatctgggcgcatcggttcggggggactgccccgaaaacaaaaaaatcgattttttcaagtgtccgtttggggtactcaaacaattatggggagcaaaaatccaacgcagaattaaagtacaggctatagggaagctattcccgaaggattcggtctccccataaatctgggcgcatcggttcggggggactgccccgaaaacaaaaaaatcgattttttcaagtgtccgtttggggtactcaaacatttatggggagcaaaaatccaacgcagaattaaagtacagactatagggaagctattcccgaaggattcggtctccccataaatctgggcgcatcggttcggggggactgccccgaaaacaaaaaaatcgattttttcaagtgtccgtttggggtactcaaacaattatggggagcaaaaatccaacgcagaattaaagtacaggctatagggaagctattcccgaaagattcggtctacccataaatctgggcgcatcggttcggggggactgccccgaaaacaaaaataaatcgattttttcaagtgtccgtttggggtactcaaacaattatggggagcaaaaatccaacgcagaattaaagtacaggctatagggaagctattccggaaggattcggtctccccataaatctgggcgcatcggttcggggggactgccccgaaaacaaaaaaatcgattttttcaagtgtccgtttgtggtactcacacatttatggagagcaaaaatccaacgcagaattacagtacagactatagggaagctattccctgaaggattcggtctccccataaatctg

SEQ ID NO: 34881 - DNA, 681 bp, Heterodera glycines
aagcgttaataaaaaattttatttgcctatttttgggttttttgtgcctattttgcgatttttttctgcctttttaggtgcctatttcatgattttttgtgcctaaaaatggagtccctattcattactatgggataaataataattaaaatatggtctcttgctgaactcgtgagttttaccagccctacaaattatgcgctaattcttttaatttcagtgcttttttctattctttttccaaattaactttcattttttaagaaaaatttaaagccaaaaacataaatttattttatattttataaaagacaaagcaaaaaatgaaatgggaaggaaagtgcaaagggaaaatgacattaattaaaggaaaacaaacaaaaacaaataaataaacaaagcacgaaaaacagatcaaagagcgacgccgtcgatgaacaattaaaattcgatgaaatagcaaaaaaaagggaggggaagagaaagagaagagaacggacacggtaacgacaagaggagaggaatgtgtacggtaggtagatgattgactgttgtgccatcgtattcccttccactaccctcgcccccccccccccccctcccctccatccgctcaatcgcttttctgtccaatcagaaatagaccgttggtggggtgggagggtccgaggaggacgactg

SEQ ID NO: 34882 - DNA, 891 bp, Heterodera glycines
  unsure (1)..(891): unsure at all n locations
gatatctgttcaaaatttctttgggttacaggcaccaccaccctaaataaaattgcgtttttaattttcaccaaaataaattacattttctatttccctccccaggcccctcgtcccaatttctcactccgatcggcgcatttgctgctcaatccacgcccattgctgcgccgccaattggcgatggtccgccgacggtccgttgggctcgcgtttctgcgcaaaaagccaactgaacagtgagtcgccctgcacgtcgacggtgttcccgcacagaacgacggtgtccaacattagcaaatcgacacggacggcggagggaggggagagaccgtcgaaggacaaacgcactttgtagaacagacgggggaacgtcctgagctacagatcattttcagtttcatggaaagccaaaggcccggcgaaagacaaagaatttttttaaaaatttgtccaatttaaagcctactcactacgccttacaattaacactcattttgggcaggcaatctgtaatccaaaaacaagcaaattgaggttttgttttgattcaatttcggcaaaaaaacaaaacaaaaattggacaaatgtttcataagttgtggtttgtttttaccatcggctgctgaaatcggtgcgtgccaattggcccgtcacattgcccaaatggtcgtggttacccgcgattgtgtaccacgggaccaaaagttcgggctggtcgtaaatctcttcaaaggaatcctgaaaattgcagaaaatcgcagcgatggcaaattttaaaatcgatttaaataataaacgaatgaaaaaaaaggaaataaaagtgaaaaacctcgaaacgcccatcanaggcattttggactccgttaaagtaaaaattgtcgccgacat

SEQ ID NO: 34883 - DNA, 962 bp, Heterodera glycines
ttcggcatctttcttagctttttcttctttttcttcggcatctttcttcgctttttcttccttatctatcttagctttttcttctgctttttgctcttctttagcattttcactttctagtaagagaattcgctgcttcaattctcgaatttccctgtcccgttggctttcggttgctttttcaggaaactgtaccactttttgttgttcagaagcacggcgttgctcaacagaattaagaatccgaacgttgctcctctcaaattcatgaagcttgggattataagggcgttgctgaatgccgtccacagtttgttgtttttccgactgttgttcgggttgttcttccgtgtcttcattttcggattcgtctgatgatatggacaccaatactggaggtggcgtaggagacaattggtttcgggctttacgaggatttttggggataaagggttcgtgacgagacatattttgtaaaaataatttttctggctgtaaatttttggagtttttaggcgaatgatattgggaaaatgatgtattatgaatagaaaattgtgaattgtagtattttaatgattcgcatttcttgaaattcctctgttactttccaaacaaatacaattaatttccacgctttcgtctccgtattccccaaagtcttggtgtgtcgcttccaaatttggtaagaccatttcttcccatgcaaattcgccttctctaaactcttcccaaaatattaccattctatcctctatcataactctgcccttttcccacagtaatcttctcatttcggtcccaatgtacggtctatcagcttcttccacaaatatttgtaaatttgtctcaaataaccagaccgaaatatatggtctttgcccttcagaaaatatttgccaatgtccctggactcgatttgtagggattatggaaagttcaaaatcgtccgaaaaatcgat

SEQ ID NO: 34884 - DNA, 1363 bp, Heterodera glycines
  unsure (1)..(1363): unsure at all n locations
aagcaaaatatgttcgccaagataacacataaagagcaattgtcgaacagttcaacgaacgcgagccacttgcttatcttcgcgcaatttcatatcactttcacttttaaataataggactttgaaaatggaacagagaaaaattatattaaagaccgaattacatttttttaaattttgattattctattttttaaaaattctctatagtgtcgaaattactcaatgtcgaaatggtccagtgtcgaaaatgcaggaaaacagtgaaagttttagaaataattcagtgtcgaaattacttagtgacgaaaatgtagtgtcgaaattacttagtgtcgaaaatacttagtgtcgaatttactcagtgtcgaatttacccagtgtcgaaattaccagccgcgcttttttgtgccaaaagtttttgaatttctggttgtctacccaaactaaaaaaaataagattctcatagaaatgcctactgttcgcgaaatatttgggtgcctgcaaaacccccaaaaaaaaggcgtcgccattccaacaaaacgaagccagcgtattcaatgaaatggcagccgcagaaccgtgccgagaaattctgacagtgacagattttgacagtaagaagaatttttaaaaattatttaaaggcaaattttaatagataatagatatttaaatctaattctcgtaaaatttttaaaaatgcaagtgatatgagcaggcatgatgaaattctaattggtcacgatgtttttctttctcgaatttgtaaccccgagagtgtggtctagtgcctattttctaggtttttattttttttatagtctaaaaagcctaaagatttttaaaaagacctattttggcgttttgcccaaaattattaacaatttgcccaaaattattaacaaaaatgcaataaaaacgaaaaatacaccccctaaaaatcgaaattccaattttttaaaatttgttataatttgttggattcaaacaaatcgtagctctttgtttatcttcaaattataaattggcacgaactttgtgacaaaatcaaaaaattttcaaaaatcaggcgctgagcaaataaaacacggacaattaattgaaaaaattacaattgtgcaaactttcatttgaatacgggcaaaagtgtctgacggaaaccaaattttacgtgccattanattcgtataaaaaaggaattgaaattttaaattaatacattcattanaaatataaacgaaaaacatttttaaacattagtcttaaattcattgntgttttaataataaatagggactccattaggcacaaaatcctcaaataggcaaaaataggcaaataaaatttttattacgcttt

SEQ ID NO: 34885 - DNA, 1225 bp, Heterodera glycines
  unsure (1)..(1225): unsure at all n locations
ttgcgtcccgatgcggatggatgtacagcttaatntccaattaactaaatttaaaacacaggaacnccaaaaatatacaaaatcggtgctggaaaatggcgaccagctccataatgacagcgcgttcccctccttgatcagggtcttctcttcgtttacccatcccaagagtccctcaatcctggccggcacgtcacgctattcgatcgggaccatgaagtccccgacctgcacattgacccgacgaaattgaccggcccagcgatggccagcacccaaggcaaggcggtgaagtcggaagatgtgctgaaagtattcgaataaaaattttccttattcacagttttagtaattttttcaaatatggacaaattttgtcaaaactaagatttgccctaaaagcaaggctttggaaaaaatagctgacacagaatttttatcgccaaaattagtaaaatcgccggtgatggggacgggacaaatgagcacgaattttagctttattttggcctatttcgaaccttctacccgaattcgagcaagaaagtcgaaaattcaaattttcgaattcgcactttaaccttaaattgattaaacatgcaaaaatcaattgcaatccattgcaaaatttaaaatgggtaattttatacaattttaaaacaatgtaaattttgatttggcttttggttcgaattcgtgtatggagggagttcgaaactggtcaaaataaagtcaaattggtgttaagtgaccgcaaaaaacccttaggttttcacatcacttttttgtgccgcgctttttaaaaaatttggaaacaagtaatctggcagtggggatatgtgccacagtgcaattttttgaaagtttgacctatttcctaacagttatatccaaaaatgaccaagtattggattttggttaatttttacgagttaataaggtggatgctagttatggcgggccgaaggcaccgttgggaaaattttcagaaactttgatgaattttaagaataaaaaatagtttgtattttattaatttatttaaataattggcattatgtctaaaatttaaaaatgcattgcggatcccgttgagcaatagaaactcaaaattttttctgatcctatcccacgggattaatcacgcaatctgcgaactggaatacccaaaaatcccgggccgggatgcaaaaacaaaaattttgcttataggtttactcaaaag

SEQ ID NO: 34886 - DNA, 780 bp, Heterodera glycines
  unsure (1)..(780): unsure at all n locations
aagatttgttgtaaattaataataaaagaatttatgtaaaaataacaattatctttgaataaagaatttcatatttttttaattgaatttataaaattaatttcattttaatttaaatattcaattattgtacatttcaaaattctctttttaattaataaaaggaataattaatttattttttaaaatttataataaattgcattcaatttttgtacctcttctaatcaatctcagttgtacctcttctaatcacttttgtacctcttttaacaattttgtacctcttctgatcacagttgtacctcttttaatcacagttgtacctcttctgatcactgttgcacctcttctaatcacttttgtacctcttttatcacttttgtacctcttatcaaatttgtacctcttctaatctctgttgtacctcttctgatcactgttcttcctcttttaatcactattgtacctcttttaatcacttttgtacctcttctcatcactgttgtgcctcttctaatcaaacacagttgtacctcttctaatcacagttgtacctcttctaatcactgttcttcctcttttaatcactgttgtgcctcttctaatcaatcacagttgtacctcttctaatcactgttgtacctcttctgatcacagttgtatctcttctaatcaccgttgtacctcttctaatcaccgttgtacctcttctgatcaatgttgtacctctntaaatcacttttgtatctgttctanaatttaaaanacggncgcgaa

SEQ ID NO: 34887 - DNA, 1041 bp, Heterodera glycines
tttacggcgatttgacctacgcggaaggggccaacttctcacattggccacgctgtccccgcgagtacctatcattatctgcgacggcattggcaagcgctatttggtgcccggctggcgactcggctggctcatcatgcacaatcgcttcggcgtgctttccgacgtcaaagccggcattgtgtcactgagtcagaagattgtcgggccatgtgcactgatccaaggggcgttgccacgaatactgcgcgacacgccgcagtcgttcttcgacaacaccaaagcattgctagcaaaaaattctgaaattgtctacgacattctgtgccaagtgccgggactgaaaccgctacgaccccaaggggcgatgtacatgatggtcggctttgacgaggaaatgtacggggacgagacgggcttcttgcagaggctaatcgcggaggaaaggtaagcatcgttggcactttgctcttcctgactttatctctgtttcgctttcagcgtgtactgcttgcccggttccgccttctctctgcccaattggttccgtttggtgttggctttccccgaagaaacgacgagggaagcgtgcgagcggatagccgccttctgcacacggcacatgcgcccgtgcaggaaacaattggcactatgggggagtcaactggacgaggaggacggccgagggtcggaaggggcggaacggaccgcagctgaagagagtacgagtggtgaggaggaggaagacggccagagacaaagcgagcgatcagccgaatgatcaatcgatcggccgatcaaagcgtgccgaaatgcggcacgggcacacattcccatccaaccgaaaagcaaatctcaaacagtcgctaccgtcgcgtcatttatcctttttgattgtttatttttttctcttattaatttatataatttctaaacaaattactttgcttttatgcattctttcctatttttatccatttgattttgattctctttataacccaatgatatttttgagcaaataaatcctctcatttttta

SEQ ID NO: 34888 - DNA, 865 bp, Heterodera glycines
cggcgtcgagattttgtcctccttcatttgttccttcctgacagattgccgagtcgcgcgcttccggcaaattcacgctgttcgccctggtggacggcgcgatgcgcaaagtgagcctgaacgtgccgcgcaccatttatgtggacgacattgagccaaggcaagcggcggttccatgtgccacaatttgagagacaaacccattgaaaatgccaaaactaattggttaattggtcccataaattctcctcaggcacacatcggtcggcagattggcgcacaaaattttgccacgccaacgcccatgcgcttacctgtacgagttcaacattgacgaacaactgtttgctgcgcgaatgacgtaagggccgaagttggtcgtcctccccccccccccgaaaatattttttaaatttactaagcaattagaaattttgaaaaaaaaatttcgaaaaatttttgaatttttttgataaatttcagataaaaattataaaaaaattgtgcggtgtaaacgacggggacggggggatatgtgcaccacataagggcgggggtgggtagggctcgggtaattaattaattaaatattttaatgggtttttaaacgccgtaaatttcttttccccccatcattagcgacttgaacacggagttgtgcctgtggcgcatcaacggtgtgtacgagacacgggcaccgctgctgttcaacgcattggcgcacgtcggtgtccgatgccatgtggacagggcgatggcccaggggatcagcaccagcgcggatttgccaattgatgccatcaccagggtgagccaagcatgggggaggaagcaattcgaacacagcggaaaaaataaatattta

SEQ ID NO: 34889 - DNA, 856 bp, Heterodera glycines
taattttcgtcgctaccccaaaatcggaacattcttataaataagaacaaatggtagccctgctggtttaaaggcgccagcttggactcactcttattggcgctaacgaaatcatatgattaaagtgaaaaaagaagattgacgagcatttaaaaaaaaaatttgtttttttgggttaaaataaaatttggtcattcctcgatcggggtccccgaaccccgacaattgagctcctcccggccccgacccccgacatgtcgcccccgaggtccccggcccccgactttttgccccccgagggctcggggcttaaccctaaattttattgatgaattcaaaatccaccttaaagggtgtgactgtcgtgcggcagcccaccttggtactgtattcgtatgatgtgaccactggcgttgttgtggaccttggcgagcggttgtccattgtgccggtcattgatggtacggtttgaaattgtaaaataaaaatttaataatataaataaaatcaaaagaatttgtcgtggatgacgctgtcaaaatggcacattttggtgcaccacaaattcgggaacaaatgctcaagggaattggtgacgacctgcagaaagtgttggacatatttggcaatggcagtgatgacgacgatgcaagcatacaattgctgttacgatacatcgttgaaaaggtgtcatggatgtgcgttacttggatttattggcgggtctcagcttcgctttctcccgccgagggttgattctcgataataaattagtgctattcgagagtctcggcaaaaattttgctttcgatataaagaagcgtttcatttctcgcacttatttaagatggtgttg

SEQ ID NO: 34890 - DNA, 958 bp, Heterodera glycines
ttatcttatatccaagaaaaatgactatctcttattttgagaaattttatacgttacaaatgctctcgagcatgataggaagggcggtgcgcaatcgccatttaatttctcagagaatttttaaatttatcttatatccaagaaaaatgactatctcttattttgagaaattttatacgttacaaatgctctcgagcatgataggaagggcggtgcgcaatcgccatttaatttctcagagaatttttaaatttatcttatatccaagaaaaatgactatctcttattttgagaaattttatacgttacaaaagcgctcgagcgtgagagggagggcggtgcgcaatcgccatttaatttctcagagaatttttaaatttatcttatatccaagaaaaatgactatctcttattttgagaaattttatacgttacaaatgctctcgagcatgataggaagggcggtgcgcaatcgccatttaatttctcagagaatttttaaatttatcttatatccaagaaaaatgactatctcttattttgagaaattttatacgttacaaaagcgctcgagcgtgagagggagggcggtgcgcaatcgccatttaatttctcagagaatttttaaatttatcttatatccaagaaaaatgactatctcttattttgagaaattttatacgttacaaatgctctcgagcatgataggaagggcggtgcgcaatcgccatttaatttctcagagaatttttaaatttatcttatatccaagaaaaatgactatctcttcttttgagaaattttatacgttacaaaagcgctcgagcgtgagagggagggcggtgcgcaatcgccatttaatttctcagagaattttttaatttatcttatatccaagaaaaatgactatctcttattttgagaaatttatacgttacaaatgctctcgagcatgata

SEQ ID NO: 34891 - DNA, 785 bp, Heterodera glycines
aaaaattttataaaaatttatgaaaaagaaaacaaaaaacattaacaaatgataagataaaattgtacaaataattaaaaattaatcaaaattccaaatattttttctctttcttctccttttcctccttctcatcctcctccattctttctctcaggagggtctcgcacatgtgcagcccttgttcctcgtcattccgtgggtcggtgatgtcccactccatttgacggtcgccaaggtcagagctgccctcccggatttggtcgatcacgagctggaaagctctacggggcgcaattggttgacgaatcacactcccgtaggcgtctctctggccattgcgaaggtcttcgtagacactcctatatttctgataattgttttcaaactctttcaattttttttaccaggctcggatcacaaagtcgtcgtctgggggtcgggctgatgttgagctctgactttgttcagcaaagtaatctttgtaggactgactatgcgagtctttggtcggcctaaacaaacattttatgctatattttttttatctttttcaccatatgttgtctgggatgttgacgggacggcggcacttcgggcatgtccggttggtggtcaacgaacggcgtacgcagatggttggaagatatgcttgacattggtgtcacagggcagctgagtgacgagatctccgcgaagcagtggtccgtgcagacaccgcacgtctcagtgttgtctcaccactgcccttctatcttgctgctcacgatctccatgtgtacaac

SEQ ID NO: 34892 - DNA, 1240 bp, Heterodera glycines
ggattgcccatacattgtcacttactacgggtacatcatcacttttgtgagtgttttgtaatcatgccaaaattgccacgaatttattttttgccatttttcaggaatatttgtacatttgcatggtgagtttttgctgcatttttaatatttttttagttcattgtcattcattaaattaaatacttcttaatagataaataatttattttctttttttaatcgtcagaaaataaaaaatttaataaatatttttctgagaatttaaataaacaataaaaaaaagaacggcccaaaacatcaaaaggtttcaaagattatgcccattttttgcacttttccaaaagatgagactattttgaatttttacgatttttttcaacttgtctgcttccaaaaatagtgattaattacattttgcaaaaaaaaaaaataatatttttaatttttccaacaaaaacgccgctttttaaattttcaaccctttaaaaacccaaaatttcctaacaaataagtgtgtgtcctgagaaattgaaccaatatccctccgaaaggaactgatgtgcacctgtcttgacaagttgttgttgtggcgttgtgaaagtcgttgcgcgcccgacgttgggctgcccgaggaaatcattggtcaaattgggctcagtgtggtgcgcgcgttggactacctgaaggagacacatgtacggacacggactgacgatgattttgtattaggaaaatttgagaaattttggtcgaagtttttccgttttcaaaaattgccggcagaaaatccggcatatgccgagaaaataaaacccagattccggacagagctccggaaaaattggcgcttaaatgcatttttagtgccatttttgcaaaaataaagcgtcgccggctttttagcagcccatttttgaacagaaattggctcaaaaaatgaaaatttctacaatttttgatcaaatcacccgcattaaagagaaataaaattcagaaaatcatgcatcgcgacgggaaagcgaccaaacttctgttggactggttgggaaacgtcaaactgtgcgactttggcatcagtgcaatactgatcgagccaaaaggaaggtatatagttgttcgacattcccggcaccccttttccccgaattctaactttaacatccacgaaaacaggcttgaaccgctatttgggggggccctttattttttttaaatttaaaaaatctttcaaatttaa

SEQ ID NO: 34893 - DNA, 955 bp, Heterodera glycines
  unsure (1)..(955): unsure at all n locations
tcctgttcatgctttgccgcattttttccccgaactttttggcggcttcatttgccagagttggcgggtcgacttcttttatcgttcgttttctggagcttacgacaatagcttggcctgtgtttttaaggctttctctttgtcctctcgcaaatccttttttgcctcattgttcaaagtcgactcccaaaatgccattcgctcgtttgtcggcttcggcgagttttcgaaggcatctctttctctttcttcagaatccacaatcgagatttcatcgtctttcgttgttccgacgctgaggcttcgtttggtttccgtctcgtccttctgcttcatctcttccttcttcttttccgtctctttttcttttccctctcttcttttcttctcctcctcctctttttccttcatttcttcgccctttttcgtcgtttcttcctcatttcttcccactcctgtggtcccactggatcatcatccgacgttccggattttcatttttcgctttcggtcagactttgctggaccctcagaagttgatgttcgagctttctcttcaacctcttcagagattcttcctcctctttcgataacaattccatcttgaaaaatgaatggctttcgtaaattttcccgttcttttctttgggctcgtttaatctgcctttcgtgttcatgttctcgattaggcctaaaagctgcttattttgctcattatttttcataaattgtcccatttcttcattttttcacttcttatgacatttatactcattctgaactcgttttggtcgtcataattttctttttcacttatgaaaatttctgggatccggtttatttcatacattactcccattattcccgaaatttatttcccatatgattnccgttccatttccgttttttatgaccatttttctgcaaaaagaattgggcatccatgcccaaaaca

SEQ ID NO: 34894 - DNA, 750 bp, Heterodera glycines
atgtgtgatcgccttcggtgacacaattagcctcgtctctttacgcatccaatgccatcgttttggccttttgaccatctctttaattagtgtgcatctcgagattctcgattcgtcaactggtaaattctcgggtttatgggcccccgtctcactgttctggagagcaaacactcggtagtgctctcgactttggtatggtatgcattgataatttttggcattttttttataaatttataaatcctcgcccacttcgtaagaaggcatttacaaatcaaaatcaatttaagaataaatgatgctaaatcctttgcatttcgctcccattcaaattgcaacaattaaaatcattcctccgtgttcagcgtctccgcttttttttgtccgtccccgcggggaacaaatccccccccccaacccctccgccattccgttcacatcagaagaatgtgaaaatgcatttcataatgatttgtgtgtagaaaacccttattcttattataaatgggccgaggattcttataaaaaacaaaaaaaaaattttaaaaaatcattaaattttgaaatatttttgtaaaacatttttaatatatttcccttaaaactatatttttgatgataaaaatctatgctttttattcattttccttttccttataggataggataattagcggatacgaggcgtgccacacaattgacacgaggagaacgcacacacaggttgtgcagtgcaagtgatcaccc

SEQ ID NO: 34895 - DNA, 628 bp, Heterodera glycines
cattcgagactggttcggctgcaaccgccgactttttcccttaagcccgaggattggacaacattttgggcctaggcccattgctggaggcaaaattgccggtgcgagtgctcacggaattgcggatcagagaaagcatgatgggatcgaaatggtcagtgcgcgagttcaggagagcggtggcggaacaagtacggtgcatgcggtcagcagagtcagcattggcatcaatgaaagacccggaagtacgcactgatcaccgaaccgagcgtggtcagacgggacgaggaggcaaagcaggtcgggagccatttcaaagagcatttacgggacaaccaacaaacccgtgcgaaacccaacgaaacacgaagcgaggagcggtacgggacgaacgcccgtttcgccagacgatcgaccacacatgccaacgagaacgagagctcaggcgggaattggccccgcgtcgcatcaaacggaccaattgccacaacggagatatggagctgttcactatgcctaagaagtggacatcgaccaagcaaatgccgcgactatccgacagctcaggagcggaggaggagactcattgagcagaagcgatgcttgcgctgcatgtgctctgatcact

SEQ ID NO: 34896 - DNA, 646 bp, Heterodera glycines
tgcgctactaacttgctaaaattgaaaaatttaattaagtttttcagaaggtatacaattttttcatttttttggctagaacttttgaaaaacttaataaaattttttgaaatttagaaagttaatagcgcaattcaagggctatcgtatgataccaagaatgtgcaatttggttgcgtctgagaaagttatgagttgatttagtcaaaaatttagcaaattttgcacttttcgtcggtccaccaaccacgggcgacgaattgtttcctgctgctcttccacatttatttttttgcgctgttcagaaaccgcgaggcgcacttgcgcattttcctgcacaatttgcactttttgctgtccaaacaacagatggactacgccattttcgtcgttgaacaggtgaaaaaaggccagaaaattgaaattttgcgatcactcccaaaaaaaagcgatgttaaggccagcaaccagacattcaaccgggcgaagctgatgaacgtcggctttgtggaggcgtcccgtctctacgactggcaatgcttcgtcttccatgacgtcgaccttttgccggaggacgaccgcaatttgtactcgtgtccggaacacccgcggcacatgagtgtggcggtggacaaattcgactaca

SEQ ID NO: 34897 - DNA, 894 bp, Heterodera glycines
caactttgttcgtcggatggcgaaatattgggacagtgcattggtcgcgcaaaggatcatatgagtcttcgaccattgacgacgtggacgaagacgacgagttggaccagtacttggacgaagaggacgaggacgacgtgccgacggagacggacgtggagacgcgcacggaaggtggagggaaagggcgcggggggctatggttggtcagttacggcaatttcagctggtggcatctctccgctgaagatgcacatgatcccgatcatcaaaacttcgctttcttcttcctccaatcgccggcccagcaacgaatcaatgaacagttttgtcagcgaccgaacgaggcgaatattcacaaaaaacagaaccgttctaagggcgaccaatttagccaagtggccggcgccatcagcagcattgccagtcccatcgcaagtcggcgcattttgctcgaatgtgacgcggaacgaaagaagggcgacaaggacgcgccctggtcggccgggactgctcattctgcgcactttgctcaatcgcacctctctctcatgcttttcacgttttcagctctcgccgccacctctccgggggccaacacacttttttgggtcgtcgtggctcaactttcactaccacaacggcggcaattacacgcgcctctaataatggcaaccaaatcgcacccgaactgtccgatttggtcatttacatgcaggcaattctgcggactctttctgtctgtccatcaattagttattttgtgtcctttgacaggcggtgaaattcaaaggttttgttgtgacgtcaacggaagtgcccgcgagggacactcccgcgacgagcggaaggaatggcggagcggaaaacgatagcttagtgatcggagaactc

SEQ ID NO: 34898 - DNA, 1071 bp, Heterodera glycines
  unsure (1)..(1071): unsure at all n locations
tacctcttttatcactgttgtacctcttctaatcaccttaccaggtctttaatgagatttgtacctcttttatnantccttaaaatattntataanagttgtaantgttatnatcactgttctacctcttctgatcactgttgtaccacttttaatcacagttgtacctcttctgaccagatttgtaccccttctaataatcttgtacctcttctaatcagatttgtacctcttctatacatcttccaacaattttgtacctcgtctgagctcaacaacatataaatacgggcgcgaagcgcccgtttggcctcaacaaaatttaacaacgggcgcgaagcgcccgtccaagctcaacaaaatttagaaacgggcgcgaagcgcccgttcgaggccgcgaaacggcctaagaatcaccaaatttaaaaaacgcgcgaagcgcccgttagaggccgcgaagcggcctaaaagccccagataatttgttaaaaattccaattctccacaaagcgccctaataaaattttttgattaatctcaaatatcttctggaccaacaattactccacaacccatagcttatctaggtagcgaagctcaagaagtgtgaagngntttttaattaaaaaataaagttttagattttttattattttgtttttttaaaatttttaaataaagntaattgtataaaattatatttaaaattatgaaattatttttgtacacctcataacaagttagacttttgtacctcttctaatcactgttgtacctttctaatcacttttgtacctcttttaatcactgttgtacctctttttatcacttttgtacctcttctaatcactgttgtacctcttctaatcacttttgtacctcttttaatcactgttgtacctcttttatcacttttgtacctcttctaatcactgttgtacctcttcctatcactttttgtacctctttttaatcactgttgtacctttactaatcactgatgtacctctttaaatcactttttgaaccctttttatcccagttgtaccctcttctgatcactattgaacc

SEQ ID NO: 34899 - DNA, 1017 bp, Heterodera glycines
taaacagataaagtgtatatttcacgtcactcgaacagaataaatcttttgtttgtgtgtacgcgcattaacagaatgtgtgtgataaagataagtgtcaacaaaacaacttttaaatagagaacatcatcagcgtcactaaacaattgtcattaacagcgtccaatggtccttcagtgcatggcattgtcctcctcttccgactgttcgtcccccatttcctcctcgtcatcgaactcgtcatattcgtcttcctcagccgcctcaccagtgaagaaaagcaccgcacggggaatcagctaaaaaaccaatggaaaatcgagacaaagcgcaaaaataatgaaaattacctgttcacgaatgatctgtccaacctcgaagtcatcattggttttctgttcctcgatgtcgtcctaagtgattaaaaatagcattcacaaatcagcatttttgagaacaaccaaatgctaatttaattatggcttttcgccaatccctcccaatttgtcatttttttccacttaccatttcctctgtgatggtcgtcactttaggatcgaaaaagttgaagaagctttcgttggtcacctattgatgagacaaaatttatcaataaaattttccctttttaaaatttcaccgttttggtgacgtatttgcccgcctgcgcccctttcttctgttttttcttcacaatcttttgcgtcacattttttccatccttccaatcgatatcgcagctaaagtttgatgaaaaaagttttatcgccatttcagtgtcattacccctgactcttcacgattgtcggcccgtcgtaagagaaccttaaaggtttgataaaagctgtaaatgaaggaaaaaacaatttacggtttttgcgggtccacgtcgaggttaacctcgtaatgtttggtcaacaccgcgttggtgaagtacggattctcggcaaaatggaagaacagagaaaacccctaaatgggaaatgtggaaaacgtattaaaatggataagcgaaca

SEQ ID NO: 34900 - DNA, 1152 bp, Heterodera glycines
acatgtttagaagcttttgataagctatttctaagcgattgaagaacttataaaaaagttgcaacatgaatactaccaaaaagtcagaatttttgcatatttttacttttaacttttttatgtgtcggtatatctttgtgtttttggaaagccaatagagcttgttaagagcattcgaatgataccaagtttaatggattggtcaacaaataaaaaagttatgatgctcaaacttggctcagactataccggccagactatagtgtcccagtccggtaatttctaattgcaattattaattaaatacatttattaattaaataaataagttaagccctctatcaaagggagcttatatttcagggagggcttctataggggggggcggggtatatttgaggaaatacggtaggtaataaatgaacaaaaattacccctcgtccggcatcggttcctcccggaaacggtagcgggtttggacgacagtaaccgcgaaacacaaaaaaatgatggcgatggacaatgtgaacaaatgtctgccgctggaggacatccgttcccataagcacagaattggacaattggttaattataatatgtatttgttgaagaatcactcaaattgaacgagtccaaccaattaaaatgtctttactctttgctccttttatgagttaattaattaatgaataatgggggagggggggggtgcctttttcggcagtaccgaattcgccaaacaaaactctaaattcaccatttaacagagcagttttattaaaggcatgcgagacttttttgattttagcgaagacttccccataagagtcgagaatcaagactaatgaaccgagaagtgaacaaaaaaaagttgtttacgatctaagagagcgtgagaagcttgattcccgcgacaaaaaagtcgagattcaaaaatgagagaattttccgaatcgggaatcgagactctcgggtgtccctcttaaaaacttttttgataattttaattaaataaaaaaacgcggggactgaactattgcaattttggagttagatagaactttaaatgattgaaaataatggggcaataaatttgcagcacaagaacaatggcgctacataattttggaacaacagtgggacaattcactg

SEQ ID NO: 34901 - DNA, 944 bp, Heterodera glycines
  unsure (1)..(944): unsure at all n locations
tttttacgtgctttttacacatgcttctcgtcatgactttgtttaaaaggatcgaatattgacaaaaagatatttttcagatattttcgaattcagaactttttgagttagagaaagttgcccatttcaataccagtgaggcccacgtactctctctctcctataaattgtcgctcgggctctagatgtaattttaattgaaaccttatgggaatggtggtagcatagtgcgcgggaatttaatgctcactaattaactgcttcagttccttttgacatccattggttcatttttctcatgagcatcatttgtaggctttacttgactataagctaagcagaaagtaaaatttaatcaacacttttaatttatcccaatgatcccttgcattattttaactgcctaaaactgaacgtgctggatcgtttcttaaatttcgccactttgggcctttcttaaatccgccaagaggtagaaaaacaaaaactttaagaaatataaataaattcataacttgccttaagctcaaccaaattaatatttcttggtatcagtcaatagctcaaggtgttgtacatcagaataataattgagaaatttttttttacaaaattataaaaaatttatggtcacaaaatttcaataagtcttgagtcataattttttgtccagactttttggaaaaacaaaatttacattatatattttgtaaaacagaattaaaataactttttatcgatggcataagccaacgttatatgaaattttccaaccaattcccacagtgtagaagaatggacgaataattaaaagcattaattgcgctttatcacaattttctgatttngggagggtttgataattgattttttttaatattttgctntttaagcaatggtttcganttgagctcaaactctatttttgtcccgaatgattgacg

SEQ ID NO: 34902 - DNA, 630 bp, Heterodera glycines
ttccaaaattcgtaatttggggctaccaaggacgctgatctccaatatgatatttattttagcatctgatgactgttagtcatagataggaaaatatcgatgatttaaaaatctaactactgatacaataacatcatgaaaagggcgttaacgactgacatgaagccatcaggtccataatatctttccataaggctggaaaggcagaatttgaatgggcagtcgatatttacactgagcacccgttgaagcgggtgatgcgaagccatagcaaactgtatttttaaattctggccgcaattctaccaaaaacgtgtttagaccgcagtaactcggctcagagtgaagattaagggacgcaaaagagacgatttaaaagcgattcgaaaattctatcgactgatataataacgatgcagtcgcggcgttgacaactgagatggaaccaaaagttccataatatctttccataaggctggaaaggcagaatttgaatggccagtctatatttacactgagcacccgttgaagcgggtgatgcgaagccatagcaaactgtatttttaaattctggccgcaattctaccaaaaacgtgtttagaccgcagtaactcggctcagagtgaagat

SEQ ID NO: 34903 - DNA, 1094 bp, Heterodera glycines
atcccttataatcttagacgtaaagttgtgttaaaacctaatccagtaaaacttcaaattcttttatcaacagaacggccttaatatggtctaaactcaacaaagatataacagatgctccatctgttgacagtttcaaaaaacgaataaataaatggattgagttaaacaaaaatttagtctgtaaaagagctccttggacttgatattactttactaaaatctaacgtgtaagtggtcaccccttcgttggatatttttatttcttctgaataaataaataaatatgtttataaatttattttaaaagttattgaaggcaaccatttcgaccgtctcagaacctcggatttttttgtcagattcggaccctgggtttggaattagtcggaatggatggatgctcttatgcagtttatttagttcccacaaatttttttcactttccaagcaaaaaacacacaaaatatataggtttacggggtcacttgccacgaatctggttttttgaccaaaatctatttaaatatacgaaatgggtgctggattcggatcatcgaccccaaaatctcctggaaaatgttttcacatccgtaacattagcaaattttcagatttccgagttggacagttacatgtaccaaagtgtgggcagtcagggaatcaaggttagtgagactaaatatgtgctttaaaaatatggaaattgaatccgatttaatgtttgtttgatagttccttttcgaataaatttttctaaaaatgccaatttttggtacattttaaaacccaaaaattgtaaaaataggcatcataatttcttaaaatttcggctttaaattttcggtttcccacacacatttcgctgaatatttaattttttgtttgtaaaatactcctaggcctgttttcctgcaattttcagttttacgcggatgccattggcctgccgctgttccaacgcaaaatttcgggacgtccaaaatgtgttgagagcaacacttatgtgcaggacgaggaggatgtagtggaggaattgtaccacctttagaagacggtcaaagaatgggacccggaaattcgtggtgattttt

SEQ ID NO: 34904 - DNA, 1169 bp, Heterodera glycines
  unsure (1)..(1169): unsure at all n locations
gctgcctgaaaaatataattcaaataaaatccatggattcgacggcacagactttgtaggaaacgcgacgttggaaatcactntggcgctgactttggcactcaaccgcttccaatggagcagtcggcacagcacggggatggcaccctgcgcaaccaatgcccgctcaaagccgcggttggccatccgcgtaaaaatggtcaccagcttaatgattgcaacatcatcattaacatttgatgatttatgtgattaattagttgtatacaatgttttagtacaacataatattaaaaataatataaaataataattcgatttattttttaattttagtaagtcttcgagaattttctaactaaaaaattttgtaatttgtgtttaaaaaattaaatattcatttttcaaaaaaattatttaaaaagaaaaatgtataaaaaaaaattttctcgtgtaaatgaatacaattaatttataaaaattcaaaattcattttttctaaaaaattattttaaaaaaatacccaaaatttttttgaaaatttttctttgtgaattaatcacaaatcacccacctcttcctgtacaaacatattgccaacactgtgctcacgtccggcagccttgaccagccgaagcacagcgttgtgcgtgtacagtaactctgtggcgggtgccgcgcactgtgcgcacagattggcgagcgccgccaggcacagcagcaacgcctcgggcgccgacgcgtggtcgacgagtttcaacagtcgcggcaccagcgcgtgcagcgagtgaggggacaagcgcaggaaacagtgggagggcgagcacagctgagccaggcagccggctgcctgaaaagtgcgcggaaaattttgaattttttactatggcatactgtaatctacaaaataagataggtaggtatactgtaatttacaaaaaaacaaaagtgtaaaaattgttttacaatattgaaaatgatctaatttttcaaatttcttaaagattttttttgttgtaattaaaaatagaataaaattttgaaaaaatctcagcaattttatactgtgatttacaaatatagatatactgtaatttataaaaaaaaaaataataatacaaaattgccttacaatatcgaaaattattatttaattttccaaatttcat

SEQ ID NO: 34905 - DNA, 804 bp, Heterodera glycines
ttcatttccattgacaatgccattctctcctcaccctccctccgtctgtccactggtccttctgctctattcccaatcgcctgtcctccgtctcctcttcctcacccagtccatcgcttcgttcgtttctctgctcgtcctcgtcttcggcatggttcgtctgctcattcgtccgttggtccccacccaccagcggaataccgttctttttctaagtttgtgcctctctttactgctcggaaatgtcggtacaccaatttattggctcattcagcttccaattggcattcgttgttcatttgccaggtgtgctcctctccaccctttaccacctccacgtgcccctcttcaggcccacttccagcctctgtttttggctgtccttttcaattggcgattgccttagtgagtgtcccttgtccctctcttacatttcccctccccccccccccccccccagtgattcggtccctcctcaacgtctctctgttctccgcttatttgtccggcgtttgttttgccctcgaaagagtcgtcagctctctgctactgctgcgaaatcgacgaataaaatgggcaattgccatttccctggccatcctccaggttttcggtctccctttccattttgtccgcttttcccctcatttcagtggcttttgtcctttttggccgtcttccaggctaaacattccgccgttgcggcgcccttcgtcgtctccgaattccccccgatttcgcgacaacttttccaccttgagtaatgtgacgccttatcccacgcaatccatccccatttttttg

SEQ ID NO: 34906 - DNA, 841 bp, Heterodera glycines
  unsure (1)..(841): unsure at all n locations
ttttcccttgcattccncctcacatttgtccncatgtcacatttccccccattgtattctcacacatttcttatgtatgggtntaattacccaagtntgagataaaacttgtggaatattttggtgcaaattcttgggcggcaaatttgggcaattggcggcagcgaaaaacggacaaatcggcgcagacccctcccccatctgcgtcaggggtttgacaagtttattggggaaaaaaagactttacaaaataatacccctgggagaagggagtgggaaacatgatttcaaaattttcaattttttctagtctaatctactcaaaccggttcagaattcaataaaaataacattcacggtgcgaaaaatggggtttgaaaagtttattgggaaaaaaagactttacaaaataatacccctgggagaagggagtgggaaacatgatttcaaaattttcaattttttctagtctaatctactcaaaacggttcagaattcaataaaaataacattcacggtgcgaaaaatggggtttgaaaagtttattgggaaaaaaagactttacaaaataatacccctgggagaagggagtgggaaacatgatttcaaaattttcaattttttctagtctaatctactcaaaacggttcagaattcaataaaaataacattcacggtgcgaaaaatggggtttgaaaagtttattggggaaaaaaagactttacaaaataatacccctgggagaagggagtgggaaacatgatttcaaaattttcaatttttctagtctaatctactcaaaacggttcagattcaataaaaataacattcacggtgcgaa

SEQ ID NO: 34907 - DNA, 869 bp, Heterodera glycines
ttttttgggatagagtataaatttaaaaattccctcaaaaataaaggtctatttcgcacagccctccctatcatgctcgagagcatttgtatgtgtataaaatttatcaaaaaaagagatagccatttttctgggatagagtataaatttaaaaattccctcaaaaataaaaggtaaattgcgcaccgccctccctatcatgctcgagagcatttgtatgtgtataaaatttatcaaaaaaagagatagccatttttctgggataacctctaaatataaaaatcctctgtgaaataaaatggcgattgtgcacagccctccgtctcatacgcaagcgcttttgtgaggtataaaatttctcaaaaaaagagatagccatttttctgggatagagtataaatttaaaaattccctcaaaaataaaaggtctattgcgcaccgccctccctatcatgctcgagagcatttgtatgtgtataaaatttatcaaaaaaagagatagccatttttctgggataacctctaaatataaaaatcctctgtgaaataaaatggcgattgtgcacagccctccgtctcatacgcaagcgcttttgtgaggtataaaatttctcaaaaaaagagatagccatttttctgggatagagtataaatttaaaaattccctcaaaaataaaaggtctattgcgcaccgccctccctatcatgctcgagagcatttgtatgtgtataaaatttatcaaaaaaagagatagccatttttctgggataacctctaaatataaaaatcctctgtgaaataaaatggcgattgtgcacagccctccgtctcatacgcaagcgcttttgtgaggtataaaatttctcaa

SEQ ID NO: 34908 - DNA, 656 bp, Heterodera glycines
taaaaaatactttattaaaaacgtcttttttatacctcctatttatttgatttttaaaaaccctgtcttaataagaatattttttagatatattgacaaagtcaacctttctgctgtaccaattgttgaattcaattttatgatttcggacaattttttgacaattaacaatggtaacaattagcctaattatatgtacaattaatttttaaaatttgcagtttcaccgaatccaaagggtttttacaaagaattttttgaagaatcaaagcttggctcatttttggaagaatatgtcggactttggctgttggcagcggacattatgccaaacttgcgccaaaaattgacaaaattaatttttatggtgccggataaatgtagacttattcgtgatgaacgtcaccctcaaaattgcgccacatttgatcagatggcatttgagaagaagcatcgctccgtccgtcaaattaacccactcgtaaataattttaaaaatatttacaatttatttatatttaaataaatttttcttagatttcgggtggtgccaaaattgacataaagcatatgccatgagttgtgtattttatgggggttatacaaacaaatttattcaaaactaaaattgttgcatgcacagcttcactgatttc

SEQ ID NO: 34909 - DNA, 960 bp, Heterodera glycines
ccccccccccctccccccacggcggtcccttggccatcttttcgtccttttcgtccttccgtcgtcccatcggctgatggctggcaatgcgatggtgagctggctttttggtggttaggctcgtgggtctctttcgctgctgctgctgctgctccaccccaccgccacggctgaacaaagaggcggctggcagcaatgagaagagggggggggggggcagtgagggcggaggggaggagcggtggtgcgtccctttcatccgttgcccccccccctcggctgaatgagaaagactgaacgagaggaggcgaacgtccgtccgtcgtccaattcgtcgtcccttccatccaaaatcatcccttttttgtgtttgtccgttcttttttccccatgagactcaatgaaatgcgaatgaattgtgaaaattctgtcgatcttatcaactgtgattgggtcaggtcaaattcaaattcatttaatgcttttttttgctagctctctcagggtaattaattaattatgttgacttttctctttctcctaatgaccattgactatttgtccgtttccatttgtccctacttatttggtccatttgtccgtccacattccgttctaccttttgtccatccattttaattccgccaaattcgctcaattcgcattttttccatttcctaaatttcacaccaaattacccaaacaaatggtgacgaggcaaccgcaacaattcaacactaatcgtccggtgaaaaacccaacaaaaatctgtcgcgaaatcgaatattttttggtgcatttttcatttattctcgatccattttcaatgtaacttcgatcagagtggaaataatatcaacagaatggcataagacacaattcggcattttcccgttagacttttcagggccgttcagtcgaacggctgccgtcccctccccccaagttctgtttgccgac

SEQ ID NO: 34910 - DNA, 1183 bp, Heterodera glycines
gggggggggggtagaataactcgaaaataacaaaatatatcaattaatttgtcatttttgactttgagcgttgaaaatcgctctcggagcagagcccagctcagcacccagaccagcgctgtgctggcactcataatggacgacgcagcgccggccgaaatcagtcccaaggcttgggcgtacgcgtaattaattgctgtccacagggcgagaaaaagcagcgggcaaagcaaagaatgccttcgagaagaaagagatattattaattcattaaatatatagttatcaatcaatttgtaaataattaacatttttgcccctccccaccaaccctaaaaaatgaaaaaaaatgaaaaattttgagtttcaaaagttctttaaaaaataaataaatattaagactttcataagaatttctttcaaatatatattttttttaattcttgcaaatattaaagaaaattttaagaaattaacttttttcaaaaaataataaaataaattttttaatgaatttgttaggcatggtttttcccaaaattctttggttttaatttaatttttatttttctggcaaagtgttcaatcttaatcgatattttatttaaatttttgccattttcttatcctgggtattcggtcccctcaccaaatgctgaattggccatggtttggtgaacggagcactttgagtgcgtttcgctgctccatgcgaacatttttgccggatacaaatgcgaaaatgagaaatacgggcaaacaaatggtcatgaaagctgtgcttaaccaaaccttaacaacaacaaaaaaggataaaaaaaaaattaattaaaagaaagacaaaaaataatttaattataaaaaaggcaaaaattaatttaattataaaaaaaggcaaaaattaatttaattataaaaaaggcaaaaattaattaattataaaaaccaaagccgaaatttatgtgagccagcttcacaaaatttttaagaaatttaagacttttttctcattgtcagcacttttcttgcacatttaaagtgcatttaatatcactttaattctaaaatttgatttgcttctgaaaaaacgtaatttttttttgttagaaaaaatagtaagaaacgggtacagtatcaaattggcctacacggtattttatttgtgcatattttcaactgtatt

SEQ ID NO: 34911 - DNA, 1915 bp, Heterodera glycines
  unsure (1)..(1915): unsure at all n locations
gtcaagaccggcatatcaaaaatgtccacggtcaagaccggcataatcaaaaatgtccacggtcaagaccggcataatcaaaaatgtccacggtcaagaccggcataatcaaaaatgtccacggccaagaccggcataatcaaaaatgtccacggtcaagaccggcataatcaaaaatgtccacggtcaagaccggcataatcaaaaatgtccacggtcaagaccggcataatcaaaaatgtccacggccaagaccggcataatcaaaaatgtccacggtcaagaccggcataatcaaaaatgtccacggtcaagaccggcataatcaaaaatgtccacggccaagaccggcataatcaaaaatgtccacggtcaagaccacataagcagaaaatgccatgccacgaccacataagcagaaaatgccatgccacgacgatcactcgcagcgttatggatgagttgggtttggatgagttgggtatggatgagttgggggtgactctacaaatcgtaacatttagaattataaatattttatttcctttttatctgttagagaatatcattttatgataccagtgcatatttttctataatccaatagcagttattttgaattttctgtttgtttgtcagggcacagatttttatgttttaggtgggttttctatgcgcgggaggaagtttgggcaccagaaatttggacaccgggaagtttgggcactaaattaaggatttatatattttaattgtctaaatgcaaccatctaatttaaaattttaactaaattaggaatcgaaagtttttgaacgaatatccgctcaattaaccatgcttattttgctatactcattacaatttattctatatcaatctcatattaactattatttgtatcattacaagattcagtctgttcaagatttaaaatttataaatttaaaaagaaataaaaggatctcctatttatctttaaaattccaaaaaatttcactacaaatttagttcaaaaaagttctgacnaaaaaatccaacttaagctttgtggaataagagtgccgctcggctaccctctctaagcgagcatttggccatgctgaggaatagcagcagagaaagagaggaaggagatggacaacgagaacaggcaatgagagcagcagcagacgaacagagaaaaaatagtgaaaagaaaggggaggaggagagacagtcagcggagggcatagaacaatgaaggaaaagaacggggaggaagacaatcagccgcgaaaagtggaggagagacagtcagccgaaaaaaaagaaagggaggagagatagttagacgaaggcatggaacagtgaatggaaatgatagagaagtgatcactgacaagcaatatacataattatagctgctatgtatcgctgatttgtcgaaaattcatagaaattcaattttaaatatttcaactttttataggctatattaactgaaatttaatggatttgaagagattttagaaatttagccatagatttgggaaatttttgtcaatttttagggatttggtccatattttattgcactatttatggattttatttcaatattttttcaccctcctgatcagctgtccaatcgtttattaaacattcttggtattgttcgaaagcatttgaaaaaccttattaacctggaaactcaaaaatttttattcttgtacaaaaaatctgggcaaaaaagtcaaaaaactaggtttttaagttccttctgaccataacaacaacaaaatatcactcatcaactgctcctccgtcaatcggtttaaatcccttctttttactccaccgggcgagcagacggacgcggaggccaaccaatggccgaactgcttcaaaatacgggcctggtctgcggacagttgg

SEQ ID NO: 34912 - DNA, 1048 bp, Heterodera glycines
  unsure (1)..(1048): unsure at all n locations
ttttgctccccataaatgttgagtacccaaacggcacttgaaaaatcgatttttgttttcggggcagtcccnccganccgatgccccagattatggggagacngaatcnttcgggaatagcttccctatagcctgtactntaattctgcgttggatttttgctccccataattgtttgagtaccccaaacggacacttgaaaaaatcgattttttttgttttcggggcagtccccccgaaccgatgcgcccagatttatggggagaccgaatccttcgggaatagcttccctatagcctgtactttaattctgcgttggatttttgctccccataattgtttgagtaccccaaacggacacttgaaaaaatcgatttttttgttttcggggcagtccccccgaaccgatgcgcccagatttatggggagaccgaatccttccggaatagcttccctatagcctgtactttaattctgcgttggatttttgctccccataattgtttgagtaccccaaacggacacttgaaaaaatcgatttatttttgttttcggggcagtccccccgaaccgatgcgcccagatttatggagaccgaatccttcgggagtagcttccctatagactgtactttaattctgcgtgggatttttgctccccataattgtttgagtaccccacacggacacttgaaaaaatcgatttttttgttttcggggcagtccccccgaaccgatgcgcccagatttatggggagaccgaatccttccggaatagcttccctatagcctgtactttaattctgcgttggatttttgctccccataattgtttgagtaccccccacggacacttgaaaaaatcgatttttttttgttttcggggcagtccccccgaaccgatgcgcccagatttatggggagaccgaatccttccggaatagcttccctatagcctgtactttaattctgcgggggatttttgctccccataattgtttgagtacccccaacggacacttgaaaaaatcgattttttttgttttcgg

SEQ ID NO: 34913 - DNA, 1268 bp, Heterodera glycines
  unsure (1)..(1268): unsure at all n locations
cgaggcattcagccatcattacaaaatcaaaaaacaaacgtggaaagagagaagccaaggctgaagataccaaagactcaaaaaattgatgtcgcaaagagggccgcagaacgcgccgggagagacgtagaaagacattntaatcagatcaacaatatctcgaattccatccaaacccaactaaacacactacgagaaacaaatcctcaaattttagaagagcctgatataaaaatttggtttgacaaaatggttgagatgggaaccgaaattcaaacatcacgaaatgaacttaaggcttttcaagaagaagtagataaagccaaaaacataacattggagcatgtggaaaagaatgacttgaaaaaagcaaagaaatcagccgacgtcgcaaagggaatcgccagacaggcaaagaccaaatatacatcaactctcgagggatataatgataaatcggaaaagggttttagcgggatagtgaataggcttaatgaggcgctcggtgagcatattaaacgtaaagatattgaaaatatacaagtatctgaagctgagaaaggaccacaaaaaagagaaagactagccaatgaggatgttcaatttcaatatgacagcattgatcaaaaatttattgtctatctttccgctgctgtctcccacatagatttgtcaaaacacctcgcctatgtgctcggttttaagaacacaaggctatttcatgcggaagaagcgaattatatgccagatttgactggcggcgtaaggcagctatacatttatgcaccaaatttaatcgaaaacacaattatcggcaaccagatggccccactcttaagaatagttaacgtcgtcgatgacccaggatcgattagtgaagttatatatagcaccgagtattttcatcgtctacagtcgaaacgaatttcagaaattacaattgaaattcacacaccgtttggtgaattcgttaaatttcactggggaagttgtattcttacattacattttaagaaaagtatattttaaaaatgacacacgtatttttcgatcccgagtcggtcgattggtcatctttttttactccccaacatggaagaggacagaaacaatattttgtcgggagcaagtaccagcggggattcggtttcctcggtaatgtggcacgtttcttgacccctattgagaggaatattgcctcgagtgcaggacatgaggggctcccagtgaggcagagagttctgagtgacatcgctcagggccgtgat

SEQ ID NO: 34914 - DNA, 1229 bp, Heterodera glycines
cgctgctgctgcactttgcggggagagattgcgccaaacggtgcccgggcatcgaattgatgtgggaccaatcggccgacggaatggcgcttctttcgacgatgggcgaaggcgcactttggccggggacgacgaacgattcgaagcggagaatgactttctccaaattctgatcgccttggagaccatccaaaatgtaagtacacgtcgtattcggtgggtaaaggtcggggaactgagcagaaagaacaatgaatgacggacaagagcagagaaaacgaacattgggagagtgcacaaaatggacggattcgtggcccgaacagacgcgaacatcgcactcggaaccacgcaaatggcctgggcagtggacactcggcttggcaccgatcagacggctaatggccacgaatttatccgagaattggtactcaatgtgaaagctgaacggggggaggggaggggggacagatggaaaattgacgagaaatgtttgaacataataaattcattaaatttcatccaaattaccccctgtcgcccactttcccctccacttcggtggtgttaaactccagcaacagctcgtgtccgaatgagaacagttcaagtcgttgttggagcccacagagttttcgaatgatcggatcggaagttgaggcgccgtcgtaaattgtcagcgaatcgtagggacagctgaaaacggcacaaatgagcgaccgaatgaatcggtggcgatgccgtggcatttcatttcccccccccccccttaaatcgaactgttcgccgccgaaatacacgtcgaaatcgcggaagaacaaacggatccgttggtgggcgaggccccgcagcagaaacaaacattgcaaattctaaacaaaaagggaggtgacacatttgattcagcggccaaacccacgcttgggtaaaccccggggtaagtgggcgacaaaatgacaccggtgccgtcgttggctccgtttggctctatcaaaaaggcacacccttttgggcccccggggagtggagggcccggcaaaaagggcgcctcggaaatgaattcgaaagtgccgccgagagcgaaagtctgtccaatggaggaatttgtgtaggtaatagaaaaaataaaaaacaaaacaaaccccggtccgttgacgaccaacccgagaatggaacaccaaaaccatcaaattgtgcagactgacaaaagaagagagggggagaaatga

SEQ ID NO: 34915 - DNA, 990 bp, Heterodera glycines
  unsure (1)..(990): unsure at all n locations
atgtaaaatntggcgtccagaaatttttagactaatccgaagcaaagcacgaatgaattaaagaggcgaaagaattcacagtatcgtttctaatagggaaatattgacaggatattcggctaaaaacgggtttgatcatttttagcgcatttttaggtatacatttaagacaattgggcaggacaagaaaagaatgaagttgatgcctcatgaaactcggaattggttatgtttgtcgaaaatatccttacataatactcataaaaaatacaaataattcaacccacctattctatgaccacattctgaaaaaaatcccagaaatacgaggaaagatatgcttggtcacaataaaataaaaaatggctagtatgtaaaaatttgcggtcacaaataaaataaaaaatggctaatatgtaaaattggcgtccagaaatttttagactaatccgaagcaaagcacgaatgaattaaagaggcgaaagaattcacagtatcgtttctaatagggaaatattgacaggatattcggctaaaaacgggtttgatcatttttagcgcatttttaggtatacatttgagacaattgggcaggacaagaaaagaatgaagttgatgcctcatgaaactcggaattggttatgtttgtcgaaaatatccttacataatactcataaaaaatacaaataattcaaaccacctattctatgaccacattctgaaaaaaatcccagaaatacgaggaaagatatgcttggtcacaataaaataaaaaatggctagtatgtaaaaatttgcggtcacaaataaaataaaaaatggctaatatgtaaaattggcgtccagaaatttttagactaatccgaaagcaagcacgaatgaattannagagcgaaagaattgacagtatcgtttctaatagggaaatattgacaggatatttcggctaaaanncggtttgatcatttttagcgcatttttaggtataca

SEQ ID NO: 34916 - DNA, 773 bp, Heterodera glycines
agcctggattttccctgggtccaggtccagactattttttggcaatttagattttcctggacctgggttatggtcaaggatttgcaggtccatgtcaaatatcaaaaaaaaaaatccaagtccaggttaagcacgataaacctggaaaatattcaagaatttgttatttcgagagaccaaacgttttatttcaaataagatacttttaaattttcctaaacaattaggtaattgatttttttcaagcacttgttgtttacttaaaacccgcatgccttgtcaagtctagaaatttttttcaggaaaatccgggtctttccaaaatagaatccaggctttttaaagtgaattttttttgttgccattttgtcccactattatatcaccttaacccagtcgtggccaagcagtgaaaacagttggctgaatgcatgctctgtatgcgtgtaaatggagtgccaaattgagtaattggacagtgccgatgggtcaatggtcgacatgtttttggttgccgcaatgtccaccattttttttttgaatttttattaaaactgtgggcgatttcactctttttcaaacaagaggaatttttcgttttaaatttgaggaaagaattttgctgcggtttatctatttatatttttagaggacggacggactttcttcctctaagttttgttattttcgtcgtcgtcgttaatcgtcctttttcgtcttcgtcaattaggcgctaatgacgggcctattttggatagccgccgccaccacct

SEQ ID NO: 34917 - DNA, 987 bp, Heterodera glycines
  unsure (1)..(987): unsure at all n locations
ttttcctcgtcagatggtttccctgcgtttgtcttccttgctttgtcgggccaaattgtgcccttccacaaccgaacggcggccgaggcgaaggattggcaaagggttggcaattgaaaccaaaaaagggggcggggcgttttaattaaataattgataattttactctaattgtgatgatgtttttccgttattaagaatcggggccaatgaaccgtgacaatttggggaaacatttgctcggcactttttcccatcagccgacacaaagcgaaaaggagtaattactttattattattatttttaatttcattttgtcatttttccttttggataattttggccaattatattttccttatgattaattagtgttttaattttatttccgtttagtcagccgacggagcaaaaggccaaaagcaaacaaattttggaggaccaaagggacagcggagaaatgaacaaaatgtaagacaatttctgacttaataattagttcaatgctttgttattcagttacattctcattttcaacggcatttgcattggtaagaattaatttaatattttgtgacacttttcaattgcattttaaaatgaaatttaattttaattttaatttaatctttgataagtctaaaaatcacttctcttctgatcattttatttccactttgtttttattttacattttattttctcccccccccccttttcgattttatacattttatttattttatttatttttaattcattttcattttatttttttattttttcagttttctttctccttttcggcctttgtgtgatttgcaattgcgtcgtccgaagggtcanattccaccacgagacagaggaaaagaaaaagaaaccgaccgttagcaggtgaaaaataaaacaaaaagcgcaataaataaaaatataatctaataaacgatacaaagtcccaaaaatatgttttttaatggatttgatga

SEQ ID NO: 34918 - DNA, 1700 bp, Heterodera glycines
tttttcaaaaatacacccctaagaaatcaactgaaaatttttcaaaaatgcacccctaagaattaaaaaaaattctcaaaaattgatcacaaaaatttcatttttttcttgataaaaaattttaggttcaaaaattctccttcttcgaaaaacaatataaaatatttaataatcatttaatgaccaaaattatttttttggctaacctttacatgtttttgctccctaaaaatttaattaaaaaaattttaaattccttttttcatgcttttttcggaattttcgtgccttttcatgcctttttttcaattttttcgtgccttttatagtgcctttttcgcgatttttggtgcctttttagtcggcctctagtaatgagtcagccagaatcctcctaagtattttcataaaattatcatatgcaaaattatgtttttttatttctcagaaaattctttattaaaatatttaaattttttaattttgtacatatttttaaagattcatttattaaattatttgtaatcacttcaccggtatgcagatcatttgattttattatttaaaatttattaattaagtatatttattaattttagtatatttattaacttttctttattcatacgatacttaaccttgttaagattttaacaaaaaataatttaaacagctatttttctttttttatgtgttgcaactttatttattttatttaaatcaaaatcaaaagaatttattcgttatgttatttactctaaattttttatgaaagctgcaattgaattttaataaagaaagatttaatcagtattcatatttatgataaaatgaatgtctaaagctttttaaatgtataattttttctattttctattttctacttttcttatttttaaataagctacctacatttttattaatcttgataacaaaattattttttaaatatatatcttatcttacatataaaactaattttaatattttttaaaaattatatttacagaggcataaatatttaatcgatgaaagtcctggaacaaatttagcattttccttgcgcggtttagcagtcttttgtgtagctgctaggtcgtttcttaaattccgccacattgggcgtttcttaaatccgccagggcgtttcttaaatccgccagggcgtttcttaaatccgccaatatgataattaacgaaaaaataattgtgcataaaataatttgattatgactattattattattcggtgacaagaagtgtcagccggaactgtcatttgtttattacaaaagtcagtttttgtcaacattaaaatagtataaatatattaatatttattttttataataaaattattttttaatttttaaataaatgcagacaacttttttattcttaatattatattcatgtataatattataaattgagagaatttaatcaacaaaatgaaatttggaaatgggtaagaaaaataaaaaataattatacttatatgtatatttaataattatgaatagattcgacggatttttgctttgcgatttcttcgtaaagaagaatctacaaaattttggtcaaatttacaaatgtttcgtaaaaattatgaatgagttcttagggaagaaatgaattcttttttaaattatatgaataatgagtggattcaaaaaattgactaagggaatattttttct

SEQ ID NO: 34919 - DNA, 1167 bp, Heterodera glycines
tacggcatttcccacggcacagattaagtgctgcatgttccattacgggcaaagcctgttcagaaatttcaagcggcttggtcttgtgcatttgtacggtgagaagacagaacgtggggaggcagttcgcaacacgttccggttaaaaaaaattttggtgaaattcgaattatttttcagaagtgttctttctttgccacttttgcctcccagcgttgtcagaatggctttctcaattattgtggcgtctgctccttcaggaatgcatgagtttttcctttacttctctcgaacatacatcggcttgacacagcgccagttgttggatggtgctaatgcatttggggccactcaaatcagttttttgtccagcaccgaccattgtttgttttcgtatttttgcatcgattttcaaagtttaattatttttaagctgaactagtgacaacaatttcgaccatcaactcagaacacagctacgcggctactccaatacaattcggcatcggctcaccggcgccatcaactcttacatggccaaccactgtgactccacaagaaaagcttgttcaatattcgttgagctcgctatcgacttcaacagcctcttcaggcatatattttttcacaaaactcgttgttttcacgaatctttcgtttatatttaataaaaaatttagttcccgtgtgggaggaagatatctgtcaggcgccccatttcccaattgcaatttggaacatgcactcgcaggccgcatctgctctcgctcgtacaaacaatggactggaggcaactcatctgcattttatgggttttatttactacgggcaaatttttaaaaatatatttagaaaggtctctgtcaccacccggcactctctgacttcatctgtggagtcaatgaaaacatcgacagacaggtggacgctgcccgatctgctcgtcatttcattcacaagagacacaaacgatacatcctccaggatgctgtcattatgcgaattttggcggacgcgtcgtacaacaacaacggtgacatccatgatctgatgacggcgctcggtctacaaattgaaggatatgcagcaaaattgaaagatttcgtgaattttgatgattcgattgttcgtattccgtgatgaattttttattgaatgtttaataaa

SEQ ID NO: 34920 - DNA, 1102 bp, Heterodera glycines
tctgcaggatcctgcgcaggattgcggattttaggaaatttcaaaaaattctgtattaataaaaaagtctttcaaagtatagcaaagtattcaaatatatttttaaaccaaaaaatgatgaagatgaaaaattaataacgtttttttgcttacactccaagcaatcgactgaatcttctttaatgcgtttaaaaagaccgatttgccaaattgggtggctcataataatagcttaaattagggttcgagccccgtggggcgggggtggcttttcacgggggcgggggatgcgggggtcagagtcacgggggcgggggcgggggcacgaaaatttcgcccccgcggggacgggggcgggggtttgctttgaattaggtccaaaaatctcacaaaaaatattttttaagaatgatttctttggctccacattcctttatttgttgatcgcctcgatactatttcttttgacataaattgcacagagttcgactaaaaagtaaccaaaatttagggatttttgggtaattttttttaagaaaaaaaaatgtttttttgggggggggggcgtgccgataggggcgaattttaaatttatttctaacagatattcaccaaaaaaattaagactttttcgataaattttcgttttttaactatattaaattatcgtgatttactcaaaattggaactcagattttttaatttttttttttttgcggcacatttttcaaaaaaaacttgatgaatgtgcgaggggagagttccggcggtgccgataggcgccgccgggaaaattttttgaaaatttgaatgcaatttgttaacaaattttgtacaaaaaatgagcaaaattcgcgagcttgggataatttttaagaaaaaattataggaattttagggggccggcgggtgccgataagcgccaccgggggaaaattttaagaatttatagaaattttgttaaaaattagcccaatttttccaaaaattttcctcttttaaaagaaaaaaagggattaacccccaatcaaaacattttctaaaaaaaaagaacataaagaaaaccctggatttaatcacaaaaaaaaaaatttaaggaaa

SEQ ID NO: 34921 - DNA, 1689 bp, Heterodera glycines
  unsure (1)..(1689): unsure at all n locations
agaatcgaatccccattctcagagtcaacccctaattcttttacttttaagtcaggagctgcagcttctcgaaagaatggcaccaaattatccatacgaaatgtgttagttaaaatttgcgttagagaccatctgaaatagaaactaggtaatcctatgttaatcaaaagtaatcttgtgttaattaaaaattgtttctaaaattaaaaaaaaaatttgaaataaaacagtaaattaaatgccaatggcataatttaaaattaaaaactaaaattttttttaataaaaatattttctcggaaattaaaatcccctcgattatgcttcgtaataataatcctaaaaatgttaacaacgcgaaacctcagcaaacccttcatcttaataagaatgttgaatcacggagcactgttattgaagcactttccatgattgaagttgaggaccggcggcttcctttgctgcaatacgaacaggaaatgatgatcgacactttcatcgacgacgttctttttattacagcaaagtaactttaaaaatgtaattaaaaaaattttatatatttcaaatgaaaaatatttttcagaggattgggcttagagcggatcttcttcaatcacctccatttgtacagtgtcccaagttttacagtgctcgtcttaaacacaaccccagacgatgaagtgctttttagataatcatttaattattctttctaagccccatggaatatgattctaattttcgaggaattcttcgttggactataacttacaatttatagcatttttacttggaacgcctgcgcagattgaacccgggctgtcctcctaaattaatcactgctgatgttccttcacgcaaccggtgttctgttgggggcgcacccctttttcaagttatgaagtccatattattcacagtactctcatttaccgttctggcggtgttcaattcgtcacttctcgcattttaatggttgatttactaacggacaaagtgcctttcgattgcgttattggcatcctcgtctttagggcacacgagtaatttatcattttacgaatttatttttaacaagcagcgcaatttgtttcaggttgctttttggttttcaggaatcatttattctgagattattccgagagaaaaggccccatggctttgtcaaagtgaatactcttttattctttttaaatttgacattttatttttaatgatatcacccatttgtgaaggcattcaccgacagttgtgtacaaattaccagtgatggactcggccaattgcaacggcttgtgaatctgctatatctaaagagggtcgttgtccttccacgtttttatgcaccagtcaaagagtgtttagacgtcgatcaggcaaaaaaaaagcaaaaaataattagttcccaaattgaaatataaaaatttcagcaaaagtttgtgcaaacggtaattcaactaaacaacactcaacgcaaagtgcaggccaatctccgcgacatcatcggaacttgcgtcagggagttgaagcagtgcacaaagggcgtggatgtgggaggaattttccattanataatggccaattggtccattcagactgagacagaatccgaatattggcaccgtctgcccacttgaggccaccaaactcgagttggacttgcgtcgtcgagacgccgttctaacg

SEQ ID NO: 34922 - DNA, 950 bp, Heterodera glycines
  unsure (1)..(950): unsure at all n locations
attttaccgaattttcaaaatgccacggagtgactgcttttctgctgaccaattaattaattaatttgtccgtcgctcgtgtgccaaaatgctgaaaatgacgcccaagggcagcgtgggcagcttcgtcgttggccgatccaacatcgatttggagacgaacaccaacaacaactacagctacagcaacagtgccaatctgtcgacgacggcgattggcaacggaaaaatgtcgcagggaatggcggaggagggggaggagcaggcgaatgcccaactcagcaacagggaggagttccatcttcacaacctgctcgaaaatgtggaccaaatggtgagggggaagggagcacccaattaaattaaaaaaagttaattcaattaaataattaaaaaataatatcctcagggcactgagcatgactcttcttggcgcaaatacgctcgccttgttcttcctcacattggccttgtcatgtaagtgtgactaccttctacttttctaatgactttgcttactctcgctctctcttttttctctttttctcattctctctctctctctctctctttctcttttttctctttttctcattctctctctctctctctttctcttttttctccttttctcattctctctctctctcgctctctgataattacatatttaatccattccatttttgtaatatgaatattaatttaattttaagccccaatgttaattacctacagtttcgtgtgcctatacgccatgttcggtgcctgggtgttctacagtattgaatcgccgcatgaagaccgtgtaagaaagttgattgaaaatttgaattttggcattccgtccctctttcgcaccaatttgaatgcctttccattcagctaaaaatgatncgcattcaaagggtttacccaatgcgacagtctctgatcaatgtactgatcag

SEQ ID NO: 34923 - DNA, 942 bp, Heterodera glycines
agactacgcgacaagcacgtgtacaagccaatgacggtggagtataggtggcccgctccagcgccatccattttcagggctagttgattcggcaggtgagttgttacacactccttagcggattccgacttccatggccaccgtcctgctgtctatatcaaccaacaccttttatggggtctaatgagcgggcactttggcaccttaactccacgtttggttcatcccacatcgccagttctgcttaccaaaaatggcccacttggagctcaaacattcaacgcctgggttcagagtcaagcaaccctggcttcatacccatttagagtttgagaataggttaaggacatttcgtccccaagtcctctaatcattcgctttaccgagtataactgcttaacgagctccagctatcctgggggaaacttcggagggaaccagctactagatggttcgattagtctttcgcccctatacccaagtcagacgatcgatttgcacgtcagaatcgcttcggacttccaccagagtttcctctggcttcatcctgctcaggaatagttcaccatctttcgggtctcagcgcatacgctctgtctccgccccatcgcatgcgatcgagacgggactatgttgcgccccaacaccgcagtgccagggatcacacatcagctccgtaagaagccttcactttcattgcgcctttgggttttgaacacccaatgacttgcgcatacgctaaactccttggtccgtgtttcaagacgggtcgaacagatgaccggcttttacaccgagaacgcacaactgagagcccgagctggaccgaactggtgctggtacgtgtcgcacgcgaccgccaccgacccccagctcgagtcaacacggacccgaaacattgcacattcacccagagtaacagcactcccccgatccgggtac

SEQ ID NO: 34924 - DNA, 920 bp, Heterodera glycines
  unsure (1)..(920): unsure at all n locations
tgtgctaaatccataaaatgccgaanatatgtgcgaaaatatgtgttctaataaccgattgagcatattaaatgcaatatttgcggggccttgctcaaattttcatgcccagacccggatgaacacaaatttcattgaaacttactccattaaaaaatgaaaattaacaatttaacatcccaactctgctgatttatcagcattttgctgcttatgcttatcaagaggtcattgctgatttttttataaaatttactggtttaaaatcagcctagtccacccccaaaattctgtttaatttttaaaatttgacaaaaaaattgccaatattcagtgaaaatccgatgaaatggcaaaaaattctaattttcccccagcgtcacctaacgacgccgcctgcccccctaaaatttttttttctgataactggctcaaaatcgtaaaaattggactttttggtgaaatctgttgataagacaatttttattattgcaaaaaccacgactgtcatgtttatacttgaaaaaacggaaattttgttaaattttttgataaataaaattttattataatttaataatcgaaaagaatttaaatttacaatatgtgtttatgaataaacattcaaggctaacaaatgatttagagcaaaataattttactatgatgatgaattctgctatatttgtttaaatgaaaattaaaataacaaatcatatttaaagcaatctttattatcatattttggatgttgtccttaattctttataaaaataatataaaaaataatactccaaagtagtaaaaacaaaaataaatgaaatatttataacttgacaaaaggaaaaactaatcatagaaataaaaattttgaaataaaaaaacgaaaaataacataaaattttcacaacaaactttaa

SEQ ID NO: 34925 - DNA, 1347 bp, Heterodera glycines
agtgattttttgacttacgaaggtccggagttctttttgacggccctttttcggcggcttgggtcgatgtaccctctccgtctgctgttgtctcggcttcggtctgctttagcgctgaaaaatgcagtgttttaaaataaaattaaatttgttcaattttcgtcactttttggtgttgatccagctttttttgcatgctcccggcgccattccttccgctttcgtcttgcttcagtcccagaattgcttagcttcataaattttccagttttattacgtgtagataccatttttatgctaaaaatgttgcaaataaatttgattttgttgtccttgaaaaaaaaattttcctattgaccaattttcttaaaattttgcataggcccatattttgaccccctctatcgaatccctgtttattttttcgaagttatgtttttaactcgagatcggctcttccatttttacaagggaaaatccccggaaaattttaagttttgcaaagttttggcgttctgattactaaataaataataaacttatttgtacttggagcccaaaattgggccgctgtgtacaaaagagcctaatatttcgcgatttatttccatattttggcatttttatccatattttatgtccttatttttttcgataaatttcaattcttaaaattgataaatttatgtcaaaaataagcaaaaaaacgaaaatttcgcttttcgggttgatttttcggtaaaaattttgagaaagtatacccttaattttgaaaaatttatatccatattttgacgtttttgccatttatgtccatagtttgagcttttaccattttatgtccatatttcgcgatttttagtccatattattttatagccatatttcgcgattttatatccatatttttatcatccctactaatagttagtcaaataaaaattacggtaatagtgccgatggtagccagatccacttttccagttttttttttctagagataatgtcattttaggggttttcagggtcggagaatccgattctgatatccatttcaacccaattccgaattccagacctgatttcgaaccaaaagtcgaaaacaaattttcacatttttttaaatctaaaaatggtccaaggtttttttactgaaattttggtgatttttattttatttgcacacatttaaaccattttagaccaaaaatgagaaactcgaaaaattttagttttcgactttttgttctacatatatcgggcccgaggttcgaaattggctcgaaatggatatcagaattggattctctgactataaaatgacattatctcgagaaaaattttttt

SEQ ID NO: 34926 - DNA, 701 bp, Heterodera glycines
gatgtctcggtcttgagaaattcaagataaatccttctaaaaagcatggggggcatccaggaaaatttatgatgaagctgatgacaaaaaaacaatcattggccattacaatttgccaaaaatggcgctaatttaaaatggaaacaaatgcgtaaaatgtgtgctaattgcacatttgtttcccggctttagcgccatggtgaaatttatacaaaaaaaaacaggttggccaattggtcattgaacaaatttttgttgtttgattttaggcggggaaaaaattttatttatggaaatttgtaatcccaaaaaattatggcttttaaaattttctaaaatgcagagggtgagtcagggccaaaaatgccgcaatgtcctccagggatgtgtgccgacgccctccaattcgacagtctgaaattggaattcagacggaccaaaaaagttcaaaaatcggaaatcggcatgccgacacatctctggtgtgcacatttattaattggtaagattgggttttaattttgaaagatttttacggtttgtttggtaaacaataccagggtcaatggcaactcgtacaacaaaaaaaaaatctaagaattttcaactaaaacttagaattttcagataaaaaaaatctaaatggattttttagcctagaaagactttaaaaaaaattctctatagtcttttaccaattt

SEQ ID NO: 34927 - DNA, 1252 bp, Heterodera glycines
ggtagttattaaataaaaacaccgttggaaattattaaattgaatatttatttaatttgaaaataaattatttttttttccaaattcaaaaaaaaataatgaaattctttaagttaaaaaaaataaatttaaataatttaaaagaaatcttcaaattaattaaaaacagtcaaaataacccaaaaatgcacagaaaaataatgttacaccgtccggattcgaactttgcaccccccccccccaaaaatgatgcctcagaatccccaatcacacagggattctgaggtcttgactatgtcaaaagttaaatctgatcacgtattcgtgatcagcgtcataaaatagccctaatgacatgtttttggaagatttttgacgaaaaaatttttccactcaaaaatcctggtcacccccctttggtcccgaatctcaaaatcacttttatttttataaaaattcttaaaaagtgataaaaatgccaaataaaatttatataatagagcaaaaaactgcggatttttgtagtattttatttttccagaatatcttttcagaaccgagttatgaatttttttctgaaaattcgaatttttccagaaattctggaataacttttttccttttttagatagaaattccaaataaagtccataaaattctcctgatttttctctatttttaaggctttattcctgtaaaattgatcaacccttcgatttgttatgaattttcaaatattaggccaaaatcccgagggccaaaaaattgccaaaaattatcgaatttgtaaaaaattccaaaaattatgaaacttaaaatagacatcatattcgtactcaggaccttattttaccccagaaaaatatttttcacccccattttcgtccgaaaaaaaatttccgaaaatttctagggggcctagctcgaaaatttttgaaaattttacatcatgtagtacaccattcaatagcatttaaaatgctaagcgcttcgcgctttcggagcttcgctacctacactgtgaagcgattcaaattgatcgaattggttggagatttttttttgaatttttaataaattattatgggtttttagtccacatcgaggctcaagacgggcgacttaaaacaaataaataataattcatttcgccaccgaaattatttcttattacaacgaattccctgccgatgatcagagctttgcttgctttgccccattactgtaacattagatcacacattttgggcca

SEQ ID NO: 34928 - DNA, 939 bp, Heterodera glycines
actgtttcccattccgtcaaatcagctgaccaagacacagagaattgaacgattatacatcaaatgtaaccattacgctgatcgtatgggcgttcggggaaatacaattaataccgcaaacggcaacccgttggcgcacagcaatttgcgaatggccatcaagtatataatagacagaagagcgggccgtcccaccattaaaccaccaggagcgaacctattggaagagcggcttaggcaggacccaattttgtattcatggacggccccaccaaagagaccgtcacagagcaaaaccacccggacggaacggacaatcaagaaggaatttcgcccgaaaaaatggagctgatcaacaacacacttgacaagctgtacaacgacccatcctccccagcggcgttcgctggagttactgcactgtggaaggaggcgcgaaaaaagttaaaacatttacgtaaaagggacgtggagcattatttggaggggcatcgcacgtacactctgatgcgcccccgaagagtgcgctttccaagggccaaaactgttgcagctggcttcatgacagacgtccaagtggatttggccgattttcaggcgctttcgcgccacaatcggggtcaccgctacctgcttgtggcggttgatgtgctctccaaacgactatttgttgttccactaaaaaataagagagccgatgagatgctggaggcatttaagcaacttatcgacaaaatgcccatggtcccccatcgcatcttttccgacaaaggaaccgaattcaaaaacagattgctgaaggaattcttcgaggagcaggagattgcgaagcacgagcccgtccattcatcagtcaaagcgtcggttgctgagcgggccatccgtaatggaagcagaaacggtaccgatatttcgcggaaaaggagacactgaattggg

SEQ ID NO: 34929 - DNA, 1273 bp, Heterodera glycines
  unsure (1)..(1273): unsure at all n locations
aaaaatttgataaatcatcccaaaaaattgtaaaaatgaggtattttttaactanaattgaaaaaagcaaaaaaattgcccgtttttgngaattgagttttaagaaattggaaaacttcgataattaaattcctttttttttggtgtattaatagcaaactaacaatgaaatttgaaaattgatcaaaaatcggacagtcccccgccttttccccccttaccaacctcaacattcataatcaaattgccgtccatttcgaccaacaaatttggtgcgcccgcattcgccacacacgcagcctttcgctggacagtgaaggagggcaaaatgagacggagcctgtgccagggaaaaaatatacgaaaaattcaaaaataaataaaaatctcaatttcataaagttagccttgcctttttcaattttgtttttctcacaaaaaatgatatcaatttgaaaagcaccaatcccattcaagataaaatttgaaacaaattgcaacaaaaattgaaacagttagggagtgtgggacatcctaaaagaatgtactattttttcaagtattttaaattttttacaatttttttagcaaaaaaatatttttctatgtaaaacagtaaaaaaaggctggtaagaattttccgttttctatgtattttttccttaaatcttttggtctgctcacaaatgatgacgtggcagtcggaaggacagttcaacggcatgttcactgtgcacactgaacaggaaagtcgttgttgtcctcgttggtgtttgagttgctgttggtgttccgttgttgttgtccccgtcggttgttgtcgcaggagacggcttttgctggcgatgtttgaaagagtcgaaaaagttgaccaattgggacactttggagacgaacgctctgtaaaaaaattctgtcaattagcatttttcaatcccttttaaataaggaaatttttgaaaatccgggcaatttacaaataaatttaataaaaaattatatttcccaggatggcaccatacataaaaaaggggggtgggtcggaaaaattttttgcgaagtggggtcggccgcccaatgacttttttttttgcttttcaaaaaccgtttttttcggcgcgcttttttcataaaaatttcgggaacagggggtccggcggtgccgataggcgccgccgggaaaatttttgaaattttgtagtgatttgttaacagattttgcctaaaaaaacaccaaattttgagattttaagccaattgttgttaagaaaaa

SEQ ID NO: 34930 - DNA, 926 bp, Heterodera glycines
  unsure (1)..(926): unsure at all n locations
ctctanngagtcttttcaatgtgtcctgttgtggggtactcaaacaattatgcctgagcaaaaatccaacgcagaattaaagtacagactatagggaagctattccggaaggattcggtctccccataaatctgggcgcatcggttcggggggactgccccgaaaacaaaaaaatcgattttttcaagtgtccgtttggggtactcaaacaattatggggagcaaaaatccaacgcataattaaagtacatactatagggaagctaggactgccccgaaaacaaaaaaatcgattttttcaagtgtccgtttggggtactcaaacaattatggggagcaaaaatccaacgcagaattaaagtacagactatagggaagctattcccgaaggattcggtctccccataaatctgggcgcatcggttcggggggactgccccgaaaacaaaaaaatcgattttttcaagtgtctgtttggggtactcaaacaattatggggagcaaaaatccaacgcagaattaaagtacaggctatagggaagctattcccgaaggattcggtctccccataaatctgggcgcatcggttcggggggactgccccgaaaacaaaaaaatcgattttttcaagtgtccgtttggggtactcaaacaattatggggagcaaaaatccaacgcagaattaaagtacatactatagggaagctattccggaaggattcggtctccccataaatctgggcgcatcggttcggggggactgcccccgaaaacaaaaaaatcgattttttaagtgtgcgtttggggtactcaaacaattatggggagcaaaaatccaacgcagaattaaagtacaggctataggggaattatttcccgaaggaatcggtctccccataaatctggggggcatcgggttgggggg

SEQ ID NO: 34931 - DNA, 1475 bp, Heterodera glycines
ataataccgccaaacgcatcatctgcaatcgcaatgccattctgtccttctaccatttcatccacaaattcaaatcgaacacaggtcaactccctgttacagtaagaaaatcaataaaaaaattttttttttttgctttttttaaaaaaatgaaaattttaaaattaacattctgtcgtcccctttattctagtactttttgtcccttttttaatgagccttcggatttgcgcttccccataactcccggctttccatttacggatttacggcttccatccgcccccccccatttttttgtatcaaaaactcggctgaaactatgacaatcgttccgaaaatcaactaaacctaaaaagatcattctcacattatcaaagcggcaccactttctatcgcatccttccattgttggtacccgtcctttggcactaaacaattaattatgtatttttttacaaattggcattatcccagcagtggtcataactttctggcactttaaaacatttgttcagctaattaaaaattattacgagctgatttgttgaatgcgattttgatcggggattcggtccatttctcttttggttggtattgtcgttttagccgctgacttgccactttttcgggcttaagcccacatactgaattttaatttcgattttatttttatttatttaaatttccaaatttaactcactttccctcaatctgttgtactgttctcgcagcctttgtttgtcacaaagcatatcccctccacatagcattgtttcggatggctttttccatggcatttctggcggaagtggggcccagtctggctttttgaaagcctgaaattatttttaaataatattttttaaatattttttctattttttaccgcattgttttcgctttccttctttccacagtttgccaatgcctcaattttcaacaacaaatttttgatcggcacacaatctgcgccgtagtaatcacagggtgttgctctctctaaaaacatgccaaaattaaatatttaaaaatatttttttcttcctgacttgtattgttcgggtcattttggtagggcaacaattttgtacggttggttatgaattttgaaaatttgggcctttcaatttggaaaaatgcgaacattttggtatctttcgatggcggcacaaaatgaattatttttgccaaagtgccgttggcgttttccggctcaatgtcattgagtatggtgccaatgccattgctctgtaaaaaatgattatttatatattattaatttatgctttttttttgaccgttttgaattcttcacaaatgcttttttcgtcgcccttttctcggattgcgcttttccactggtcagtgccaaattcgattaagaatgttggcatccaatatgttatgtctgttattttctccaacgaaattggaaatgttcgcgtccgtttgcaacttaatgtttttaattt

SEQ ID NO: 34932 - DNA, 1313 bp, Heterodera glycines
tcagctttgcccgttcgcaaattaacgatgaaatcttttaacgaatcgtaaaaaaattttttcttgtttcagattgttcaaaaattttttcggcttcgtccaactgatcatttctgaaacaaactttgaaattgagttgaaattaaactgaaaaaagcgttaaaacgaaacgttaacattgaagaacattcgttcagtgattggcggactttgcgcaattgccattcataatcattcacactttgtgcatgcccacacaaccactcaaactgacgttcatcttctgaccattgggatataatactttttgatgatcaaattaaaatagatcaccgagcatatgagttgggatagggttgttgagagttttgtcggtaataaaggaaagtgtgatcaacgaaaaactgatcggagtcgggtgtcttgtgccttttgcagtcgcgcatttatcggcaaaagagttaagcccgttgataaaactcttaacgaaattcgattaaaacgtgttaaaataaagacaaatcgccttaaacgaaccaaatcagtcgcgcaatttccaatggaaggatcaacaaaaacactgcacgaaatgatttattcaaatgaatgatggatgatttatccgaagcattcagtccatgaccatgcagaaacttgcgggcaatcttgaacaaattttcagatttttgagttttagtgcctttttccacagacccttttcgcatttgaaatgtcggatttatcgatggcactgcgctcattaaaagtcataatcgctaagataattgacccatagcatacggacacggcaaaatgtgtggcattttccacaggcaattgctgcaaaatgaaatcacgcactttggggtggttcagcttcagtgaaaatgtctgcaaaattaattattcaatacagtaaaaaagtgccacccttttcaaccatttttggcacaattttaatgaagccaaatgagtttctatgttcggattgagctgccgcttcctgcagaaactgaccaaggggactaacatcttcaagatgcgcaagttggctgatcacactcaactacaaaaattcaaaaaaatatgtttcggattgtattatcaaaaactttctgatcaatgcccaacattttggtgcgctctttcaaatcggcaaaactttcaatttcaatgatttcttcacgcaaatttggcctgccttgcacagtaaaatttatttatttttcatcattttgttcacaaatccatgatcattcagtgacgaaattgtccgccaaagcatcgtaaagattggcgagaggcgccttcac

SEQ ID NO: 34933 - DNA, 1315 bp, Heterodera glycines
  unsure (1)..(1315): unsure at all n locations
caaacgaacgaagcgacagatcgtgnaaaaatttccaacggatgggcggcggcgccaattggaggcctatccaggacgtcaaaatcacttggatttcactacgccaaatgtgcttccagccgctatacagcccggacgaattcaaagacattgaagaacaggtcagagaaagagagggcggaagagagcgcagaaacagagaaagaagggagagagagtaaaaggaagagagagactggggataacgaaagagaggaagagagaatggaaagaggggaagagagagagagatatgtgaatagagggaggaagataaagcagtaattagagaggcgaagaggaatgaaaagggatggaaaggggatttagagagaatggagagaaagagattaagagagggtggaaagataatgaaaaggaaggggaaaattgccatttttcttgaggatcaattcttcaaaatgcttatcgttcacggaaaagaatacgagtcgttggactgcatgagcatcgacttccacggtcggcccggggaggaggcgcgctatttggggccgaagggacggacgaacgatggcacggacggagacgtacggacgaggggggcaattgaatttgggttaaaattctgttttttcagctctgtctgtccgaatcacacgaaattgtcgcggaagtgaaagaaatacagactttgctgccgggcgcggaagaagcggaagaaaaatgcatggaatacggaggggaggagcagttcgggacggagttggagtgccatggccaatgccgacttggcctaattcgggtcggctaaatgccatttttggttggctgatcagagaactccctccaattttgcaatttaaaatttcaaaaatggactttttgatcaaaaaccatcatccgttagcaaattgaaaaattttgtgaatgtttcagaaaatttgcaaatgcaccgctcgcactttggaaagcctcgccgattcggaaactctacagaattttcccctttgtgactatgcgaaatgcaatttgaagttaaatggaaaaaaacaattaaaaagggtaattagtgaaattaagtgccaccgaagaagcattggaaaattgggaagcgacgctgaaaaattgcacgacggagtgtctgccgaattgtagccaaaccagattcagaataagcaaaaagacgaaaagcgcacagagagacggtgagaaaggaaaagcgaagggcaagaaagggaaatgaggaaaagcatttcagacagcacagaaagtgaagcnntgtctgggctcgttcgagtatttgcgactgatc

SEQ ID NO: 34934 - DNA, 1096 bp, Heterodera glycines
  unsure (1)..(1096): unsure at all n locations
tcaacaagcaaaattcaaacgaagttggcacaaaaccatgcaaacgaatattttcattgaattcggatttttcctttttttttggccttccatttatttatggcaaataattctttggtcaaattttgctccattgatcgcattggaaattgaaggtcgacacaatcagtcgaccacccctttcaatttatcatttgctgacaaaaggcgaagtttcactttggtgtgttctttgctcctcactaaagtcaaatttcgcttaaccttttgtcattattcgataggtcaatcactgtttcggtgattgtttcttttttgaaattgcattttccctttgccaattcagcccgtccatgtcagtccctcccttcgccattcgctttcctccataatgcgagtcaccagcaaacggcgcttccccgagtttctgacgttcaaattcggctacgaattgcccacgggcgaatcgcacataaaccgcgtgcattatttcattctgccaagggcgggggaatgtgccaaggccgtgaagttggccattatcgcgctgaaaccgctggcaacggacggcgaagagacactgagcgaatcgtaagggaaacggagagagcgacagagagagaaacagacgaccaattaaaaaacaaatgaatgaatgaaataatgcaatggaaaagaagcaatgaccgaccgaccgcaactgctgactgatccccccccccacacctttttgctgctgttctttcatctccgcgcaatagtcacacaaatcaaatcactaacaaatcgctgggttatttctgcaattttctttatcagacgaacaaaatgaactgaatagcctttcaattagccttaatcccatttttacatctgtgtaataaacaatttattattatatacatatttttatttgtattccgctgattgtttattggccgattctctcaaattttgctgtttcactttaattctcgcagaggtgcaacattccgctgaaatgtcatttttgttaacttatttagcctaattcatttattttgtggacccaaattctctnaatttaattacgtatagttttgttattagtgttgat

SEQ ID NO: 34935 - DNA, 996 bp, Heterodera glycines
cgtgtggatttttgcgcagcatttattccgccggatgggccttcgccgggggggatttgagttgagttgcgttttgtttgttgtttgagttggtgggctcatcaacaaatgcatttgggggagtgaccaatgggagggaagaaaatgcaaatgaaatccgatccgtccgtccgatcttttggacatggcaccccccgcggggcagtgaccgtccgttggatggaagcgccgctctcactctcagttggtggcagggtggaggtcgtccgtcactgacgggtcgaagtgagccaaaaagtgagtgagtgaatgaatggatccccccggggcggggggggggccgcgactcggtcagccaaatgcccccgcccttccccccgcccctcgggggacatcttgtccgacggtcccgcccactctcggcaagtcgtttccccgccccaccgcatcggctgagtcggatcgggacacttcagtgccacaaattaacgggagcaaacgtatatatagaacgtagacaaaaaaagtataatttatttattaattaaatttgttcgaaatgaaacattttcgctgcggcgctgactcagccggtgctgagttggtatttcctccctcccaaaaattacccttctctccccgcctctttttctccttatttccttccgtccctctgccgaggtcactctttcgtcagcccatccgtcagcactaatgaaggggattggaattggaagtgatgtgtatgtgtggatggacgaagaaaataatgggcaaaggacagcagcagagaggggaaaagcatctgctggccccgagagtgagtcgagagtggccaaatgagccaattttattgctaaggcaaacaaacaaagggaaaaaaacatttgcagtcgcgcaattatcgcaaaaagggcataatcttagaacacaaaacgggacatcactaaatgatagtgttgagcaataggtcatttttatttgagatttagcttt

SEQ ID NO: 34936 - DNA, 630 bp, Heterodera glycines
ttttcaaaacctggagctcagattcgtgatcagcacattttttaagcctagaaaaagtatccgacaaattttaacattttttttcgtcgggacaccaattattaatgattgctccctttttgatgggtttttttataacgactagagctcggcatggacctggatccaggcctggatttttcctgaacctgtattttcctggatttttgtccaggaaatccaggtcgaacatggaatccaagtccaggtccaggcttttttcaaaataccgagctctaataacgacatagcaccggggtgggttagttctgaaaatattaagattctgaaagtgagaagacgaaatgatgacggaaaaaaatttaacgaatttttttccgaaaaaggggtgttaatttaaaatagacgcactttttcagaaggctgtaactttttgagttgagcattaaaaaatctgaaaaaattcatttaagcttagttttttgtactgatcgaaaaagtaatttgcaacaaattgatcagatcactccttcatagtgatctgaaaatcctaaaatggcttgaaaccgcgaaattttcacaaaaaaaaaccctaggggggtggaaaaaatttttcgtgaaaaaccatta

SEQ ID NO: 34937 - DNA, 709 bp, Heterodera glycines
agtactaggcttttctctgcacagtggggcgtacccaccttgagtgggaaaaggtagacaggcagagacatacactgacattggtgtccctccggggcagaaaagcaaacgaaatcgaccgaccatttactgctgatgctggacgagccaacaaactctttcgtttgaattaccggccgagccatccttcctttgccaagggtgcgtaattaacaaattaatgagccgaaaattggccccctgctaataattgtccatcccacccttccttcggccgcaatggcccccaaattccttccgcccgaacttctgttcgaaatcgtggcgtttatgcctgcaagaggtgccgtgccgaatgcttttacctcctgctggttgcttcactcacttttgctccaacgagtcaccaaatggaagcaggtacagcacgatagtgttgctcaagatcgaaattgactttcgagcagcactaataaatatgtcgtgccgtttttgactgttgtgtatttgcacgcgttcaagaaatctttaaaatttgcaggatcccgcgtggggttgcgggatggaaatttcgaaaaaaaataaattaaaaaaatctccagaaaactaaacaacctaaattcgatagccctaacaaaggagaggtacccaactgctaatcatgaatccgaaggaatttttggataaaaatgaaaaaggtatgtcatca

SEQ ID NO: 34938 - DNA, 762 bp, Heterodera glycines
ttgtctctgttgtatctatcttttgctcagggtttgtcgtagttaccgttgtattttcctctggttgggtttctacttcgggatgtgtttctatttcagcatgtgtttctgctgttgtctctgtcttttcctcaggatgtgtttctgtttctggatgtgtttcggcagttgtctctgtcttttcttccgcttctgtattcgttttggtaattccttgcccaactttcgttatctccaagcccactccaacaaatggctcctcagtttcgtttccgtctgtcacaccttatttatttttatttttttgtgttttttgtattcccttgttgtgttttaccctgtgttttggcccttgttgtcttttccccctcttcctctttacatttcccgctcttttcgcctcctccttcgccctgcttctgctgctgctccttcgtcttcgtcctgttgttctcctccaactgctccaacccctcgccaaccaatgtctccaattccgtcgtcggttcccctgctgcctttgccccctccgttttggcaatttcttccaaaatcaatggcactgattggtccaattccctgtccaactctttctccaattccgtttcactcaaatgagttgcgttagtcgcggcgaatgctttgaccaatgcctgaaaattcattctcccgatcagtgccaaaaaatcgaattgcttttctcacaatttcgcccggtgacgcgcgcggattgaccgacgcttcaaagaggaaagtgcgctg

SEQ ID NO: 34939 - DNA, 1268 bp, Heterodera glycines
ttagcaagggattcattcacctccacaatttgaccggccattgagggaaaatttaccggcaatttgaaattgtagccaaatgctctagtccggtaaatgcgcgtgcatttcgaattaattccgatgttgacaccattccgactttaccgcacattttctgtcctcttcaattagagtcaaattatgaatttttcaataaaaggtcgcacagaattggaaaaaatatatttacttttgtggacccggattcggggcccatacacaaatggcgcagatccgcttgaaaagcgaaaattattcgtcaacattgttggccatttactagcctcctgaaataatctagaacattgtatttgtaattctacgcgacctttcttgatttaaaaaaaaattccaaatttgggcctatacgcaaaaatactcatgtttaaatacatacacaaaaatgctatattgatattagaagcagctaataaaggggcaattaaatttcatagctccactaaaattaaaaattttttaattcaaatatttttcagataataattgcattcatcctcttcaaattcattaatagtttcaaccaatatttttcaaataaaatccatatccatcgccagcccgttcttccgaatttctggcacattctttggatttatggcacacattttcaacagcaaacagcagcaacagttggcatgcgcccatgggcgccgcgcattttctcgtcatcaaatcggctgcgcacagagcggcgccggcggcgatggcaccggcggagggggcgggggacagagcgccagaagggggcaacaaaacaaaaacggcactacaatcaatcgtgccaataataatcattcatttttcgggtcaccgccggacgcggacggaccaccatcatcatcattttcctacatattgttgtgccttctgtctaaaaaaaaattcaagattggaactttgttatcaaaaatttccggaaatcgggacctagccaggctccatgatttttgaatttaaatttcgaaaatattttagaccgtttttttagaatgtgttcccgtctcataagtccatccgtgccgatcttcaaaaaatttgattcccaagcctgacaatctcgacatttgttttatccttctctttatatttttttctctctctctcacttctccctctctctctcccgctctcttcctctcttctccctctctctctcctctctgtatcacttcctctctctctctctctctcatttatctctctct

SEQ ID NO: 34940 - DNA, 1274 bp, Heterodera glycines
  unsure (1)..(1274): unsure at all n locations
gattttgacgccatttttcgtacaatatgtttcccgatgtttggtgttgttactggtataaatccatttctcaatccctagctctaaccctatcaattcncaacttatacccaaattcgagaaaggttcaaaccccacnggttttcgagtcgattatgtattttcacatcattcaaacacttttttaggtcgaattgcgttctttgattcctcggaatgacaaccataccngaagtcattgttagggcacgagaataccaagggcgtggtctgttgagcgcactcgacttttacaacgaactgtttcaaaaaactaatgaactcaaacagcaattaaattgtgaaagggttgtgccactcgttgaaattgacaaagcggaattggacaattatctgcgaaaaccgccagcgggattcgttgggtttgaggagctctggacccaagctgtgctggaaaaccccgacccggagaatttggtgccctatccaatccagggatttgaacaattgttgcagcgaaaaaagatgcaattggcaacggtttcttcgctccatcagggaattggttggaattactatattttttctttttaccttttattcttttattagacaattgcgtttctcgaattgctacgaaccaaagcttagtgctttctgcccacaataaatatattcaaataatgcaagcgcaaaaacaattttctaatcggttgtacccccaaacactaaaaataaaacaaataattttgcagtttattgcgcattttggcttcacaaacactttctcaacgctttgggatgattgttgacgaaaaagaagaacaattattttgccgcttagaaggaatgaatttaagagtgaacggacccgggcgcttaaaggtaatttttaatcaaaatttttttctcgtcctttatcccgagattaaattgaaatttcttcttgtcaaggatcaaataaacggaatttacgacactttgaggcaaaacgaagacaaatttcgggagacattcaaagaaaagtcgatgagtgcaggacaagccatttccgctgaagatatgaaagagcttaaacggtgtttggctacaagacaaaatttgctggagaatcttgtttcagctgttaaggtacagaattttgacaagtattttctagttgatgatgttgttaaggcgaatgctgaagtgttgcgagttgttgaacacaatcgtcagccgatgactccgatgaataatcgccgctaattctgtttttgcaatttttaaaataa

SEQ ID NO: 34941 - DNA, 895 bp, Heterodera glycines
tgttagtttaggcactctgatgctttttctatcaaaacagtgagatgaataaaatttttaaaaatttttaattcctttttaaacaggccaaaaagtttaggcttaacttttttttcagaaactgatcagaagcgcaccaaactttgcagggatactgaaaggaagagaaataacctattttaaatattatctagtcagttcatttaaataatttttatccaaaaaatttttttttgggttttcggggcagtccccctgaaccgatgcgcccagatttatggggagaccgaatccttccggaatagcttcactatagcctgtactttaattctgcgtaggatttttgctccccataattgtttgagtaccccaaacggacacttgaaaaaatcgatttatttttgttttcggggcagtccccccgaaccgatgcgcccagatttatggggagaccgaatccttcgggaatagcttccctatagcctgtactttaattctgcgttggatttttgctccccataattgtttgagtaccccaaacggaacttgaaaaaatcgatttttttgttttcggggcagtccccccgaaccgatgcgcccagatttatggggagaccgaatccttcgggaatagcttccctatagcctgtactttaattctgcgttggatttttgctccccataattgtttgagtaccccaaacggacacttgaaaaaatcgatttttttgttttcggggcagtccccccgagccgatgcgcccagaattatggggagaccgaaatcctcccgaataacttccctatagcctgtactttaattctgcgttggattttttgctcccataattgtttgagtacccccaaacggacacttggaaaaaatccatttttt

SEQ ID NO: 34942 - DNA, 1057 bp, Heterodera glycines
gtgcgatctaaattatgagatttacataattgtgacttttttgcaacattaagtaaacaaaggctttttggcttttatagtcatagactcatgttgaggaccattagacccactaattacccttgccattccgctacagttacgcatcctccacagtaccattcgacttctggcgattccttccgccgcctccccttccgctttcacatcgtccatttcgcctcccgccgtctcatcggttctcttccgcaattcgtctgtccatcgttgggtcggttccccttttgcggtgccgtctttctcgaccattcggcactttctgatcgaagagtctcgcctcgacgattttgtccaaccagtagcgataccagcagaaggacatcagcaacaacaggaggaagggcccttttctcatttatctgtcgtcgattcctttcgaattgtccgctctcagatgggcggtgcccatctgagcgcaggcactgccgacagagtaccaacaccatttggcggcagcaaagttggaggagataaatgtaagtcaactcgacaaaaatcacttttagattggcacactggaaatggcagaatgccgactaaatcaagcgccgggagccgcctttttgaagggcgtggaagtgcgcgagcggctgattgtcaacggcacgcaatggccgtgcgggagggaccattgcggcacggaagggtcagtcatcaggggatggtaccaaaactgtgccgggtgcgtctttctatgggtcgctcgttttcaacaatcttcggcaccagcaggtccgccaaaaagccgtaaatgggattgttgaaatccctccgccgatgatttctctcgccctttccgttgttacccttcattttaggcttttggcataaccaattaaaaatgaatttatgctctccgatgatcagattgtttttggcgccaaactctcatcgcaatttgcactggcaattcacttccaaccggtgctttgacgggaattacagcgacactttgtcatcatcattaacatcatcatcatcttcattatcatcatca

SEQ ID NO: 34943 - DNA, 918 bp, Heterodera glycines
tttattcaaaaaaaataatttagtgtacaaattaattaaccttgaaagtacataaggctagctgacttttttactcatcaaagatattttaaatagatacattaatttttgttttaaaataataattaaaatatttttaataaagatacttcgttttcatttgcgagtcaccacatccgcaaattggaagccttcctcctgctgaccgttcttttcattttcggtaaaactcgttataacgaatttaaataaaattcattttttatgcaatatgtgattggatggttaaagaaaaacagaagtttaaatccgaaaaaccaaataataataaaaaaaattatattatatacttgatctatagtttattttattgtctttgttttttcatcatttttcatttataatttgttttttaaattatgatcagctgcttaaagacaaatatatttattattttatttaattaaataaattatacatccctcaatcagtcgctgacgatttttttgtgaaatttaaatactttgtcaaaaaatatttgttattgatctctgataaatattcgaaagtttttttattagattatggaagggagcaaacataatactatgtaagtttatttgtaaaatcatacattgaaaaaaaaattggccatttcttttgtcatcatatgagatcgccgggagatagccgtaatattaggattggaaaaatggatgaaccaacttagacaaataaacattcagacgtatacctagaaagtgccttttttgggaattcgccaccttttgccgcaattattgcaaacaagagggaatacagtactccatccgatgaaatgatcggacaaattgtatagttatgagtggttgcagagatgttttgagcacggctctccacttttttcgttcccataaa

SEQ ID NO: 34944 - DNA, 1653 bp, Heterodera glycines
  unsure (1)..(1653): unsure at all n locations
cgtgcattcaagccaaggggagatcaaaaaaaaatagagaaaaactaaaatcgtagccctacagattattgtaaaaaaaaaaaaaattaattttttaatgaatttgatcgtatttagttttattaattttcttttcacctaatatcccctgttgatccaaccattcatcggtcgcaaatacatttggaattccttccatatgacctttgctcagtttacaaacgaataaataatcgggaaatttttggattgtcacttttatggcttcgatgacatacgaaaaatccgatttattggtgtccataactgtgccaaaactgacgaaaacaatgccatttctgtcgccaaaatttgcagttattttctaaagaatcacaaaataaaatacaattaaataaatattttgagctatttttactatgtattataaagaacatacaattattattaagtttgcttattaaatattcaaatgccaacctcgtctaattctcgtccattttgttttaattgaaatccaccaattaatttgatcttttcaatgccattaaaaatattgtaattgtcaaagtccacttggggctgggaatttacaagaaaaaaacgactttttctgaaaatttcatccaaaccggggaaagattggagcgcatagttttcttgtgctactttttggtactgaacatccttaaaaatattaaatgtgagtttaaaaaatatacaataaattattgaaattttatcaaaaatctaaaaatttaaaggtgaaaaaaggaccaaatagcattaaatttagaaacaatttcttgacctgtatatatgtatatttatatttttatattaattcatcgaaaaatggaaaatttatgaaacgaaacttttcaaaaaaatattaatttgacaaattttttatgaattttaattaatgtaatttgcactcgataggactttaaaacatgaaattctacaaattaggcagaaaataccattacctaacaaataatgtgcatagattttgtgaaaatttttagttttttagaattttccaaaaaatttgttttaccttttcaacgtgacccctaatttttctaacagttgcttccacataatttgtccagatttctgtttgtctttgctgtaattgtttgtcgagatggtcacctacaattgttccactacgtattgtaagttcacatcgcaaattataagggctcagatttttggggtctaaaaattgttaaaacagattaatccccaaaaattagcaaaaataaaatacgctaatttaaatggaaccaattctaataaaatttgcttaaatttattttttcatattttttcctgagctcccagtgcctacaacgcacaaaaaacaaaaaaagtttttttgtggttgttttaaggttgactttcgagttatttacaactattttatagttttttattaatattaacacctaaaagcctaaaaaaatttgaaacaattattttcanatatttcagtgttttgtccaaaatttgtgcaataaaaacganaaacacacacacctctaagaatcgagcaaaaattttcnaaaatgaaccctntaaaaatgaaaattttctaaaaatttcaaaaattatttattttgttttacagattttaaatttaaa

SEQ ID NO: 34945 - DNA, 820 bp, Heterodera glycines
  unsure (1)..(820): unsure at all n locations
aattttatttancatatttggggttttttgtacatattttgggatttttcttacatatttactgtatgtacatatttggaccactttttgtacatattttttgcagccctattaatgatcgatcattgatggaaaaggattaaaagttaaactgctatgtagtcatttgcagattcccaatggtaagagtaatgaattcgaagaaaaagatattttatttcaagcattttatttgtaaataatcagtagggttataacttataagttgtatgcactaaaaaatgccaaatatgcgcataaaatatgcattaaaaatcccccaaatatgccctaaaaacccgaaaaatgcccaaatatgcacccctttcttcatagcatatgcgcagaaaaaatatgcaaaatcatacaatttataaccctaataatcaggaaaaaggaatgcacttagtttgatacaacgaatttcaatgattctgatcataataattattccgatcgtccgctggccatctcatccaaaaaacgctgtgcaacattttccataggttccaacgtacgcggtgtatgcggcaatcgtccattttcatcaccttacataacggaaatttggatttatttgaacggaaatacaaattgttaagaccttattatctttatgtgaaactaaaaaaatcttgtcagctgtttaaatgtagattagacagtataatttccacttgtggttagacccgaatcatacctgtgcaagggggtcgtagggggggggggtctcagtcgatcgtaagggttcaggacagtcgatcgtacgaggtggaggggt

SEQ ID NO: 34946 - DNA, 593 bp, Heterodera glycines
ctgcaaaatttcgaaaaatttagttaaggttcaaaaaagttatggccagaagaattcaaaaaaccaaattttccaacttttttggctcgaactttttttgaacttgacgaagttttttggaattttgcaggctaatagagcatctaaagagctttcgaatgatatcaacaatattggatttggttggcaaagaaaaaagttatagtccaaaaacatgtgttcgtacgaaaacggcccgtacgaaaacggcctggccccaaaaacttcacatcacaaagaaaacattcatacacactaccatctgcgtttctatcacaagattattacgccaattttcaaaaaatttgcatattttgggactttgctatatttgattgtgttgaactttactttattttatatatattatgtgtttaactttgtagaatttatggattgttgcattttttatcaattttagagtctaaaaatgagaaatgtgaaaattttgaattttcgacctttcgaattcggattaggggtttgaaattggtcgaaatggatgtcagattcgtgatcagagaccccaaaaacccccggaaacttgtttttta

SEQ ID NO: 34947 - DNA, 571 bp, Heterodera glycines
  unsure (1)..(571): unsure at all n locations
ttaccctcctcctctctcttcgcgcccaattccatcggaccgtttttaagcgagaatttccgcttcgttttctgcagcgtttggcgccgttgtgccgtttgaattcgttcctaaatttctttcgaattttctttcgtttgctttcctatgcttttctttcacctgcaatttccgatacgggctcattctgagtgcgatctgtgcattccgttccgcttgtttctccaccaattgcgcgtgctgttcggcttcttctttccgcttttggtcgtggggagaaagcggaaaaaatgccattgaattcggtggtggagggaaaggcggcacacgcgcgacagagtcattggcacaatattcgaattggtagcggatgtaagcagagaattccgggctcagctgcagtgggtcgaactccaagtcggacgaagcgccactcgtcgaagagagaaggtcgtccagngaggggtcgggcgaaagcgaactttcgatggaagccaagtcccaatcggnggactgaagcagcngggccgagccgaaacgtgacggnntcgaacagtgcgcgagagcagcg

SEQ ID NO: 34948 - DNA, 991 bp, Heterodera glycines
actcggacgctaaggttctaaaaccaacaaaatcacttttctagtgtcgaattgccacaaatgccggcgaaatatttcgaaatgtttgcgtaaggctagaaaaacaaatctatttgattctttagtggttaaaatattgcgagtttttactccaagactttagagggcaatttgaataacgaactcataatctaattgcgaatgctatctaaaaaggtagcgattagcagcagaaaagattcgtaaatactaataggctaattttgccaaggattatcgtcctattttggccattggacttaaaagggttagggtgtacaatcaaaaaatttcggtctcccagaggaaaattatttattgacctttatgcacaattttaatcataaattaggatttaattgtacctcattactcggacgctaaggttctaaaaccaaaaaaccacttttatagtgtcgaattgccacaaatgcctgcgaaatatttcgaaatgtttgcgtaaggctagaaaaacaaatctatttgattctttagtggttaaaatattgcgagtttttactccaagactttagagggcaatttgaataacgaactcataatctaattgcgaatgctatctaattaaaggtagcgattagcagcagaaaaggttcgtaaatactaataggctaattttgccaaggattatcgtcctattttggccattggacttaaaagggttagggtgtacaatcaaaaaatttcggtctcccagaggaaaattatttattgacctttatgcacaattttaatcataaattaggatttaattgtacctcattactaggacgctaaggttctaaaaccaacaaaatcacttttctagtgtcgaattgccacaaatgccggcgaaatatttcgaaatgtttgcgtaaggctagaaaaacaaatctatttgattctttagtggttaaaatattgcgaggttttactcccagactttagagggcaa

SEQ ID NO: 34949 - DNA, 860 bp, Heterodera glycines
gcgctgaagcaattgggaggagggaccaaaaaggtgggaaatgggaaaaaaacattaaaaatgccttttacgcactgaaaatgagttaggtagtccggtcggaatgtctcaaatgtgccgttcttaaaggtgctcgttttgaccaccgattgctatgacaaacctttgccggaatcgtcgcgagtcattccatgctggccacatttatggtccagccgaaagaaacaatttgcgaaattcaattcaatttttgaaaatattcattttcccgttttcccctcgcaattcccatagatgctaaatttttattataaaaaatacaacaataaacccaaaaatcaaatggcatggctatttcctgctatatgaaaattttaacgttttctggatttattaatagctcatgccacttgtgctttgggtttggaccatcacgatcggtaatttcttgtgcgaatgatcgaatatcattcgttctcatcgctgcatcgtagttgttgcgccatctggcgcgcataagaaccggctcgtgcccggctttccccaaaatcaaattgaggaggagccgggcggtactcccgttcccgtcaaggaacgggtgtattcgcacctgaaaatttttgattcaaaaacacagccagggagtttttggggtacactatgaataacaaatcttaggatttttttataagaaaatcccacgaaaattttttttctaaaattttgatggtgaattactaagatttttcaaaatgtttccagaaatcgctcgctgaaaatttcccaaccaaaattttcctgacatttaaaaaaaaaattttgagagctgctcccgaattttggaaggaacatttcctttt

SEQ ID NO: 34950 - DNA, 840 bp, Heterodera glycines
agaagagagggagagaaaggaagagaggggggaaattacaatgagaaaagaagagagggagagaaaggaagagagggggggggggagggggaattaaaaggagaaaagaagagagggagagaaaggaagagaggggggggggaattaaaaggagaaaagaagagagggagagaaaggaagagagggggagggaatagaggaggactaacaaataagataaacggggaaaaaattgaatgaatttggttttttgatccgataactctttcgcttctcttccctttctcctccattcttttgtcattgcaattgaattccataaaatgtcctgaggcaacaaaagtgggcaatcattgaaaggtaaaaagggcaacagaagggtggggggaagttcaacggagggcaattcgtagggataaaaaacgaaaaggggaaaatgattataaaaagagagggaaagaaaaggagggggggggggacgagagtggaaaaattaacgagagacaaagggaacaggcagaaaaaggttgatagcaggcgacaaaaaggagggagacagacagttaaagataaaggcattcagtgataagaaggagtttggcattttgcaaaacttagggaggaggaggggggagaatgtttgctgaacagacaaatggcgctgctgaacacccgagaatgagcaaaatagggctataataaacaatgggtcattccgtaaaacatgaaacggagatggggggggggtatttgaggacaaaatgaggggacacccccacccaaatccattggatttacttatgatgaacgaaacagatgcgcaacatgaaaacgaatttt

SEQ ID NO: 34951 - DNA, 1247 bp, Heterodera glycines
  unsure (1)..(1247): unsure at all n locations
ataaaattgaactctgctgatccgctgatctttttatgattattacgtcacttatctacaaattttgctctcttccgttcaatgagggtttctcaattatttttgttgttttccaatgctttcggaagaaagtcgtaaacacaaaacacttccatttcgtctcccccccccccccccttcactccccacttttttctctgtttgctttgccctttcatttcgtttttatttttgtttaattttccattggttttatttgtggcttttctttaataaaaatattttcaattttgcactttttttaaattttgttaaagattttcttgctaaatttgtgtcgaataaacgcattttgggaatattttaccggattaaataaaaaaaagatggccgagacaattaaggcaagcggaaaagtgattcattaaaacaaaattgatttaattaaaccattgggtttattcaaatgattgagtttgactttgttttcaggatgccacccatcgcatgggccgaatgcttccggcagaggctggcccgcgttatgggctttacgcggtttgttttgtgatttcgaatattttgtatagctgcaatttaattttaggcactggcggcaattgccggattggcctattgttaccgcgaccgtcttggatttaaaaagtgaatggacggacggcggaacggattggtcacccaccattttgatgagagagggggcaattttgaattcggattgttccaaggtccacaaattttatggccaatggtcggatcttttttcatttgatgctttttggtttcttttcactgtaaaataaatactatttcaattggactgtgttttattcgttttttagggtttcattttccattggaatttctcccccccccctttttggcattggcacttccaatgggttttggtttagtgcccttaatcccccttatttttgttttactttttaagcatttggcgtttcacttgtcttttataatcctcctcattcgccaccttcgaagtcaaaaacttgaaaatcccggcatagtcccgccgcaccgatgccccttcaaaaagacaataaaactgagttgccgttattgtctccattaactttcaattttcacggcaaattagacgcgttggtattattctgtctttttgtgtaaaatgnccaatgttgagaagccaaaatgcaactaattataaagacaaaagctgaattgaatttggacaccaaaaa

SEQ ID NO: 34952 - DNA, 1516 bp, Heterodera glycines
tttgcatcttgtgtaactaagtgtgaaagccgcttgctttacaaatttggcgaaacaaagtgagagaatggacaaaggagtgccgtaaaaccaggacaaaagaagtgttccgaggtcaccaagaacagatgaacaacccaagaaagcagcttataatgattgtaaaatcaatttattaactgatctaaaaaataagcatgtgaacgggaaatgtgtttacgagaggaggaatgttgtcaaattgtcccgggattttggggcttttaggttatacaatttcaaattattttaaatttaaaatcacatttaaaaaacttaatttgaattgatcaaagagttcaattgacgctttcattttacaaaaaatattcactttaaaatcaattgtatagattattaaattaatttccaaatagatttaacaaaatttgccattttttgcgtcattaaatgtaaaattcaatggaaaaagtggcatataaatgaacccgcagagacccatttctccacaatttgtttatatcttcttacttctatatcatgttgagctgttgatttgtggcttctgttctgaacttatattaataattaatattcattaaattaaacaaaaaatttgttttaatttactttatttaggatgaaaattttattgtttttcattgctttcattggcattctgtgccatgaagtgttcgcaaaatttacaaaggagaagaaagacttcttctcatctgtaaattttaaatgcctaaaactcatcaacgaaatgaaaaaatattctactgaagcagaatgtgagtaataaattatataataaaaaagttgttttaaattttttggtttcctttttttttgaaaagaaaaaaatattgcagaatattgcttagtctcttctttttttgctttgtaaacaaaaattcacgtcattttatattatcaatttaatgccgaattaatgaatttatttttctttttgctatagattctgaagacaaattgatggcaaattttagagatttatctgagaaagtaaaaacttgttcttgttgtgtggacgaaggtaataaatcttttttcaattcaatggacaatgccaaagaattctttgaaaatattgggaaagatgccaataaaagtcacattcaaaaatggcttcatcaaataagcaccgatttcaatacattgactattgaaagtgacctgtttgaaatttgggaaaactttatcgaatactcacatgccattacctcggaaaatttaaagtaatgtgtgatcaagtggcgaaaaatcagaatgatataagaaatgatgcggcactttatgctgtccttaataccattcattatgctgtagaaaaatgtaaaagtttagcagcaaactatgaaaagcctaagctttctgaaatgatttctgtttttcgtgatacactcctcattatgaaaaaatccttttacgaaagggaattaaatgccaaaattgtatttatcaatgaaattgggcatgaaaatgcatg

SEQ ID NO: 34953 - DNA, 1612 bp, Heterodera glycines
  unsure (1)..(1612): unsure at all n locations
caaacgttcattcaatttgaccttaagaaatttaaagaaaaggttaatccattttttggggcgatattatgcgataaataaaacatgaaaattaaagggaattcggttaaaaggaaaactaaatcaatgataaaatgtttttgtaaaattaataataaaaattcttaattttatatggttaaaatttgtccatgggttgaattttgccttatctggggaaaacaatcaccggcgagttcaatttctggcgaaatcaaatacagacggcgagaaaaagagaaatagttcactggcgaaatcactcactggcgaaatcacacactggcgaaatcacacactggcgaaatcacacactggcgaaatcacacactggcgaaatcccactggcgaaatcaatcactggcgaaatcacctggcgcgtttttattatataggattttttgaaataacgcacaaaacttacgccattaatttatttggcataatgtctaaatatatgaaaaaaaaccgcgaattccccacaatcttgaaaaaccgagttttctacgtctgttcgtgtttcgaatccggtttcgggctcaaaatcagtccattcggaattttgaggttctttgtttgtcacaattagctagataagctgactcgtaaattatgtgtcgtaatttacaccttaatgttttttcaaatttcattcctattaatcaaactttcctatattttgggccttccatttgtccacaatgaatgtgtattaagaaaacagcgtgaaaatttcacgcaaattgaccaaaatgactgatgggacgaaatcggtgagtgtttttctttctaacttttgatgccattacatttcttgggcctttgttttaagatggacgacgccgttgaattggtcactgccctggagaacatgcgggtgaacatcgacctgctcagtgtaaaaaccgacaaatttgggatttggggtcacacttgagaggaatcttgccaatgcaaaaatggtttaaaacctttgttggttttgtttcgattcaatgccccaggattctatgctcgtaaaaactagacatgcatattccaaccgtttcaggtacttttccattgatgacacaccccattaaaaaaatgagcaacaaagccggttcagtatacatagacttacctattttgtacgcataaaagaattgggttgggttcaaatgggacaaagttttctcatcttctttatattttgtatttacttacacatatcgaatggctttgttgcgcttttttaaattggggtgtgtcatcaaaacataaaaatataccttttattccctctattaatttttcaacgaatttaatttacaattttgcttttttcagaaaactcgcattggcgctgttttgaacgaattccgcaagaaaatcaaagacgaaaaactagcaaaacgttgcaaggcattgatcaaggtttgttttttttggaggagagatgcacaaaaacaaaggactcaaaaagtttaaacaccaaaatttggcacaaattttatgaatttttagcattacaaactttttgaatttgttgccaaaagacgtgctcagattntgttggcacaaactcgaaaat

SEQ ID NO: 34954 - DNA, 956 bp, Heterodera glycines
aaaaatggggacaaaaaatcatagaaaaaccaattaaagataatcaccgcttgagctgttccatcgttgacgaccattgatccatcggtgaattcacaaagcatctgatcaccttcggcacaccatacaaacaaggcgtgaacaaccatttggccaccgcttagccatccgacgcattggcactttcatccggcggaaattcggggaaaatgacgtcaaagaaagagacaaaacgaagtgatggacattcgctgagaagtgacggggccaattgacgcaaacgccgaaaagcgatggagttcaaaagcataacacgaatggagtcatgcagcattggccaaatgttgagcaaaataaattccaaaatgcgatcattgcccgtggtaatgtacaaatccgttgaacaaacggcggataaatgcgatgacattttgatcgatgtagctgaaaaaaagagaatgtagatgaaaaattccaatttaatcaaatttttacaagatatgaatgtgtctgaatccgatgactttgttcgacaacggattttgcgggattgacaatggatttccatcggaattgacaatttgcattttcttcgtgccattctctccaattttgtggcaaattcgcattttgcccaatttccatttgcgtgttttgaagtgttcgtcgacgatgcagttaaaacggcggttgaccagcgcaatttcaaggccgagctgagaaggcgcaagaaaatcgaacaccaaaagccaacaatcgccgcagataaagctgaaaaattgaagaatttctatgaaatttacaaaattttcaattttatttacatttctttgtgagggcggaagtcgttttttgacattgcttgtgaataagaaataaaatttctgcagaaaatttttcgaaaaaaaaaatccagctttaattatgttttaataaatttaaaaaattcatttttt

SEQ ID NO: 34955 - DNA, 365 bp, Heterodera glycines
tcaagggcgtagccagatcattggctttggggggggggggggggtgaagtcaaaaattcgatttttaggggtgtatttttcttctttcagtcgattttgaggggagtatttttgcttttttgaaatcccgaattagggggggtattttacataatttttcgccttttttcgccaaaaaattactattttttgccattttggccttctttttcaaaaatatggtaaaatggggtccggtggtgccgataggcaccgacgggaaaatttttgagtattttaatgcaaatttgtcaagaaaattgcttaaaaatttcaaaaaattaactgaaaattttttaaagatttgggtttcggggggggggggc

SEQ ID NO: 34956 - DNA, 903 bp, Heterodera glycines
atggcatttcaatctcccacctcagacgtttgtgggcactattgcatattttttatttatttggcttcaaccggaatgttatatgatgaaattttgaaacaactgaaattgtattgtgtggattataattgtgacattgcaattaaaaactacgtgaataaaattttgttttatctcttggggggagccttcaattagtaaaggtggatgattccgaatcatgatttaaaaatataccagctagtgccagtctctgggcattggggtcaaaaggcgtcagctgacacatttctcctgtgtctatctcattttgatgcgtcagctgtctagcattttagtccttaatttattagagaaaaagaggcattgagtatcgtaaaaagagaggtattgagtatcgaaacgattcattcataattttatggaaattactgctagtacggggtataaattaagtgaaaaattcaatacaacctcatttattggccaattccaaaaatcatcatgagcaatcgatcaaacaatgaacctagcccaccgaagcgccgaagaatgccaaacatcctcaaaagtggaagcaacaacaacaacaacaatggcaaaagacgcaattttcggcactatgtacgcgcgctgaacaccgacgtagcgttcaacaaaaaattcagactaatgaatgctaaaagtacattcatgatccagactctaccatcaaatcctgagtcgcttttgcgagtcatttttggacattgcatacaatcgtcattaaatgaagctcagagacgtggaattgaaccgagtcgacttggggcaacaattacttcacagttattggaccctgacatttggattccgatccgtcagataactccaaacacagtggacacaattttgaatcgcttc

SEQ ID NO: 34957 - DNA, 425 bp, Heterodera glycines
ttcatttctctctctgtctccgatcgatgcgcagttccaatgccaaaaccaaaaatggacttatttgggcactgtttgggcttttcgtgcgttttaatatcccataacaccgatcacataaaggccccgttttgttgttgttctctttcattgccaaataatccgccaaattttctgcgtttgttgcgttgaatatttatttatctgaacttttccaaacctgttattcgcagaatgagtgctttctccgaaaagcagctgtgcaattcgctcggcttcttcttcagataccctccttttttcgcctcatttggccttgcgaaattacccgcccttttcgttttgcgagtgatcaactcgttcttgtctcccgctggggctaattgcatcaacacgtcaccgggggggggggggggggcgggggg

SEQ ID NO: 34958 - DNA, 1884 bp, Heterodera glycines
  unsure (1)..(1884): unsure at all n locations
ttcttagaaatgattgataaaattcaaaaattgccaaatctttttatgtatgaatatagaaaacagtccttagctatgcaaaaattagaaattggtatcaaagaacgaaatatatttaaatgtcaagaagcagagattatatccgataccaatttatcgaagataaataaattccaaaaacaagtgccaaattatcgatttgaaatgaaaatgttatacaataaaattagaataactgcagtaaaacatttgtttaaacccgaaaaagaaatattttttagtccttttcaaatagaaagaaatagagaaatattttattcattatttcggcatatctaataaaatcgcaatacaaaagtgggcccaacgaaatgatgagctttggaagaaaacgcaggaagagagcagcaaaattggcatccgtgacaaccattacatttggaaaaaaagattgtgatgggggtctatggggaaaatgttgagaaaccccttctccaccctccagctcccctccccctcccgcttctaaatatgttgttgtttttaaataaaaatataaaaaatgtttaaacattaatttgattttttactttggctactataccgagaacttttattttttgtacgtttttcttaactttttttgacgatttttgattttttggctattttaacgaattttttcatagtctttatgatatttttagtaatattaatgggttttttgtaatttttaacacttttcagattttttttggctatttttatgaattttatgatttattagcgatttctgattttttttttttggttttttaagaatttttacaaattttctatttttggcatttttttaccaatttatcgtgaatttttttttgatccttccgcaccaattattcataaatttggccactggtttaaacagcgaacagggttaatttgggtcggtgttaattggccacaacgtgcgatgcgactttgcncacaaagcgagatgcgactatttggagggaggtggggtgtcgccacaacatgcgatgcggttgcccacaacgcatgatgcgaaattggggaggggccacaacatgcgatgcggttgcccacaacgcatgatgcgaaattggggaggggccacaacatgcgatgcggttgcccacaacgcatgatgcgaaattggggtgttgccacaacatgcgatgcggttgcccacaacgcatgatgcgaaattcgggtgttgccacaacatgcgatgcggttgcccacaacgcatgatgcgaaattgggggggaggtggggtgttgccacaacatgcgatgcggttgcccacaacgcatgatgcgaaattggggtgttgccacaacatgcgatgcggttgcccacaacgcatgatgcgaaattggggaggaggtggggtgttgccacaacatgcgatgcggttgcccacaacgcatgatgcgaaattggggaggaggtgtggtgtcgccacaacatgtgatgtggttgcccacaacgcatgatgcgactattagggaggggatgaaaaattgatgcggtgggaaaatttaaaatataggctgaactaaactccattttaaataaatttattttaaccaatatttatttacattttttataattgtataacgagaataagatataatttggaatgcatgtttaaaaatattaaatttctttatcaaaacaaaaaatattgttaggaaatgtttcagtttacagaaaattaaacaaaaatttttttgggaataaacacattaaaaacttttatattttgaaatgatacaaatttaaaaaatttgcataactttacgcagaaggacagacgggatttggataagaaaaattaattaacgattaaaaatt

SEQ ID NO: 34959 - DNA, 847 bp, Heterodera glycines
tttttgcagcactgctcactccaattttgatcgatttggcacgctcagctataaattcgggcttcaaatctgaaaattaatcattttatcatggcatcaaaatttgttctcatccccgacgaaatctatcaaggtctaacaaacaatgattcgggaaatatcaatttggactttgctcaacgtactttggaaagaacaaaaagaaggagggaaaatgtgacggctaagaatgtacattataaccaggaattgtcccgttatctccatctgcgagatgaacaacaaaatcggccaactaaagttgaaattgcgaaagggttaaaagcgttgattaaaaggggagatgaaagtgatgaagaaccggtttttaatttgggatcagacagacagcaatcccacgcttcacaaattcgtaaaccacgtcgacaccatcacagctataatgaggatgaggaaatgccattacagcagccttctccaccgcttcgagctgaaaataggggacaaaagcggaaaccaaatgatttttattcctcgtgggaggaaggcgcaaagagacaactgcgtcaccaagatgaaccggttcctccctcctctaagatcgtgaatagacaaagaagaagtcaaccgccagtttcattgagaagagaagaacaacaaattccagttgacatcccgcaggaagaacccttccaaccagtcccacaaccgtctattcctatacatccacaagttaacagaaaacggaaagcccagcataccctaaatgatattcgggaagtgaaaaagagccttataggattggaagagctaagacctccttcgcttcacaggaggcatcccttcg

SEQ ID NO: 34960 - DNA, 960 bp, Heterodera glycines
ttggtttgagtaccccaaacggacacttgaaaaaatcgatttttttgttttcggggcagtccccccgaaccgatgcgcccagatttatggggagaccgaatccttccggaatagcttccctatagcctgtactttaattctgcgttggatttttgctccccataattgtttgagtaccccaaacggacacttgaaaaaatcgattttttttgttttcggggcagtccccccgaaccgatgcgcccagatttatggggagaccgaatccttcgggagtagcttccctatagcctgtactttaattctgcgttggatttttgctccccataattgtttgagtaccccaaacggacacttgaaaaaatcgattttttttgttttcggggcagtccccccgaaccgatgcgcccagatttatggggagaccgaatccttcgggagtagcttccctatagcctgtactttaattctgcgttggatttttgctccccataattgtttgagtaccccaaacggacacttgaaaaaatcgatttttttgttttcggggcagtccccccgaaccgatgcgcccagatttatggggagaccgaatccttccggaatagcttccctatagcctgtactttaattctgcgttggatttttgctccccataattgtttgagtaccccaaacggacacttgaaaaaatcgatttttttgttttcggggcagtccccccgaaccgatgcgcccagatttatggggagaccgaatccttcgggaatagcttccctatagcctgactttaattctgcgttggatttttgctccccataattgtttgagtaccccaaacggacacttgaaaaaatcgatttttttgtttttcgggcagtccccccgaaccgatgcgcccatatttatggggagaccgaatccttcgggagtagctccctatagcctggacttaaatct

SEQ ID NO: 34961 - DNA, 1008 bp, Heterodera glycines
tgagaaataaatccaaaaataataaatattcataaaaaacgattaaattaaatgaaattattaataaaactaaaaaaattattaaaatattattatagttaaagtaagtttaaaaaatatttggattagcaaattcttctttaatactcctttcaattggatattgttctgtaacttttaggagagtcattgtcaggaagttaacgaaaataaacttgtgcctcacctcataaatctgttttaccccaaccattggtcaaagcatgtgttggcattcctattgcgaagctgggcaatgtgttcatctcttttgccaaagctcgcttctgaccgaaaaagtataacataaactaacaaatttacagttcaattttttccctcatttcatgattttgccgaccgttgtttggcttacattgatcggaatgcggacaccttgttcaaatcagaggcatttttgcaaattgaccagaaattattgttcaaaattctgtgccgggatcagttggttgtaagccaagaaattgccatatggaatgccgtaaatttttgcattttgtaaaaatttaaaattttgcttttttgggtcgattcttaggggtctattttttgaaaaaaatttttaggtcgattcttaggggtgtatttttcgtttttattgcatttttattataattttggacaaaaggcaaaaataggttctttcaaaaaatttttaggcttttaggctctaaaaataaaaacctagaaaataggctctaataactcgaaaagtagcttaacaacatcccaaaaaaccatgtttttagtgcgtttcaggccacggggagctcaggaaaaaataggcttttgcctaaaaatcccagccctagtgaggaccgtgggaccaagctactttaagacaattaattgttgctgtctgattgtgagatcgaaaaacccttgggctttagagactttttttttgtatgaaaatggcggacgatttgatcaaatcggaaggaattt

SEQ ID NO: 34962 - DNA, 859 bp, Heterodera glycines
ttccctttttttgatgagccctcattttctctttttgttatttgaggaaagtcaatggcaacggacgaattgtcacactttttcgcttctctcttacgcactcagaatgtcggtttgccattctgattttgtcagaaatgttaatcgggcgtgttaacccaaaacatgcgggttttttgaaattatatttttctatttgtacgggcattcccttactatgttttttgactatcaccagcaggaaggccattttttacaaattcgttcaaaatttttgctcaacagctgatcgatgatcactgtctgtatgcgttcctcaacagacagtccccccacagaattgtctcctccttcttctgctgctgtccccggttttggttgttatcatttatcaatcactcattcattcattcgactcgcacccattggaacaattcactcaaaaaaattaaaggaagaaattattcaaaatgatatgaatggtttaacattcgtaggattttttatcagtgtataattgcacttgttaaattcgtttgatttccttatatttaatcgccattgattatttatgattttagctttttttcttcatgttttcggatgtttccgttcaaaaggttaaattattgtcccattgaagaggaggaaggagagaattcgcagtcaattcatggccggattgatggcacatgccaagttgggacggactgttgcgacacgcgagagtgtgcaggagttcatgcaacccaaagcggactcggcgtgtctttcaaatgcgagaaggacccggaaatgacccccccgccagaggaccggccccggtgggaccacgagggggacgtgtaccacgcaagca

SEQ ID NO: 34963 - DNA, 965 bp, Heterodera glycines
tccgcaggcgaccgtaaccccgattgagttgggtacagtcgtcaaagaatgtgtgcccaatgtgctcacgttcggacgtactgtgccgaacacggactgtgacctcgtatggttcggtccagccgtggatgtagagaaaacccggaaatccgacccgatttcttaaattttttaggcatcaaaatccaaacccaggtttttttttgctgtgatgctgtttttttctaaagtagagacaaaaaattgtcataattttctttaaattttccgttgaaattttacaatattttagacaaagtttcaaaaaaaattttatgtaacgaatttttttgaagcggaaatttctatttcaatatagcttctactgagaaatggacaattttttattgagctcaattcaaacatgtccattttgtatggttgccaccaccgtacgtccgagagcagcacacactgtacaaggtgctatgtcattacttaaaaaccatcataatgggcgttacttaaaaaaccatcataatgaaaatttttgcttataactttgctctaaaaagaccaaatttttaatccttgctatcattcgatagatctaaatgttctttatgagcctgtaaaatttcaaaaaattttattaagtttaaaaaaagttatggccaaaaatgttcgaaaatcaaggttttttgagttcctcgagctataacttttttgaaacttaacgaaattttttgaaattttgcagactgatagagaacacttagggctatcaaatgatatcaagaattaaaaatttggttgctttcgagcaaagttataaataatttttcgacaaaaattttcataatgatggttttttaagtaacgcccattatgatggtttttaagtaacgacccagcaccctgtacaatgaactgctgccgatcctggaaacagtcgctggcgaatgggtcatcgcgctgacaacgag

SEQ ID NO: 34964 - DNA, 707 bp, Heterodera glycines
caaaagataatttggccaagtgataaacaaaaatattattttcctctgaaaaagcaattcaaatttttaaaaaattaggtcactttttggcattttttgtgcctaaatttcggggttttatccccactaaaaccccggacacttataatttgaaaaactttgcccctattaggcctttttctttcttgggaggggaattcagtcaccctttgattgattgacccgtaaaactgaccgaaatttgcaaattttttggcggtgcacagattggcatcggtcgctccacaaaatgttgctgttcaccggtaatctccagcagtccaattcgatcacagcacacaaaaagtggcgccaattttcgacgctttgtccaaatgcgacggttggacaatgcggcgaatcgttgagaaacgaacgcaaattgtgaagcgagaaatgggcgactgagctgggacaacacgtccaaccaacaatcatccggcagccaaatgctgtgaaggaaattaaaaaaactgttttggcgttttatttccatttaaaatatattttcaaaatttttttaaattttattatgtgctttaaacattttctcgacaaactcacagtgatttaacggtgcacatggtttgagacttgaggtgaaagacggtttttggttttgttgttgtaccagtgaaacaaaatttaattgaataaaataaatgtgc

SEQ ID NO: 34965 - DNA, 958 bp, Heterodera glycines
  unsure (1)..(958): unsure at all n locations
atacaaatcgatcattttaagaaaatgatgatgttagattttgtatgcccaaaattttacaataattcattcctgagtatggtaacacattaatccgtgaaaccaattggtttcctaattacataaaaaatacgaaaaatattaaaaatctctcaaatttggaaatatgttcatctctatatacatataataatgatcaaaaaaaaacattctaattgagatcggattaacatttgatcaaaccaactcacttgtatgggaaatggtttgtcgtggcgatcagttggaacggttgtgccagatcagaactgcatgagagcagctgaacagcgccagaggaaagcatggtgagcagaaacacacgccctggccctctcattgggtggtcctcttcggtggcgataccgtacaccttaccgcactcttcatcgcctacagtagaccatggttggcagttgtacacgctacaaaaacatttttttattaaaaaactcgcacaatattcaaatctaaaataatttgaacattcattttcagacattgcatcatttgtcgcaaagattacggtaatgacccaacaaaattgttactgtacattttgtaaaaggacgaagtgctacggtaggcaaacacggtgtacgatgaagcaaacaacacagtggcacgtgatactagcaatgccatcgcgtgaaaatgtacagaatccaggaaatgggcagataacggtgttacagtagtgattggatcaaaactgcgcgttactgtaaacaccctttgccatgattggtacagtatgccggagctgttgtcaaatgcgagtgacacaatgccagcgtctgcgggtggtaatttgngtctnaagaatttatgtataatcatttaagtttaaaattaaaaataatgttggatctatatttagatataatttttaaaaatatttttgcttttttatttaatt

SEQ ID NO: 34966 - DNA, 1272 bp, Heterodera glycines
caaaatgataactcatacaaaggaccaaaaaatagtaaattaataattttaataaaaaaaacatatatggcttaaaaaaaccaaaattatttctgaattatgacctaaaactgtgaaaatatgacctaaaagtcccgaatttagagggtgaaattgatttggaaaaattccctttccaccgaaagggttctagaaaaaatgcggataaatcacaaaatccctaatatggatctgatctaccggaactggtcgaagttttcggatggttaaaaatcagtaacggtaaaagtcggaaaatcggggagcggtcagtcatcagatgcatttttaggttcaaccagtaattttgcatttttctttttttctttgttggtttcttcaaatcccatcccaatttgacctgaatgttgacagtgatttgttgcgaaattttgaatggaaattggagaataaaaaattgaataaaaattaataatgaaaatgttctcattttatttatttattggtaatcccaattttctcctctttttcgtttgaatgggaaaaccaaagcttattttctgctgctaatggtgagaaattaatttccaaattcagcaaatgaaataaatattttttaattattcagctgcaatttgtgataactattaaatgttttagtaaattaattcatttttactgaatttttcttaattgatgcaaaattcaaaatttaatcaaaaataattaaatgtgaaaaataataaataaaaacaattatggaaaatggtcacaaatggccaaaagaatgctttgttggcattagattttaggcacagaattacgacatgaaaaaggggtgccagggcattttcaaaatcctaccattgaaataagaaaatggaagaaaaaatcatggcataacccaagtcagccaaaaaaatgttttatcctatagtctttcttagtcaactaaaaaattcaacaaattcagttcatccgatagctctacgtatttagaacttatcccctacatttaagccccggacaaatgaaattggacatttgcgcccggaatttatgtgcccgacatttgctccgcattccttaagggctattttgggacatttgccgcttgatcattctaaatttatatatgttttgaagagaaattaattatagttagcatgcatcaagcattcaatatttcctacactatttatttaactattttttgttagcagaaatgagttaaaatttttaaaaattcataaaaaattaataaatcattgg

SEQ ID NO: 34967 - DNA, 1163 bp, Heterodera glycines
agaaacagcggtgcaagaagattggcaagcagttgctgaagaagagcagaagcaacaacagaagggggccatcggcgcatttgcgtcgcccgaggggacaaattgctgcagcagcaaaaacccattgatgcgagatgattttcgccaattgccttcctctaatggactcgtcgaggcactttccgcctcctcctcttcgtccgcttcctcctcctcttcgtccgcttcctcctcctcttccgcctgttgctgtgcggagaatcgtctctttctatgctcaccgcagcagcggggactgacttttccgtccccaattcgcccctccggcgaatgttcatcttcctcctcatcatccgcttcctcttccgcttcatcttcctcctcctcttcctttgctttgtcttccgtcaccccccgtcgtccttttttctttcacaaagtggcaaagacaattgtggcggaagatgaggacgaagttcaacagcaggggacggagaatatgtggaagacaaatccgatgataaagcgaaggacgagcaaaaacagtgccaagggaaagggaaacaaaggggaggaggaaaattgccaacggaggacggacccgaaaaaggcaattgaagctgcggacgccgtctcacggatgggttttctaaactgatcaaatggcgatcggacggaccgatcgataggaaaattcaatcgcaaattattttccttttttgccccctcctctcaaatttcttttctgtgtttttttgatatttctgtataaaaagactgttgttagtcaaataagtattattatttttcaaattttaaatgatttcttttttaataaaattttggcgctactgtaaaagtggccgtttttgaaacaaaagggggggggggcccttttgttttgcaaaatttttttaagataaaaaaccatgataattttttatccggggttttaaaggtcgctaatcacgaatctgacatgtattttgactaatttctaatccctaacccgaactcgaataaaaatcgaaattttgaatttttcaaattatgattttttgttcaaatttagattaggaaatcggaattgatcaaaataattgaaggattcgtgatcgggggcaccaaaaaccccagagaataaatttttatgactatcacaa

SEQ ID NO: 34968 - DNA, 702 bp, Heterodera glycines
tcgctgacccacaaaatgtccagcccacgaaatgtccaagtctcgaatttgagttttttattattcagatgggcctaaggttaggcaaggggtaatataaagggtatattcgtattcagcgaccccgaaaaccctaaaaatcctaaattagactcattttgtttttataaattttgaaaaattttggacatttcgtggcttggacactttgtgggggtgccatttcgaaacgggccagttgcgtctgaggcaagtttagaccaccattttttataagttgttcaatcgcttagcaatatcttatcaaaagcttcttcaaaaattatcatttaaaaatctaaatttctctctgaatcctaaaaataagactaaaataaggacaaagagcttaaataaggacaaatcttacaaataaggacaaagggtaaccctgctctaaatggctgactatggtattaaaaaaccggtacttgtgcggtttacatgatactttttacatagatttttaaatgcctataaatgtgtttttgaaattaatgaaaataagtttttagggtcgctgatcacgaatatagcacccatttttgtcaatttcaaacccctgatccgaactcgaacaaaaataaaattagaaaatttgtaaggatgatatcttggcatcttgcccatgagggtaacattggtacaggaagcctatcaatt

SEQ ID NO: 34969 - DNA, 754 bp, Heterodera glycines
  unsure (1)..(754): unsure at all n locations
ttttaaagaatatattaatatattttttaaattttttctttttaactccaattttcctcactaatttttcactcagacccccattctgaccagtgcttgtttttcccggttcccggttgccctaccgggaccgggacatgagcttttcaaaatccgggaccgggacctcggatgaccgggaattcccggcccggtcccgtggcactctacatgaaagtatcaaacataattgatgatactcctactgtgaaccgatctagggctccaacattttaaagaacaattggcagtgaatgcattttcaatttaatctaatcattagtgaacggattcttaagtttttgcttattttttctgagcatggacggtaaaaaacgaaaaaaattgccaaaaaataattggcgtaaaacaaaacgccaacacactcaaattgaaaaacaaattatattttcatctgatatttgttattaatgattaaataattcataaactaacagatagaatcaaaaaataacagatgaatcgatgcagaatttttttctctatcgctatgcaaaatttggtatgaatttaacaagcagaaaaaaagttaaacaggatgaagtaaatgttgttctttacattattaagaatgaagagatagtacgtaaaagtgagagaaataaagataaaaagtaaatgtgacagaacgccaattttttcccantaattatccataaaaagatttattgtcgcttttttttcttttttaccg

SEQ ID NO: 34970 - DNA, 983 bp, Heterodera glycines
tttttaaaattgactagagcaatcgaacgctaacggacgatctaatggaaaaaaatccccgaaggagagaatttaattaaatccattccttcgggggaccgtgccgggtgccgcggggtaagcagtgctggttcgtttcatcacggcaccgaaccttttggctagtcagcaatcgttgcttaacttgccagatcggacgggtgcgcatgattccactgttccaagcaccccaccaaaagcaaaacgatataaccaaaatataaggaaaaattttttaaaaaattttttctccatcttcctttttgatactaaagcatcagagtgctaaaattaagttgtaaataaaatttggtgcgctttagagcactttctgaaaaaaatatttatgaaacaaaaaaatcgattttttcaagtgtccgtttggggtactcaaacatttatggggagcaaaaatccaacgcagaattaaagtacaggctatagggaagctattccggaaggattcggtctccccataaatctgggcgcatcggttcggggggactgccccgaaaacaaaaaaatcgattttttcaagtgtccgtttggggtactcaaacaattatggggagcaaaaatccaacgcagaattaaagtacaggctatagggaagctattcccgaaggattcggtctccccataaatctgggcgcatcggttcggggggactgccccgaaaacaaaaaaatcgattttttcaagtgtccgtttggggtactcaaacatttatggggagcaaaaatccaacgcagaattaaagtacagactatagggaagctattcccgaaggattcggtctccccataaatctgggcgcatcggttcggggggactgccccgaaaacaaaaaaatcgattttttcaagtgtccgtttggggtactcaaacatttatggggagcaaaaatgcaacgcagaattaaagtacagactatagggaagcta

SEQ ID NO: 34971 - DNA, 1427 bp, Heterodera glycines
gctggggggcctaaaatatggggccacattggagaattaattctgatttctgaaaaagtcccagaaataactatttattctttccataccttcttgtagagctcgagctgctctttccaatggtcttatcccggtctcgatccgtgccgaactcacaaagttatggagtgaaatgtgaaatattgttttcaccacaaggcattttttctgaaaaccggattcaaaaatctggggtttggtataaccgttttagaaatagcgtagaaaacagcttcgatatcaagaaaccaagtcaagtccagaaaggaatattttaaaacgatttcgttttgttttggcattatgataccgaataactttcggaaattatggaaacaaaatagtagataatattcccaatcaaattatcgattgattttcgatcgataatttgagtgtgtctactttttttctctgacatccccttccacaaacccaaacctattggatggtctcctcgagagagagagagagagagagagtacattgaccccccccccccatacctattggatgatctttgatcccttcaacccaaacctattggatggacttgtgcgcgagaatttaattaatttaaattttaattaattaatttaaatgagcgagagctgcgcgactatttccgaaaaattgtgaaaaatcaaaaacatggtagtggactcgaaccgttgagagtggaagcgaggagcttaaccacttggccacaggggcagttgaaaggtatgggataattgttgactttatgatgaaaattccgaaaaatcgtgaaaaatcaaaaacatggtagtggactcgaaccgttgagagtggaagcgaggagcttaaccacttggccacagggtgagttgaaaggaactggataattgttgactaaatggtgaaaaattttcccctttgcttcaccacaagcgctgcggaggcgggcgtgtggcggtgagagagtgatggtggacgcctctgtttcgatttttcaattaattgattatatgcgcagccctttaccgttgattaaggatatttaagctccttaacattgcctttttctctttttctcattttttcaattttgttaaattttcatcagcaacaaacatcctcattttataataaatattaattccttaattatattcgtttttatatattaattttctaatatgaaaaagaatattttcaaatgaaaaaatgcattttaaaattactttaagttaaatgtattaaatcactttattacgctactttatattcatttttatttaattcagattttagacctaatcctgatcatttttgaagagttcgaacaatgttcgacttttcgaccttttgttcgaactcgttattttcattacccagggctcccagtcactgtacaaacatttaaa

SEQ ID NO: 34972 - DNA, 958 bp, Heterodera glycines
  unsure (1)..(958): unsure at all n locations
gggtttttagggcatttttgggggatttttagtgcatattttatgcgcatatttggcattttttttagtgcatacaacttataaccctagtaattagttctaattaaatataaaaattatcaatagtaaatttttttttgaagaattatgtactgaaatgaccgcgctaaatcaattttgaagcctttcaacgcatcaaggaactcgggcaacctgggaaacgagttctgcactcagtccaaatttatttacctgccgtttgtcactgtttggccacaacaaagttgggagagccaaagtgcggtaaaacgggagagaaaggggagaggagaggggagggggaattgaaccgacaattcacacaaactaaacaaaggcactaaccactgagccaggaagtacactctcagaaaatgcccaaactcaataaaaaataagcatgcaaaaagtttttttgatttttgaaaattaaatttggcaatttatgtggggaatttagggtcgagtggtgccggggtttttagggcatttttgggggatttttagtgcatattttatgcgcatatttggcattttttttagtgcatacaacttataaccctagtaattagttctaattaaatataaaaattatcaatagtaaatttttttttgaagaattatgtactgaaatgaccgcgctaaatcaattttgaagcctttcaacgcatcaaggaactcgggcaacctgggaaacgagttctgcactcagtccaaatttatttnacctgccgntttgtcactgtnttggccacaacaanagttgngagagccaaaatgcactgcgtnaacggaagagaaacgattttcagggtatgggctctattgcggtgtacacgaccataaaataacaaagacaatttaacacttcataaagcactttcagaagacccaattaaatattcttgatattcttaat

SEQ ID NO: 34973 - DNA, 750 bp, Heterodera glycines
ccccccgccccgcgccccccgaaaaggtcggtcggattggccgcatttatgcatgcttcttctgccctccggcgggtccctccgccggagtccgtccaatgtctcctcaccggtctcccccgccgcccaacccttctaaatccgacaactgactgactcattccgaatggggaaaatggatttttacggccgacatggggggaggaggatgaatgaaaaaggaagaggaagaagaagcatgtattattgccttcctcccccgctcctctgcccaatcaagccggggacaggactggatccccccgggcgataacgatgaatgaattgctgcgtggccttcattctctctgcccccttaaggatggctttagtgatcggacaggcactgatcgaggaggggttttgttgtttccgattgtttttgcttttgtattggctttttctttttttgtacaagcatctgtcaacatcaacattgagagggcggggcggggggcatctgtcaacaacatggaaatgctggggggcaagtgccgggggaggggtagagtgagtgagagagtgaggaagactgacctgtccccgaagacgattacaagtcttccgatctatggtttttagaactaaaaagtaatcgtccgggtggaattcgaacccatgacccttcaaaaactctaaccaaataagtgagttcttttagacgctctcccatgccctttatctctattccactttttgggcccattaact

SEQ ID NO: 34974 - DNA, 861 bp, Heterodera glycines
ccccgacccatagttcctccccgcttacatttgtcccactctccgccgactctggtccccgctttcgattaccaaacgcaaatattcccctcgtaaatggaagaatgaatgaatggatgaataatatgcaatttctcaactttcaattttatttcctgattttatctgcctgtgtcgctcaccccgtttctcgccgctctgctgcctctgatcgaagcataatctttctgtgcccccgccgctttcacattttgcatgtaatccgcgcactcatctccaacacacacactctgtcatataaaccctccgtctccgtgcccccgcccctgccgccgctttgcttttggttgggtgggcacatttgtacgacgtcaccgccgccgccccccccccgcgaccgtcccctatgactcgcgtggaacacgataaaagttgaggcggaacaaccggttcacccaccgctcccccccccccccgctcgtcccattaatgggctccgcgcggatcggcgcgtcggggacctttacgccccaagcgcttcacttataattggttattggtcaaaccctccaccgcgcttggtgaagtatttaaatattctgaccagctttttctaggcctttgtttgatcactaatatattcactatattagaagctcatccgggtcttataataaacaccaattaattgacaacagaattccattttttgatgttaatttcagaaaaggaacttcacaatgtgattccttctcgtaaagatacactcaagcgaatatattacatttgctaagaatatatttgtgatttccaaacagtgcatacttggagaatatttttatatgtatgattgtagtgtaa

SEQ ID NO: 34975 - DNA, 954 bp, Heterodera glycines
aatatttgagtttaaaattcagttcatcaaaagacggcaatttaaaggacattaaagagccgacagcagcaccttctcacaaaacaaaggcaaagacaacggtcaatttcgaaatggaaagttcgactgaggaaaaaatttcacccaaatttcttcaatttataccaaaatcgccaattattggtgggtgatcttacacaaaataatttaatacattaatagagcatttttttcattaaaaaagataaataaatattaaagtttaatgataatttggtcaatttaaattaaatcttcgcttttgaaaattattttaatttttgacggacttttatcttctaaaagtcgttatccattgtaataaataatccgtatttgcgtagttgaacagccaccttcatacgctactgtaacacagtatcagcgccagcaacagcaacaacagcagcccaattataataactaccaatcgtatcctgtccaaccacctcaacactgttatggatgttacgatggtgctggacggtacggaggaaacggtaataaactctcaattatcattactattttttataggagggtataatggaaatggaggatataatagtaatagtggacaaggtcagctaaacagtaaaaattaacagtgttcggtggaaatggaggatactattatggacaaggtcatcttctaattgccaacataaataacaagtactttaggaggatacggcgtggggtacggtgggaacggaggatacggtaactaacaaaaccacataataaattttaatagtgcttttgtactatatcagttccctaaaaacatgaatatttaaaaaacaagattatattttaaaagataagtatcacttaagcaatgatgcctatgtcatccccatcatacatgggaggatatggtggcaacttgttcaattttggcaccggatgggg

SEQ ID NO: 34976 - DNA, 1254 bp, Heterodera glycines
  unsure (1)..(1254): unsure at all n locations
ccaccaccaccaccacaacgcgacgagttaataataattaataaaaaaattaaattttgtggcatttggtcccatgcccccttaaactctcaaactgattaaaaaaactcagatgctaagccccgaggaatgggaggtgcgcatgcgcggcggcattctcagcaaagcgttgcgccgctacgccgccgacggacacttaaaaggcgacgatgtgccaaagtgaggaggagacttttaaaaattgaaaatttgattttttaatatatttgtggcgattcgaatcggattttctttaatggcaaagtttttccttgccgatttcttgagtcaataaaggagtttcctttatgactagtgaatgatcatatgggttttgccaatgttttatgaactgaatgcaaagtcaaaattcaaaatttgataatttcgttacaaatttttggcgaaaagttgtttgttgattttgacaaaaatttgagaaaatttatcatttttttgtagaatgagtggagataattttgaatctgctgaatttaagtatttttaaagaaaaaaatcagtttgaagattttttaaagttttcatttatttttcactttttttttttggcatttttgagggtttttagcacaaataaaccccaactaaaatcgggcacaaaatatttttcctgctgttaaattgggcatcgcgatatataatttgaaacttttgaatttgaaatttgtctccaattgattctaatgaatacagtaagcgtcgtgtaagcgttgtggacagttcggacgacgactatcgctacggtattttgggcaagtcgctgcgccaattcaacgatggcgggaaactgtatttgcatgacaaccatcgacggaatgacacggaaacgagcagcagcagcgctgaagggacgatgacagtgcaaaatgcaattggcagaaagggtacggtagcaataggaaatgaatactgtaatttgttttaagtacggtaataacacagaagaatactgtaatttgttgccaatgtgctgttaagcttttgaaatctataggaaagcatttaaaatttattgaacaagctacggtgttattataaaatcatcattttatttttagaaaatcctactgtaatattatattcaaatactaaattatattttaaaaatcgaaactttagttttaaaacaaaaaataatataattttttcttatttttcgaaaaaganttattattttttgatttgttttgatca

SEQ ID NO: 34977 - DNA, 1024 bp, Heterodera glycines
ccccgcttttcgttactccctccccccgcgcccccgcccccttcatttccagacaattcgcagcaaaagtttgttttttaaaaacgccaatttaaaataataatttattaaaactttataattattattgctttgtatagaagtaaaattttttttaaatgaaagatttctattaaatctcaaatagcttagaaatgtaaagtttttgaataatttttacaataaatcattttttggaatattattcgaactaatattttcgaaaaaattttgaccaattccctaaaagaataaaattcactgatgcattgtcttccccccccccttcgtttgtctcttttctccccttttcaattaagcctttgtctccgcctttgtccttcaatttgtttttgaaactcttcgtggaatggagctgaaagaatttaatttaagtgatgagaatatgaaacggcggagagaaaggccgagttaaattgggagtgagtggtgacaattcggaagggagacgaagcggacacggacaattggccgacttaacggccaattgggcgactgaccgatgagacaaatcgtcttaaaatagaaagacacacaaaaaacagaatgacaatcatcatcttcttccggcggatgagcatcattttccgatggaattcagtggagaggaagcggagacgaagccgaagtgaaatgggcggaagatgaaacgggcggaaggggcggacgaagcgaagggaccgatgacgggtgggaggcggaagagcagtccacaaccgcatatttgtgctggaagatgggaaattgaattcagactcagcgttaaatttggtgagacattttgtcggtagaaaacggaaaaatgccgagattgtgggaaagaaaagaggggacggcatgggatgagaggggatggggatgcaaattgggaaaatggcccggacgagaggaatgggaggaataggggataggagaggcaagagggagcggaagggagggagggagagagagagagggaggagag

SEQ ID NO: 34978 - DNA, 991 bp, Heterodera glycines
aatattttacgtgtcaaagggtgtgcatttaagcgactcgctgtgcttgcccactgcatttcaaatagctggtaatttttatttctccggcctaatccagaaaaaatcactatctctttttttggaatattttacgtgtcaaagggtgtgcatttaagcgactcgctgtgcttgcccactgcatttcaaatagctggtaatttttatttctccggcctaatccagaaaaaatcactatctctttttttggaatattttacgtgtcaaagggtgtgcatttaagcgactcgctgtgcttgcccactgcatttcaaatagctggtaatttttatttctccggcctaatccagaaaaaatcactatctctttttttggaatattttacgtgtcaaagggtgtgcatttaagcgactcgctgtgcttgcccactgcatttcaaatagctggtaatttttatttctccggcctaatccagaaaaaatcactatctctttttttggaatattttacgtgtcaaagggtgtgcatttaagcgactcgctgtgcttgcccactgcatttcaaatagctggtaatttttatttctccggcctaatccagaaaaaatcactatctctttttttggaatattttacgtgtcaaagggtgtgcatttaagcgactcgctgtgcttgcccactgcatttcaaatagctggtaatttttatttctccggcctaatccagaaaaaatcactatctctttttttggaatattttacgtgtcaaagggtgtgcatttaagcgactcgctgtgcttgcccactgcatttcaaatagctggtaatttttatttctccggcctaatccagaaaaaatcactatctctttttttggaatattttacgtgtcaagggtgtgcatttaagcgactcgctgtgcttgccactgcatttcaatagctggtaattttatttgtccggctaatcagaaaaatcactatctcttttttt

SEQ ID NO: 34979 - DNA, 163 bp, Heterodera glycines
aaagaaaaagagagggaggagagagaaagaaagagagtgagaaaagaaagggagaggagagagagagagagaataagaatgggagaagaaaatggaaggcgcgatggaaagaagttgtttttacattttttttaataccattttaaaaatttaaaatagagcg

SEQ ID NO: 34980 - DNA, 905 bp, Heterodera glycines
  unsure (1)..(905): unsure at all n locations
attcactgaagagttatttcatttaaaatattaaatgcttgaatgatgattacgaaatcaacatgtactatttctgtaatatattttactcggagtctatgcaatcatttggttcgtctgtgttacatattgaaaacatgttttgaattttgaaattaattataacatatattctaagagaatttttaggaataagctatatttttttctcttttcattatttaaatattattttaattattccgttttatcattttcgttaaataacccactttcaaatttctctgtttaaaaccacgaccccacatcgtcaatcaattcttaacatttttatgaaagtttatatattaatctaattgcttatttgttttttatgcaatacttatggccattaaaaaaacaatttatgtaactttaattttaaataatattatacagattatttgttttaaaatattttttttcttactagacaacatttttctattaaatacaattttcaatttggtataaatttattatcattttttaattaaatttatattaatataaactatgtttattttttaattaactatatacaataaatgtgatttgagagtttaggaaaattcaagctcacttatgtggtttcatgaccaaaatgcttcatcctatttttactattaaacttttaagaaaatttgccttaatggtctcgaatgtctattttccgtgatgaagttatattcatagggcgttggaaaaatacatgttgctctctattttgagctattatgtagataaatttgctttcgctatttgaaaaaaatggtttcgaaattccgaanattgcaccanaaattcaagtacgatataaatagaaaacggaccttgaaggcaantttaggaagtgtcgtgccttc

SEQ ID NO: 34981 - DNA, 1815 bp, Heterodera glycines
  unsure (1)..(1815): unsure at all n locations
attaagcaaaataagactttggatataatcgcttcaaaaantatcattanaatctaaatttctctctgaatccaaaaaataagactanaataaggacaaagagcttaaataaggacaaatctacaaaataagaacattnaaaatntgtaagattgacccntaaaaataaggacaaatcttacaaataaggaaggacaaatggtaaccctggtctaaaatggatcaaattttataatcttagtattttcgatagctctaagtgttttctattatcctgcaaaatttctaaaaaattctttaagtttaaaaaaagttatgacctgagaagctcaaaaaaccatgtttttttgaacattttcagtcataactttcttgaaacttaacgaaactttttgaaattttgtaggctaatagaaaacacttagtgctatttaatgatatcaagaattaaaaatttagatgctcttgaacaaagttatatcaaaaaatattttcatttgatggttttttgactaacgtcatagcacccattgcatccctagtaatgaattctctaatatgcaaccacgcgaaaacggtcctcacgcaaaaaaggccacgcgaaaacgaccccgaccgaggtatttgttaggacgataattcgtagattaattcttaactaaataataaaattctctatttttttctttctttctctctctctctctctcttcactcccccctctctctccctctctctccctctctctctctctctttctttttctatctctctctcagttggtcttactgcactaaaatggtcaaaaaattatcgattggtttattcattttttttttgttccaatctcttcaatattaatccgccggattaccttcgtccttttttgctgcgtcatttaacttctcttttctgttaatttaccatcagcggaagacaaatacattttattttgcagaattacgatttcgaattttttgttagagttgccaaatatttttttcctttttgatagagtccgttaaaaaaaatttccgggagcgtgatcgggaatcccgttaaaatcccgctgaaattttacgggagtcccgggcgggagcgagagttaattaaagactaacaaaaatatttttaatgcacaaatttgaaggacaatcctttattaaagaaaaaatagacagaaaaatttagtaagcagaaatttgaaattaaaaaatcatatttttgtgtcaaaaatcagaaatttttcaaatttcttcaaataaaattttttaataatttatttgttgactcccttcaatagagccaaaaaataatcaaaccaatataatttttaccaacaaacggtaaaaaataaaccggatttaagatttaccaaatttctaattcgcataaaataatgccgcgaaattcacatgcaattggcatcgatcttggcacgagcgcttctcgtgtcggcgtttttcgaaatggatacttcgcgtcgatccacaatgaccgaggtgataaaaagaacattttggccatttttgagtaaaacaaaggcagtgccgaatatgttttaatttctttatattttcaaaatttctttcaataaatttctttttttttcgtttcgagggttgggagatggcctacccaatttcctaatctttttttcattacgggaggttcaggagtttctcccattcccctgaagggcctaaccaaattttttcattttgtaaattgaggaaagcgtatgacgccatcttacgttgcgttcactgacagcggacctttggtcggagaagcggcaaaagcacaggcaaaaa

SEQ ID NO: 34982 - DNA, 1065 bp, Heterodera glycines
  unsure (1)..(1065): unsure at all n locations
atttcctttcagtttgggttcacacacaccaaaaccggcttaatgtttttcctttgtgacggctcttactgtttgaccgccactctgtggggcgttctgttggaccgatggaattgcaacaattttctgatgtttttcggctcatccgccaccattgtttcattggttctgtttggagttgttgaaaagtatgtttttccatttcctcttaatcaaaattactccaattttcacttcccattttcactgattaggcgtctcgaatggatttgcatttccttggccattcttggcattgcctccggcgccctttacatcccctcgtttcagcagtgtttggacgttgtcaagtcatttgtctcatttaaaatgttgttcttccgaaactaaactcttttcaggaagaggggttacgacgattcatttcaaacgtacggatgcgtttccggacttattcaatcctcctacgcattggggtgactaaataaatttctggtttcattatacctctgacaatgtgtttttcctttgtttagtggttttatgggtccgactgtcctcggcggttggggctgtcaaaagtttggcctacgttcgatcgtgttatccatcgtggtcatcaatctcatttttgtcagtttttttgaaaatcaatttgcgcaatcattcaattctttttttcagatttttgcgcttctctcttttctcactgcaaaacgttgttgtactgctacaacatattttgtagacgaggctcacatcatcaaagaaagcagcagaacttcacttgaaacactttgagcattcattccttttttctctttattaattgctattgtctttgatttaattgttaataaaaacggtaattatggcaccgaaaagaatgttatttcggttcgcctaattctgtacccctcatccaaagcggtacaccccaaaacgtcgtcataccaaaaattctgaaaaatttactannatttaagtttttgaaagaaaatttccggaaaatacttggaatttggtccccccccccccctaaaaaaaatttcaaaaaaatttttt

SEQ ID NO: 34983 - DNA, 984 bp, Heterodera glycines
tttcgaatcttaattttttctcgtcaaaattgacattctttggagcgaactttgatcaaacaccgatcattgatacggtgatgtacagatgccagactgcgccgggcgccacctttcagacttcttttgtcgggaagtccagttcggtcaacggtggtcacagtaactgtgaacggctcgccccagagggtcacattttgctgctgtttgctttgcgccactttattgaattgattaaggatggtgtccaccgtgttgttagtgatttgacgaatgggggtgggtatgtcaccgccggtcaacagagggctgctgatcaaacatccaatatgggttggtttgattccacgctcttgactatccgtaatggcctcatcaatgcagaattgaaaaatgcctgcaagcagcccttctggattcgttgggacgtcctcgatgctgaacttagatttggccttgacgtattggaaccgtggcacatgctccacactgttttccaactttttgacgaaatcctttgcagatttagccgatgacgttccagctcccgcttgaacaccatgacgtggcttttttgcaggaatggacagaatataatcaatggaaaattttgaggggcactgaaggttgcgattttccatttttaaatctaataaaaatccataaatattttttaaatattattttaatgataaatatgcagcgaaaaggagtatttatatgagcaatactcatcaaaaacacaattggtcatgaaaaatatatgagaaaaatgcacaattatttgaataattgattttttaaaaaaagacaatgtcaacccatcttggcctgatgagcagcgcactgccacccatgaagcacaagacgacagggcacctaaacggctcaggaaattagatatgtctaaagcatgacctcaaggtctaaaagacaaataagaaaattgtgctgccaggataaacggagctctgtatgtcgaac

SEQ ID NO: 34984 - DNA, 862 bp, Heterodera glycines
ttggcttttcaggttttgacattttaccgtttcaatattagttcaatgggtctattaaaaaattggcatgatattattttttatccaatgaggattatattatccaaatgctttcagcccggagacacagtccgcttcaagcgacaaaaagtaaacaagcatgatgatgcatttgtcaaattggaatttgattcgttttttgcttcctttttggttcatttttatgttctaacctgtttattgtttttatgttttccttggtttatgggtttatttttctgtttacaatggtggtacaaatgtacaatcactttgcattgcattgaacgctttcagcctggggacgctgtccgtttcctgcaacaaaaagatggtcgaggtcctcagattgtgcacgacctggtcaaagaaaaggactacaaactggaggtggtccgtgagaagacaaagaacggcacaatcgcatggaaagtcaaagtgaacatggtgtttgcaccagaaacaaatgaacggctgcgaaaaatgaaggaaattgatgaggtttgttacaaggtttctaaaatgagggattttttgcgattgaaccccaaattacggagatcaattcattgaatattttgaaaatgggtcacattccgagggcgtattcagccatatttttgaaaaatgtccccaaaatggcaaaaaatagtcatttaagcgaaaaacagctataaatccggccaaaacacccgcccccccccccctctcccgaagccaagggtttaatccaactaaatttattgcatttataatttgttgtttttagaaggtacaaggattggcttttacggacaattttaatgaagtgctctgctttctt

SEQ ID NO: 34985 - DNA, 831 bp, Heterodera glycines
cctccctctctctctgtgtctctctcatgcctctctcccttatccctctctcttcccccccctcctctctcaccatccctctctcttccccccacaccctctctctctctctctcctctctttctttccaccctctctctcgcttctctctaccccccccctccgccctttctctctctcacctccctctctctctgtgtctctctcatgcctctctctcaccatccctctctcttccccccacaccctcctctctctctctcctctctttctttccaccctctctctcgcctctctctacccccccccccctccgacgtttctctctctcaactccgtgcatctttgagatttactcatggcatatgcatcaccatacgtctctcttcgccgttcatcaatgtaaatgatgcacgcttgtggatgaaattgatagtgttgatcgacggaagtaattatataggatcatgaaggaaaaagctgcaaaaacctcttgtaagataatatttggtaaaaatggaatattttttaaatttttatttgaagacaccaaaatgtagatcaaaagatgcctattattcatttataactgtctgagcatgggaatgcacaaagtaacataaattaaaattgaagaattcgagactgtaggcgattgaaaaaaataggtgagagagtttatcagctatttgacatattgcctttttgcagtaaagatcatcattttacaggtagtagataaaatagaaaaatgctagtgaaattatccataatgaaaatgctgttttcattaaaagaaagatagaattttcctcattattctttaatgag

SEQ ID NO: 34986 - DNA, 906 bp, Heterodera glycines
cggcacccggcacggtcccccgaaggaatggatttaattaaattctctccttcggggatttttttccattaggtcgtccgttagcgttcgattgctctagtcaatttttcaaaatttttgttgaaatatttgtcgtgctctgaagggcgggggggaaggcccaccacgaggccgcgaagcggccgagtgagtaccttcggtgcaggaaaattattaaggaagagagttcattatttatttgttttttgcataattaattcataaatatttttttcagaaagggctctgaaacgcaccaaattttatttacatgttagtttaggcactctgatgctttttctatcaaaaagggagatgaataaaatttttaaaaatttttaattcctttttaaacaggccaaaaagtttaggcttaactttttagtgaaaattcaatcactcatttttcgagtagtgatcagaagcgcaccagattttgcaggggcctaaaaaggtcaaggaaaggcgtctctgcgttgatttagcagtagtacctatgaatttaaattttctatgaatttttaaagttttttgaaatttttttaagtgcaaaagtggtggtgtctgcaaaaaattttcaccgggtttaaaaaatctaggaaaattagtaagcatttgtagtgttccgatacgtatccctgcaaaatttggtgagcccctgatcaattacaaattatttatggacgatcaaatttttagaaatttttatttatttttgcataattaattcataaatatttttttcagaaaatgctctgaaacgcaccaaattttatttacatgctagtttaggcactctgatgctttttctatcaaaaagggagatgaataaatttttaaaaaatttttaatttcctttttaaacag

SEQ ID NO: 34987 - DNA, 757 bp, Heterodera glycines
ttaataaataattttaaaaatgataaattaaaaaactacgctaaattaatttacgtcattagcaagctaaaaaaaatatacagaaaaaatcaaattatttattttagtaattaatttcattcataatttaaaaacaattgaaattaaaaataataataataaaatttcaccttcaattcctgcaaaaatgatttgataaatcccgtaagtgtccttgcatgaagtcccttcaaaacagtagctgaccgtaatttttcaaaatcatcgaacattgccaaaattgtcggatcagacctaaaagatcaagtatcaaccttaatatcctcaaatactggaattgtacttaaatttaagaagataaaaaaaatgtgtcggcatgataattttgaaatattagcaaaatttttttttgaaaattaacccattttcttaaaaaaaaaacattttttaaggggcgatgctaagcagttttgcagtcctggagaagtctctaatttaggaattttgcgctacaaaatttgcagtacaaaaatttaaggacataaaataaggacaatttgcccaccaagcaggcttctcatgctcatacacagcaatgccatttttctcatcagattcaatcgcgtaaacacaacggatcagctgggccggtactttgggatttgttgccggacaaaaatccgcaagacgaaatttttgtgctggaaattgtaattaatttaaaaaattggaggagggggggggggggggggggggg

SEQ ID NO: 34988 - DNA, 926 bp, Heterodera glycines
  unsure (1)..(926): unsure at all n locations
cgcgatgtttggatgggtgagattaaatttaaaatttttttntaatttttgtatatttgcttcgctttatccatgcacagaagccaatccattggcgcatgcattcagggaagatgtggcaccggttacacatgcacaaccggcaatatttgttgcccgtctcaattgaaccgtaaattttgtgaaatatttactgtatcacaatataaattttaattttaaccggccagaatcattaaaactaattacaaattacactaaattttgccttgggccatttcaagtttttgagaaaaattcaatttcaatttttgcgccttcgaattatttaatttaattaaaaaaaattacctatcaattaaaaattttaaagtttgccctcctggccaaacatcggttggccaagcagtgaacggccgatgtcccgccggctacacaaatttcaatggccaatgctgtggtccgcagagtgcgcaaagtcaagtgtcctgttccgtcgaagattcttttggttggaagaaatttttgaaaatttcaaatttcataaaaatttaaattttatgaaaaatataggacgttgtgatagcaatcaacaatgtgccgagccgggctatgcttgtgatgttgccaacaattggtgctgtcctcaagtgatcggcgacgcgattggcccatgcattcagggcgaagggggcaatcggttgtgccctgagggtaataatgtgtatcacttttaatgagagccagtttctattgaaaagagtcgaaacttgaccccgagaccgggtctcgaccacgagacctagacgtacccgactataagaaactataagaattgaaaccaggatcgcaagaactcgagacttttctcgagtcagactcaagactgagactttttgttcaatgaattttttcttgtatattaa

SEQ ID NO: 34989 - DNA, 684 bp, Heterodera glycines
tgcatattattctctttgttaaatttttaaaatattccattgaacctccccctaatggtctctcatttccctccctccaattgtctctctctcttcatttactccccccccccccactctctaatgggcctttctcccccattattctctccgtccgtcgcttacctttccattcggcccccgggcgatctccaaaattctcgcggaaagaaaataatcggcggaggatggtaatgaccacccgacaattcattcaccatttaaatggaggagttttggactattttatttagggatgaccaaaaggttaattgtcatggcattttgtgaggggggggggggatcattgacaaagggagggaaaaggaattaattttggtaggaaaaaagagtgaaagagaaggaagaaaagctggacaaaagtgcggaaattggaaaatactgaccaaaaagttagaacggagcagctgtccgatcgaatttattcattccgaacacttttcccattcgaacaattgaaaagtgagcgaaaggaacggacgaaacgaacactcatccgcccctttcttccctccccccgcgccacccatccgccgatcgcatcacagggaaatgacccacaaaaatatatttgttggattccgaacttcactttgacattttgcgcataaatttccaagagaa

SEQ ID NO: 34990 - DNA, 941 bp, Heterodera glycines
ctcccttctccccaggggtatttttttgtagaatttttttttcccccatatacttttcataccccattttcgccccgtgaatgttattttattgaattctgatccgttttgagtagattagactagaaaaaattaaaaattttgaaatcatgtttccctctcccttctcccaggggtattattttgtaaagtcttttttccgcaataaacttgtcaatccccatttttcgcaccgtgaatgttatttttattgaattctgagccgttttgagtagattagactagaaaaaattgaaaattttgaaatcatgtttcccactcccttctcccaggggtattattttgtaaaaagtctttttttccccaataaacttttcataccccatttttcgcaccgtgaatgttatttttattgaattctgaaccgttttgagtagattagactagaaaaaattgaaaattttgaaatcatgtttcccactcccttctcccaggggtattattttgtaaaagtctttttttccccaataaacttttcaaaccccatttttcgcaccgtgaatgttatttttattgaattctgaaccgttttgagtagattagactagaaaaaattgaaaattttgaaatcatgtttcccactcccttctcccaggggtattattttgtaaaagtctttttttcaaaataaacttttcaaaccccatttttcgcaccgtgaatgttatttttattgaattctgaaccggtttgagtagattagactagaaaaaattgaaaatttcgaaatcatgtttcccactcccttctcccaggggtattattttgtaaaagtctttttttccccaataaacttgtcaaaccccatttttcgcaccgtgaatgttatttttattgaatagagaaccgttttgagtagattagactaaaaaaatatgagt

SEQ ID NO: 34991 - DNA, 693 bp, Heterodera glycines
ataatattttaaaaaaagctgaatattaggagggggaatcttttgcaaaactaactcacattgtttgttagaagtagtgaacattttttcgacaagatctgttaacaaataccatttaaattacaaaaaataaagaatcgcaaaaatttggctgtttttagtgtaaatatgttaacaaattgcactgaattttcaaaaaatttccggcggcgcctaccggcaccaccggaccccccccccacaaaaaaatttgtttttttttgaaaaaagcgcaccgcaaaaaaaagcggtattaaaccgcaaaaaaaaggtcgtcaatttcatggctggaccatttcgcaaaattggccgctgcccccccctcccccccacttccttccagaccatttcgcacaaattttggttgatggcaatttttaatcactgtaacaatggacttaaaattaacctcaaattttattgccatttctcagcatttggcgttcgttccgcttcgtctccgccaattcccaaattgtcaccgccacgtaacgtggcggacgctcagcttttggatttgttgggcagtgttcaaccaatgcgcgacgccaatcgccctgccgcgcccccgccgaagaaaaattcgtggtgtaaagtgagacggagtaaaaagcggcagagagtggggggggggggcaaattaggaaaaaataa

SEQ ID NO: 34992 - DNA, 510 bp, Heterodera glycines
attacaaggccatgtcccacggggcaatgctttcgctgagtatcgtcactttcgttgaattgggcccattcgtaagggcactgaccaaaagggcgaaccgttacaattccgctcgcattttgcacattctgaccagcaaacccgtgattttggccgagccaaagcttttcgagcagtacaactcggctttttctgaaagaaaccgttttgggttcaacgcgagtcagttgctcaattacctttattatcggctgcttttggaataccgaaatttcatcccggtcagttcagtactgagtgataacttacaattagaaaccaatttgatcattttccgaacattcagggccaaaatggcggagatggaatgaaaaatgatggacaacaacagaaccaaatgcatgaacattctgatgaattgaaaggattcaaagcgacagaaatgatcagaccgattgagggggaggaaaagcgggggacggggagaacggacggggaggagggggaggg

SEQ ID NO: 34993 - DNA, 992 bp, Heterodera glycines
  unsure (1)..(992): unsure at all n locations
aaaataaaattcagcaaaattttattcgaaactctcagcaaacatttccaaaatgtgaactatgacgaaaagcgtcaattgctttcgtttcccctgtcaacgggcgaactcattatcacgcgattcagtgaactaattaggcaaaaacggttggtggttatatgcacaataataaacattaaaaataaacgggttttatattttgttcaagagtatttggcaaaatgtctggttctataaaatgggtcttcggactcaaattttgttttttacgcttaagagttgaagccttatacgaatatagtaaacggatcatagtccaaaaaaaggatttaaacctagaagatatggataagaattacacataattatggttttttgggagcgtaaattacggattacggatttgttttagtcacacaatacaaaagcataaatttgctggacttagaagacaaattgatgttatgaaaaccattcaaaacattgtttcaatggagcccattcatttttataagcgaaaattgactttgtcttcggatggatgcatatatttcgacttatttttatccatggcaattcgtttgagtgcacaaattgagcgcaacgattgtttcaacgcattattatttggcggccccccaacatattaccaaaggtattagtacgtaaaaaataaatatctttttataacaaaaattaattttcattttgggaaataccctaaaacattgttattatagcattattttagctttttcgattataaaatacaaatcacaaatggcaatttggtttcctatcgacaaaatatgatccacatatatattttttttaatgatacatattttatcaattaaaaaaaatccgtataattgttgagcctattaatcccgaaaaccagtcttttttgttgaaaatctgttaacaaattacactcaaattttcaaattnttcccgggcggcgcctatcggcaccgccggaccccctt

SEQ ID NO: 34994 - DNA, 1106 bp, Heterodera glycines
ttttcaaaccccctttttcgcaccgtgaaatgttatttttattgaattctgacccggttggagtagattagactagaaaaaatgaaaaattttgaaatcatgtttcccactcccttctcccaggggtattattttgtaaagtctttttttccccaataaacttgtcaaaccccatttttcgcaccgtgaatgttatttttattgaattctgaaccgttttgagtagattagactataaaaaattgaaaattttgaaatcatgtttcccactcccttctcccaggggtattattttgtaaagtcttttttccccaataaacttgtcaaaccccatttttcgcaccgtgaatgttatttttattgaattctgaaccggtttgagtagattagactagaaaaaattgaaaattttgaaatcatgtttcccactcccttctcccaggggtattattttgtaaagtcttttttccccaataaacttgtcaaaccccatttttcgcaccgtgaatgttatttttattgaattctgagccgttttgagtagattagactagaaaaaattgaaaattttgaaatcatgtttcccactcccttctcccaggggtattattttgtaaagtctttttttccccaataaacttttcataccccatttttcgcaccgtgaatgttatttttattgaattctgaaccggtttgagtagattagactagaaaaaattgaaaattttgaaatcatgtttcccactcccttctcccaggggtattattttgtaaagtctttttttccccaataaacttttcaaaccccatttttcgcaccgtgaatgttatttttatcgaattctgaaccgttttgagtagattagactagaaaaaattgaaaattttgaaatcatgtttcccactcccttctcccaggggtattattttgtaaagtctttttttcaaaataaacttttcaaaccccatttttcgcaccgtgaatgttatttttattgaattctgaacccggtttgagtagattagactagaaaaaaatgaaaaattttgaatcattgtttccactcccttttcccaggggtattattttgaacatctttttt

SEQ ID NO: 34995 - DNA, 752 bp, Heterodera glycines
tttcctgacgacgaaacgaattaatcgaaaatgccgctccttgtatgcatttcgcgttaaaatatttaacttgttacatcgtattttatttgcactgttcccccaaattcacctgccgcagaagtgcgaattcgttacgcaatttgttcccgagacgcaataaccctcgacgattttaagcataagtgcgtcttcctgctcttcggcagaaacttaacatggaaattgccgttccattctttcgattggtctctttggcattacgtcctttgcgcattttgacgggcattgccctgccgaagtttggcagccattccgcacgatggggagggaacgggcggagagaccaaccggaaaagggcttacacagagcgggtggagagggaccatcacacgcaatggaatttcccaagaaatcatcgccttaaaataatgtcttatgggaatcttgacagaaaaactatttgggtgtgcattacgtttccccgcttcccgggaaaaatttaaaaaacttaaaaattttccaaaaaaagatcttatggttaataaattttaattccctgctgttgaatatggatgtgttggaataccacgaattaccactgccgaaatgtttgatgaaaagacggtaaatttttatgttattgccgattgggatttttccaagaaacaatcactgaccgcaaaatatgattttacagagaatcggttataaaattgtccattctctcagctcttaaagccatggttgt

SEQ ID NO: 34996 - DNA, 409 bp, Heterodera glycines
aaaaaaaaaaaagaaaggaggggggggggggtggttttttttttttttttataaaaaaaaaaaaagaaaaagaagaggaggcccccccccccccccccccccctccccctctttcttttttataaaaaaaaaaaaaaaaaaaagaaaaaaaaaaaagtagtgcggcccccaccccccgccccacccccccaaaaaaaaataccccccccccccccccccaaaaaaaagaaagagggggggggggggggtggggtgggtttttttgttttattatttttacaaaaaaaaaaaaaaaaaaaaaaaaagagagaaaaaaaaaaaaaaatttttttttttttttttttttttttttttttttttttttttggagaaagaaaaagaaaatattttttttttttttttttttttt

SEQ ID NO: 34997 - DNA, 581 bp, Heterodera glycines
gaaagagagagagagagagagagagagagagagagagagagagagagagagagaaacagacggagaaagagggaagagagagggagagataaaaagagaaagagagagagagagagagagagagagagagagagagagagcagagaaacagacggagaaagagggaagagagagggagagataaaaagagaaagagagagaggaaagagaaagcgattaattacataatgaccgatggatgatcagaaattgacacgaaaaatggggttaaagaacactacaaccacgactttaaattgggcgaaaatgtatttattactcgtggcgtcacaacatttttcttcgtcatcaaaaagttggtttgattttggatttattatcgccgcacctttttttaatgaccaccaaaaaagagcagaaatagttgtaattaacaaaaagtgattactaataattaataattgaggaggcggatgcgaatttgttgaacaatatttaaaactgtgccagacaaactacagctgagggtaagcttacccttacctcgctctttttctcggcgtccctgatagagattgaaa

SEQ ID NO: 34998 - DNA, 1061 bp, Heterodera glycines
ttaatggaattactggtcttcgtgtaactgagaatacggtgtcgagccgagataacatcgggacggggggaaggaattaaggctaattagtgatcttggtgctactcgtgaatactgtatcgaaccgagaaaataccgtagttttaggtatcgatatcaaattttgggtttttttgttttatcgaaaacgattatttttttctaacttctaaaaataggttttcttgaggccgtacatacccaaattgacgaatttgattttttgttggccttatcagtgtcataaaatgcagccataaattatttcacgaaccaattcttccaacagtctgttactgttggtggcgccgtgcattggtcggattggcattggacgtgcaattccatcgtcgtcattagctgcttctccgtcggcacttttcggtcttggcaccatagttgatgcgttggtcgtagtcgtgccacgacgatgctcaacaatgatcggtggccggaacacggcatcgttgctgatggtaatggcacttaaattgttggcaccagttggcggctgattggcatggcgttgttggtgatcagtgagtgttattgttgctgacattggcacgagtgttctgaaacaaattttaaaaattactgacaccgataaaatgacatagaaacgagactagtaaaataggttaaaaaaaattacggtaatataaattaaaaataattttattatttttagccgatagaaaaacccaaaattttagttattcttattttggaaaatgcttttgaacgccttgagtataacgttttatttatttttaattcttttttttttaatttataacattcggatatcccacaaaagaggtgtacaaaaattagtgggaaatttttattttatttttttccctcggaccttgcgagcttggtcaagaaacaccgggtcgttctatggccttgggtcaggttgggccaccaaactcttgcgccctaatgccatcactaataatcaccacgcttttataaacataggaaaataaataattgtttaaaaatttaattttcaa

SEQ ID NO: 34999 - DNA, 1209 bp, Heterodera glycines
  unsure (1)..(1209): unsure at all n locations
tgtgtttcgagtttgccatttttttgtaaataaactgacaaaaaatgagacaatcaaaaaaaaggaaagaaagtttataaaattttanaaacacttcttatgctttcgtttttttttactattatttgccacttttttagttcnatgtgccaatnntgtgtnnccgcgnatgcacagcgagcatgggacgctgcaattgcactgtttgagcgtgccggtgcccgtgttcgtaaagtgagcatgccgcactgcccgttgtccatccgagtctatgccattctgactgatcgggatgtggcctcgaatatggccaggtgtgccagtttnaaatntaaaaagaattaaattgaattgcataattttagacaaaaaaataaaatataaaaaatcaaaaaatcattccgttgcggggaatcgaaccccggccttgtgagtgagagtcacaaatcctaaccactagaccacaacggatatgttttggttgcccatgtcagttaattaaatacaatatttttacgctcgattttgctgataaattaaatgttctttcccgtttacaaaattttaaatccattttttgttgcccaaatcatcagctggtaaactaagaatttcctccttttttcgttcagatatgatggcatccgatttggccacaacgacgccgttgatttggacgtttcctttgccgaacaaatcgccgccagtcgaaccgaaacacttggccaaaatgtgaagcgtcgcatttttgctggcaattattttgggcttcgcgagtgagttttgtcaaccagttttttttttaatttccattttctatgactcatttataattctttttttttccaaattttgccttttctgattggcaattttcattttttgatcactttcctttgtcatttcatttaaaaatcactttccaccgtaatatattacagtatcatccgcccttaacgtaatcatttttattgtctgctcataatttcccatcatttccctttctctaaattcgtttttctgctgatcactttccaccatttctattacagtaccctgtgccataccgtaatcccttgaacttatcacttccagcatatttctcatactgtgtctccctccgcccatataccgtaacccctctgatcatttctctcccccctttcctccccagaaactatgaccaatttgtgggccaagcgatgcgcg

SEQ ID NO: 35000 - DNA, 879 bp, Heterodera glycines
  unsure (1)..(879): unsure at all n locations
ttcctaatgggattagcgcctttttcgtccctttccccctcaccttccattggctcctctttctctcttctttctctgttcgcactaattaaatctttccgcaacatttccacgggtattgccaaattgttctttttcctttgcctttttcaccaattctctccctcttcttcttcttcttcttctttttcttcttcctccgtcccttccctttttctttacttttcatagttccctttggctatgattcctttgcttatcggtcggcacataaatgtgttcgttcgattgggaagtgaccccgaaagtgctcttctgctaagaaccgatggatgccttcgcccggcactttccatctttttgtccctcccttccccctccttctgctgctgctattgctacgccggtcatttgtccacccctaagggattgatggtgcccctggggaacgaccgatgaagggccaactcattggaaagttccaaaaactgacatttccgtcccccgtgtcggggggggggggggggggggagagactcaacgattgttccaatttactctttgcctcagttttattccattgtccaaaatttgctcctctccacgacttcttccgatgcaaaagtcatttcagcaaatggttgccattctctgctgccgagggatggatttgtaaaaacatttggcaatgaaaagcagcgaatgtactgagttgatacggaattaagctgagcaaacgaagaaagaaaagaccaaagatcggacaaattgggaaaaatccgaggcatccgccaattctccgaaaggcattttcgattanacgactattccttattatttttattcaaattattattcttttgaatcgtcaaaatcgga

SEQ ID NO: 35001 - DNA, 1004 bp, Heterodera glycines
  unsure (1)..(1004): unsure at all n locations
ttttggtttggttttagctttagttatttttaatttacttttttggcttattttttcaattaagctattaaaacacaattaattttatttgcatttttgtttatttgaaaaataatcaataaataatggtttatttttcaaataattatttaaattatatatataatattttctttgcttttaaaaatttcaatttgtaaaataataatttttccaattttttattaccaatttttcggcccaatttcagcacattgccatgactgagttgccccatttggtgatggatttgcacgttcgactgccgaacagcttcaaatgtccggacgcatgttttattttgtccggctttgtcgacgctttgtcgttccgcgaattgtttccgcattgtgccaccgacgaatttatgcgccgggcagagaatgccaaaatcaaaacaataggacacagatcaaagcaacaaagtgccacgtccgacgatagtgatgacgaacaaggacaaatggacaacccatgggtcggctttttggtcgaaaacccaaacggaaccaaattcgagctgaaattgcactactcaccttcgaactatgacaaatggtcgaaaatggtgatccgacaattggccgacgacgaccatcagcaggcggcaaaagaattggacgaaaatgccgaaaattatgatgttagtagctaacccttttatttactttttgattttgttattgtattttcagaaatgcatttgcttttgcttttataaataaataaaaatcatgtatatgtacttctcaaaaacggaccaatgataaaatgaatttaaatcaaaatttgatttgtgaaatgaccgaaaagtaaattagcaaaattatggacaaaaactggcgaaatcttgttcaattttaaatagcgaanatatatttttctaattgatacaaaaagaaaaataattttccttatttttttattcccaaataaatattaataattacaaaataataaaaatg

SEQ ID NO: 35002 - DNA, 882 bp, Heterodera glycines
tcatctctgatctattattggtttctttttatatttacctcctgagagaataattaatttaaattattttatttatcatttctttttttgaaaactcaccgcgtcagccatgctatgtattggcatgttcaaaacgatattataaatgtgttcggcatttgctgctgttgatgaggatactgataacgaagcaggtggtggtgataatggcgatgatgaaaataacggtgaaaatgccgatgccgatgataatgaagataatgccggcgacgatgttaatgattccgactgatctgctcttgccaatgaagatgatcccgactgatttccccgtgcccctcttccaccactgttggcatttctctgtgcattttgttcaatcgttttaaatttattttccatcatttcgtcaaactttgcctgtggtgactcttccatttttgccttttgcttcccttttccttttgttttgtcttccgaatttgctttataagcatttatttcctcctcgtttggcagaattaagcccatttcttcccattcttttgcattttcttccgccaatttcgagccgtgacaaaatttaaaaatgtttgccaatctttccataacttggacaaatgtcagacgaatttcaccattttttgtcctaaaagatggctttttggtcggaatctcagcataaatatcggaaaaatgttggtacaaaatgcccaaatatttgcggtattcttcacaatgagtcatgccaaaccatccaacacaatgccaattctgtttcatatagtgcaaaatgccaagatgggtgtcataaatttggaccagtaaattcttgctttgccttgtctgtgacttcattttgtgtacaaatttgctcaaaat

SEQ ID NO: 35003 - DNA, 1197 bp, Heterodera glycines
tccacttcaccggataacattccttacattttattaaaaaattgtgctgagccaattacaaaaatattagctgacatatttcgacttgctttggattccggtcaaattccggaaatatggcgaacatcattagtggtaccaattttcaaaaaaggcgaaaaactgatccattaaattacagaccggtgtcattaaccagcactgtctgtagagtttttgaacgaattttaagtagcaaaattttagaatttctgaacggtataagattttttgataaaaaacaatcgggtttttaaaaaataggtcgactacaacccaaatattaaaaacaatggacgatataataattctctacaaaaggatcaacaaattgacattatctatattgattttgtcaaggcgtttgattctgtaccaattgatttattacttcaaaaaatcaaaaagattggaattgaaggaaaaatttataaatttttaactaactttttaaaaaatcggagttttaaggttaaaatcggcgaagtattgtcagaaagtttcagaatattttcaggagtgccccagggaagtgtcttagggccattactctttttaatttttataaatgatcagccgtccgttattacaaatgaagcggcatcagttggcataaaaaagtatgccgatgatgttaaattatattatgccaatgaaaatgatgaccattcgaatcagttggataaagcaattgaggctttggaaaatggtcaaaaataaatgggttagaaatttcaactgggaaatgttttgttctttatttagggaaaaataatatgaaaaaagattatttaattaactcaaaaaagatttcagaatcggataatgttcgtgacctaggcattataattgactcgaaactgcatttttcagaacatattaacaaaattgtacgaaacgcttatcttagagttttccagattttaagagtcttaaaaaccagggaaataaagactctaacaacagcttgtaaaacttttgtccgacctcaattagaatacgctaccgaagtgtggaacccaaatttaaaaaaagatatagacaaaattgaacgggtacaaaaatttttcacaagaaaagcttttcgaaaatgtggatttgtgtacaaaaaatatatggaaagactaaaaatcactgatttacacaaattagaagaaa

SEQ ID NO: 35004 - DNA, 1085 bp, Heterodera glycines
  unsure (1)..(1085): unsure at all n locations
aattcaataaaaataancattcacggtgcgaaaaatggggcttatacaagtttattgggggaaaaaaagactttacaaaataatacccctgggagaagggagtgggaaacatgatttcaaaattttcaattttttctagtctaatctactcaaaccggttcagaattcaataaaaataacattcacggtgcgaaaaatggggtttgaaaagtttattggggaaaaaaagacttacaaaataatacccctgggagaagggagtgggaaacatgatttcaaaattttcaattttttctagtctaatctactcaaaacggttcagaattcaataaaaataacattcacggtgcgaaaaatggggtatgaaaagtttattggggaaaaaaagactttacaaaataatacccctgggagaagggagtgggaaacatgatttcaaaattttcaattttttctagtctaatctactcaaaacggctcagaattcaataaaaataacattcacggtgcgaaaaatggggattgaaaagtttattggggaaaaaagactttacaaaataatacccctgggagaagggagtgggaaacatgatttcaaaattttcaattttttctagtctaatctactcaaaacggctcagaattcaataaaaataacattcacggtgcgaaaaatggggtttgacaagtttattgtggaaaaaagactttacaaaataatacccctgggagaagggagtgggaaacatgatttcacaattttcaattttttttagtctaatctactcaaaccggttcagaattcaataaaaataacttcacggtgcgaaaaatgtgggtttgacaagttattggggaaaaaagatttaaaaaatatcccctgggaaaaggagggggaaaattgtttcaaaatttttattttttttagctaatttattcaaaagggtccaatattaaaaaaaaaactttcccgggggaaaaagggggttgaaaagttattggggaaaaaaaaatttaaaaaaaaaacccccggggaaaaagggggggggaaaaatgttttcaaaattttttttttttttttattc

SEQ ID NO: 35005 - DNA, 1523 bp, Heterodera glycines
gatgaggtcgatgagccggaagtagaggggatgcgctaatcaatagggattttcatcatcatcttgtgtttttgataagttctatgaggacttttgcgtattattgaatcttctgtgggagacatcagaatgttaaattttatgattaatattcgctaatcgtattatttttgacaatcatttaattgaggttattaatacacccggaatccaaaatctcaaacaaaattttcaaaaatttcatagccagaaagaaattccattcttttctgaaaaacgaaaaattacaaaaagtacaatttcctaggggttatcattttttggtaaaaacttagttttttattgatttaaaaaaactcccctaacctagaagccattacactttcgaaaaaaataatcgaataatgggagcgacacaccctctaaaggattgttagatataggagaacaatgtaggttttggtgacgcggttaattctccctccttcaccgtacatctattataatggggggttgcgtcccatccttctcaatcaataaatcggagagtacgatgttgggccggtggtggtaccgatgccaaaaatgatgatatttgttcatctcctggtgatatcaaaaaaacagatgagtacgaagcctgcgctggtgaaggaagtggtggtggtggcggagctggtggtggtggtggtgccaatgccaaaaatggcgattgttgttgttgttgttgtggtggtgccaatgataatgatgatgatgatggtggtggtggtggtggtggtggtggtggtggtgccgatgccaaaaatggtgattgttgttgttgttgttgttgttgtggggatgccgatgataatgatgatgatggtggtgatttttgttgtggttgcacagttgccgcagcaacgacagatttaaatagagcatcagcagaaatttcagtgggggcgaaggcatgtgatgttgtgagaaactggttgtccttttgtcgcaatgtcgcagccgtttgtagaccgtattgttcctgtacagagaatgccaatcctcggtcgaacaactccacggtaccgcttgaagacggaagatccatccttgtgtgttttgcgataggcacaacagggaaaatatccgcaatgttgacgctgccatttgtcgattcgtcaaaaccgtgaatttttagggagccgttattattttgaacaatactaaaattgatcgtatttatcattatgactagggcttatatttatttgaatatttttaacagttttcatttttgtgagaatttccacaataactcgtttttggtcggaactatcttctttttaacgttaatattcgtaaatacaaaaattttttgtacttttataaataaaatgttgtaaaaaatacagcgttaagaaaaactgttgaaaaaattcgaaactggtagaaaattttaaaaaattaaaattaaaaaagattttaaaatagccatatttaaatgtacgcgccaaatggacgtctatatggccctcgattct

SEQ ID NO: 35006 - DNA, 605 bp, Heterodera glycines
acgtaattaacagtaattttttaggggcggtgaccggtgagggggggggggggaacttccgccacttttgccatttatttttcgcccttttctttcgcactcagttccgagcagaaattcatgcagtttttttggtgttccttaatacgcactttcaattgcttttccttcccttcgcttttcacctgcactttgttcacttcttcttgcacccattgggccaccaaattcaccgtaaaatccttcggaaatggcaattaaaagaacacaatttggggagaaacaacccgttggaattccgaaagagattcgttgtagtcgagcacctgacaaagggaaagggtaaggacagcttatgttagcttgtcgagagtctcggcatttggtgaccgcaaattattgaaatggcaaaaaatttgctggcaaaacttactcgacgcgtgaaccatgacaaatattgggcactttggtgcaaattgtcggccgtcttcagcaatccctcggccgtgttcagtccgttccgcgttttctccgcctgaactgcaaaatgtgccgtaaatttcttttccgtcctttttcttctgctgctgctgctccgaattctc

SEQ ID NO: 35007 - DNA, 728 bp, Heterodera glycines
cgtttgctgaacgcacactccgccgttgagacagcgccgtggggcaatgcccacggggcacggcacggcattgggaggggaacttctgctaaattagggaaatgacactaaccactgattttaatgacaaaaatgaacagttacccgtcggccccaattgaacgcgtcattttcagcgtccgttggtaaaggttcgcccccggcacgcgtcccctgcggcgcgcttcgctgggccgagccaaagccgaacaatggaaaatgacggagtgatcagccgaagaaaagacagacgacgaattggacctgaataatatttaattggtttgcctcctctgctcattcccatcctttggcttcattcacttcgctttgtgcttttttgcccggtggtgccgtccctttttcaattgttccttttcgctgtgcctttgcttttgccaattcattttttgttcattcgattctttgcccaaaatgatgacgtcatccactgattgaccaatgggctttgtccgtcgatgccaaggcacaaagttgtaattcaggctgttaaaatggggtcaataacagttcgtacaatggagtttcgtacaataggtatttttataaaggcttagaataagcatcagctttcggattaagcttaggcttgagccatgcttagccctaagcttagggttgcttgggcttaggcctatgcttagtattaggctttattttggaaattt

SEQ ID NO: 35008 - DNA, 758 bp, Heterodera glycines
cccatttttgagattttaaaaatgatctatcgattaaattcaagatagttagactcaaataaactgatgggtctacttaaaaaagtggccaaattcaaccactgatttattggccaagaaaaggctaaaggtacaaaacaaattatggttttgtagagcaaagttgggactatctgacaagctgaaaaagagccaccaagaccgacggttatttttttaaagttgtcctgtcagaaaatgggtgctcaaaagtgccaagattcagcacccactttgtacaacattgttctgaaaggacctaataaaatgaaattgatgttttcatgggcaaaccaaacccggagaatccgaatatcgcctcagatttagtcagttgctgttctatgaccctgtactgcttcaacttcttgtcaacgacatggagcagtacaatgccagagaaaatcagagatcaaatctgaggccagatttggattctccggacttgatttggccacaaaaactgcttttaataaatttccaactgatcaaagcaaagttttgacccgtacaataaaagtgatcgggttttgatttttgaggattctattcaaaaatttctaaaaaatccaaaatgaggtggaaaaattaaaatggccattttttcgaaaccgcagacatttctttacaaaatgcaaatgagattgggccggggaagcaacggagacattttttaaaaattcacaaaaaaatcaattcacagctatgacagaacttat

SEQ ID NO: 35009 - DNA, 1237 bp, Heterodera glycines
ttttcggcgcccgccactgttgcggatgttcggcgtgccgctcagtacgcccaaaaaagacgtcccttcgaacgtggagtgttttggtcgcccccccccctcctatctttccccgatttccaatcatgacctggatgggttgttgagacccatcgatggtgtttgctgatggtgaaggcaatttggccatgtccggtgagtcggcattctgttgttcgccgtcgttgtccaaaacaagaggggccgaatgagtgtcacgcggggaggcaggtggcatttcactgtgtggaatgtcagatgccagagaaaccgaatcggcatcgatgggaatggggacagcggcaaattttgggggggtttggtgggttttcggggacaattttaaaatgtgaaataatttgggagatgagaggggtcattttatttgatttttccattgctaaaggggtggaaaatgataaattaatgggaaatacgggaaggattagtgcgattgatgagttcatccacagcgcagcgaatttcggtgagctcagttgagttttggggactggagggatgaatgagtgggcgtctacggaacaatgtcggaaaaaacagtgaaataattttgaaaaaaaacatgaaaacaaggatgataaggcagcccaaaatggttaaaaggacggcggaaatttcgggctcatcctcaagaaaggatgccaatgagtccaatccaaaataaattgccgtagtggagaggagtgaaacggcagttttagcaaagggtttcccaactcggcggattgggaaggggattggtttaccctttccctttgggtgggcattggaaaactcgacctgaattaagcacagaaaaagagaaatgagaatcattgtattgggagcacggcctcgggagtgatcagtggtggctttaatgcgaggaccgggccggccgggtgtatggtgccgaggcggacggcggcactttgcacggcaacggcaccaccaacagatgaagaaaagtgccaaaaggaagaaaagtgccaaaaggataaaggaaagaaatccccaattagtggacggttcggattggtgccaatttggaagaaaaatattgagtgagaacaattcaagggagaaaatactgcccatttctaaacaaagaaaaaggaaatgaaaaattaaacaaaaaattgaagaaatgaaaagaaatgtgaggatgggcacccagccatgtgtttaaatattagaa

SEQ ID NO: 35010 - DNA, 595 bp, Heterodera glycines
attatgtaaataaaatatgcataaaaaatgctaaaaatatatatgaaatatgtacaaaaatccccaaatatgtactaaaatatgtaaataaaattttttaaatggtaattttttggataaaaattcttcgtaaaaaatgaaacaggcacaaaatgccataaaaatgaccaaaataggctagaatcacattttaatacttaaatactaatttttggtatctgtttttttttgaaaaaattcgattttttagggatacattttcaaaaaaatttttaatttttcacaaaaaatttctataaattctcaaatatgaaaaaaaatgaaaatatgtacgaaaaaatcgcaaaattttgaatttttttggggcatctaaaaaattttccttaaaaaatctcaaaaattgcaaaatatgtataaaaaatgcgaaaaagtccaaaatatgtatgtacatatgtaatatgtagaaaaaccccgaaatatgtaaataaaagtcccaacttttgttcgcaaacacaaaaaagaaagtgttttccccactaattaggctatggagaatccaggaaaaatatgtatttacataaaattagcagcccta

SEQ ID NO: 35011 - DNA, 998 bp, Heterodera glycines
aaattgaaaattttgaaatcatgtttcccactcccttctcccaagggtattattttgtaaagtctttttttccccaataaacttttcaaaccccatttttcgcaccgtgaatgttatttttattgaattctgaaccgttttgagtagattagactagaaaaaattgaaaattttgaaatcatgtttcccactcccttctcccaggggtattattttgtaaagtctttttttcaccaataaacttttcaaaccccatttttcgcaccgtgaatgttatttttattgaattctgaaccgttttgagtagattagactagaaaacattgaaaattttgaaatcatgtttcccactcccttctcccaggggtattattttgtaaagtctttttttccccaataaacttttcaaaccccatttttcgcaccgtgaatgttatttttattgaattctgaaccgttttgagtagattagactagaaaaaattgaaaattttgaaatcatgtttcccactcccttctcccaagggtattattttgtaaagtctttttttccccaataaacttttcaaaccccatttttcgcaccgtgaatgttatttttattgaattctgaaccgttttgagtagattagactagaaaacattgaaaatttataaatcatgttttcccactcccttctcccaggggtattattctgtaaagtcttctttttccccaataaacttgtcaacccccatttttcgcaccgagaatgttatttttattgaattctgaaccggtttgagtagattaaaatagaaaaaattgaaaatttttgaaatcatgtttcccccctcccttccccccaagggtattattttggaaaaggctttttttttcccaaaaaaatttttcaaaccccctttttttcgaccccgggaatgttatttttttattgaatttcttgacccggtttagggaaaaataaaataaaaaaaaaattggaaaatttttgaaa

SEQ ID NO: 35012 - DNA, 488 bp, Heterodera glycines
cccgattttcactgtattttgggttgtctaggtcaccatgaaggagtgatctgatcaagttggtataaaagacgtttttgatcagcatcaaaagttttgtttgcttgaattatttcagatttttctgtgctttcaaattcgagattcaaaaagtggtgctaaagatatgaccgccccaaaaaagggagtgcagttgttcaaatggtttataaccaataataacaattatgaaagggttaatgattggtatcattagaaagcccacaaaaaatactacaagaaatgtataacatatatacacaatataatcaaattgagattttataatcaattttaaacaaatttgatatgaaattttaagtggttctaaagacatgaccatgactgtataagcaatgaaaatcatttaaataattagtttcctgcaatatcattaatataaattattacaactcccggctctggaaaaaccttcatgcaaaattaat

SEQ ID NO: 35013 - DNA, 1041 bp, Heterodera glycines
  unsure (1)..(1041): unsure at all n locations
ttgtttcttccttcccattaatccaaataacaaaatctttatcgtcggttgcagtcacttcaatgtccattaattctttgacagggttttttaaagaatgacttggtgttggtattcctattttctgtttaaaatatttttgtcatttttttttggaatcattttttatttattataatttaattactccaacagcttcggacgtgaatgtgattttgcccagataaaattgcatttgcataacagtcgcaccgactagaaatggcaaaaatttagtcttaggtgttcagttcaaattaaaatggctggatttccggcccattataattctacaacaataaatcagggttagaattggtgttgaaaatgtgtgaggtttttttgggccagcaaggtcgggcggactgaccaaatttgagtatggttttcactagaggccggaattttgaattggccgggaccggggccgggagttgaaaaatggaccgggacgggatcccgggtccgggactcccggtttttcgggactcccggtcccggtcccaatttttgggccggggccccgccgggaccgggattttttcaaaatttttgaaattttgataaaaattcgaaaaaatttttacaattttatattttagcttagaattatatcaagcctgtaaattgacctttttttgcttttaaaagcacttttttttgcgcgtgtttttctaaaaaatttagggtacaaagnggggggggggtccgacagtgccgataggcaccgacggggaaattttgaaaatttgtgtgtgatttggtaacagatttacaccaaaaaaatgacaaagttttgcaatttccactcatttttaagaaaataaaggattttatgggccccggggaaaaaatttttttagatttttctttctattaagtaattttcccccaaaagggtatgttaaaactaatttttgaaaatttttggggggattttattattctttttaacagtttaatccgaaaaaaaaccccaaattcccccttcaaaattttaaa

SEQ ID NO: 35014 - DNA, 1121 bp, Heterodera glycines
tccactcaaaactcgcctgcttcatctcagcaattatgccggtgtcgagaagccaattgctgacaaaatggtgctcgaattgttgtagaatttggtcggcatccggcatgcatttccaccattgctccagtcttcgccaaaccgagtgcagcgcctcatcccctaatgtttttgaaaatttgagttaattaatttttgctgcccaccctgctcgtccagcaagccgagaaaagagtgttgccgagcaaatgggacgaaatgattgagcaataagtgggccttcggtttctgagataggaagtcgcgcatccgttgttcttgggccagaaaaacacggaactcctcaatttggtgttcaaatgcgtccaagtcatttggcgaaagtggttgagcctaaatttataaatttgggagtgatttgctaaaaatgtgtacttttgtgaaattttggatttggcctaagtgcataagagcttgccaaattgtctttggtcatgtcgattcaaagagatgttccatttccgatgcacgtttgaggacttagccaatttgcggcgtgaggtgcactgcaaatgatcaacatttttctttggtcgtcctgttggagtcgctaaaattagaaaaagattaagatttcgaaaaagagtaaagggggattttatttcactcacttttgctcgtcgttggtggcgccgttggtggtaccgcgcattgctccagctggcaacgcagatcactgatcagtgcatcacggttgcgcacctgctcgcgcagaaacttgatgatgtcctcctggtccttgagctgcttctccaagtgttcgatgcgcggtgatcgctcgtcgatgaccagcggtggcggtgtcatttccccggtgtccattggcgcagttggtgttgtcgaaaacggcaccaaatcgccgattggtgtgacagatgtcgacggcagcgaaaagccaaattccaaaatttcctcgtccatctcgggcgtcggcactggtcctggagttggtggcggcgactccatcgcttcttcggccggtgcagcagatgttgacggccctgcttcgtcctgctgtggcgtttcggcattggggttcggctgtggagcgtctgaaatag

SEQ ID NO: 35015 - DNA, 464 bp, Heterodera glycines
tttagtacatatttcatacatattttagcatttttttatacatattttatttatatatttcgcgatttttcttacataaaaaaatgattcctgattattggtagtctttaattggtttggatagcgtagccaaaggcccagagacagcgacacattttgcgagattaataaaagacgcaagcaaaagcaaaaactggactgaaagacgatgaatgaatgaagtcggaatatttaaacgatcggttgttggcccatttcgcgctaattagttttcctacagctgcttcgccgccaacaaatgcgtaatgtattgcaggatgatccatcaaaagaaaatttattattttaatgtgatagtttacgaaacgacccatcattaattttgtctcactatgcgtttgatgattccgccaaattgggcgttttcaacaaaaaaaattcccattattttcaccataaatcca

SEQ ID NO: 35016 - DNA, 785 bp, Heterodera glycines
ttttatttcagcattggtcggaacagattgccaagctcagtactactgtatggattacacatattaatcagcattttaaagcaattaattaaacgattgaaaatttgaataggatgacatgctaattggaaaagtgggccaaattgtgcacattttggtccataatgaaggcacgccaattcgcgcattgcataagctttccatcagtgagtgataaatggattttaaagaattatttttaacaattccatttttcagttttatattgtttcaaaaaaagatttgccgatgattgggaagaaagaaattatgtttctttccaacaattctacaaaaggtattcaaaaataataaaatattgttgtgtatttattaattaattcgtaaatccgctacaagaatttttcaatgaaaatttgtaaaaaaaaacttctgaaaattctaggtaaaataatttgctaatttcatttatcgaagatgaaacaattcgctaacaaattttcatctttccggattatattttaaatttttggcgccatttaagttgaccaaattctcatcgatggaacgcacgaactgaccaacaaaaatgcatttaacactatgataatgaatttaatcccctttttaccatttaatttatttatattgtttcaatattaatattgatttaaattttgcataaataaattttatccggccaattaactttttcaaattaattcaaatccatgaaatcctttaatccatcggcaataataagcaaagtgacagacgccattttt

SEQ ID NO: 35017 - DNA, 288 bp, Heterodera glycines
aatatctaatatcattttttgtttatccagatggatgacccctttagcaccgcctaatgagccccccccccaacccggcgccacctgttcagtccacgaatagccgctgggtgaaccgagaaggaagtggcgcaatttgcccttcgacagttcgtccaaatgctcaaactcttccgcgtccatttttggcaactctctcctgcaaatggcataatctgtgcacatttattggcatggcatttcatcgatgttccagttataaattggtggcaaaatgaccgaattatg

SEQ ID NO: 35018 - DNA, 1167 bp, Heterodera glycines
tttttgtttgtcctacaaaatatccgcgctttcaattaaattttcatcaaaatttgatgctttaatccaagaatttaccaattcgctttgatgtgaggcgaatagaaatggtcgaggaactaaaagaaaaatgtgaatctatttgcttgctgttctgcttaatccctctcctcttctccacctgtgccaatttcagctcccatttctcggcatttgcttcttcctcctctgtgccgtgtttcaatgcatacggtaacatcagtgcctttgcaccggcaatcttccgagtctccggctccaaagagagtccgccgagcaatccgcgaacgccgttgccgagggaatccaacgaaagagagttgagaagctgggccagggacgaatcaatgggaatactttcattggcgtgggtcccattttgtgtcaaagcatccatcaaaattttctggcttttcagggacgagtccaacaacagtttgatcagctccaacaacgggttggacacgcacagttcgtcctcaaccggcacattcgtccgattgtgccgcgtgtcgtcaaaaaacagggacatggcattgtccagcgagtcgggcaggggaaagcggacacaaagggacgtatagtcaatgggaggagcggcggaccgcgggtcggcggattggttctcgtcaattgttattgcttgaatgatggaccaaagtttgacagaagctgaaatttatttgaaaatacaaaaaccgaagagcaaattcatgataagccgcttttggacgtctgtttaccctttaatgttgccgcttttaaaatttcgcctttgtcaaccgccgtcacaataatgtaacccatgcgcttcatgtcatatctgaaatttggtcagcagaaattcgattttttaaaatagtaacgcaacaattagcatcacttaatttattaatcagctttttttaaaaaggtatttaaaattactattttaattggttgcattataatttaaataatatcttcggctggcatagaacgggtccgagtcgtttatgtgaaaaaggtcgcccaactcgcgcagttcggcacgcgcacgcgcattggtcggcgtgtacagctccaaattgtccttgagcaacgcgtcggaaatgcggagaaggcccaaactgcacagaggactctaga

SEQ ID NO: 35019 - DNA, 277 bp, Heterodera glycines
ttgatttacattaatttacatggccggagaccccttcgcaaaattggaaaattggctgctgaccccttgttttgcaataatctgaattttgaggtctacatctgaattttagtgttctatgtcctgaatttgaaaaaaaaaaacttggtcaccctcaatatacatatacttctgaacaattctaatgctaaaaaacaggtactcgcgcgaaaactgaataaaaattttgtatttggaaaattttgtccaaaaatttttatgctctaaaattaccggt

SEQ ID NO: 35020 - DNA, 863 bp, Heterodera glycines
  unsure (1)..(863): unsure at all n locations
aaaggcagatttcgggacnatataagcgcccctcatcgtcttatcaaaagctttcgagcagtttagcnaactctttcattgtttgagtgtttttattattgtctagcaattcacgaaagtgagcgcttttggtttaccttttgaaattcttagtacattacaaaatgatttntaaaaaggcatttatatacacgagcattttacgggggctggaatttataaattctgagaatctcgtaaatttgctaaattttcacttttatcattggcaacactgctgaattgtgcattaatcagttgccataattctttgagctataacagcaatgggtgcattttaaatagatctgaaccttttaattaatgccaaatatggtgcaaagtatgtaaggattaaaggcagattttcggaacatataagcgcacctcatcatcttatcaagggcttcgagcagtttttcaaactcttttcattgtttgagtgtttttattattgtctagcaattcacgaaagtgagcgcttttggtttaccttttgaaattctttagtacattacaaaatgatttttaaaaaggcatttatatacacgagcattttacgggggctggaatttataaattctgagaatctcgtaaatttgctaaattttcacttttatcattggcaacactgctgaattgtgcattaatcagttgccataattctttgagctataacagcaatgggtgcattttaaatagatctgaaccttttaattaatgccgaatatggtgaaagtttgtaaggattaaaggcagattttcggaacatataagcgcccctcatcgtcttataaagggcttcgagcagtttagcaaactct

SEQ ID NO: 35021 - DNA, 701 bp, Heterodera glycines
ctgttgggttgagtcccagtgattggaatgctggtgggttgagtcccagtgattgaaatgctggtgggttcagtcctggtgattggaatgcagtcccagtgattggaatgttggtggattgagtcccagtgattgaaatgcaggagaattgagtcccagtgattgaaatgctggtgggttgagtgccagtgattggaatgctggtgggttgagtcccagtgattgaaatgctggtgggttgagtcccagtgattagaatgctgttgggttgagtcccagtgattgaaatgttggtgggttgtcccagtgattgaaatactggtggattgagtcccagtgattaaaatgctggtgggttgagtgccagtgattggaatgctggtgggttgagtcccagtgattgaaatgctgttgggttgagtgccagtgattgaaatgctggtgggttgagtgccagtgattgaaatgttggtgggttgagtcccagtgattgaaatgcaggagaattgagtcccagtgattagaatgctgttgggttgagtcccagtgattgaaatgttggcggattgagtcccagtgattgaaatgctggtgggttgagtcccgttgatcggaatgttggtgggtttagtcccggcgattggagaaaaagccaagaataggatgcgaggccgcgaagcggccgagccagtcgattttat

SEQ ID NO: 35022 - DNA, 841 bp, Heterodera glycines
taccctttctgatcattgttttcctctataatcacttttgtacatcctatcatcactgttgtaccacttcttatcacttacgtacatttcatttcaaattaaataaatatgcacttattaattttcaaaattgtttttaatgaataaaacgagtattttattattataaatttgaattaaaatgcatccgatttttaattttttataaaaacttttccttatttatttaattttaaatcatcttgacctctttcccgttgtattacctcttctgattacatttgtacctcttctaatcacttttgtaaaaattgtttcggttttcctttttaaatattttttataatacatcttttcgacaataaatctcaatattttctctggttatgcaataaattaattatttaacaatatactttagatgtcaccgctagcaattgaatgaaatcaaaatgcacaactaatcaatcaaaactgaaaaaacaaatagatattggtaaattttgccccatttatgctgtatccccagcattcaaatttccatattttgtgcataatgcaaattgccctattcctccacccaatcccgtcataaacttagtccgtctattcatccaatctcaaacccaatccttgtccctctcatttatcgagccgtttctatcccattcacctctgttgcatatgccatccctttctctcttattcctgtgtttatgccgtcatacccctcatcctatccaaaatccctacccattgtgccagtatataactcccactcaattttccccctcggggacttgcgaaatgtctgcgggtgaatcactctgtgccatttctt

SEQ ID NO: 35023 - DNA, 978 bp, Heterodera glycines
  unsure (1)..(978): unsure at all n locations
tcacaccgggacgagaaatgccacaaattctttattttggggtcaattttttaacataattttttttttttcaaaataccttctggtcatttcttaaatgctgccagaatgagcattttttggcaaaaatatgacatagattttctaattgtaatgggaaagaaattaaagaaaaatgaaatttacgtgattaggcttcataataattgaaaacccgttcttgatgcttattaggccattgaaagttagcagaaaaaatatgtaatgcatcaaaattcgctctctaatcatttgataggtcgatgttatctcaattagcatgcaaaattttaaaaattacacagtttaattgatgttgtttttaatttattttttgaaatttgtttctgagaaaagttaggtacaattttaaaaatatattagtggcgcagaactcaagcaatattttaacatttttagagctataccaactaccaaatgggtggaagaattcatattgttgatgaattcccagccaatctcaaacacgctgttgctgaggtggagtttatggacagattatgaatttttaaatataatttttacttttttaaaatttaggcttttagaaaatagctatagatacacatttaaaaaaacatttgatcagaaataatacctttttagctattttctgaaaatctgattgtgggttttaatgggggaaaaagccaaaattaacaatatcaccgaatcaatggtgctctcactaattgcacattggcaggataagaatttgtttccctcattccttcaaattagttaatttcttaggagttttttagcctaataaaaaaatatatatatatttattttttgtatgttttctaccaatctaaaattttttctacatatgcaaaaattttagccttatcgttacgacgctcgcaggcacaaggaaagtcttgaacttagccgcgacaattcggccanaaagga

SEQ ID NO: 35024 - DNA, 1070 bp, Heterodera glycines
  unsure (1)..(1070): unsure at all n locations
gccactaaatacggtgttctttttcgtgccgtcgtatgaaacggcaacagtttcggcaccggtaatgacacgggatttggtttcagcacttcgagcgtttgtcgcttcagatgactaataaaggaaatttaagttaattatgccgcccgtaaagaaccaaaattaataattatctaaatttttattttctcactttcattttccctaatcatattttcactttccataagaaaatttttgttacataaaattttttgaactcttttttcagttagcatggcccgactgggctcaaatgttgggatagggaatatttctatttttttaaaatggcactaaaatcagtgaatgccgtgccatcccatgcaactttaaaaatggattctataatgccaaaaacaatcaaaaaatctcatttgtcattcacccataaaagcatggcttacgctttgcttttcattgtgcccattgcatctgttcccatcgcaaaaattgcgctctgccgtcccattcatcgattggcattcatttaatccaaattctttaagtggcagtttaacatcccacaatttgtccatgttaacacatccttttgtgtggaaaagcgtcgaattgtccgtcccaatgcaacgcactgagaagcattgcgcatcttcacaccttaatttgtccctctttgaatttatctaattagaataattagtgctaatattgtcccctcactctccacaaaatttcttcacctaatttcggtgaatgcttcgtcctttttctcgccatcattcatagttccattcaaacacacaacaatttctttaccaataaattcaaatcagttaataattaaatggtttaaaataaaaatttaattagcaccgtttggaattttgtcgttacaatacgaggtggaattgcaaactgagcagtctaccaaaagtttgccaccatcggttaagcatttctgttcaagctcagcgcattccctagtgccgttgaaagtgcaaccctttgacacttttgtccaactttttcccgcangtttctattgaaattaattaattaattcatta

SEQ ID NO: 35025 - DNA, 534 bp, Heterodera glycines
gacgttatgtcccggcgagttttggtttgagcagcattcttcgggttcgagtcccgccaggcgcgtacccttttatgttttcatcggtgctgctgcgcaatgccgattcttatttattgttttctcatcacaaaaaagtggcatttattggactgtaatgtgtattggttgcaccaatgatatttttttatcggatttccattccgtatcaatgccacattcttttgaacgaaatgccaacaattccctcatattgttcttttttcttgcaggacgatgtgcctcgtgtggttgccagcatgtgattgggtgtgtgttaagcggtggtggttgtgctgctgctcgtcaagagacgagagtctccacaaagctgatccgagccgcataatcctcagacggaagcggaaaagcatcatcggccatccctttttttatttcttttttggtgctgacgccgtagttcttccatcatcaatcaatcaatcccaatctgtccgcctccatccctcccgcgctgatcagttgatcactgat

SEQ ID NO: 35026 - DNA, 1625 bp, Heterodera glycines
  unsure (1)..(1625): unsure at all n locations
cagagttgacaaatttattcccatcgtttttnaaggtattgcgaactttgctttgcccgattcggtatcattcagcagatgaagtactttttgttgctgaatttattaagatttttgaaaatatgtccttcattggccgttagaggcagtaaaatttgattgaattttttaataatccacacaaaaatgggcattgccaaatccaatttccaaagtttcattgctcttttagggaattggacgatggcatcgccgaggcagtgagcagtttgttgtgggtggcgcctcgcattggacacgaaattgcggaattcaaggcatactttgggcaatggcaaaatcagaaaaacaatgccgtggtgtgaaaagcttttgtccaccctagaaacaaaatttggtgccaccaaaattactttcgtgtggtataaattggccgattccaatcctaaagaatttaatggaatttttccattttccctaaaaattccttaaacattatcacgcttacaattaactaaataattcaattaaaccaaactgaaaagcatcgtccaaatgtaggtgatcaacgacgaactgacccacaaatacggcaaacaattcgcggaggccgcccgtatgaaccaattgccggagccgagccgagtgtcgaccaaattggtgcagaaattgtccgtcagcgcaccgtccaaattgctcgtcgaaaagtttgtcaccatttatttggggggtgtgactttttttgacaatttctcggtaattgcttaaatatttttctaatcaatgccattttgtttgctttttaaattccaattttttctctaggtatttggtcactattgcgcaatcggcgggcgtcgatttcgcgccggacgccaaagtgatgcgtgaagacgacgacgaaattgcacgagcggaacgcaacttgatcaacttcatgaacgaggtgtggtgccattggggttgggtgggcaccgtttaatcagccatcgaattggcgggattctgcgtttattgttaatcagacacgaaaaccgcgcgcaaaaaatggcacttttgcacccttttttgattttgtgccttatccgaaaaacccgcttttccgagtcgtacagcgattggtccaccttttctacacgctttccccccccccctccgtttaggagcagtacgggtggactgtccgtcacaacgacgacccaaacagcaaaggcggcggcggagggcatttcgctgctgccgtcggtggcgccattggctccgccgatccgttgatgaaccagggcagcaacaacgccagtggcaatggtgctaatgcaatgcctatgccgccaaatggtagcgctgcctttgccatgtcgccctccacgtttgtgccgtcgcatccgtctcccctcgccacttcgtcgtctcctccgcccgaatacgcgccgccgcctccactgccggcccatggcgctggtgtttaccgacagcaaacgacgggcggagtgcgtttttggattgcataaatttttcgaaatccgaattttttaaataaaaaagtcggggaaagacgggcaatctcaaaatttttattggtgtgaggaatacaaacagcaaatggatgacaaaagttgcgttat

SEQ ID NO: 35027 - DNA, 713 bp, Heterodera glycines
tgcgtagtatgtatttgtaaaattaataaatttttcttttctattttctataaagaaatatttttttttataaagcttctaattcaattgtagtgaaaacgccaaaatccaggagtctggaacttcttttcaacaatgaattgaaaaaaacgaacgcatttttatgttttatttttttgttcgttatttgataattattatttaaaaatagaactcaacttcaaaaaattcttaagtgtatctttttatttaggtgatcgattatttttgagaatactagtaaagcatgatcttatttcctgttgggttttaaagaggcaagcaaactctatgcgaagtgcataatatttctcttttaaaattttcaatttatgagataaatttgtgttcgttaatttgttaattgtccatttattagattatgattattttaaaatttgatgtcaaagtttttaaacgattattgaactttaatcttttatatctgtttttcttaataagcgatcactaccacgggaatttttttccgctttggtcactaataattcaaaatctcatttatagcaaaatatcagacactgttgttgtgtcatcttacaagtcacgtgacaagggggttagataatgtagcgaattgttaaaatcaaaaaaatcatcattcttctctgtctttttttgcatacgggaggggagatatatcgtacaattaatca

SEQ ID NO: 35028 - DNA, 860 bp, Heterodera glycines
gtcccgaaaacaaaaataaatcgattttttcaagtgtccgttttggggtactcaaacaattatgggggagcaaaaatccaacgcagaattaaagtacaggctatagtgaagctattccggaaggattcggtctccccataaatctgggcgcatcggttcagggggactgccccgaaaacccaaaaaaaaattttttggataaaaattatttaaatgaactgactagataatatttaaaataggttatttctcttcctttcagtatccctgcaaagtttggtgcgcttctgatcagtttctgaaaaaaaagttaagcctaaactttttggcctgtttaaaaaggaattaaaaatttttaaaaattttattcatctccctttttgatagaaaaagcatcagagtgcctaaactaacatgtaaataaaatttggtgcgtttcagaaccctttctgaaaaaatatttaagaattaattttgcaaaaaataaataaaaacgaaagactcagattttcgaaaatttttttgagccagctagctcggcgctcatttcagtgtaagttagtcctttaccggggagtatccctgcaaagtttggtacgcttctgctcaattagcaaaaaatatgagtgatcgaattttcactaaaaaagttaagcctacattttttggcatatttaaaaagcaattaaaaaattttaaaatttaataattttcctgcaccgaaggtactcactcggcctcttcgcggcctcgtggtgggccttcgcccccccccctcccacgcccttcagagcacgacaaatatttcaacaaaaattttgaaaaattgactagagcaatcgaacgctaacggacgacct

SEQ ID NO: 35029 - DNA, 614 bp, Heterodera glycines
attaggctgtaccaaaattgtttgtttattttcctcattcattgcttcagcaaatgctttgctggggttgtccgctgctgtgctttcgtccgataaacagtcattcctttcctcttttgtgggtccttccgcgtcacgtcctctcatcactttgacaaaaactagctcaacagaagggcggctccttctgccccctcacaaatttcatctgtccgtgtccatatatttaatcactttgctgctcctcatgcgtgtcttatgaatagcctttactcctccactgtcgtctgtaaggacagaaaggacgatgagtgaattgaaatgggggggggggggaagtccaattcatcggagatgaacagagggggggggggacggaggagggatcatcatcggtcggtccgttcgtcgtccatccctcaaacgctccgcaaaaagaactccagtccttttctgtttggaaagcctttgagtcgatttgactcatcgtgcattctccttcactctttaaaaacctcttgatttactctaatcgagtggacgatggactcgtggaggtggggaaaaaagagggggggggggggggaatttatttttaccctcctcaatgaaat

SEQ ID NO: 35030 - DNA, 1130 bp, Heterodera glycines
caaaaaccaacctttttttgttgaaaatctgttaacaaattgcacccaaatttttaaaatttcccccggcggcgcctatcggcaccgccggaccccttctttcccaaaagttttttgaaaaagcactccgaaaaaaagtgatgtgaaaatcaaatctgaatttctattaatattcgatgatttagtccaaaaatgattaattgtttgaaataattgaagaaaatttgtttgaaaattttcattaaaaatttgaaattttttttaaatttttaaaatttttttgaatttttaaaatttcccggttggtcccggttcccggtttttcttgcggtcctggtcccggtcccgaaaaaaaatcgaggtcccggtcccggcttctcaggtcccggcaagtcccggttttggcaaaaattcccggtcccgtggcactctaaattaaataaataaattaatttttatatatgaaaatagaattatatcacaaattaatttttgtaatttagctgtctttccctaatttaaatgtttgtataaaaattttttaaaaatggtaaatagtttaaatgttctttttattatttgaaacatcaaattctgaaatgttgatctttttttctaagaatataaattagatttttttagaaattttatgatttttttttcattttattactctttggcgaaatttacgaaaaaagcgacttaaaagcattaatgataaaaaattaatttatacagtatgctcaagcttttctttgttaaaaaaaataaattaaattttattaaataaaaatgaaaaaatacaatgtatatatttttaattaggtaactaacaaattgtcaatttattaaaaggatcaatttacagcaagtgattcgattaaaatttattccctaaaataattttttaaaaatttaccaaaagaaagtatacttttgagtagcatttcataaattccgccaagggtaataaaattaaataaatgcataaaatcatatatttgtagagtgacaaattcagctgaatagtgaatgaaaatttttgcatcgttttgcttttcggataattttccaagaatttcggtgttattgggattcgtcggcggagctaggatttctatattaataaa

SEQ ID NO: 35031 - DNA, 1144 bp, Heterodera glycines
  unsure (1)..(1144): unsure at all n locations
gatattttagcgctcataatgggatgtataaaggcgatgtagaaggaatgggaagcgctaaaatgttgnnagaagcttttgnagcgtaattacgattttacttagaccattttttctaggcttagatcacatgcgattttcggcactctgataattttagcgctcataatgggatgtataaaggcgattgtagaaggaattggaagcgctaaaattgtttgagaagctttttgagcgtaattacgatttttacttagaccattttttctaggcttagatcacatgcgattttcggcactctgataattttagcgctcataatgggatgtataaaggcgattgtagaaggaattggaagcgctaaaattgtttgagaagctttttgagcgtaattacgatttttacttagaccatttttttctaggcttagatcacatgcgattttcggcactctgataattttagcgctcataatgtgatgcataaaggcgattgtagaaggaattggaagcgctaaaattgtttaagaagctttttgagcgtaattacgatttttacttacaccattttttctaggcttagatcacatgcgattttcggcactctgataattttagcgctcataatgggatgtataaaggcgattttagaaggaattggaagcgctaaaattgtttgagaagctttttgagcgtaattacgatttttacttagaccattttttctaggcttagatcacatgcgattttcggcactctgataattttagcgctcataatgggatgtataaaggcgattgtagaaggaattggaagcgctaaaattgtttgagaagctttttgagcgtaattacgatttttacttagaccattttttctaggcttagatcacatgcgattttcggcactctgataattttagcgctcataatgggatgtataaaggcgattgtagaaggaattggaagcgctaaaattgtttgagaagctttttgagcgtaattacgatttttacttagaccattttttctaggcttagatcacatgcgattttcggcactctgataattttagcgctcataatgggatgtataaaggcgattgtaaaaggaattggaagcgctaaaattgtttgagaagctttt

SEQ ID NO: 35032 - DNA, 939 bp, Heterodera glycines
agattttaaaaattagcgattgtcctctttaatcatttaaaaattttgataaaaattggccttttcccgtttgaacaaagattaaattaaataatttgtattaatttgtaaaatgatttcaatgcttttaatttgtccgataatttggtattctgtcaacaaaaatcagtatgaagctttttcttttaattatatctgatcatataaaattaaaaattggaaaaatgattaaatatcataatagataattattttttcaaaaattttgtttgattataattaaaattcattcttttcagaaattagagcgtaatctctgtaaataaattatcttcaatagcgggacattaatatttaattattttatagtaaatattctcattattaataattttttttaatatatatttttttattctaatgtaagtatttaaaaagatttaatattttacttaccgttaaaatttttgtttttatataaatgaaataaattttatttattatataaatgctaatctattatttttgaaattattttttgtgcattaaaagtttatttattcctttttcaattacaaaatttcgaaaaactttgaagaaattgttctattattcttgtagaatttttccaagtttccgaatattttttaatttttatacctaatttatttatttttatttgattttatcatttcattttacataatgtcttttttactcattctcctttttctttattgtgtaacttaattttgaggtcgtttttaatcgatttatttattatattttaaattttagctattcaaaggtttatatgacaatcaaaaccgaatgaacctgatgttattcatttatttagtcataatctttcaatttcgaacatttttatgtctaattgattaacatttaagggaaattcattttttcatgtatcatctg

SEQ ID NO: 35033 - DNA, 789 bp, Heterodera glycines
tcattttctgtttctattttgtaagtatattactttattttatatttatttaagaacccaaatttatattattgcattatttaatggctccattttttctcttagtgatcataggttttttccttgccattagttgtttcatggctttataattttttttatttttctccatttttaaataggttgagaataatcatttttcaaatgtataattccatatttctattctataataatgaatttaacttatatattttaattttagcgaaacaataacttcaaataatttaagtaatagataaaaaatcttttttaatcatttaaatttaaaaaataaataaattattgaaatttttatgaactgctttttttcattgtttatttagttttcagattaattttttatcagttattttggcaatgacctgctgaaaattttgcattcagttttatattattgtatcggaatttcttccaaaggtctatcaagatgattggccgacatttgcggcgctgacatttgcggcgctgacacttgcggcgcccagtcaaagcgacacttgcggtgccgacgtttgcggcgtgacacttgcggcgccgacacttgcggcgacgacagatgcgatgcccagtcaaaaggacttttgcggcgcccacacttgcggcgtgcagtgaaaatgacatttgtgggcgctacattaaatgactcgagaaattatttgaacaattcttttattaaaacacgtgtattaaatcactcttgcagtcctattcttcagagcctttcat

SEQ ID NO: 35034 - DNA, 200 bp, Heterodera glycines
ttctgctcgtctgtcccgtcgttgttgcccatgttaataagatcaatgtcgctaaacaatggggaaaacagtcaataaaaatgccaagtaaaaattttaaatcagtttttttgtggaattttttttggaaaacagtacttattaaaaacagtacttttcaagtttgcataatacttttagcataatcaagaatcctttat

SEQ ID NO: 35035 - DNA, 721 bp, Heterodera glycines
gggttcgaaattgagcctaaagaaggggccggattcataataagcgcctcgaattacccctgaaaataattttctaaaaacttatttaaaattttttttcgggaccaataatctttaccattgccgaaaattcgccctgttcagctccgtcagttgcgtgccgagtttcgctttcgcggcgtcaaaggcgccgtcgggacgcaggacgcgttgatgcaactgttcgacgaggacggggaacgcgtcgccgcgttggacgccgcggtggcgcggaaggccggcttcgagcacagtctgttcaccgtctgtggccagacgtacccgcgttatcaggtgaacacatttaatgtgactgcataattcccacgcatttcttattatggcgatattttatgatcccccgaaagtaatttttttaggttaggtattttgactatttttggttcctcaaaaactttgtcattggtttgaatttgagtccgatttttggtgaacaagataaaattttgcacccaaaatttaaaaaaatatattttttagcgatttttttttgaaattttatgacgaattagtacgttttcgaaaatttttacaaaaatcgctaaaaaatttttaaaattttggggtgcacccgaatttggcattggtccatgggcacctttcttaaaatgttcagaaatgattgattgctttcctcttttgtcaggaatccgatattctt

SEQ ID NO: 35036 - DNA, 866 bp, Heterodera glycines
aacgtacaatggatgaagtctctacgccgagttctaaaaataaataaatacattaaaatgtaattaaatttcggagattttgctaacaataaacttcggctctaaataaataagggggctaatttttgaatgagttcgacttttgtgcgaatttggacgcagagttaaggaatttgttgaaacgaaagcgacaaaaacccaaattataaatggaggaaagcaatcaacgctcaattggtagattcgtcaccgatttttagtttaataataaaaaaaactaacaaatccacgatttttgcggaagtgatgaaacactggtggagatgataggtgagcaacggctccttcaacgatcgcaaaaaggttttgactgccgacgaaattgttttgatttcccagtcggacgcaaaaacggtgctcatgaatttgtcactttttttgctcgggtccagcgcaagttgcatcaacttctgcaccttggagttgacgccacaatttcttaataaatgggggcattttatataatatcagaatcagttttttccaaataaaaccggatccaaaaagtggggaaattttggttttttggaagcaattccaagggttttacgcgtcatttagtgcattaatgccgaaagtccacaagttcttaaaccgggttcaaaattgggggaaacgatctgctcccatttaaatcacaccgtcgcacctgtaaatgccctgctctttgatgcccttttcctcaagcaccgaaatgcaatgacgaacaaaagcgaagccacgttcatcaagcgaagctataaaacatacaaaagagatgaatctccctggcatcaccgttcgatggggaaaaaagtcacttactc

SEQ ID NO: 35037 - DNA, 641 bp, Heterodera glycines
gttaatgccccgcgggggacggatgatccgagggattataattacgctaattgcctctttaatattaatattccgtcccggcccccctgcaattacgctgagtggccgtttggtgccggttgttgctgttactgctccgttttgtggcgcctccgctgccgcatgacgccacgcgccggccgcgccacttggcgccataaaagcggaagcggtggaagaactgcgcgggaaggcgacagcgcccgaggcgcggtgatggccattacccagttcgctggccgatttgacggcagccgcggccgctgtcgcgcggtgctggtggcggtggtggtggtccatcaaattgcccagcgaggcggcgttggccaacggtgccgacgcggcggtggtcatccgacgtccggcacgagttgagcaacgaccacggcacacagtgcagcaggtgtttgtctgcaaatttggagggagggatttgttttaaagagccggaaaattttcctggccccgattatatgggcatacgtaaagcacaataatattggaatttaaattaccatatttgaatttaaaatttaaatcacttttttgacttgaaagtattgtggggaaggcaaaaaattatgaagatcctccaaacaatg

SEQ ID NO: 35038 - DNA, 514 bp, Heterodera glycines
ttctcagatcacaaaaaaagacaaattctacccattttgaggttaaaatttcaaaaatcaagttaacatgaaggtccggcggtgccgtcaggcgccgccaggaattttttttgaaaattgtaataaaatatgataggaaaagttgcaaaaatttcaaaaaatttactatttttttcaaaaatactgaaaaaggcatgaaaagtcacaaaggtcaaaaaaggcacgcaagttagcaaaaaaggtaattattaatcctgcagctcaaaataataataaactgaagcattcgttttaaaaatttaaaaatatattcattcttaggagtggaaatttcgcatttcgcgccaaaaagcgaaatgcgaaacgacaaaaaatgcgaataatgcgaaaagcgaaacctaggcccatccccgacatacatgatcaaggggtgcgccggcgcacccccccccccccccccctcgttcgtcgtaaggggggcaggctgtaaaagaggaagggggtggggtggggg

SEQ ID NO: 35039 - DNA, 620 bp, Heterodera glycines
tgaaaagatttaatcgaaacaaataattcttaccgataattatgcaaaaaatttaaaaaatatattatttttaacatttatatgaaaattaatatttaaaaattaatttaatgttgaaagtattttttaagttttactttaaagcattaaaaaaattttaagtttcaaaattgttttttttcttcacccttggcacaatgatgcccgtggctggtgccatttccacaagttcggcagctcccgcagcgtcctgtgccaatccaaactcaacgtcgctgtcgttgtcgtgctgtgccgttggtggcgacgcgtacacgacatgcgcgagcagtacaaacagtggtgcgaacgcgcgcgcggtagcgttatactgaacgtgaaagcggtcgcgtgcaaagcgcggcgagttctgtgcattttcgacattttcggtgttgttcagtgatgtgaacagttggattgggtgaagcacatattttggcattcctgatgattaatgttattttaattaagtgattaagtgatttaattatgtaattaattatctggataaaaaaatttgctaatattaatccaaatattattttaaacttaaataaataaatttaaaaatttatttc

SEQ ID NO: 35040 - DNA, 303 bp, Heterodera glycines
atttttgaggtttttggccataacttttttgtaaacttacaaaattttttgaaattttacaggctaatagagaatctgaagagctatcaaatgataacaaaaaattttaatttggttgatcaggaaaaaagttgttagcaacggcgccgaagtgggcggttcccaatggtttgtgatgatttaatttttatgaataattattttctaacttaaatctttcgataattaataaaattgcatcaaattttatttacaaatgcacatatttatttagcttttttgaaattcataattttgttcctt

SEQ ID NO: 35041 - DNA, 1200 bp, Heterodera glycines
agtgcatacatctcggatgaaaaatcgcgttcaaatttactatttttccggcaaccccaagcatgaaaaccatgaaataatgctttcacagtttgcaaagtccaaactctgaccccctttgacctcccccaaccgcactccagcagggggggggacgaccttttttttgatgttcgacattcgccacgattttccaaaaagggtaagataaggcaaccggaaaatttttggaatttttgtcgatttttaatgaaatttcttaagaatatggtatactttttactaaattctcacattttttattaaaaattttttactttttgcgttacgggggcagcgctacgcctttgcccagggggggggataaaaattctccaccaccaaaaaaaattttttttaagggggtgatgggggaaagggtatagtgttcccattgagttttgtgctgactgactgactcgatgccctcctgctccgcaatttccaccacatcctccagcgccatcacaaacagtttgccactgccactggctgcccatttggtcagcccccgttggaacagccaaacgcggtcctcctcgtccgccacgtagcggaacgcgcgtgagtacacgctgaacaggtggccgccttgaaagtaatgtgatgggaaatgactaataatttcaccccttgcctacttcacacgtcgggggagttgcgttttctttttgaaaatttgattaacttctatattattgtgcatcggttatcacacatttgcgcaccgaacattcgtgagtatgtccaaaaaagggttcaaaggtaagtttttccattgatggtagcttaaacagatttaaataagcgagtttgaaggtagtaaatttttgaaaaaatagtcaattattcaaacaacagaattaatgttcctagtaagctagaagtctgtattttcttaattttaattctgtttaggctatcagggacatacattttttagggggggggggggggttcgcagaaaattttcctggcggcgcctatcagcaccaccgaaccccaaaattctcatttttcttaaaaaattggcttaaaatcgcaaaactagccatttttttgacaaaatttgttaacaaatcgctttaaaaatttcaaaaattttcccggcggcgcctatcggcacgaccggcagcccccccccggtctccaaagtttttt

SEQ ID NO: 35042 - DNA, 1585 bp, Heterodera glycines
aaaaaagtaattactcggtaattaatgcaaaaaccccatacaattagagctatcggcagtgtttgaacgatacatttcgacactgtttgacccaattggacttccattcggccgccacctctgccacgagacaatggcacaaattcgaatgccatcgtttgctgacgttgagcaaaagcactgagcaaactgagcatcgaatttctgttgctgatggacaaatgaaatgtccattaatgtcgaatttcgatggaagagaagcggcgggtgagaagagcaaacaaacacttaacaaatcaaggaattctcagcaggaaaaagtttttgaaaaaaagataacgaaaaatattggataaattctgctaacaaaattcgtgaaaaattgttaataaattttgttaaaatattttttggaaaatatttttttataagagaacgaagtggattcatctactgctattgttgaagaatattattattctgaggaagaaaacgacaacaatcatcgccagcgaagcgatggaaaaaggcctttgttttgcgcaatattcggacaggtgtaataatacttttatatcttcgaattatccgtggtttctttatcaaaattttttccaaattttttaattctttccatataaagcgattaatcagacgtaaaaagtgcattaattaatcagtcactctgtcttaatttagccattaatctgtgtctatcattaattattaatttataatctctttaagttgcatcttcgtcctttccatggtctgtccctctcccaaatcgatcagtgcgcttttgctggcgctcgaccactcattgaccatccctttttcttggtccaaatcaccgcttccgatcttttggccaatgacagcaaaacaactgatcaaagcaatgaaacgaaattatttggcattacaaaagtcagttttaacgcataaaataaagaaacatttccaaatttgaaacgaatttattacttaatgaatttttacgctttttctccaattatcaaaacccaaaacaggtggcagtaattattcgaccaaaaaagggatgtgtaaacgaccgaaaggtttatttggcggaagcctccgctgatcagcaaaatgatgctcttcccgccacatttgcggatggatcttcagaaactggcgctattctttcagggaaaaggtcgtttttcaaacaaaaaatgcattaaaatattaaatttttattaattaaatttttaagtgtatttattatttttcatatttttgttccattttagagctgttgaaatcgtacgaagtacaaaagaaactgcaaagatcagtttgaatcatatcgacacgcaaatttcaatcatttccattggaaatcttttcttcaatgtttttgtccgtcttcgttctccaaaaatagaaaatgtaaaagtaaatgcacaattatatacagtaattaatagtaattaattccttttattgcaggcatttcagtcatcgctttgtgtccaaaattgtccggacggcgcaaaaatggacgaatattcggcatttttaaacagcaataaagaaaataaaggtgtctatataa

SEQ ID NO: 35043 - DNA, 1044 bp, Heterodera glycines
gccaatccttcgccgcccgtttaacaggatgttttttgtttggttggactttgcgttttagtagccaaaaagaaaagcaaaataaatgaaaatcaaaaagaaaacgaacgaacgaaagcgacgagaaaataaaaagcgaaagaaaaatgggagggggtaaaaaagcaatgcaaaatgcaaagcgttaattattatttttcaattaattactcaattaattaccctattaattattacattaattaggcctaattgggtgggatggcctttttgggtcgccgtcccttgcgaatgttcacacatttttatgctttttacccattcaatgcgcggcgcactcagttcaccaaaaatacgacggtcgagcagctaaaaaacaatggaacaaagggaaagcgaaaagagagagaaaaagaaaaaaagacaaaggtcaaacattttcaggtgttttttgccgaaaaaagcggcggaacaaaagacaaaaaacgaacgaacacaaaaaagtgaaattcacaacaaaccaaaaaaaaggacattaataaataaaaaattaaaattagggcgtaaataacaattgaatttgtaaaatttaattattaaaaggaaaatatcacaaaagcattaattatttgtttaatcgatggccaaatcaatgaaaatctgagaaaaatgcaataataataattcagccattcttttgccctttatgcggcgaaaacattttccgtttttatgtcacatttttactttatcattcattcaccgcaaaaatgcaattattttactgggggtgttctgcctgcccccccccctccttttgctgattaatccgctaataaattccttattatttccaaactttgatcagaaattcaacccattggtccgttctctgatcataatcactttctcactctgatcagagttctcccgggctgatcagtgttttccgatggcgcccctctcacaaaactcaccggcgagtcgagcaattcgtagagccaacaaattgtgtcgttatgcgctatcactccattcattccg

SEQ ID NO: 35044 - DNA, 747 bp, Heterodera glycines
caattgtgctaattgccaaaaaatgaaccgacggtaaggtatttgaaaagtcacacaatttgtggattccttattcaaacaccacggatggccagcggatttgggatgtttttgttcgtgaaatttggccaattttttcggcaaatattcgccatttgtgcttttcccgtcgtgatcatttggacaatttgtgtcgtcgcacttcgccaacaattctcactgatctcaaccaattgacttcaatctattcctgtgatttgtcgcccgctgcgattggtgatggttttgatgcaacaatttctgctggccaagcattgtccaaatggttgcacattccgagaaaagatggccaacccaagcgattgcgttgcaatgataacaaggaacaagcggacttagattggatcaacaatttcaaggaggtgtggccccacattttcaacaaatcactgattttgagtgcctttttttccaaattgtttagcaatttctccgtgccaatgccatttcttcgatcagttaccaaattcatttttatgttcgcgtgccgtcaatgccaatgatgccatttgaatgtgtggtgaacgaatcgacaaaggaaaagctgacattcgccaaagcaaatgaatgggacaaccgatggataatgaaacgatgcaaaattattggggagactgcggcggttcagcagcaaaagaaatatgaaaatttggacaataattttaacaatgtgtccaatttggcttt

SEQ ID NO: 35045 - DNA, 1514 bp, Heterodera glycines
  unsure (1)..(1514): unsure at all n locations
cttctgatgcgcgtgccattgttattgttgttgtggttttttcctccacttcttgcgacaacgccgaatttggctgcgtttcttgctgccgctgctgtttttccggttgttccgttggctgttggggtcgttccgactctttttcctcttccgcctcattcacttcttctttgtcgtggtggtcttctttttgttctacgatttcctcgttgtcagcagcagcaatttccaccgccgctgcactgctcgccgccgtcgtcggagagttttccgcttcggtgtgcgtcgtcgattccaagagaggccattgttgcggatttatgcggggtcgaaccttcaaaacaatttaaattttaaataggtagttgatcaaatgggtgcactcataaatctcgcctctttaatttatttttaaattttataacagaaatttttcaattaaaaaaatataagaaaacttttttaacgaaaatgtcataaaataaaatttaaaaaaagcgctgaaaatttttcaaaatttttaatcttgaaattctattacaaaaaaattttctaggatttttttcttgaaaaatttttaaattagaaaattgataaaaatgcggccgcgagattcgaacggcaagagtccgatgacgagatttgtcgcatccccgaaaaaattcaattaaattgcccgtctccccccaccgacctcctcttctgataaaccctgtcaattgtctgtaccttttggtggtcctcgttcagctccactttgtcactgtcacacaaactggagacaatgaaattctggtccagcgtcagtgaacgaacgcgcgggaagctggcaaccaaaccgagcggcaaaaagccgtcgatgtccattttccggcgcaggaagaagtccttctggaggttgtcagcggagaagtagtactcactgaagaaaacatattatggatgagnngatcagatggcccacagtaagatttaataatttataaataattaaataataaataattatataaatgagagtgcgttgtaagaatgaagatagaatatatttaggatttaattacacaaatattagatacttaatgaaataagtatatgctgaatttcgcattatctaatagaatgaatgtagcttgaattttagcgtacgactccaaccgatcaccagtcccaactgtcgcgaactattcgtaaataattcctctctctcccgaaatacttgtatttgctagttacatgattggttcgtcgcttgaagtcacccaccccgcccttctcgaaattcctttgccaacattagcntgcgctttgtttctttacattcatttgtttcattactaatcatatgtcacttttcctccgttttctgcccaactttcttgtccaagtaacccttaacgcaacagctggccaggctgtttgcgttcagtcaaagttcggccacccctccattcattcgtcattccattattcattaaacatttgataaacaattcgggaggacccaagttaag

SEQ ID NO: 35046 - DNA, 1602 bp, Heterodera glycines
  unsure (1)..(1602): unsure at all n locations
tccaattaataattttttgttattgttcatcacgataaatttgacatggtgtaacatatttagatatatttaagttgaaaatgcatacaaatacggtaggaaaagaattcctcttattaaaataggaaaagcaggatttaagctagaacttaaaaatttgaaggaaatttgctgataaaattgacttaagtttcaaaaaataaggaatattgttttcaaaatactgaaaagcccaaaaaatataaaaattattttttaacatttttaaatttaaaaattgatgacaatcattgtatgttatggcatcgaagtaacaatcccatccgtggtataaaaaaaaatttcctaaattttttgtttatctcattaatgccaatgcacacgctttgacacttcatttttctcttgatgcctattaacagtcagatgttggcacggatgcccgctggcatagccattctaaataaaatattgtaaaatcaatttgaataattaaaaattcaccaaaattttaccccgtattgattggcttcttcttggtgttgctctcgtccgtcatcctctcccattttcactgtgccatagtccgtgccgtgccaatggtcatcatcgtaatgatggaccgtgtccggtaaggtttgcagcacatttttcagtcccagcgtcagaagcgcaattgtttcgccctcatttgtgctccgtcgcttcagtcccatgcttgggatttgtctccccgcagcaccgaacgacatggcattgatgaacatgctgcggatcgtcggcgtgttctgttggcaattcaagcgctgttttcgccgtctgacagccggaaaatttatttatttaatttgaaattctttatgtgtggacattaggattttgtcgataggaatggaatttttagacccgaaacccagcaaaatagctaagatgaaaagtgataataaaatcaaaaattttcaaaataaaattgtataaaattatttggtaaattaataatttttttttgaaaaggtgccaatttttagagggcaaaatttttttgaaaattaaaaaatcatttctaggtgtgcttttaacattttattgcagagttctgtagntttcaggtcctaagaatttatgaaaaaagtagcgtccctattcatacataactatacttcttataaatttatgtttaaaattttttaattaattttaaagactttagagatatttcaagaaatttactctcttctaatagaaagggctatgttttcgaatggattctcataaaaaataaactttgaattttttaactatgaaatttataaaaaaaaatttgctctaccattcaattaccgaatcacaatgacaacagtgatggccagtagatgaactgcagcaaatgcaagcagtaccatggcccataatattggtgatgatgtaatggtgtgaaaatttgtccatcgctggtataattctgctgttcaaaattattgcctgcttgatcaagttgatgggaaggaatggggcaccactgtttaaaaaaaaaaaacagtgccgaattaaaaaatgaaattttatggcattttttatttttttaaaattttcctttttttt

SEQ ID NO: 35047 - DNA, 752 bp, Heterodera glycines
agagaggagaaggggagataaaaagagctgcgggaaggccatggagaagagagaggtgttggagagaatggaacagatgtgcgtgagagagagatctgagggggctataccccccccccccccccctactaccgcatttgtgtagggactcatgcgaatataagcgaacataaagtcgtagagaatgactttctgcagccacaaatcgtacacggccacaataatctgtaaaatgaatgaaaaatttcacaaattttggcacttgccggaatggcaaagcacacgccaatcaccgccttcagagagcgaatgctcaactcgacgttttggcacacgtaagaggtattggtcaacgccaaggacggggaagaggaaatagaacacctaaaaaggagaggggcagggtaatcagagacgctaaaataacaaggaaatgacagagaaaaaggaagtgcagccgtgagtggtgttgtagagaccggtgtgctataaatcgctcataaacaaggacgagtctgactctgcaggtgagctgaggtttaaattatttaggtattaattgtccaatttgcttttgctctctgattttgtgcaattctccacacacagacgtaggaaaagaccgtgtatcgaatagtcaatgctgagaagaacgaaatccataccatcggaacagattggcactagtcattcccaaagtggggaatttgtctcgggaagtgatctgtcatggcctcagccccatgtaaagc

SEQ ID NO: 35048 - DNA, 979 bp, Heterodera glycines
ttggttgggcaatcttttcaccgaaattgacaacaatgacaaacaatccgcttcaaactcatcgtcgcaccacacatcactgcgcctaatactggaggacgatgacatggacattggacgtaatgagtgcagtcaagatgctgcaccatcatcctattggtgaaactgtgcaattttctacccacatattttattttccattcctcattttcaatatagattgcatcttcgcttgcttaattgtgcatttttcaacctaaaattgacttcttataatgcttaattattttaaaactttatcttcaattctttaattatgcattaatttttattaaaaacgaataaaatggtataaaatgtacacgtaggtacaaaagaatagtcatgtgtgtgtgtgtgagagagagagagagagacaatgtacaataaattacggtgtgtgtccaaaattcagcacattgaaatcagcgcctattatgccctttcccacaaacggacgatagcacttttgcataggcatggaaacgactcggcctccctccctgatgttaggtcgaaggaaatttgggtacgtgactattattggctcgtattcaccacttgtcgcctaccggaccacctcctctttgaagttctcatagcgcatcccttggttgttgatcacatcataattcagcgtcagtccgcgcactttgagcacatggtccatttgggctcccgcctccgcgcccttgcgtcgcagacacaggccgtactaatgcgcggaaaaattaaaaaaacaatttgcacagatggtaactttacttgttttgtcccaccactgcaaaattccacaatgtcgtggtctgggtactcgtccgtgaactggcccaggtgggtgccagttttcagtgggcaccgcttctccgggtggaccagaatgaggctgtcagtgtctaaaataattcgatttcatcatcggttttttgtgcattgttgc

SEQ ID NO: 35049 - DNA, 989 bp, Heterodera glycines
ttaggcacacataggtcactttttatttatggtcacaattttgaaattgtgtatgtcctcaaatagcgtttgggcccccgtttttgggcccccgcgtttggcccccgtttttgggccccgggatcgtttgggccccaacccaaaaatagaaaaatgtgcttttttaaaaattaagattctaaaaactaagcctgagggatccctcttaacattcgctcattttttacaattttacttattccaaatcctattattttttaatagttaaccaatttgatgtacattctgatttggacatttttcagaaatggctaacccaattgcaaccaaaaaacaaaaagtaaaattgtcttacgaaggccacctttacaccttcgctaaaatgagttctgatgggatgacaaaattttggagatgcgagttcaaaaacagcaccaacaaatgcaacggccgaatctggacggacctccacgaccaattcattcgcctcgcaactccgcacaccagggatgggccaaattgaaaaataaaaagcgaaatttgcgaaactgaaaaatgcgaaatgaaaaaaaaagcgaaatgcgaaaagctaaaatatgcgaaaatgcgaaaggcgaaatgcgaaagcgaaattttttctgcaactttttaatagttaaaatcataaagcaaaaattattttttttaattttattccaaatttaaaaatcaataaaacgcttttttgaggcgcgctttttccaaaaaaactttttggtaagagggggcaggcggcgccggcaggcgccgccgggaaaatttttgaaaatttgattaaaatttgttgacagattttcactaaaaaatgatcaaattttgtgatttttatataatttttctaaggagaaataagagttttggggcgccgctgaacaacggcttttcatcaaatttacaaatttttgcgaatttggggccattttctaaaaaaaaataaggagttttggggg

SEQ ID NO: 35050 - DNA, 865 bp, Heterodera glycines
aaaaagaaatagggatttttgggaactatttttcaaattttcacggacaaacccgtactggaaaattccaaggaagtattgggttcactgctatataatttcaagggccgactcagtccacaaggatagaaaaaagaaatagggattttggaaatatttttcaaattttcacggacaaacccgtactggaaaattccaagaaagtattgggttcactgctatataatttcaagggccgactcagtccacaaggatagaaaaaagaaatagggatttttggaaatatttttcaaattttcacggacaaacccgtactggaaaattccaagaaagtattgggttccctgatatataatttcaagggccgactcagtccacaaggatagaaaaaagaaatagggattttggaaatatttttcaaattttcacggacaaacccgtactggaaaattccaagaaagtgttgggttccctgatatataatttcaagggccgactcagtccacaaggatagaaaaaagaaaatgggatttttggaaatatttttcaaattttcacggacaaacccgtactggaaaattccaaggaagtattgggttccctgatatataatttcaagggccgactcagtccacaaggatagaaaaaagaaatagggattttggaaatatttttcaaattttcacggacaaccccgtactggaaaattccaaggaagtattgggttcactgctatataatttcaagggccgactcagtccacaaggatagaaaaaagaaatagggattttggaaatatttttcaaattttcacggacaaacccgtactggaaaatcccagaaagtattgggttcactgctatat

SEQ ID NO: 35051 - DNA, 624 bp, Heterodera glycines
  unsure (1)..(624): unsure at all n locations
aataaaattttancaatttgaaaaaaacagaattataaataaattttcaaggaatatttttttcaatgttaatttttttacaatatttattaaaaaatgataatttgtattgtaaatgttttgacatttttcctttcctacatttccccgtaattattgctgaaatggagaagttatgggaaaaaattatgatttaaaaaagtaatttaaatttaaaataatgattattattgtaattaaaagagagaatttgttcaacggattaaagaattttaaagaatatgcgaaaatgggtatccgaaattattagtgaaagagttaagcatttctataaatggaaaaagaattggcattaaattaagcaaaaggaaaattattttaaattcgattattataatgggcataaaaatatcgttgttttagcctcaaaacaattgtttcaatattaacatttcataataatctaatctgatcataggtcttcaaaaaatttctgttattttatgtctgaaaattcgcactttttcggtctgcctcgcctggtgatcaattgaagtgaaaagattttttacatatttttttaaataattcgaaaaaattgttttaaaatccttcaaatattta

SEQ ID NO: 35052 - DNA, 828 bp, Heterodera glycines
cagcttcgttttgcccttctccatttctcttcgtccatttcacaaaaaagcatttgcatttttttaaacctttgaattaatgtggtaacacaaaagaaattaatttgtttggcattttcacgtgccgtcaatgactcgtaaatttgggtcgcttccccttggtcgaattttggcattttccattcgccgtgccacccgtcgcacattcccttcccaaagtccttaattaattaattaattgcattttgccattaattaattatgagtccaatcgtcttcaccacactttaaaaaggatgtgcacaagtggtgcctttctcagcagtgtcgtccatttttcgctgctttttcgcatcgtttcgttagagtacaaaaacaacacaaatttgaacaataagaaaatttgcttttcaggtttcaaaataaggtccacattttggagcagttcgtcccaatgtttgcctaccgccgacgcctccgcaacaacggacggcgaaagtggcggaaattcaaatgccaaaatggacgcaagcaaaaccaattcttcgcagaccaaccgtaaccaccacagaacctatgaatttttgtcacaggctaatcattttgattcattaatttgtcagtgggaattgtccttcataattccccgccccccaaatgctaatttaaatttggcaaaatgccgacaaaatgtttgccaaatcccatagaattttctccctcccattttgtgccactttctcctcacttacccccaacattttgatggtcataacttttttagcgcttaccatcagatcaatttcgaattgtccatatcttccagaa

SEQ ID NO: 35053 - DNA, 1077 bp, Heterodera glycines
taaacagttcgaacccggaggacattgagtcacttaaacaagcattgaaaggagcactttacgaacaagaggaggagggacagtcggaccatttcaaggcggccatctgatgacagagggaaaaatggcaaaataaattaagacggttaattaacaatgggtagatcattaacataatatatcttttggttattttggcacatttcactatgaacatgtcaatttttaaaaaggacggacaataaagttaaacagcaacattgaaagcttaaggcgtacctaatcatacgaacaaacgttagcaacttggttgtggagtacacagctaaatttatatatcttattcttgtgctaattgatttagttatctaaaaaattattaggctctaacttagagcaaccaatactgctgttcttatccccgcctgattccaaccccggcgaattggggtcggttatgactagggagtccaattatatgcacatgcatatttttttcctggactgtgtggggcctgaaacgcacgaaaaacatgtttttagcgtgttttgaagcttctaggatgactttccatatgcatgttttgcatatttgtgcacatttcgcgatttatgtgcatattttggcatttcgtgcatattttatgtgcatattttggcgtttttccaaaaaacctctaatagatcggcccccaacagacaaattggcctttttgacctcaaaaaccggaaaattttccaaaaaataattttttagcaaaattttcacgaaaaatattgaataaataaattttctcaaaaatggttaatttatgtcaaaaataagcaaaattttgcttttcaggttgatttttcgctaaaatgagtaaattttaagctgtatcgtgtttttttctcctaaaatgatttttaataccacatttagccatttttgaagattttactttatgtttaacaaatttgaagaaattttgagaaattacaccctcaattggaaaattttatgtgcatatttttcactttttatgtgcatatttcacgatttttggtgcatattttatgcgcaatattttgcga

SEQ ID NO: 35054 - DNA, 1035 bp, Heterodera glycines
gattaccagcaaaaaatgtcggataatccaaacgaagcagagaaacaaatggacaaggcgatgtaatattcttaatttgaaatttccatggctaatcattttgcttttccgttttcagcttcatttctgccgattgttggttgggagtgttcgatttgcttccgctttctcagcttggactgggaattgcattgatcagtcaccgatttgactatttcgttgacgaacatttcaaaactcgcaaatggaaattgagaccaattgtaattcgacacaaaattggagaaaatggctcaaaggaaatgcaaaattgtcaattccgatgaaaaagctttgccaaatccacaaaatccgttgccgaacaaagtcatcggattcagtggcattcagatcatgtaaaaaaaattcaatttttaatgattggtaccaatcacactttcttatgttttcagcttcatcgaccaaaatgtgctcattttccttcgccgttttgactgttttttcgcctcttgtgcaacaaaattggcaattcgcactgaaaatattcgtatttcggagttccttctgctcagaatttggccaatgttcaaagacaccacttatctgttgtgtttctaccctatcgcttttcgtctaatccgtcaattggcctcgtccattctcaacgaatttccatcccttcgcattgttgctttccaaggcgccattttccccgcttttccgcctgatgacagtgccaatgcgttggatggccaagcggtggccaaatggctgtttactcctcatcccagcaatttgatgaaggcgttgtatgtcacaattgagaactcatcggttgaccaattgttggcaacatttgaacaaatcaaagcggtgattttttgtccaatttaattcattttttaaatattttttgtcttttcttaggcattttccatcgcttcttctcctgttgctttcgtcatttctattggtctttccgtcgtcctttccgattgactccattttgccatttaaactgaccaacgaaatgac

SEQ ID NO: 35055 - DNA, 927 bp, Heterodera glycines
ggggggggaatgagaaattcaatggttgaaaatgtgaaatttgtacaaaaatcattttttatataaaattaaatatttttttttttttgtaaaaataatgaaacttcataaaaaaacatattgaatgaaagacaatataaaatcattttattgacataaaataattaattggataattagttggagccattttatacttaatgttttaaaaaaaaagaattaaattgaacaaaaaattgaattcgttttcaatgctttagtgttttggctataaaaacgctggtcaatctatgaattaatcatttattgtttttcaagtaggctattttgattagtgattgattaatccatccactgattcaaaatttaatttttctttcaaatcataagtattgcttttattttttaattaaaatttgcttttaaatattgtaataattttcttcagcttcttcctaataattaataattaaaaaataaataataaatgattgactgactgactgacacaatggcaattttaaaaaaatatttttacattatgagaaacaatttcttcacacaatgtcatttggtttttctaccatttcagggcaaaatttgtagctttgttaggaaatgagattcaaatgtaattaattaaaattaaatcttaaaccaattattcggattgaatcttttcaaaagtttaaaacattgtcaaacaaaattcgtcgtgtttctttatttatttacttgcatttatttgtttattaataattttacaaaaatgttctgattgtggggggcgggtgaaggtacaaatgtggcaatgtaaaatttcaaaattttccgctcaattttatcaataggttgtttaataaacaataaaattaattgcaacaaaatcgtttatgcaacaagccaaaaatggcaccaacagatcaa

SEQ ID NO: 35056 - DNA, 1200 bp, Heterodera glycines
tttttgatttcctctagcctaactttttttaaacttcattaaattttttgaaattttggagacttatagagaacactaagggctatcgaatgatatcaagaattaaaaattcagttgcttttcagctaagttataaataatttttcatcaaatcataatgatggttttttaagtaacgactccgccccttttgcatgtatgtgtgatcatttaaaacataacgtgcagataataacgcaccgaatcggtgaaaaatggatcaaaaatcaaaaagaatgattggaacgtcggaaagccattcgcaaatgttgctggacgacctgatgaggaaaaaacaaataaattgttgcctaaaaatattttaaaacaaaaccactaaaattatttatatttcaaacaaccttaccaactgtgattgcggagtcactctttaaaaaggcccaatttttcagtatggcggcattcttgaataggtccgggtcaccaaaaccttcaatcctttcttgcagtatctccattaaattttccaagacttggctgctgttttcattatgccactctctaaaaaatttatgctaatttgaatatcaaatattattgttttaaaatacttatcttacaattcaatttgttaaaaaaatgcaactgattcgtcaaataaatttttaattgcctatttttagtagtaaaactcataaaaaattaacaaaagtttatacttcagttgtaaataaaattattaaatattttacagcaaaacccataaagaatcaagaagattaatttttttatatttcaatcgtaaatgaaattattataatttagttttttcgaataagaataattttcaaataaaaagctaggggtgtatttttcgttttttatttcagttttgttaaggatttttccaaaatcatataaagtcatcgtagaaatcccaaactgtttcaaaaaggttttaatttaaaactctttaagctaaataaaacaattttttctctttaagccaactaaaacttctatttcttttgttcaaactgctaggggtttaaaaaattatttttaatataattgcataaatttactctatgacgtttgcaatttccacaactttctcattgtaccagttgttagcacgttttgcccgttcgtactgattgacgaagtaccgaactgccaaaacgtttacttcattctgat

SEQ ID NO: 35057 - DNA, 461 bp, Heterodera glycines
tctctccccttttcctctctccctttctctctcagtctttcttttgtcggtggctttttctttttttggtcggttttttcgcgtaatgcgaaaacaaatgacgacggcatggacaatgaaaatgatacacacattaacagatgaaaatgtgatgcaatgaattaattaatggaaaatgcgggtaattaacggccgcgccagaaatgttacggtacagtacgcccttttaatcgcttgcccaatcctccgcccgccccctcagggcatggatttgttaccgacaaaaaaggagcccactaatgtaatgttacactggacaactaatgagcaattaaggtagtttatcaaacatacctcaggggatatatgataacttagtcaaagcactcaaaaaggggggggggggtattagagaggttttcgaaagtctgtcaaaacgggtaattagggaatatttggcc

SEQ ID NO: 35058 - DNA, 1315 bp, Heterodera glycines
acgtcttcagggtaaaaacatttaaaatcaaattgttacatttaaattactctatttttaattaaaattacttttttcagtgcaagaacgactgaccaagcaaatgctttcagcaattctccaagctgtgcacccgacgggcgtcggagttgtgattgaagcgaggtgaacatatatatttacattatataacgggctttggggaagggcacacaaaattcaagacggcatttgtttgctttttctattcaaaagcaattctcgaactcaattggctatacaaaaccaaaaaccatatttttacgctttaaaattgagccaggtttaattcatgtgagatttatagatttttttacaaaaaattttccaagtgtagacttatgcaatgctttagtatgatatgaaagttgaaaattgaggtgctttttaaaaattaaaaatgtaatttttatttgcacaaattatgtcgctattatttttcttggggaaatttatagcttttttggttactcaaatttggatatatattatattgtttgtatgaattcccattcttcagccacatgtgcatggtgatgaggggcgtgcagaagatcaatgccaccaccaccacctcgtgtatgatgggcgtttttcggtaattttttttttcaaaaattcagaaaatttattgttttagtacccccttatttttcagcgatgatccgaagacgcgcgaggagtttctcactctgatcaaaaaatgagcgggcaaaaaaaaacaattgtggacagagaatgttaccaattatagcttcttcgtttgattattttactattattgtaagtagcgattaaacttttcatttgaatttatttttatggaatttgattgaaaaaattagagttgagcggtaatcggtaattgtaaaaaaaccggtaccggtactgaccggtaatgcaaaaaccggtaccggtaccggtaccaactttttccaccggtaccggtaccggtaaaaaccggtaattttccaacgtaaaaatttttggacaaaatttttcaaatacaaaatttttattcagttttcgcgcgagtgcctgttttttagcattagaattgttcagaagtatatgtatattgagggtgaccaagtttttttttcaaattcaggataaagaacactaaaattcagatgtagacctcaaaattcagattattgcaaaacaaggggtcagcagccaattttccaattttgcgaaagggtctccggccatgtaaattaatgtaaatcaatgaccttttttgctttcaacaccgcttttttcgcggcacgtt

SEQ ID NO: 35059 - DNA, 415 bp, Heterodera glycines
ggggatgcctctagagtttaggtgctgccatatctggcgcatcccttcctcattcccttaagtccacttcacggagacgaagaagacggagccaaccttccagcctccccctccccccccccatcattttggcgtgactacgcgccacgagctcggacaacaatgacaaatggactctcggggactccggctttagaaaaatatttactttaggattatttcagttatttgaaataaatattcaaatagttaaaaggtaagttaattaaaatgtttaataagatttttttaaaagttttatgacgcagacgatctacagcttcaaactattagctgaattttatcatttagctaattataaatcttaaaattaaatttacttacattttttttgtctctttccggcaaaaacaaa

SEQ ID NO: 35060 - DNA, 890 bp, Heterodera glycines
aataaacagacaaatgaagtttctgctgtcattgttttcctctccgccgatgatcatctgtctctcacaaacattgaatttgaaatgagtgattttctagcagaattccgaattaatgagaagtgatcgatcaatcggacgaatgggggggggcgaagaatgtgaggaattttgccgcttgagaatgaatggcaaaagaaaatgtcggaatttgcgatggattaaccctttgggcgacaaatggccattgaacaaacgatcagcggaaaatcagcaccgacttatcagaacatgatcaactcgtcaaattctccaagttagcctcctccgataaattcttcgaattgctttttcggtccctttgtttggctaataattccatcctcccccctctcgcccaagtaaaatataaagagcaaagccacgacagatgagtaaaaaatgtgccggaaaagggtggcaatgatcggtttgagaaaaacgggaaaaacatacaacggttgaccgtagccgaaggaagaccaaaggataagcagaaggccgagtatcattaacaccatagtgatgataaacacaaagccgatcaaactgaaagaacggtccacccattaaatgtaaaatccacgaaatgacgaggtttttgagtaaaggaaattgatgaaatggataattgacttaaatgaatatgccttacacctccctcctcccgataaaattgtcctcaatttttgattgagttcaaaatgaaggagagagtaaaataattaatagatagaaaaatgatttagatatttatgtagaaaataaataaattttataaaaatttgaaaagaattaagcgaggaagcaaattggtgtgcccggaaatgtgattgttttttacgctcgcc

SEQ ID NO: 35061 - DNA, 411 bp, Heterodera glycines
tctagagactctatttccctggcgacttcttttcgcactgccccccttcttctgcctccaaaatgtttaggttatttaaaaaaatttcttattccgcacaataatttttttcttatttgtctatttaataaaacgatgtttttatttaaatttgagcattaaatttatttttgtgcatctccctttttaatctggcaactttcgtcccttttgctttgtcccctaattgcccctccccaattaatttgttgccaaacaaataaatacttatttgataattgtctcgcttcctcagcaaacaaaacactccttccgtcttctgttggtgcctttgtctttttgactttttgttacggacactctctcccccctctctctctccccctctctctctcccctgtctgtctccgg

SEQ ID NO: 35062 - DNA, 879 bp, Heterodera glycines
agtcaaatagtattagactcttcttaaaaaaattgcctctaaacctctaagttttaacattctttttaaacaaaatctcaaaaaataatttttccttggtaattgaaagagcctggaaaaaacatactttatgttcatagtttgaaaatttcgaatgctgcaccgaaacggcgtgtttacgaatggcattggcattttcatttcttcttcgcccagcaatggttggcgcacaaaaagttcggcgccggtgccattcttcgcccgttgcaaacgcaacgaataaatgtaccaatggggaaccctgaattaattatttaaaacaattaaaataacaattttcgagaattaagcaccatttactcgccagaaattggctgtcgaccagcgcatcaagacggcagctaatcagtgccaatataagtccaagtttagcatggctaagaaagccaaagacatcgaaccatacgtcgtcacaaacatagctaaaatgggagatacaaatatggcactgagtaatcattgattaatcccactgatcaaacttttatccatcagttgctgaccagagttaatcattaactcaaaagttcgcttacatgcatttatccttcattatctgtgctgggctggtcaacggatcaagcaatgatctgaccgagcattatctttcgctaagcttatccaaattgacaagtcactcgctgacctttttaacatgcactgatcatttaataattcagaattatatgctctgacccagactgatcaatcatttaccattggatgatctgatcagtctgactcatctcatggtccgacccggagtgattagttctgcgctcattagctttatcactgatcagatccggctgatttacc

SEQ ID NO: 35063 - DNA, 897 bp, Heterodera glycines
ttgagtcccagtgattggaatgctggtgggttgagtcccagtgattggaatgctggagggttgattccggcgattggaatgctggtgggttgagtcccagtgattggaatgctggtgggttggttcccggcgattggaatgccggagatttgagtcacagagattggaatgccggagatttgagtcccagtgattggaaagcttgagaattgagtcccagagattgaattgctgttgggttgagtcccagtgatttgaatgctggtgggttgagtcccactgattggaatgctggtgggttgagtcccggcgattggaacgatggtggattgagtcctggcgattgaaatcctgtgggttgagtcccagtgattggaatgctggtgggttgagtcccggcgattggaacgatggtggattgagtcccagtgattgaatgcaagtgggttgagtcccagtgattggaatgctggtggattgagtcctggcgattgaaatgctgtgggttgagtcccagtgattggaatgccgcagatttgagtcccaatgtttggaatgccggagatttgagtcccagagattggaatgccggagatttgagtcccagtgattggaatgctggtgggttgagtcccggcgattggaacgatggtggattgagtcctggcgattgaaatgctgtgggttgagtaccagtgattggaatgctggtggattgagtcctggcaattgaaatgctgtgggttgagtcccagcgattggaatgctggtgggttggttcccggcgattggaatgctggtgggttggttcccggcgattggaatgctggtggattgagtcctggcaattgaaatgctgtgggttgagtccccagtgattggaatgctggtgggttg

SEQ ID NO: 35064 - DNA, 952 bp, Heterodera glycines
  unsure (1)..(952): unsure at all n locations
cattttaatctacacaaaattacccatttttaatgctgtaatgggcgattgattttttaaaatcaattttgattaaagtgtgaaactaaaaaaaattttggattttcgactttttgttcgagtccgggtcgggtttcgaaattggtcgaaattaaatgtctaattcgtgtttagcaaccctgtaaaccttttggtatcatcccaaactgaccagttgaacgtggacaactcatgcgataaccaatgacgacttgttccaccacttccttgttgttcaattctttttaaaaaacgggacatgaaaattaattatttcgttaattagtacccggatatggagttgcacctcgggtgaagatctcgtacaacaaaacgccataagaccacacgtcggatttgactgtgaaagttccttgaactgcagattcaggagcagtcccttaacagattaagaaattgtgatgtgaatttgtaatggaatttttaatttacaatttgctttttcctggtcttaaaaaattttagaatagaagtttttatgaaaatttcaaaaaaaatgtattgaaaatttttttagcgtttttatcattttaaaatgaattaataaaacgctttttatcattttgaaatgaatttctaagtttttgcaaaaatttttcttataaaaaatcgcttatgtcaggaatttaaaaaataataaattttcggaggggggggggcgaactgcgcccgttattgagccttaaaattttaaattaataataaccaaattgacaaacattttaatggaaattttgcaccagcatgtgcctcgtaaatgtcctcctccataagctttcgtgccagaacaaaatcggcgaccttgacgaccggaaacacccgaattttgtcgcccaccaaacattacgagcggccaaatcgcgatgaaccaatttacgctcctnccagtatt

SEQ ID NO: 35065 - DNA, 1167 bp, Heterodera glycines
  unsure (1)..(1167): unsure at all n locations
aaaaaattttcaataaaaaggctatttagataaatggtaatgatgttntaattgaaatgttaatgcccaaaaataagacaaataattttcctgtgcttgattattggcgctcatttgctgtgcttggaaaacagctggatcacgcgtcaattatttgatgaacttatgcatattttgtgccaggtaacaaaatggggagagagataagccaaggaaatgtcccaatatttcttttttcgcttgcttctctttcattctctcatttttgttgttgtaaatttaaaatttaaccaaattgttcatttttaagttcattttttcctaacaaataagaactcatttttaaacagattattatttgggctttattttaatttaaaatattaaaaaattacgcttttagaaaatcttcaaaaataattaagtagacaaatttatcgtgtcagatgctttcaagagtagcagcagtagaagtgaaatgtttgagaatggaacaactaaaaataaaatttccatcgcccgaggcggaagaattgaaaatgatcgcctcgaagacgtcatcatcactcatatcatattcttttaatatgatggaatgtgatgaagatgaatgtcagtggtaacggacggactaacagatgctttaaaaagaccaaataatcaaaacgccagagaaaggcatgacaaaaatggaccaccacaatgaaacaggtgggtgatgggcgattaggcaacattcgttttttgaatgccgttctttgctaataatcacttcagatcaaatgtccgtccgtctaaaaatgtgtctcgaatccacgccacagttggccatgtgttgaaccaatatttttggacgcaaattcatctgatcaatgatcaaatcagtccataaatttgtccttgaaaattttgggtataaaaggcgggaagaagtattccatcgaaacaaatattgtagcagccaaataaaaaattctattttttcaaacaaaaaagtttttgaatcatgatagtctcaatgttttattgttcacttattttttacagtgataattattttcccgttgaaaattaaaataaaaccgcaatgttagcatcagcaaaaacctatttcaaactcttatttaaactgcaccgactgagaatggtccaccgcagcagctcagc

SEQ ID NO: 35066 - DNA, 147 bp, Heterodera glycines
ccattgaatgttcagcagaatcccttcggtcagtgatgagtgtctctatgtattggtttttcatttgcttgtcattttctgtaggaattcgtttcagtggggaacaggccaaagaaatgacgtcggttgcaactgaacgaaacgaat

SEQ ID NO: 35067 - DNA, 874 bp, Heterodera glycines
gaaaagggcttttttttggggggggggggaggtacatctctcgattttaagccgattgccattcctcctggccgtcccttgtatggggcattcaacgcacctcagaggccgcctccattgatggatatgccggttgccccggtaggtactcttatcccatttccacgagtagccagaagatttttggagagggggtgttttcggggagattactgggcaaaatttttttcaaattcttctgcttggaaaaaatcaatcccccccccccgttttttggcggggaaaatttttctccatttccaacgagtctgatgctgttttttagggagcatttgcccctgtgcagccacaacaaagaagaggtcgtttcagaccgccgacaccagggggttggtaaaaaaaaataaaaatttctgaaaattctttcagtggcacttcgggacccgagacttcgagaccctagatttaggaggagagttttgcgtgaagtggaccatggtgctgataaaaaattttctattgaaagatggtttttgatttttagttgtcccgccaccgcaagagccgtggcgagagcgctggggagaccatgatgaacgcgagccgccgccaccgggggtcggggcttaagaattgatgtggatgtgtggaagaggagggaggaggggggggggcgaacgacgagacgtccttctgattttcggcgatcaattttgtttgttggaataaaaaatttttctctgcttcggtgttccaagaaaaaatcagttaaagctgatataattatctataaataatttaattttgatttacattgttttagttaaaatggaaaacaaaaccttttaaaagtttcaaaggaaaaaagacaaaa

SEQ ID NO: 35068 - DNA, 960 bp, Heterodera glycines
ttgattcagttgaaccccagaaaaactccatggctttttaaattttgtttttgtttacaactgtcctatacttttatttatatttctgtgttttttcttcttctggccggtgcttcgacggaattattcggttttatttaatgattgctttgtgacaaaactcgagtgttcagagcatacacagatcacttttcttttctttctacgataattaacgaatttcttccatttaaataatcactccataccaattgagataaaaataacactgaccaagtacagaattccgaataaaaaatcgtataattttttatggaatatattaattatattggcatgtttcccttatcttaagggtcattggaactgtagaaggactttgacttaaaacgcacggtttttgagaaaaattttggcacaaatttggaattttctaataacaagagtgcactcaattttttgctgaggtatttttggttattctatggaattttttaaaaaggcgccggataatattatcaatttttgcaattataaacaaaagtttgattcagttgaaccccagaaaaactccatggctttttaaaattttgtttttgtttacaactgtcctatacttttatttatatttctgtgttttttctttttctggccggtgcttcgacggaattattcggttttatttaatgattgctttgtgacaaaactcgagtgttcagagcatacacagatcacttttcttttctttctacgataattaacgaatttcttccatttaaataatcactccataccaattgagataaaaataacactgaccaagtacagaattccgaataaaaaatcgtataattttttatggaatatattaattatattggcatgtttcccttatcttaagggtcattggaactgtaaaaagaactttgacttaaaacgcacggtttttgagaaaaattt

SEQ ID NO: 35069 - DNA, 1170 bp, Heterodera glycines
  unsure (1)..(1170): unsure at all n locations
aaatccaggtccaggaaaaatccaggctcctcgagacctggatccaggcctggacctggatttttttaaactcattttaaaaatcaaaaaaatgtttgaaaaattcaattaattgcttgggaacatctaaaaatatctaatttacaataataatttgtttttaaatatatttaatcattttttgaaaacttgaaaaaatatcggtcacttgaaataataaattctaaaattttgtccaggaaaatccaggttttttcgtgttttgcctggacctggattttttttcacattagacctggacctggatttcctggacaaaaatccaggaaaatccaggtccaggaaaaatccaggttgtaaaaaatgacctggacctggatccaggaaaaatccaggcctggatccaggtccaggtcgaactctagtttttactaatttttattttagatttaaaaaagatgattgaatgaaacgaaattgacaatttttgggtgatttttagtaagaatcaaaagtaagactgttaaaccctgatgatttttcatcattattttagcagtttttagtttaaaaataaatacatactttctcaaatgcgctccaattttcttcaaggaactctttggccttctctgtcgcttcgtcgatggtctcgcggaccgctctgtcaagagccctcttttccctcttcctcccgcgttccctcctccgtcccctctttttcagcaactaaatttcaattatgctacctataatggaacattccaactttaattgttcaaaaaggagttcattgatcctgaatttcggatttctttttcgccatggccccaaaatgatcagaaaattgttctaaattctaaaaaagaatgcgaaaaggaccctttttagagcttttttgcgtgttttccctgtgagcaacggtgagctttgacggcaaaaatgaaacctccggcgcattggcggtcgccgcttccaaatcgccctcatggccatgactctccccggtcagtagcaattccgccgctcttccggccatgtcggcgatgagacgggcttccagctccgcgattgagcagtcccttgggttaactgttngtgaaagangtacccatcatttccctggctttaattcatttcaaaaaaaattttattttcgaatatactttt

SEQ ID NO: 35070 - DNA, 890 bp, Heterodera glycines
atagagtgctcatttttcagcacaaaaaatcaccgattaagcacagtaaaaagcaccaaattggagatgaaattttgagaaagtttttcatttctttggtgtatttttttgaaaatttttggatcgtttcttatgtgtgtatttttcgtttttattatatttttgttaataaattttaggcaaaacgccaaaatcggtttttcaaaatttttagacttttaggctctaaaaataaaaacctagaaaataggctccattaactcaaaaagtagcttaacaatcaccaaaaaaaaaaaattaaacgaatatttttattttttatttattaaaatgtgtacaaataattgataatcaggccctgggtttattatttttacattgtgcatattttatcgcataaaaagttcgaataacaatattttactgaagttcatatcaattagagcgaagttttcatattaataaagctgattaattagcagcatttttttaagaaattaaatttttaaaaataattttggggaacttttacgttatgccgccgcccccccccacccataaaatgccatatcctgaacaaagaagggcacttttctagggttatttttgttcactgatcaagaatatggcttcaaaactgctgtaacggatgaaaaattatactttaatcataaattcaaatttaaaacaaaatctcaaccaaaaacaaaaaataatttgaaattttcgcattttttttctttttcattgcaatttttccccaaatattcttctataataaaaagggttcaagccccgccccccccccccgccccccggggacggaaaggttttttggcctccccccccggccgcccccgaaaatcaaatccccgcaaatccccgccccc

SEQ ID NO: 35071 - DNA, 843 bp, Heterodera glycines
atagggaagctattcccgaaggattcggtctccccattatctgggcgcatcggttcggggggactgccccgaaaatttaataaatcgattttttcaagtgtccgtttggggtactcaaacaattatggggagcaaaaatccaacgcagaattaaagtacaggctatagtgaagctattccggaaggattcggtctccccataaatctgggcgcatcggttcagggggactgccccgaaaacccaaaaaaaaattttttggataaaaattatttaaatgaactgactagataatatttaaaataggttatttctcttcctttcagtatccctgcaaagtttggtgcgcttctgatcagtttctgaaaaaaaagttaagcctaaactttttggcctgtttaaaaaggaattaaaaatttttaaaaattttattcatctccctttttgatagaaaaagcatcagagtgcctaaactaacatgtaaataaaatttggtgcgtttcagaaccctttctgaaaaaatatttaagaattaattttgcaaaaaataaataaaaacgaaagactcagattttcgaaaaattttttagagcaagctagctcggcgctcatttcagtgtaagttagtcctttaccggggagtatccctgcaaagtttggtatgcttctgctcaattagcaaaaaatatgagtgatcaaactttcactaaaaagttaagcctaaattttttggcatatttaaaaagcaattaaaaaatttttaaaattttattcacctccattattgatagaaaagcatcatagagccttattaacttgtaaataaaatttggtgcgtttcagaa

SEQ ID NO: 35072 - DNA, 967 bp, Heterodera glycines
aggcgcgcgcagtatttttacctttggggaaggcggagaagggcataacctttgtaaatagctaatttattcatgcgctgatacaattttgatcttttccctcgcccttttgcaatactgcgtccgtctttgttgactttaaaaacaaaattaattttgcggtcacataacaggaaagtacctgattatataaccacagatcattagcatagcagtgaaattttctaatattttgcattttaaaaaaatcagatttttccattcagccattctcgagatatataattttaaaaaatcaagtgaaaaatcgagtaaaaataggacttgatgccaaaatcgagtgcggcactcgattttttactcgatttaattgaaaaacaatttttgcagtcgatgtcgcaaaaaatcaagtcatcaagtcgaggacttgatccgtgaaataggtccctgatttgaaatctctttctctactttttactcatttaatttttacattttgttgaaaaatttaggagttttaaaatccataaaatttccaaattttatcacatattaactctgaccctgtgaaagttaatctatatcacttgattcattttatctgaatgtaattttcattcatttatatttgttttatgtttttaaatatttatgattagtgctggcaaatatggataatctcgaaatatttgatgaaatatagaccaaaaatctagaaatatggacataaaatacaaaaatatagacatatattttccaaatttatgtgggccgttcgaattgagcttttttattagaaaatgatcaaaaatagatttctatataactggcagctctatttatgataatgttttttcaaagctttcacaactttgaaaatttaattttctaacttttcatttttctactttttcaaaaaaataaaaaacaaaagataaaacactcttttggcattttcatacattta

SEQ ID NO: 35073 - DNA, 892 bp, Heterodera glycines
aaaaataaatgaaaatgtgtacgaaaaaattgcaaaattttggattttttggggcatctaaaaaattttctttaaaaaaccctcaaaaattgcaaaatatgtacaaaaaaatgcgaaaaagtccaaaatatgtataaaaatatgtgcatatgtaatatgtagaaaaaccccgaaatatgtaaaaatatgtaaataaaagtcccaacttttgttcgtaaacacaaaaaagaaagtgtttttcctactaattaggctatggagaatccaggaaaaatatttatttacataaaattagcagccctacccattactaattaactaaattctgcattaattggatttgatttgttagagttttggtcgaacacaatccatatttttggggtttttaaaaaatgatatcgacctttagtatttaaaaaattccaaaatacacaaatgtaaagtttgcatgaaaatttgtaaaaatcaaaaatgttttcatttagccatattcattttttttgtcaaattatgtatatttatgtttttatttcagtattttatcgaaaatattaaattcttattcaattatgcgcagattgctttctccgcctttgtgtttgtgttcctcgccaacttggtcatgtttgccaccatcttcggcattttcaattacttccattccacggaagaaatggcacttttctaaccaaccaaaatgaatggattggtttgatcattttattaattgcatactattttttattcatgttatgaatgtagcccatttgccagttttataatagacatcaaatttaaattcacaaatttatttgtgttttgaatttttgggtgcgcacaaagaccgaaaggcttaattttattattaaaaaacacattgattattaac

SEQ ID NO: 35074 - DNA, 1008 bp, Heterodera glycines
  unsure (1)..(1008): unsure at all n locations
aatgtaattagttgtaccttattccgtatttgatggtgtacatttggttaaatgcacttccattaggatcagtccatgaaagtcgaatttgtgaggacgaaactgtctccgcaactacgccaactggagccgataaaccgttggaattgcttggcggctgttgttgttgtccgccaaatcccccaaaagttgactgtggttcagagaacgggacttgagtggccgcaacaacattcactggcgcagaaaacccgttgaaatttcttgcaggttgttgtccaccaaaagcggaactcggttcagggaatgaaacttgcgtgccaatgtcttttgtttcaagttgaggtccacgcacaataatgtccgaaaattcgaacaaatccacaagaggaggaggaggcgttccgagaaaaccagctttcggtgcgtccagaggttgcactttgctcatcaactcctattttgatactttgttatggaatatttttcagaaaatagtaccttttctttttcctcaacagttaagatatcttcatccacagcaaacgaattcgtttttctgcctgtctccggctctcggtgtcgaaatggcttaatcggtccctgtcgcgctaacggcgtagcaataatgtcaacaagtgaaggctgcgtaatttccgtatcgatggatcttgctgatggcatcggacaacgcctgaaattgtgaaagtgtgtcaattataagtttaaggtcaaaaccttcgtcacaagttattcccagttaacaactataacaataccgaatttaaatagtcaaactaaccnnaatatggttttcntcgtttcacggtcctccgctgtgccgacaaataaattgaagtctttgattgtgttannnattgacggacgaggcgggtcccgaagtgtctgcctggtcagaatcgacccgtgngctaaaccaacgctcactttcgtaagcccttttcatgtgtagcgacgatgatgacttaaaagaaaatgatttctatc

SEQ ID NO: 35075 - DNA, 731 bp, Heterodera glycines
  unsure (1)..(731): unsure at all n locations
aataaatattttgatgcggattttctgtataggcaaaatttttncggcccaaagacttagtaaacaatttcctaaattttgacccaatatactcatgaatatttttggtgcataatctattaacaattgatttaaattgaagaaattttcgaccataataattcttaaaatatcaaaaacaaagcacattaatgcaagcaaaatttgaatatgtagacctgggttcgaaattggactagattaacatgatactcaatagtcataacaagcgaatttttttcgattttttcttttttggacttaattgaactaattaccagttttgatcagtgatcacacacagttcaagaaagaacgagaatcataaataacacaaatattttcatgcgaataaaaaaggtaaaaaaatttctgaaggatttgccaaccaatttaataaatattttatgtttttaccattgttttgttctgttgcgactgtttctccgcccgttttgtcattccttttgacatttaacagattcggtttttgttcaatagttctattcgcagttgattttgagatttctctgcaggctaaaacgtttttattataaagacaatttttaaaattttattttgagtgtatttccccccccccccccactccacccaaaaataatattctcaaacaatctaaaaaacagaaattgtctttaaaatcaaatattgcgacgggtggaaacgaaatg

SEQ ID NO: 35076 - DNA, 891 bp, Heterodera glycines
atgcgcccagatttatggggagaccgaatctttcgggaatagcttccctatagtctgtactttaattctgcgttggatttttgctccccataattgtttgagtaccccaaacggacacttgaaaaaatcgatttttttgttttcggggcagtccccccgaaccgatgcgcccagatttatggggagactgaatccttcgggaatagcttccctatagtctgtactttaattctgcgttggatttttgctccccataattgtttgagtaccccaaacggacacttgaaaaaatcgatttttttgttttcggggcagtccccccgaaccgatgcgcccagatttatggggagaccgaatccttccggaatagcttccctatagcctgtactttaattctgcgttggatttttgctccccataattgtttgagtaccccaaacagacactcacttgaaaaaatcgatttttttgttttcggggcagtccccccgaaccgatgcgcccagatttatggggagaccgaatccttcgggaatagcttccctatagtctgtactttaattctgcgttggatttttgctccccataaatgtttgagtaccccaaacggacacttgaaaaaatcgatttttttgttttcggggcagtccccccgaaccgatgcgcccagatttatggggagaccgaatccttcgggaatagcttccctatagcctgtactttaattctgcgttggatttttgctccccataattgtttgagtaccccaaacggacacttgaaaaaatcgatttttttgttttcggggcagtccccccgaaccgatgcgcccagatttatggggagaccgaatccttccggaatagcttccctatagtctgtactttaatt

SEQ ID NO: 35077 - DNA, 1028 bp, Heterodera glycines
  unsure (1)..(1028): unsure at all n locations
gcagaaatcggcagaaaattgtaataaaaacaaaacagcaattanatattaaaagtatttgccagagatgcaaacaaaaataaaaaaaatacaatcaattgaagcgaaaaaatgcgcgaaatttacagaatcagaaatggatacagtaatgaagagatcagatgcttctgctaattcattccaacaaagcgcgaatccgagccgcgtttcgatccctgaaaattaaattcatttgatggaaacattttttttttacatttaaactgactttgcggcagattttggtcggaaattcggcttcacacttgctgaaaacgaagtggaagctgatgaagccgacgatgagactgtcgacggtaagcccaacacatcggcataagagaggaacaacggcttcatctgcgggtcctgggactgaaaaacaaaaacaaaaattacaatttggaagcggacggaataaaaatgcaaattatcggagtaataattttcctttggtgctcatttaagtgcccgcaccttttgaggaaagttaactgtcgaagaatggatcatatttcggtgttctcgaatgttgttcccggcatatgcctgaaatttatgcaaattgcaagtttttttttgccaattttcgtcaaatacccaaacacttacgatgcatctgagttgccagtcgccgatctcctcgttccaatgcacaaatttctcaatgtaacgcacccgctcctccggaatgaattgatcgatgacctagccaaaaagggggaattacaaatttgatagattttgttttgtttccagaatttttatttaaaaaatgtgaccaatttagtggaaaacactcacaatcagaatttttttaataaaagatcgggtctcttgagaaaatttctaaatcgaagccgcctggactggaacaaaaataaacattgtatttctaatagatcatgtgcatttcctcgcaacatttcgccccccccgccccgctcgaagtcctcacgagcatggagtagagcagttcccgttggagt

SEQ ID NO: 35078 - DNA, 1029 bp, Heterodera glycines
atattagacatgaaaattttcaaaaactaaaataggcgcgaaaaaggtgaaagatcgcacaaaaaatgtactaaaatgttgaaaaaagaaaataaattttaaaaaagcaagatttcaaatgcttttttccagaaaagatgaaaaattaataaaatttaaaaagaaaaattatttttagggattttaagaattaaaatttagatcgattgttgggggtcaatttggtttattgaattgtagtaaggaattttccagaaatcaagtaaaatacgtttaaaaccaaattcaaaattgcacgatatttatactttaaaattttttttattcaatctggagactgatccagggcaaaaatttttcaagaaacaaattgttcttaggaaatatactaaatctaatacctttctatttgatgcatatttatcctcatttctcccacaactactacaaaaattttatacaattgaggataaatatgctgttttctttagtactgttcgaaaaaatcttgaaattaatattcccgaaactactttatctattaagtccgccaaaaacttttacccaccgcatttattatcttcaattagagaaaaagcacgtctatataagctaatgaaagaaaatagagacaaatatgaacctttatataaaagtatctccttacatattaagactcaaataagaaatattcaatcacgtaaagagaataaaatactatccggtgataagaacagattattttcctatgttaggaaatactttaaaccattcgaagatctacctgttattcaatataattcttcttttatttctgactcaatttcgaaagctgaaatttttgcaaaaattttttctgaaaactatattgtaaataatgtttctcttgattttgatatttcttcttcttcttcaacaataaacgatgttgaatttagcaatatttctgttggtaaagttcttagaactttaccaacagaaataacacatcatcggacggtattacctatagactattaaaaaattgtt

SEQ ID NO: 35079 - DNA, 659 bp, Heterodera glycines
  unsure (1)..(659): unsure at all n locations
aggcgcagaaacggccgcctaatgagtttgctaattagttgagactaattaattaatgaattaattgcaatcaattaaaatggcataaaatgattaatttttaagagtaagtcaaacgattttttgatatattataagctaccaaattaaacacattaattcaagagattctttcatcatttcaattaaaaataaaaatttcgtttttacgcataaattaaataaattttcatttttacggttaatttaaattaaaatttcccattttttacggttgctgtcgcgtggacatagtgcgcgttgatatttgccaaaagcatggacagaacggcgggcacgccaacgcacatgtatttggtgcacaaacagggaaatgagtcagggcctaacagaaaaaaatatatatttaaatttgaaattttaaaaaaatgtttctatgcttttttattaatgcaataaaaataaattgatgatttttttaaataaaatttttatgtgaaaatttcctttttcccttggtgttgtgccatccctccctctctgtttttctctctctctctctgtctctctcctcccntctctctctcctctctccctctttcttacaatagtgattagaagaggtacaaaagtgattagaagaggtacaacagtgatta

SEQ ID NO: 35080 - DNA, 552 bp, Heterodera glycines
ataattgcaataaactcacctttacaatttttaaaaacacaaacaattacaaaacacgcaaacactacaacaaacatagaacaatacaaaacaaacaaaataattgcaacaaacaattaaaattttcaatgaacacacattgacaattacaaaacacacaaaaattgcatcaaacatatcacaaacactacaacaacacatattgacaattagaaaacacacaaacaattacaaaacacgcaaacactacaacaaacatagaacaatacaaaacaaacaaacactgcaacaaatatattcacgaatattgcaacaaacaattataaagtagaaaacacttaatattcctcactcattctagatttctttaaaaaaatctcatgagtttgcagaagttatgaatttttgagggtttacaacatatattttggcagtttagttcttatttggccatttttgagctttttagtccatatatcgtgcttttttagtctacattttatgccatatttcgcgtttattagtccatataatttacagccctagtgatta

SEQ ID NO: 35081 - DNA, 687 bp, Heterodera glycines
  unsure (1)..(687): unsure at all n locations
attttagttacaaatattgtccccaaaatgacaaaaatttgtctttttttttcttgcaaaaaccactacaaattcctttttttctccctgcgctgaaaaaaggaagcaacttttgatgaaatagacgattttaagaaaacaaatccttttaaaataggggatttcggggtcgcttccacgaatcccataccaatcttgacgaaacccgaacccaaactcgaagacagcgaaagattgagttttcgcaaatccgggtttggggttcggaaggaatgagttgagatgggtgtcagaattgtaatcaacaacctcaaaaacccttgaaaagaagctttcacggttttttttgattaaaatttttttgaaaaagcactcctatcttaataaaattccaacggccggcaagcgcagaagtgtaaatgaaaaatcccaatttttgttcgcaaacacaaaaaataaagttttaattttaaagcaaatggaaaaataataaaaaatgaacgattttggtaaaatcataaaaaataatattctttacttcggctcgggattaactctctgaatatgttatgtaatttttttaaatttgcatcttaattaatcnatcagggatgtgcgaaaatttcatcagaaaccgataaattttaaatgaaatgacaaagttttatgaacaaaaaaatggataaa

SEQ ID NO: 35082 - DNA, 1729 bp, Heterodera glycines
  unsure (1)..(1729): unsure at all n locations
ggggggggggggggggccccccccccaaaaaaaaacccccccccccccccccccccccgttgtgggggggggggggggggggggggggagaaaacaacccccccccccctcttttttatttgttgggggggggggggggggaaaaaaaaaacaaaaacaaaaaggtggggggtggggtggggggcgggggggggccgccccaaaaaaaaaaaaaaaaaaaaaaaaaacccccaaacattttttttttttttttttttttaattaaaaaaaaaacccccccccccccccgagagaaagaaaaaaaaaaacacccccccccgcccccccccccccccccctttttttttttttttttttttatgtagaagaaaaaaaaaaaaaaaaaaaatttttttttttttttttttttttgtttcgcccccccccccccccccccccccccccccccccccccccccctggggggggggaggggggggggggggggggggggccccgccactccctccccccctccttttctttttatttttttttatttttttttttctcttttttttcttttctttttttgcccccgcccccccccccccacaaacaaaaacaaaaaatattttttttttttttttttgtgccccccgcccccccccccccccccccccccctctcttagaggggggggagggcgcaccccgcccgggcgaaaccccccccccctccccccacaggagggtgtttattaggggtgtgtttttttttttctccctctattttgttgtgggcgcccaccaccaaccccccacaaaaaaaaaaaattttttttttttttttgtggggcgcctcccccccccccccccccccccccccccccttttatttggggggagaggaaacccttggggagaaaaaaaccccccccaacccccgcctttttttattggggggggtgttttctcccccccaaaattttggggggccccccacaggcgcccctaaaaaaaaaatttttttttttttttgggggggctcccccccaacccaatgcccccccattttttgggggaggcgaaatcttttgcgaaaaattttcccctaaaccccggttttttatttttgtttggggtttttgcccccccaaattttttggggttcccccaacggccccttagaaaaaatggatttttttgttttgggggcaattcccccgaaccaatcggccaagttttatggggaagncggattcttctgggaatagctttcctatagcctgtactttaattctgcgttggatttttgctccccataattgtttgagtacccaaaacggacactgaaaaaaaatcgattttttgttttcggggcattcccncgaacgnnatgcgccangatttatggggagaccgatnncctcgggaatagcttccctatagcctgtactntaattctgcgttggatttttgctccccataaatgtttgagtaccccaaacggacacttgaaaaaatcgatttttttgtttcataaatatttttttcagaaagtgctctaaagtgcaccaaaattttatttacaacttaattttagcactctgatgctttagtatcaaaaaggaagatggagaaaaaatttttccttatattttggttatatcgttttgcttttggtggggtgcttggaacagtggaatcatgcgcacccgtccgatctggcaagttaagcaacgattgct

SEQ ID NO: 35083 - DNA, 940 bp, Heterodera glycines
aatttccaattgcctaaaattgtttgtttattagttgtttgttctgtaactgttcagtttggttacttcgctccattcgtttctcactgtgttcacttccaattcgtggtacaccgtctgaacgggtcggcacaattcccgcgacagttcggcatcgtccggccttaaaaaggcattttgaaattgttttgccagatggacctcaccttagacagacaatgtgaatgcttcccagtgggtacggttttattctgagcaaaatgcccttcggctcatcggctgaatgttcggctggcacatttatgctgaacccgtcgatttccgacccttcggggtcggacagacgacggacgaacccattcagaacaccgctggcattaaaaagctgggaaaaacggaaattaattaaaaaatatatattgtggcaaatattacggtaatattgagaagagaatttgagaagcgatcgatgagctgaaaattgagggttaattaagggaaagttgccaaattagtggccgaccattagggcgaagaagtcgcccaattgggaggaattgtgaacaaaaacaatcggactttggcccgggggctgtccatcttcgctttcgtcgcttcgcggcttcgtggccattgtcacttcaagcgaaacgccctcccgcgcacggaccaacgcaattcgctggtacgcatcgaacacgcgggccgatcggatccatttgtgcaccaaattgagcgggtcggccagccgaaattggctcgtctcctgaaacattgacagttaatgatcagatggtttggcaaaatgatggggcaatggccgatcagagaattcgcaaattgatcatttgaattagtccagcagaatccttcccccatcccctcacattattgcctccgttcacgtagtaactcccgtccagcaccgatcggaagcgct

SEQ ID NO: 35084 - DNA, 1363 bp, Heterodera glycines
ccaagggattttattgtattggataaaaaaaatatttggcctaaagtattttgatgatgttgagaaattgtctttaaaaatagtgtttttttatgcgacaaaattttttgtttattttttttacaaaccgtgaagtcgtccatttttggtgtaaaaaacctgtcgggtggcccaattaatgccacgtccaacagtatcggttttcgtcgaatgaatcaacttccatcgcttcgccattgatgttaaaattgccttggcttacgtatgaaataaattcccaaagtcggaaggatcaattgtctcttcccattttatctgctgtttgactgcgaatccgaagaagatctgtccgaaatagtacctaaaatagaattcggaatattcaaatttatccttacttctccttgtgataaatttaccatttaggattgctgtacttacgaatacatagttttaaatgaagagtcaacgtagcaatatccaaaggaatcctcgatgcgcctgacaaaaatttttacaattatacctgataaatgaataaattgtttttaatcttttggtaataattgtgaattcagaatttcacattttctttgccttttcagtaatctcttctgtcaagaattaacaaattcacaaaaaaatggttgaaaatgttttaaaaaatgaggttttttcttattttgttcatgccaaccgaacatttccaactctgccatttcgctggtcaatttgtcgtttcgccatgacatttccaccacaaatcgcatcagaatctctcgtataaaatgaatgcttatcgtccaaaaagatgtttgttgaacgcagttcgataatccgaactgaatttcaattgtttctgcaaattaaaaggtcgaattgcccaccacctgaagagataaagtgttaatgggttgctaattgccgaaatgcaggtgaaaatgccgaggatgtaagtgccaaacacaatttggacttggctcagcgaaagttttcggagtaaaattaaaaagccggcgttcagaaagtaaccggtagacacaaaaagcacattgaccagcaatgccttgaaaatgcgcttagtgtagtcaatttggtctaaattatattgttttaaaaacattttgccaaaatttgaagaattcatttattattttttacattttgccatgttaaatttgttggttttgaaacggagcattggccaaatgatggcatagcaaagaatggtcagtcccgtgaagaccatgcagtttctgaacagttccaaggccactttccccttggtaaaaggtcggtcatcacacagggaaaaaagccgaaaaaaaaagtaatggggaattaaataaaaccaaatttttaa

SEQ ID NO: 35085 - DNA, 1521 bp, Heterodera glycines
gttaattgtttagccgccaattccatggcacttttcactttggccacaatttggacgtcatttaactcgtcgtatttgatagccaacatttctttggtcacttcattacgagcatggtgctgcactttccacgcgtcaatctgaaatggatttaccaattttcttgcgctttttcaaattttatgacgaattactaagtttttccaaaaaatagaagaaaaatttacccaaaaaaaaaatctttttattttttcttgaaattacttacaaaataattttacaggattttttgtttttgaaatttctaagatggaaaatttgttttttaattttacatttttgttcattaattaattcagttttccactcaaattacattgcaaaattgatcatttttcaaacaaaaatttttgaatttgaattcaaaatcgaagtacttatttggctccattttttttagtgaaaatgatgaattttttttttttgaaaaaaccacactaatttttatataagaacaaaattttttcattttttcattaaagaaataattttgagaaaaaaaaaattctacctcctctttatattcgcgcactttctggctcttaacttcattgtacagctaaaattaaataaaaattgttgttttttaaattaaatttaaattttttcattttttaaaataaaattttcaattttaattttaatttttctattttaactttattgaacagttaaaaatgaatttatttctaattaaatttttccattttaaattcattgaaagctaaaagttaaatacatttttcaattttaattaaaattttcaaattaaaatttttcaattttaatttcatggaatagacaaaaattaaaaaacaatttcttttttttataatcattgagcagctaaagtataaattaacattttcgtttttaattaaaatttttcaattttaattaaaattttattttttattttaaatttatgattttaattaaattcttattttaaattttttgattttaaaatgccttgcgcttgtagcgacgaaaaatttcgaacgttgcctttggaacatcctgttcacgcaaatctttaatcaactgttcatccgcgcttagtgtttcatatccagggctgcaatggggctgtgattttattggttttaaaacattttttgattttcatttaaaagggcggaggttcgaatccgttcatcgacattaaaaatcttagtttttttttttaaatgcgatttatttaaattatttttgaaaattttataactaaattagacaatcttggtattatgcaaaggcaatagaaatccggcagctcaaaaaatttctggagccgaaaatcggaagatggctcaaaaaatttgggaaatcggaaatccagcggcacaaaacatttgtgtaatcggaattccgatggctcaaaaaatttcggactatcgaaaataggaattccgacggttcaaaaaaaaaaaaatttgggcaatggaattcgacggctca

SEQ ID NO: 35086 - DNA, 1061 bp, Heterodera glycines
caaagaaaaatgggaagaactcaaaaagtggagggaaatcgctggcggtgagaaatggctgggctttttcctattgtacgacgctccaaaagacggtaaatgaaaattaattgggcaattaaaagtgctaattaagtgattaattggtttgaagactccaatttcggcagcctttgttcggcaacccttcgaattgtctcacaaaagagcgaagtgcgcgatttccagcacaaattcagtggcgtaacaatgaaaccgagcaactgctggggatacgccaattttatttcttttgcagtgaatcccaatgaataaaatttttgggattattaagctcaattggtaggattttcatttaaaaaatgataaaatatgtatcaatttaaaaaaaacaatgaggaatcatattttttagagcccggaattttgaaagtaccgggaccgggcccgggaccgggcttcgaaaattgaccggggcgagccgcccgttcaaaaaaagcccgttttaccgggcgtcccgggcccggtccaaaattttgaccgggcgcccgtactggaccgggcttttttcaaaatttttggaattttgattaaaaattcgaaaaaattttatagtcctttattttagcttagaaatgtcaagccattgtaaatcgaccttttttactcttcaaaagaattttaaggtgtattttttcaaaaagattttgacgacattggaggggggggggtccggcagtgccgacaggccgccgggtaaatttttgaaaatttgagtttggtttgttaacagatttacacgaaaaaatgacaaaactttgctattttgagctacattttagaaaaaaatttagctttttgtactaggcgacgctgaagaaaaactttgacttttaatgaaatttataaagaaaatttttggtttttcatgaaatttgaattttttttttgtaaaaagaaagttatgaaaatgttgttcaatttcgtatggattttggggtctttttgacagttgataaaggggcaaaaatttcaaaaatccgaaagttctatcttgaaat

SEQ ID NO: 35087 - DNA, 1313 bp, Heterodera glycines
  unsure (1)..(1313): unsure at all n locations
taaactgaaaaaatcatctggtaggtctagattcttaacgatgtatagacaagtacaacatatcagctagaaatatgaattagagcccgtcctgtaattcttcaagttaacttagaacaatccaaagtattataaccccttttagaatataaaatgtacctcacgatctgctgtgcacattttcccatctcgtatgtgctcaaagataggagatgcatgaggcacaagcaaacaaaatatctccaaattatacagttacataatattaacagcattaggtaagcaaatgacaaacagttttccttaaaacgcaaatagaccatcgtctgcctaatcaatggttgctcgaagaatcttctttggtgatctccatcccacccaccaacacattgtgcaaagacaggaactggacattggcgcacgagctgtccaacgtccaattgcccgggtgccgccggcatttcgtcaaggccctgttcgccgcccctttccaccacttctactaccacgtcaggtcagaaaccaaaggcttttgagctttctttgcccagattcacagctttgggtcttagggtccacaaatgccacatcgtgtattcccagtcccgcaccaccatgtccaacaccctcttctccacgtccgaccacttcctatgccccgtcaggtcgaaatcgaaatcgttttttttgctttgccacaaattgtcaaatttgggctttagggtccaccaatgccatacaacgccctccgtgccccacaacaccccatccggtttccaattgtgaatgttccgccacttccgctgccccctcaggttgggtattgttttttgaccctattttgtgccaacatttctcaaacttttgagttcttagggacaaccaatgctgcgtaatgttgttcctgttcaccaccaccaacatccaatcaacggcctaccacttccactgccccatcaggtcaaaactcatgaccttttttcgccttctcttgaccaacatttcccatctttgatttgttaggggccactgttgttgcgtcatgttgttcctgttccacatcaccatgtccaacctccaccgaatggtctaccgcttccattgcctcatcaggtcaaaaaatgaccttttttcgccttctcttgaccaacatttctcatctttgatttgttaggggccaccgttgttgcgtcctgttgtacctgttccgcatcaccatgttcatcatccaatgaaacgcctaccacttccactgccccatcaggtcaaaactttgaattcttttgnnaccaattctcatctttgatttgtta

SEQ ID NO: 35088 - DNA, 198 bp, Heterodera glycines
tttttttttgccccccccccccccccccccccccccgctctttttttttttttttttttaaaaaaaaaaaaaaaaaaaaaaaaaaaaaacccccccccccccccccccccccccccaccacacaaaaaaaaaaaaaaaaaaattttttttttttttttttttttttttttgggggggggggggggggggggggggggg

SEQ ID NO: 35089 - DNA, 245 bp, Heterodera glycines
aaaattcatattttatgcataaaatcgcttcaattgtttcaaattggctaaatggatgtcagaatcggttttcccggcccggaaaacccctaaaaatcgattttgagcgatgaacgtgaatttggtgaaaaaagaattttcaaattttgttcggatccgggttcggggttcgaattgggtcaaaacagatgccagaatcggttttcccgaccccgaaaactcaatgcgtctatggtaaaaagtag

SEQ ID NO: 35090 - DNA, 885 bp, Heterodera glycines
ctgtttttctcgacagttaaaaattggggcaaaagcacaataatgacaaatttcttgccattttggtgccgcgtgcaatactttttttttggcactgagtgaaattttttgtgatttttgacagctaaatacagtgcatgtaatagtgattaaaaaacaaaataaatatgattgtcagctataattttaatcattttaattttgtatgtaaaaaactcattacaaaattattggcgaaatcctctcagatgatgttgaaaaattattaattgcaaacaaatttgtgaaaaaatgttaaacgactaaatattttaaatataattcagaaatatttggctcttttttccagggccgaatttgcggaattaataatgcaacacacaattcgcaaaaaatctagcttctgggttcgtacccaaaatccggcatgggaagcgtcccatgccgggctctaataatccaattgctaaataaatttatcgaagtccttccatccttaaaatatatgttcataatttattttttattttcatttcataatcaatcaatcaaaattccttaattatctcaaattattttctgttactgatctgataattcatttctgcattaaattaatatcggaatttctgctggcttttccatcgcttttatttttactttttttttgtgatgattcattcattttgtccatcaaatcgtgatcagaaaaaaactgacttttgaatatggaaagataaatatgttaattaaaaaatataatattcacataacaattttatctttaagaaaaggcaaatgaaaataaaagaaaaataaaatttgagttgtcgataagaataatattttcagaaaatgatcataaaaatggtgaaaggtgatcag

SEQ ID NO: 35091 - DNA, 1087 bp, Heterodera glycines
  unsure (1)..(1087): unsure at all n locations
ggtctccccataaatctggggcgcatcggttcggggggactgccccgaaaacaaaaataaatcgattttttcaagtgtccgtttggggtactcaaacaattatggggagcaaaaatccaacgcagaattaaagtacaggctatagtgaagctattccggaaggattcggtctccccataaatctgggcgcatcggttcagggggactgccccgaaaacccaaaaaaaaattttttggataaaaattatttaaatgaactgactagataatatttaaaataggttatttctcttcctttcagtatccctgcaaagtatggtgcgcttctgatcagtttctgaaaaaaaagttaagcctaaactttttggcctgtttaaaaaggaattaaaaatttttaaaaattttattcatctccctttttgatagaaaaagcatcagagtgcctaaactaacatgtaaataaaatttggtgcgtttcagaaccctttctgaaaaaatatttaagaattaattttgcaaaaaataaataaaaacgaaagactcagattttcgaaaaattttttagagcaagctagctcggcgctcatttcagtgtaagttagtcctttaccggggagtatccctgcaaagtttggtatgcttctgctcaattagcaaaaaatatgagtgatcaaactttcactaaaaagttaagcctaaattttttggcatatttaaaaagcaattaaaaaatttttaaaattttattcacctccattattgatagaaaaagcatcagagagccttattaacttgtaaataaaatttggtgcgtttcagaaccctttctgaaaaaatatttatgaattaattttgcaaaaaataaataaaaacgaaagactcagattttcgaaaattttttttgagccagctagctcggcgctcatttcagtgtaagttagtcctttaccggggagtatccntgcatagtttggtacgcttctgctcattagcaaaaatatgagtgatcgaatttcactaaaaaagtagcctacattttttgcatatttaaaagcaataaaaattttaaattttatatttccctgca

SEQ ID NO: 35092 - DNA, 1155 bp, Heterodera glycines
  unsure (1)..(1155): unsure at all n locations
aactgatcagaagcgaaccagattttgcgaggcatcaaaagacaaaggaaagcactgatatgatgctactncagtattctgatttaagattttgattaattttaaagcttcactattttatttttntagcaaaattaattcataantattttttcagaaactgctctgaaacgcaccaaatgttaattaaaagttaaataaggctctctgatgctttttctatcaaaaagggagatgaataaaatttttaaaaatttttaattcctttttaaatatgccaaaaagtttaggcttatattttaaaaagtttcatcgaacctagcgcaccaaaagcgatataatctctccaaattttgcgagaccttcaaaaagaaaaggaaaaacttaacctgaaaaaatgccaacgcctgtaattctgaatttaaaatttttcaataattctgaaagcttcactacttatttatttttagcaaaattaattcataaatattttttcagaaactgctctgaaacgcaccaaatgttaattaaaagttaaataaggctctctgatgctttttctatcaaaagggagatgaataaaaattttaaaaatttttaattcctttttaaacaggccaaaaagtttaggcttatattttaaaaagtttcatcgaacctagcgcactaaaatcgatataatctctccaaattttgcaggccttctccattgtaaaggactaacttaacctgaaaaaatgccaacgcttgttgtttttaaaatttttcgaaattctgactttttcattaattatttattattttgcaaaattaattcataaatattttttagaacgtgctctgaaacacacaaaactttatttaaaggttagtttaggcactcagatgctttcactatcaaaaagggagatgaataaaaatctaaaaatttttaattgctttttaaatatgcgaaaaattttaggcttaactttttttttataaactgatcagaagcgaaccagattttgcgagggcatcaaaaagacaaggaaaagcactgctatgatgctaactccagtaattctgaaatttaaattttttataaatttttaagcttcactnatttattttttagcaaaattatttcataatattttttcacaactgctctga

SEQ ID NO: 35093 - DNA, 833 bp, Heterodera glycines
aaagcaaaaaaattaagccaaattaataattgagatatatcatttttaaaatcaaaaataagcctaataataaggttttcaaaatggcaaataaaacacttgaaattttaggcattgacctttttattggccaacaatcgcaacacattggcagctaaaggagtaacaaattgacattttccatctctgttcaaatcccgcccaccaaatttgctccatgccgcttggtgcagcggcgtacggccgtgcgcgtcgcgcacgtccactggcagctcccactgctcgctgagcaactgctcacagcaggcggcacttccggctgcagccgcgtgatgcagagggttcatgccgtcctggtcggtggccacactgagcaggtcggccaagccaagctcaccaagcagtatctatccaagaggtcgagaatgaagctgccaagatttaatagacaaacatttaacacgcgtgccgattcttgcgtcgctgccaaatgaatgggcgttatgccgcgattgtcccctgccaatgcccactcgcgggccgcgccctgctgcagcgtgaacagctccgaaatgcactccatcgacttgcgctgcaccgcccaatgcattgggcactgaccacgcgagtcgcggacagccaacaacggaatgccccaactgtgccaaaaagaatgaatgctggggcgggaagcaaacaacagaattttaatgagtgccttccgctgatcagtgattactcactgacttttgcaacagtgtcaaatagccggtccgatcggtgcccaaaatagcggcgaacagcaccgcgtgtgcgcatccgttgtccgccac

SEQ ID NO: 35094 - DNA, 1107 bp, Heterodera glycines
ggagggcattcccgctaatgaccagcgtttgatctttgccggcaaacagctcgaggacggacgaacgttagccgactacggcgtgcagaaggaggcaaaaattcatttggtcagaaaacataattaaaatatttaactaatttttacaagaatttttatattatttatttacaaaaaataaaaataatttttttttctaagtaaataattaatctttaaaatatgtttctttttttctcaaatattttacgcaaaattaaaaaaaaattaattctagaaaaagaaatatatattatttttttcgctccttcaaagctttaacttttaactcctctaccgggtgtttgatataaaataataattctttttattattgtatttaaattgtattgcctaattccactcaacaatttttcatcgaataaaattcacctaaaataaggggggttttaaattttttttttttaaaatttgaataggtcctccgtcttcggggcggaatgcaaattttcatcaaaactttgaccggcaaagtcatcacgctggaggtggacagcatggacagtgtcgagaatgtgaagcggaagatcactgacaaggagggcattcccgctgatcatcagcgattggtttttgccggcaaacagctcgaggacggccgaacgttggctgactacggtgtgcagaaggaggccactgtacaccttgtgctgcgcctacggggcggcggatcgatgatgaactttgatgatgatgtgctctgatgatcagcagaattgatcaataccttgacaattatacaaacatatagctcggtttgatcgaaatcaaatcaataatttaataataaacctaacaggtagcagaaatgaatgattttgaagacaataataatttttgatggaacttaatcaaaagagagtttttctaagtggtcatatgagaaaaaaataaaattgattttgccggcaaaatttcggtgtcatgacaactcgttcataaaatttttttaattcaagtaaaaccgaaaaaaaaaagttaaaatgaatttttttctagaatgaaaaattgttaaaaaaattttaatgaaaaactaaacaattgcaa

SEQ ID NO: 35095 - DNA, 304 bp, Heterodera glycines
ttaaattacagaaaatcaaaagcaaaaattctaaaaaattccattgggggtattcattcattcacacaaaatgtttcattagtttctgatattaactacatttcctcttcattccattctcccatcaaacaatctcaatccccaaaaaaactgggggcattcaatctcggcacagatggcaaaaacggaagacaagtggtgccaaaaaattaggaggaaaatccgttggaggcaataccaataggcgcatcagcacccccacaaaggggcggggatggtactggtactgaacattacaaatttt

SEQ ID NO: 35096 - DNA, 920 bp, Heterodera glycines
ccccattataaaaaaggtgttctccaaaatgattaaatatttatttaggggcgattaaataaaccatttcccttattacgacgaatatcgcccaaattagtcccaaattatgactaagtgcgccgttgagaaggcgtccccctcctccgcctcctcccccccgccggcgttactctctccgatgatggcggtgtatttgacgcatagagaccaaaaggccaacaacagaagcagtgagtgccaagtgccaaacgaaccaaaagcataaaagcaccgcttttccctcgagggaccaacaaaaaaagttaaaccccgcggggaaagaaagggcaaaacgatcgaaaattatgacgcaattatgatcattttctttctttttttattgtgtatatcgatttttcagagtttttcgaacctcatctgatgtccaacccaccgccgatggcggaacaggtaaaattattaaattaataaaaaaaaataataataaatggacaaaaaaaggggggagagggggggggagcatttgttgatcaaattttacgacgaaattacaaaatggggagggatttttctgattaatgttaatagttgtttttttaaattttgtttaaattgctccgttttccgttcagtttctttacgacttgcgcaaaatggtcgcaatggcacgcgaaagaattcgcacgcgacggcacagtaagcaaattgggagagccggaaaaactgcgattttctttgttttagttccacgactgcatgcaattgtggaaagcgatgacgaggggggcacaaatggagggaatgagagagaacagcaaaaatacggaaaaattggtagagaagcagacagagagagggacgagagacaatggaaaaagtgcgagaagatagagagagaagcttacagtgaattggag

SEQ ID NO: 35097 - DNA, 1414 bp, Heterodera glycines
tcatttctattttattttttaatgcttaaattgttccattttaaaaaaaaattttattacaatatttttcttttgaagtttgtttatatattacctagcctcatagactcagaacttcacattatgttttttcaataattcaatttcatctcataaatttattttcaatatcaaaaatttcatttctgtcttttccattttctctaatttacacgcactattttcatcgcaatttctctttctatctctccaattagcactctctcactttctgaaatattttcgtaaatttcttttcatctttcccattatttatcagttaatctgaattatttcatccaaaattgcccatttctgtcctctctgatctcccattttcttgcactttttcaccccaaatttttcattttcaagcctctcatccccccccccttttttactgcactattttcacccaaaattttcgtttccgtccctcagaaagctcccttttcctgcactatttccatcgtaattttcctttttagccctcacatacctctctttttactgcactattttcaaccaaaattttccctttcttcccttctaaaattaccattttcctatattcacccaaacaaaattttcctttccgtccctcacaaagctcccatttccctgcactatttctatcccagcttttcctttccagccctcgcatacctcccactttacagcactatttttcatcccaaattttgcttttcaccccttctctcattacctctcattttgttgcactgttttccgccccgtcatgcacttcacagccaaatttttgtcactaaaatggtctcagggagcagcaccgatgacgtcaaatgagcccgtaaaacaccggcggggcggtcccccgccgccactttcatttatcacaccgatcactttttggtcgtctaacgttcgtcgatcaaacacaaatgtgaccaaacacattatctaatcacacacactttttcactaattacatgtgttctctaccctatcccaaaatgttttttcttttctttcgccgttcctcgcgagtttcgttttctctgttttcttcgcaaattttgtgtctgtcgttgtctttacagctctctgtttattattaaatatgttttagtaaattaattaattttattttttgtttccattcattcaaaattttttcaggaattatttgtccctaaaatttgccaatttattttattttcatcttaaattaatattttgctttcaattccatttaaaagttttttctgttttgacaaaatttcacaatttttcaccttttttcttttctgctttatgtatgttttttctaatattttaaatttggaatttgttttcatatttatctccttcttctccaatttcctttattttt

SEQ ID NO: 35098 - DNA, 1056 bp, Heterodera glycines
  unsure (1)..(1056): unsure at all n locations
tcccatcgtcataagtaatttgcctttgagttcaggccgggtataccattttgtgtgaaagtatgagcaatatccattgttcanccgacccggctctttccgaactttgagctaataaataggaacaaaaaattgaaatgatgtcattttttgtggacttgagacattttttgtgaatccaattaattccaaacttaaggaacggggaggggagtgggtccgacggtgcctataggcgccaaatacaatttttcctagtgtcgtcccattttttttaaagcgcaccaaaaaatgtgtaaaaactaaaaatgtcatcgttaaaattccagcctgatttttttggggtaagaatttcgttaacaatggttatgaccgtttgtttattttcttccgacctcttaccatttcgaatgtgtcgctacaatcttttgttttccataatatccatccatgagtggcttcgtggacacaggtccttgcgcgggtcgattttcttccccttctcatccgcgccctttcaagactttcgtcaaatttgcgttcttgctgtcgccttttttgctgagcaattattcgtctattcattaagttgcttttgataataacctgaaattgcatgagtaaataatgatttttaaaaaatagcagaaggctaaaggttattatttctgacgatggaatgcaggcgccaagtcaggttttagggtataactcctttttcgagttaaagttggtttagaggtttttagggttggagaacccgcgtctgatatccatttaggcaccgaactagaacaaaaattcgaaaagccaaaagtttttgtttttcgttttcaattaaaatataactcattttcgggatggtgtgtaaagccagtttttctacgacctgaaaatatcaaaaaaaaaattatagatcgtgctctcgagcgattcgtggtggaaccgtcctgcaaatagggtgacacttagacacaaagaagtggcgaaaaaaagagatcgaaaatgcattcaaaaaaggcaaagacgatcgtgagaaacaacaaggcaaagata

SEQ ID NO: 35099 - DNA, 1264 bp, Heterodera glycines
aggaaaccgaatccccccgtggtactgctcccgacaaaatattgtttctgtcctcttccatgttggggagtaaaaaaagatgaccaatcgaccgactcgggatcgaaaaatacgtgtgtcatttttaaaatatacttttcttaaaatgtaatgtaagaatacaacttccccagtgaaatttaacgaattcaccaaacggtgtgtgaatttcaattgtaatttctgaaattcgtttcgactgtagacgatgaaaatactcggtgctatatataacttcactaatcgatcctgggtcatcgacgacgttaactattcttaagagtggggccatctggttgccgataattgtgttttcgattaaatttggtgcataaatgtatagctgccttacgccgccagtcaaatctggcatataattcgcttcttccgcatgaaatagccttgtgttcttaaaaccgagcacataggcgaggtgttttgacaaatctatgtgggagacagcagcggaaagatagacaataaatttttgatcaatgctgtcatattgaaattgaacatcctcattggctagtctttctcttttttgtggtcctttctcagcttcagatacttgtatattttcaatatctttacgtttaatatgctcaccgagcgcctcattaagcctattcactatcccgctaaaacccttttccgatttatcattatatccctcgagagttgatgtatatttggtctttgcctgtctggcgattccctttgcgacgtcggctgatttctttgcttttttcaagtcattcttttccacatgctccaatgttatgtttttggctttatctacttcttcttgaaaagccttaagttcatttcgtgatgtttgaatttcggttcccatctcaaccattttgtcaaaccaaatttttatatcaggctcttctaaaatttgaggatttgtttctcgtagtgtgtttagttgggtttggatggaattcgagatattgttgatctgattaaaatgtctttctacgtctctcccggcgcgttctgcggccctctttgcgacatcaatttttgagtctttggtatcttcagccttggcttctctccttccacgttgttttttgattttgtaatgatggctgaatgcctcgttaattttatttcccaggcccccggcggttttaaaattcatgtccggtaaataaacttgagtcgggacactgatgtcgttttccccatactttaataaactcttgaccgttta

SEQ ID NO: 35100 - DNA, 1056 bp, Heterodera glycines
catcaacgatctgtttttatacaaaatgaaataatagtcatttcatcttttagttttatttcttcgaacctgacaatattccgccacctgtcattatggtccagcatgtctctttccgatacaatccggaatcagtaattgagttatggtaatttttcaatatattttacaatttagccatacatttacaagaatttggactttggtatcgacttggacacacggggtttgtttcccggattttactttctaaccaactaacaaataaagtggcacttgttggtccgaacggggctggcaaatcgacactcctcaagctgttcagcagagatgttgagccaactgatgggatgatccgacggcatttgcactgcaaaattggcaaatatcatcaagtaattgcaatggacattttttcactatttaattatttctagcatctcgttgaagaacttccactcgaactctccgcgttggaatacatgcaaagagagtttccggacgtaagagagaaggaggaaatgcgaaaaatcatcggccgatacggtcttacgggtcgtgagcaggcaattaaacggatactcacttttattgacacaatgccatgctaattataggtgtgtccgatgaagcaactgtccgatggtcagcgctgtcgtgtggcgttcgcttggttggcatggcagcaaccacatttgttgctcctcgacgagcccacgaatcatttggacatggagtcaatcgacgcgcttgctgaggccattaataacttcgccggtggaatgattctcgtttctcacgacttccgactggtccagcaagtcacggaagagatttgggcaagcaaattttacttttgttttctttacaatgacgtatttaataggtttgcgacaaacaaacaattactaaatgggacggcgatatattttcctacaaagagcatcttcggaaaaagattgaatcgaacgaccggaagggcacgatgacagaacgttgatcccttcttttatcacgttaaaggtgagtaatagaaagttggctcccccgcaacct

SEQ ID NO: 35101 - DNA, 339 bp, Heterodera glycines
ttcgtctaaatagcgcaaaattcggtcgttttttacacaaaatctgttatcaaagtgcactgattgtgagattcgattcaaaaaatttccccgacggcgcctatcggcaccgcaggacccccaccccccccccaagttcctcaatttttttggaaaaaacgtcgcaaaaaatttgatttggaaattaaaaaaaagcgaaaaagtagtgtgaaaaaagtgatgtgaaaagtgaaaagcaaaaaaaaaaccgtagaaaaattcttgagcgtttttttcaatttcgtaaattttggcctcagagggggggggggggtcagggacggtcccaggggggggggg

SEQ ID NO: 35102 - DNA, 986 bp, Heterodera glycines
taaatagcaaaatttttatttagaaatattttctgattaatttaatttgcattaatttgtattgtattaaaggaatcgcatcaccgtttggcttccgaattggtcaccggaatggtcagcgggtcgaagctgtggcagtacgcaaaagtcaagaaggtgcaggagcggctggagcaacgattgaccgacacttttttgggcctcacggaagaagtcgaaaagaattggggcacggcgttggccaccattgttcgtcatcattttgtcagtttaatcattagtaattatttcttcgtttagttcggtgcgtgtgagccgcgcgtcactaattggcttatccaaatgcttttcggactcgcaaagcgacccacagaaataagcacacaaattaaaacgtaatttgtttgctttcctcacaaattcgttcctttttttaatatttatttaccgtttaggcgtttatatttgctagaatcgggccttaaccaggtgcggtaaaagacgacattctgtcattttttaaatgccatttgtcttacattgtttagtatgaatggcgaattccgaacgaatggcgccgattgtttgaactttgcatggatcatgtcaacggattgggctgttcctatcaaaatgtccgcttgcgcatcggaaggtgaacaaaatgatcaatgaaatttgggataaatggtgggcccataaaaattaatttggcattccattgaccgaaaaatgtccgaaaatggacccttaagaaactgaccgcaaatttccgattttcagcaggccgcaaatttcatataacattttaatttcctttcttcagctgccttgccaccatttcatcgtccgatttcaagaaagcgcttgtcgaggcgaacggaggagaagcgaacgccgacgacgacagccaattgaaacatgtcaccgttgaggaagtgatctcgcgcataaatgccatggtaacgtttgttgattgaatttgg

SEQ ID NO: 35103 - DNA, 1144 bp, Heterodera glycines
aattcacaaaaaaagggggggagggggggggggggggggcaattccccacaaatggccaattaattaatcacctgaacgtaaaacttgcgaaagaaattgaaggcgacgacagtgtaaaggtaaacgaccacgagagtcatctgaatttggccgagttccaattctctcccgtaactctcgaacttcggtgtgcaattaattaccataattgtgaggatgagctgctggaggttgtgggtgaccgactgaagaatggccttgagcatggggaaggagagaacgacgtcgatgagaaggaaagcgtagaaaaagggggagaagagaacgccggaggcggagcacagcaaatagcagacgcggtaaaggaactgccgattggtcagaatgacgccggtccaaagccaacagttgtaactgaacagccggggataatggggggggggggagggggaagaatgacagggaagaagaatgaatggcaatttataaaccacggaatttcgggggttttgggtctcggtcccgactaccggggacaattctaggtcttgagtctcggaaatttcgactcttgagcagccctaatgcccccggccccaccgttcgtcccgattgagtattcggatgtgtcagcactcaccgatagtcaaacgacgtgtccccgggactccgttccgtgcccaaaagggcgttcagcgtttcctcgtcgacttgttcccggtacttttgcttggttttccggcgaacaaatttgtcccaatatttcatcgggaaagactttgagctaatcacaattcggtccaaatacctgaaagtgaacgcgtcaatcagtcgcttttgccccccctccccgcccaccaaaagcacgtgtccgtcagtcccctgtcctctccgcccgcttcgtcctccgttatccaacaaccgtcgaacattaatttccgcgcgacttccttctcccgtttgaaggtgatcaatgggattttcagctgatagaaggaaatgagcagcgcgaaagaagcgatcgcatggaaaacactcagccaataaagtgcctgaggggaaatgaagcaaaagcgaagggacatttgccgacctggccgagaagccaaccggtgatttggtagctgaggtaaggcacggtca

SEQ ID NO: 35104 - DNA, 673 bp, Heterodera glycines
atttatactctatcccagaaaaatggctatctctttttttgagaaattttatacctcacaaaagcgcttgcgtatgagacggagggctgtgcacaatcgccattttatttcacagaggatttttatatttagaggttatcccagaaaaatggctatctctttttttgataaattttatacacatacaaatgctctcgagcatgatagggagggcggtgcgcaatagaccttttatttttgagggaatttttaaatttatactctatcccagaaaaatgcctatctctttttttgagaaattttatacctcacaaatgctcttgagcatgagacggagggctgtgcacaatcgccattttatttcacagaggatttttatatttatacgttatcccagaaaaatggctatctctttttttgataaattttatacacatacaaatgctctcgagcatgatagggagggcggtgcgcaatagaccttttatttttgagggaatttttatatttatactctatcccagaaaaatggctatctctttttttgataaattttatacacatacaaatgctctcgagcatgatagggagggcggtgcgcaatataccttttatttttgagggaattttaaatttatactctatcccagaaaaatggctatctctttttttg

SEQ ID NO: 35105 - DNA, 981 bp, Heterodera glycines
cctcttttaatcactgttcttcctcttttaatcactattgtacctcttttaattacagttgtacctcttctaatcacttttcttcctcaattaatcacttttgtacctcttctattcactgttcttcctcttttaatcacttttgtacctcttctcatcaccgttgtacctcttctgaccaatgttgtgcctcttctgatcactggtgtacctcttatgatcaaacgggcgcgaagcgcccgccagagcccaacacaatttaaaaacgggcacgaagcgcccgtctaaggcatcgaagcggccgagaacgcccacaaaatttaaataacgggcgcgagcgcccgtctgaggccgcgaagcggcctaaaaatcccagataaaaatttaaaaaacgggcgcgaggcgcccgtctgaggccgcgaagcggcctaaaaatcccagataatcttttaaaaaatccaaatctcttcacaacgcaatagcatatctaggtagcgaagctcccaaagcgcgaagcgctttttcccagctaaatagccgacggttcacgcacccgctagttaatatatacgttatattgacaaggagtttcgttgctaaaaccattttctcccggccgaaggccgggagcgccctgaaagtagtggaagggtcttacaactttttgaggagcatccgggaaaactatagagaaaaattcagcgcggacgactgagtcccggggaccgatttttcactttttcttgcagtttagggcccctaactttttttctaaaacccgaatcaaaaagcgcccgctgtgagggcactccccacaactgtccctctacatgctggtattttttatttttttattagagccacccccctggcctgcaccgcttggctaactgcagtgtgctcaaaaagtacacttctataccaggcgattaactcgccaggggttgctttgatcgaaaaattgttcctgagcaaaaatgt

SEQ ID NO: 35106 - DNA, 666 bp, Heterodera glycines
tttcgattttttaaaaattttattatatcaatttgtgtaataaattagtggggaattggccgaaatgatttctactaaatgtgattttcattttcatttcttcggtctaacaaaaatcattatctttattcaattatgcttaactattgtgataatttaattcataattttttttcatgcaatttagaaattcccatttaattttgataaaaaatgttaaatatttacatatttttttcataaaattgagtgaaattgattataattattatttttaatttgcaaataatttttttatgtgcatgtcaatggtaaatgttgacaatgattaacgttacttattgaatatttgatggatttaatatttaatgacaaattctccaaaactaatgcaatttttcattttttacatttatgaattttatttattgtgaaataattattatatatattgctcattttttcgtttaagtaaatataaattgcagggtttaaaaaattaattaatagttcattatgctgatgaatttgctcattttgttttatttttttcgctttatgccggcattctcaacaaaattatggacaaataataaaaatgattcgctaattaactcttctaatcgttctgctgctgctggtgctaatttggaaaatgttttgcca

SEQ ID NO: 35107 - DNA, 627 bp, Heterodera glycines
ttgaatttttttgatggaaaaagaggggaatggaaaaagaggggaatggaaaaagaggggaatggaaaaagaggggaatggaaaaagaggggaatggaaaaagaggggaatggaaaaagaggggaatggaaaaagaggggaatggaaaaagaggggaatggaaaaagaggggaatggaaaaagaggggaatggaaaaagaggggaatggaaaaagaggggaatggaaaaagaggggaatggaaaaagaggggaatggaaaaagaggggaatggaaaaagaggggaatggaaaaagaggggaatggaaaaagatcatgaatgctgctgtcctgtgctgtcaatttctgttttttgttctctttggtcacattttttttcttttgatttaagtttttaataaaaattaaatttaaaataaaattaaagaaataaaaaaaaaatcgaaatatgcctaaatcaaggtaaattcatgaatcatttattacaattaaaggcattttttattttgcctctaatcaaaatagtagtagcatgatttgattcggattttccgagctagaaacacaaaaatccgagactttctcgtgtcgagagccctatactggtacatttaaaattatatttgat

SEQ ID NO: 35108 - DNA, 1308 bp, Heterodera glycines
  unsure (1)..(1308): unsure at all n locations
tgagccgacacagtggagaanatattttgagagatttcctcggtgagtaaaacattttccatttgattagtggtgcgaatttgaacgtggagcagtggaaggagctcatttacaaccaaatcaaggacttcgaagtttattagatgatttcaactcacaatctcttgcttattttcagcggactcatgacattttcggcatcggcgtaacaatgaatggggacggcgaaatgctggacgaaacctgagcacttttttgggcgacttccttaatatttccgttctgtcatgttctcaaattacacccttcagccaattcccattttactgaatagtcaaacattttttttgaaaatatattccaaatttgtgtatatatttttttgtattaaaaagcattgctggttcatggaatgacaaaacgtaacttaaagggagaagaggaccccccccccccctccccctatcggtcgcaaaaaggataagaattaagaatgattattttttgactccacaatcattgtcaatctctgccccttttttgtataaattgtgatgtttcaatgttccagcattgtctgcagtatcgtcagagatgtgccgaaaattggtttttaatgagaaaaattggtgcatcccttttccgtttttcattgccattttaaatagttattcaaacaaataaatcatgataataataactgactattttatgatgcgttatttactgtaaatgcaaaatttaatttattttggcaaataaattcactgttatattaatttgtgcgttttctttcagatgaaagtcaaagtgatctccagacatccggatgaataccaacgcgagacaaaacatgacatattcaagggttaggagctttatgaagatatttttggtgatttttcgcatccgaaattagtgcctcggaattacgccgccccgcccgacccatttcagcagcaggtggagtacacgcgagcactgaacgcggcaaagttggagcgcatgttcgcgaagccatttctggctgcctttgatgggcacaatgaggcggtcagttggtgttggcatttcattttttattggcatttcgtatccccatttacctacatttcttcgtatattttcaaattgtttaatccatacgttcgcaggtcaatttgttggtcaaacatcccactcgtctgtccaccgttctgtccggtgcgcgtgatggccaagtccgagtgtggcatttggccactcgccgctgtttgcacgtcctccaggcacattccggccccatcaacggtctctctgttgatgcat

SEQ ID NO: 35109 - DNA, 1208 bp, Heterodera glycines
taacttttctcattatcaaccaaattaaatatttttggtagcattcgatagctcttaacattctctattagaatgcaaaatttcaaaaaaactttgtcatttgacgaaaaagttatgaccaaaaacctcaacaattgactttttcatggctttttaggcgccgtttgccataactttttttcacttgtatgattttttttcgcatgaaaatgttaagcacaaagatagggctttcaaataatgccagatttgataaatttaactgacaaagaaaaaagttataatatttattggtggcgccgaaacagtcagcgccgaactgactccgaccctgcccgcaaatatataaggaccaggccgttttcgcgtcggcgagtttttaactataactttttttgtcaaccaaatccaacaatcttagtatcattcgatagccctaagtgtcttctattagcttgcaaaatttttaaaaaatttcgctttcaaaattttcaattttttgtagtctaatcttctcaaaacggttgagaattcaataaaaataacattcacggtgcgaaaaatggggtatgaaaagtttattggggaaaaaagactctttacaaaataatacccctgggagaagggagtgggaaacatgatttcaaaattttcaattttttgtagtctaatcttctcaaaacggttgagaattcaataaaaataacattcacggtgcgaaaaatggggtatgaaaagtttattggggaaaaaaagactctttacaaaataatacccctgggagaagggagtgggaaaaatgatttcaaaattttcaattttttgtactctaatctactcaaagcggttcagaattcaatttaaataacattcacggtgcgaaaaatggggtatgaaaagttaattggggaaaaaaagactttttacaaaataatacccctgggagaagggagtgggaaacatgatttcaaaattttcaattttttgtagtctaatctactcaaaccggttcagaattcaataaaaataacattcacggtgcgaaaaacggggtatgaaaagtttattggggaaaaaaagactttttacaaaataatacccctgggagaagggagtgggaaacatgatttcaaaattttcaattttttctagtctaatcttctcaaaagggttgagaattcaataaaaataacattcacggtgcgaaa

SEQ ID NO: 35110 - DNA, 955 bp, Heterodera glycines
  unsure (1)..(955): unsure at all n locations
gcgggggggggaaggcccaccacgaggccgcgaagcggccgagtgagtaccttcggtgcaggaaaatattaaggaagagagttcattatttatttgttttttgcaaaattaattcataaatattttttagaacgtgctctgaaacacacaaaactttatttacaggttagtttaggcactcagatgctttcactatcaaaaagggagatgaataaaatttttaaaaatttttaattcctttntaaacaggccaaaaagtttaggcttatattntaaaaagtttcatcgaacctagcgcactaaaatcgatataatctctccaaattttgcaggccttctccattgtaaaggactaacttaacctgaaaaaatgccaacgcttgttgtttttaaaatttttcgaaattctgactttttcattacttatttattttttgcaaaattaattcataagtattttttcagaaagtgctctgaaacacacaaaactttatttacaggttaattaaggctctctgatgctttttctatcaaaagggagatgaataaatattttaaaaatttttaattcctttttaaacaggccaaaaagtttaggcttatattttaaaaagtttcatcgaacctagcgcactaaaatcgatataatctctccaaattttgcaggccttctccattgtaaaggactaacttaacctgaaaaaatgccaacgcttgttgtttttaaaatttttcgaaattctgactttttcattaattatttattattttgcaaaattaattcataaatattttttagaacgtgctctgaaacgcaccaaatgttaattaaaagttaaataaggctctctgatgctttcactatcaaaaagggagatgaataaaaaatctaaaaatttttaattgctttttaaaggtgcgaaaaattttaggcttaactttttttttataaact

SEQ ID NO: 35111 - DNA, 202 bp, Heterodera glycines
tctcgacaaactctcgctttcgtctttttgggattctcgcctctcgccaaactctcgctctcgcctttttggtgactctcgccaaaccctcgctctcgtctttttggggactctcgccaaactctcgctctcgtctttttggggactctcgcctctcgccaaactctcgctctcgtcttttctgagacaagtcacacccctg

SEQ ID NO: 35112 - DNA, 704 bp, Heterodera glycines
aatgatcacaaaaaagggaaaactctcttctattcatttgttcatctctcgtttttttcggatggtgggtattaaaaaggatttaccgtattatctctaattataaccccgggggattattgttcaaaaaaatggtaaaactcaactcgtttttgccttaacatttttattaccccacttttttttcaaatttttcttgaatttgcttaaaaaatttaaaaaacatatgctgaaacgtgcagcaaaacacaataattgtttcattttaaaatttacgcatgcaaaattcaggccttttggagttttttcaatttaatttttttggtattttacaattttatatatttttatatttttaaaattgagtccggcaaaatcctaccaaattttgattaaatcatcggacgaaggataggacaaaaataaaagagaagaacagctgatggagtaaaccactaatttgtcgaatgaacgaatattatattcaaaatattgtcaaaaatggtcaaaaaactaggaacgaagaaccaaatgatcaaaagaaatgagaaacaattcaaaaatttgaagcaattaaagaaaagttcaagcaaaaaggaaaacatcaatggaaaaacagagaaaaaattgaaaggaaaattggaaaaacattaggggttggtccctataaaaatataaatatatcaaaaaatatttttcctttt

SEQ ID NO: 35113 - DNA, 1034 bp, Heterodera glycines
  unsure (1)..(1034): unsure at all n locations
attagggttataagttgtatgcactaaaaaatgcaaaatatgcgcataaaatatgcactaaaaatcacccaaatatgccctaaaacccccgaaaaatgcccaaatatgcactaaaatatgccttgaaaattactcaaaatggcttttaaccctcaaaaaatgccaaaattgtgtaaaaatacagaattgactttaaaaacatcaaaagaatggctaatgagtgtttttagacaattgcaaaacattttaattttaaaactttatatagaaatttagaattttttaaaatttttattaggtatatgccaaaataatattgcattttttgtatgaacaaattttttaaaaaaattctcacaataagtttaaaaattttcgggttttaagggtgtatttttaaaaaattcccaaaaagtcgatccttagggtgtatttttcgcttatttcgcatgttttttgggggtgtgtttttgaactaaattttccggcacaattattagtagggctcgaaattatatggactaaaaaacgtcaaatatggacataaaatatggactaaaaagttcaaaaatagccaaatatagaccaaaatatggactaaaaactgccaaaatatatgttttaaaccctcaaaaatttcaaaaaaggtttatatattcaatatttgcttaaataaatttaaaaagtacaataaacaaccaaaaaatggatttaaaacttaaaaatgcatatttttattgtcgtccattgtataaaaaatatttccaagtttgccaaaatttcgaaaaaaattttaatttaaaaaaaagaaaagttcgcaaaaaatggcgaaaatatttattaaaaatgccaaaatgacctacgaaaactcaaatttttcgtttttttgggggggtgtaacttttanaaattttcaaaaagactatctttaagggtgtatttttcgctttttgcatttttcttgtgaaaatttgccaaaaatggccaaaatatggactanaaaggcaaaaatgacganatatggatttattccc

SEQ ID NO: 35114 - DNA, 995 bp, Heterodera glycines
tttgtaacatgcaacatgccaatttaaagatatttcattataagtgtattttttcagcgttttcatgtgattatcaaattaataaatcaattgttttaaattgtcctcataaatacattagctgaataatgtaacgattagaccttttattatatctgatctatcccgggatgaatttgtgataaagcaggtgagttaaaatgctttcttttattttcgttttatcaacactatcgctcacaaaatttgaatatttccggaacaaaaacaaggtctaggaaggaacctaaattttctgtccatataaatggtcaggaacttacagaggaatgcatctcctaggcaagctaattccgaaatgttgcgcaaacatcatagaaaatgaagggaataccgattttcagaatatcgcgtggcttcctccgatccagtcgggcaactgtggattcaggcttttagcaactgaaattctcaaagccgttagaatttgcctagaaaggctgttatttgaaatggaaacgtatctttacaggtttcgtagcaaagaaaaagcgatttctatccatccctcgtgctttgtatcaaaacacgtggacttaagactatgtgctatggttcgcttgttaggtttaacctgcataaaatctcttttgtaacatgcaacatgccaatttaaagatatttcattataagtgtatttttttagcgttttcatgtgattatcaaattaataaatcaattgttttaaattgtcctcataaatccattagctgaataatgtaacaattagaccttttattatatctgatctatccgcggggtgaatttgtgataaagtcaggggagttcaaatgctttctttttattttcgttttatcaacactatcgctcacaaatttgaatatttccgaacaaaaacaggtctaggaaaaacccaaatttctgttcatatagatgggcaggaacttacagaggaatgcatctcctaggcaagc

SEQ ID NO: 35115 - DNA, 841 bp, Heterodera glycines
aagtttggtagctttacaataaagttataagcaaaattgtttgcttttgatggctttgttttctaaagaacgcacacataatgatgatttttaaataacgaccccaattttccgatcacgtccgggagccgttgtaaaagaaggtggttatggttaaataaccactgatgagggggctaaagcccccccgaaacccaaaaagtacaaaattctcagtaaatttttttgaaattttaagcaattttattaacaaaattgtattaaaatactcaaaaaattttcccggcggcgcctgtcggcactgtcggacccctccctattttaccatatttttgaaaaatggaggacaaaatggcaaaaaatattaatttttggcgaaaaacggcgaaaaattttgtaaaatacaccccctaattcgggatttcaaaaaaccaaaaatacacccctaaaaatcgacttaaaaaggaaaaatacacccctaaaaatggctacgcccttggttggtgggtggttcgtgaacgcacagcaaaagaaggtggttactggttacctaaccccatgtaaccatggtaaagcgcctgccctgcccctccctctctacccatggtagcagtcgtaaccaccaacctttaaaaatctgccaaaaaaaaaccaatgtaaagttttaatcgaattaaatgccgaaatatcttaaataataataaaaaaatttacaaaaaattaatccataaataataataattattattttcatttattctaccaattttctaggtactttaaacattattttgcccattatattaaaaaaatcagtgcaaattttactaagttcatggta

SEQ ID NO: 35116 - DNA, 1032 bp, Heterodera glycines
atattggcaataagacggttctgagtatccgtatcagaaacgatgctatttatgatcagagtgatttgatggctgacaaatgcggtgatcagattgcgggcagccgaactgatcagccagccgatcagcaagacgaacagaaccagaaacaccgagcgcaacattttgcgcattgaccgatcagcagccgctaaaatatggcaattagaatttaaatttaaaacaaattatttgcgacattttgcagccgattgttgcgtttgattcattggttcctttgtttatttgatggcgccataaaataagaccaaaaattactgcataatttaaggtgcacaacaaaaggatggcatatgatggaacggtattcggtacgtccgaataaatcccactgttacagtacaccaaactaaatgtgcggtaaatgcatagaatatttacaattttcagtaacatattattgtgcaattatttatcattgatcaaaggtatcgctcaaatggaaggttgataattgtccacatatcgaatatgtttaaatttatcagaatgccaaaaagtgagcagaaaaccaccgaaaccattgaacaccagcgaaccgtcgattttttattcgaattcattcgaaaaatgaaagataatttataaaaaattttttattaattaaatatggaatttacttgatttggtacattatgatcaacaggcgttcaactgagatcagatacattgccatgattgaggcgtacgatgctacggtagctgccatgagagtggccaggcagaaacggtagtcaatggtactgtattggaaaatgacgccaatcaaattgacgccaaacggcgcaaccacaaaaagttggcacagagaatcaaaggcgatcagccaattgcacactttgtgatcagtccttggagcaaaattaaatttaattttaaattaagagtataattcacatttttgtgcatgtgaccaaaatgagagacaaattgaacagaatcgaaatcggagtgaaaatatttggaagacaa

SEQ ID NO: 35117 - DNA, 1029 bp, Heterodera glycines
  unsure (1)..(1029): unsure at all n locations
aggagatntattttgaaattttccgtgaatttgagtttggccaaggacacctgaaatttggccataagggtctgccctgaaatctcacgattttgaattaaaaatttctctttttgcttaatcttctagaacatattgaattttacaaactggccaagtttaatgttatttcactaaacattcattacgttatggtcattggtgtaaaggggtagtcaaattttctcaaccatatcataatattcgtacaagttttaaaaagtatcctaaaaacgagaaaaataatcattttgaagtggaaggttagggctttcaaaaaaaaaaaaagtttttaatgtaagtaaaaatgcttttttttgtgctgtctggtaataggcctacgacgggagagagagagagagagagagagagagaggagagagagagaggatagagagagaaagagagaagcaatagaggaaggttggacggggggagggggtttgagttagggtggaaatttgaaaaattttatgttaggggagccactacattttaaatttaatttattttttttaataatgaatcaaaatttcaagtaattatttcaacatttaaatgaggacaaattaatggcttatgacgggaaagagagagagagaggtaggccatgtcaatgttcagcaggggcaccggacgggtgggattgtcttggatggagtgatgtgtgaatggattttggggcgccttatatacggcaatattgttgccgtgtatccagttttttggcataaaaatgcatacggcaaggcaaattacccaatgacagcctcgacaattgtgccataaactagtaaaattagttattacatcatgtccacattgttaaatccagccgccctccctcccatttctataggcattcaatcatatttatttatttatatgttcattttacttaactttgcacatttgcccccccccccataattacctcacggcaaaaaacacacctcccaaaatcccaaaatctttatttttttgcacgtt

SEQ ID NO: 35118 - DNA, 1358 bp, Heterodera glycines
  unsure (1)..(1358): unsure at all n locations
tgtaaatgattaaatgttttgntggctctgtcttacatataattattttcacgaaaaattattgtggctgagagtgtgagtgatttttgttgtacaaaaataaattcattatttatgtgcaaattcatcattaaaaaacgaaaaaaaaataatggaaataaaagcgctaattaatatttaatattttaaaacaattttgctacaattttcagaaatagaatcatttaaaaattatttttttggcatattccgttatcccctaaaaacttttttcaaattttgctggactaatttaatgcgctgaaaatgaacccggctttgtttttttgattcgatccagcttcattcgcctgagatgcattaactcttaagtggaaacttaaaactggtttttgagcgcatgattaaaataagcttaatgtaggtctaattaccaacgagaaatgtgaattttgaaaatatttaaaaggttttcagttaatttatgtatttaagtgtgccattaattgagtctcaaaaatccttaaatttatggcacagttgagagaaaagacgagaattggatgactctttcttgaacattttgcatcaaagttggtaatagattttccagatctattctagtaaatttgaggtgtggtcaagaaaaaagagagtttttggcaaaatcattttaaaaatttttacattttaggatcgttattctttttttttataaatttgatgcatattcctcgaaataattttctttatttcaaaatttaagctgaataaacattaaaattaaaaacgttttgatcactaaactgaaaaaatgccaaatcttcggtataaatttttttaaattgtcatattcgaaaatcaatggttaataaaaattcatttgttttaggaatttgatgacttccacaatttcactatttacctgaacaaataataaaattcaaatttttgatgattaaactgaaaaagtgccaaattttcggtgattctgtttgctcatctgctgtcatactttcttttttgtactggtctcacaaactacagtcaaaagttggcatatttaagtcagaatttgccaatcccttcaccaattcctctgtttaaagcccttttacaaatcggaaatgaatcccaacggttttttctttgttttagcggtactttttcttgtgaaagtcgactttttacatggcgtttacaatggtatgtcaataaaatatttctgatttttaaacaaaaataaaaaattcagaaccaatggcacgacaggtgctgcaaaagcatgcatcacaatttcagcagcattgtaaaaatcccgcagaggaagtgccgtggccaaantgttgcagtgccat

SEQ ID NO: 35119 - DNA, 888 bp, Heterodera glycines
  unsure (1)..(888): unsure at all n locations
atgcctgcannggtcaatcgaaatntcaattgaaagaacactgaacattctatcagttatttcgccttttgtccttccattctgttcccaatttctttgactatgttttccaatccttctgcatattttccggaacggaataaatttttctaaaatggcattaaaattaataactaattaattaatgacattgtccggaagtattttttggagtgcaatcgacgacttttgcaattctccaaatcggttctgggattttagttttttggccaaaaaatgcgacagtgaaatgccacatttcctccgagagacaaattattcattacatcaattcccattagtcccttcttaatggaaaattatgcgctaattagcgagttgttaatcacataatttatgtctcctggtattacatattttttcaagtgccacctgatcagtgaacattcgagtaaattccgtgcccacaattggcacccctttcatgcgcgatgtccagaattttttatcccccactgccacaagcatcacaatggccttgccgcattcgtcgtccaaatgccatcggcgcattaatccgtccgccatttttttggctgcctaaatatgttttcaacatatttttcttttttttaatttaatgccaaaaacatatcaatttcaaagttacactctctcacattcgattgatcagtggctgttttgctgatgtgattggcaatggccaacacagcagtgagtcctttcttgtcgcactttgactctccgcggcccaacttaaatggattaaaaatgtaattttaatgccaaaattaaaaatatttatttttatttcctaatcctcaaattgcccaccccaaatgcttttgaccatttcggccaatgctt

SEQ ID NO: 35120 - DNA, 864 bp, Heterodera glycines
cggaggggcgggcggaagattttgtgcaattaagaccattttacattgtatctaagtaattagctacaaacatacaaaaagccatcccaattttgtcccattcgcattaacaaatggcaaaaatatatggccttaatgaaaaagaagcattttatatttttactgacaatttggccagtccaatctcaatttcaaatttgtattctctcttatcaattcattcattcattcatccattgcataatattctttttcgttttgtttgttttcctcaaaattgctttttgagatgctttgtcccttctttgggatgctttgtccccccccccccccccgctttttttgcttttcattcgtaatttttctttctctctgtccgtcgtattcctttccttttccttttttgtttgtgttatttatttatacactttcttgggttttaaatgtgcattaatttttatcattttgttcaattgcaaaacgatgaaaacggagaaaagcacagaaaacaaacggcggacggacggacgacgaattttgggcattcgccgccgccccctccccaatcacagcaccttttagtccgtcaatcaacacaaacacaaagccaatcaagcaaataaaattgcataatcacttgattaaatcattcatatgcccataaaattctgaaattcatttgttgccattgtgccacaattaacccataagaaatgccatgggaatttggaaagtaaacccatcggtataactcggaactcactggtactatagaaccccggtagtcctaacggatccccgttcccgggcctccctcccggtcattttttacgagttcaggtcccggactttcaagctctactg

SEQ ID NO: 35121 - DNA, 1181 bp, Heterodera glycines
  unsure (1)..(1181): unsure at all n locations
ctcagatttttgaattgagaaagttgtaaataagtaataagantagctgtnccataagaaagctccgctcgactgcccatttctgatcgcttcngatgcctttgnctatgccatcactcggttcccctatttcctctcatttttgctcgtttgcattcgtcacccgattcgactaatcgattgctctttcctaatgaccgttgcgctaattggcaatcggacttccatctttatgatgctttttctcggcatcgaacggtgcgtcgctgtgctcttcccaatttggtaatcaattagataattgactaattattatcaattttaagtgaaaaaaaattctcaggtcaaggagtcgcaaccaacgcaaatatgctttttggacttgcatattttctgtgcttctccatgcaccgttcagtatttaccaatgcttatctgttgggttcaacgcaccgaaaaggcgccgatttatttttatttaatattttaattttaattttagattacttttgtgctcctcaattgatgttgtggcgggaggtggaaacaattttatcatcacaattttgaacaacggagtgatgggcggcacaataattgtgtacactttgttgtggttgaaaattaaatttgcgtcttctccaaatggtaaggcaaaggcaaaggtcgaaaattgagtgtcaccaaattacagtattccgagggaaattgaccaatttccaaaatggcaattttaaaaatattatgactagggtagcaacttttcgtgacgaaaaatcccgaaatagttaactaaaatagtgagtaaaaatgccaaaatagtgaagaaatagtgacaaaaagtccgaaatagtgacgaatagtgacataattttcagccaaaaattaagcaaaaataatttttattcactgattgcattgcaaatgagtagggctgggatttttaagggcaaaaaaacaaaataggtacataaaanaataatttttaanattaaattcttgcgacgaaaaacctttttgagaaaattttttcatttcttaggagtgctttttgaaatttttttgtcgatcttangagtgtattttttgttttattgcattttgttaagaattttccaaaaatgtcgaaatagtgaaaaatagtgacaaacgccaaaatagtgatttttactattttagtg

SEQ ID NO: 35122 - DNA, 822 bp, Heterodera glycines
actgttcccactcgccccgtcgaggcccgtcgctggccttttttgcgggttttctttctcataccgttggagtgtgaaatgtgtggtcattacacgcttaataaatgaccaaatttactaattgatgctttttcgggggactcactgtgctgtggatggaatagaggtggaaggcaaggcaagaggagatcatcagttggatggttttgagtcgattccgaatggaaatggcagcactcgacgaactcaacgttttgctgttcttgaaagatgcccaagaagagctaaaaatgatttgagggtattatgaaaataattggcaaaacattactttaaaaaattgactacgtcagtcaatgatgagtgcattttttcgggctttgagttgagtgaagacgctgtcattatgtaaaaagcgacggattcgaagtaaagcagaatctgatgcaccttatccctctaaatgcaaatgtttttgggttcatccgtcctattcagtccgcctttgcctcgcctacctcattatttccactttttttaagttcacgagcgcggcttgcaaaatgatccacggacaaattttttccgttttcaaaacggggagcaaaagtggcgacggcactttgacccgaagacttatgcaacagaatgtgtaatcagaaaaagactggtgtgggtattgtaccagctttccatctgaatgttgagttggctcttccgccaaatttgacgacggtgccctcggcgtattggcactttcgctcatgccggaagatgtgctgctgtccatattgtctctctgatccgcctttttgtcttgct

SEQ ID NO: 35123 - DNA, 1566 bp, Heterodera glycines
aaaacgaaagactcagattttcgaaaatttttttgagccagctagctcggcgctcatttcagtgtaagttagtcctttaccggggagtatccctgcaaagtttggtacgcttctgctcaattagcaaaaaatatgagtgatcgaattttcactaaaaaagttaagcctacattttttggcatatttaaaaagcaattaaaaaatttttaaaatttaataattttcctgcaccgaaggtactcactcggcctcttcgcggcctcgtggtgggccttcgcccccccccctcccacgcccttcagagcacgacaaatatttcaacaaaaattttgaaaaattgactagagcaatcgaacgctaacggacgacctaatggaaaaaaatccccgaaggagagaatttaattaaatccattccttcgggggaccgtgccgggtgccgcggggtaagcagtgctggttcgtttcatcacggcaccgaaccttttggctagtcagcaatcgttgcttaacttgccagatcggacgggtgcgcatgattccactgttccaagcaccccaccaaaagcaaaacgatataaccaaaatataaggaaaaattttttaaaaaattttttctccatcttcctttttgatactaaagcatcagagtgctaaaattaagttgtaaataaaatttggtgcgctttagagcactttctgaaaaaaatatttatgaaacaaaaaaatcgattttttcaagtgtccgtttggggtactcaaacaattatggggagcaaaaatccaacgcagaattaaagtacaggctatagggaagctattcccgaaggattcggtctccccataaatctgggcgcatcggttcggggggactgccccgaaaacaaaaaaatcgattttttcaagtgtccgtttggggtactcaaacaattattaaaaatttttagatttttattcatctccctttttgatagtgaaagcatctgagtgcctaaaataacttgtaaataaaatttggtgcgtttcagagcagtttgtgaaaaaatatttatgaattaattttgctaaaaaaataaaatagtgaagctttaaaaattaataaaaaattttaaattcagaattactggagttagcatcatagcagtgcttttccttgtctttttgatgccctcgcaaaatctggtccgcttctgatcagtttataaaaaaaaagttaagcctaaaatctttcgcaaatttaaaaagcaattaaaaatttttagattttttattcatctccctttttgatagtgaaagcatcagagagccttatttaacttttaattaacatttggtgcgtttcagagcacgttctaaaaaatatttatgaattaattttgcaaaataataaataattaatgaaaaagtcagaatttcgaaaaattttaaaaacaacaagcgttggcattttttcaggttaagttagtcctttacaatggagaaggcctgcaaaatttggagagattatatcgattttagtgcgctaggttcgatgaaactttttaaaatataagcctaaactttttgg

SEQ ID NO: 35124 - DNA, 1191 bp, Heterodera glycines
atgcccaacgcgacaatccgcgcgccggccaaggccaactgttggtagtgcgagtcgtagtcagacggtggattcgagaactgaaaagggactgacttttcaattccaattacggcggttttggcactattttttcaaaatgccattcatccgttgctcaagcatttctcccacctcttccacttcccttagcattccctcaccgaccattggcttaagcacttcgggcgcccccttgacgctgacaatgtgaaaagtgtcgttggagccggcaaccggctgatagcccgccacgacagtcatccgtttcatttggctggtgaagtgaaagcggcggaagattttcagcggcgccattttgggcattcgccggttcggcatcacagcgtcttctgagaatggagaaatttatttttataaaaaaattctaaagattggcactgaattccgccccttagagccaaaaataactctcacgtttcgtgacgttccagtccaaccatttgagaatggccttctccagcggatcgcccaccaattcgttctcaaaacggaccaacgagtggcaggaggccaacgcgttgattgtgttgggtccgcactcggcaacattttgaacaacagttactgtggtgtcgcttggcgtcgtgtcattttctgtggagcggctgtcagaggccatcgcatcgtttgaagtacttctacaaacagtttggatgaaggaataatcttaaactggatttgaaactccgacccatcccaaatagtttgattgttttcggaggattcccaaatccgatccccgagattatcttcttcaaaatcgtcgttcccctaatttcatcttgtattttttaggtttccaatttgctgacaaatgtcaatgatcgttcatcggctgaaaggggcgttcgagttcgaattgtgctcacccgttgctgttcggggagtctgcctttgttgtgggcagtccggcaacgccctccatcaccaactcgtccttagtcagagtgcccgtcttgtcgaagcagcacatgtccactttgccggcgaacggaattcgaaagggttcggtgcagaaaatgtcgagccgttgcagagcaaccagcgaattgttcaccttgaaatgcatttaaattaattcacttggagggaattcattttccggggaaattgcatttttatatgcaa

SEQ ID NO: 35125 - DNA, 1119 bp, Heterodera glycines
atacagtatttcaaaaaattttttgggggataataaaagagggaggggttcaattcgagggtgggaagtacggtaaaatagtaaaaaatatgtgcattttggttcccagattgtctggaggacaaaaatataaaaaaagaataaatgtttatttatttatttattatttgattgttacttaaaaatgataaaattttatggctttttacgtcatattatgatgatgcaataaaaacatatttacgaaagaaatgtttttattggtggctctatttaagaagaagccccacttggacagaaagcatacattttgttttgcgaatcggaaaatgtttttcccaatttcacttttcataaattttgcgatgctttacaaattgctaaaaattgaaagctctccaaatttggcaagaacaattgctaataatactgctaatttgacccaaaatccttttgtcttgttaaaaaataatgctcaacaaaatgcgaggcatttcaaaggtttgacattttaaaaattaattactagggttcgaagttgtatgcactaaaatatgcactaaaaaatgccaaatatgcactaaaaatcacccaaatatgccctaaaaacccgaaaaatgcccaaatatgcactaaaatatgccttaaaaatcacagcaaaatggcttttaacactcaaaaaaatgccaaaaattgtgtataaattaagaattgactaaaaagaccaaaacaaggactaaggagcatttttagacaattgcaaaaatttttattatatgctaaaacaaaattacatttttaatatacctaaattattttttccaaaagttcttgcagaaaatttttcgatttttaagggtgtattttttaaaaaattcccaaaaagtcggtccttaagggtgtatttttcgcttttttcgcatttttcttgtgaaaatttgccaaaaatgaccgaaatatgctctaaaagcccaaaaatggcaaaatatgcttttatctcgaaaattccaaaataggcttttatatgcactaaaaaccttcaaaaaatttaacgtagaaatgctatttttgagcccctttcttcatagcatatgcgcagaaaaaatatgcaaaatcata

SEQ ID NO: 35126 - DNA, 782 bp, Heterodera glycines
  unsure (1)..(782): unsure at all n locations
aaagtcacagaacaatcgctaaaattttatcaaaaacataacgcacattattgtgactcaccaaagtcacagaacaatcgctaaagttttatcaaaaacataacgcacattattgtgactcaccaaagtcacagaacaatcgctaaagttttatcaaaaacataacgcacattattgtgacacactaaaatcacagaacaaacactaatgttttatcaaaaacatgacgcacattattctgactcaccaaagtcacagaacaatcactaaagttttatctaaaacataacgcacattattgtgactcactaaaatcacagaacaaacactaatgttttatcaaaaacatgacgcacattattgtgactcaccaaagtcacagaacaatcactaaagttttatctaaaacataacgcacattattgtgacacaccaaagtcacagaacaatcactaaagttttatcaaaaacataacgcacattattgtgactcaccaaagtcacaaaacaatcactaaaattttatcaaaaacataacgcacattattgtgacacacaaaagtcacaaaacaatcactaaaattttatcaaaaacataacgcacattattgtgactcaccaaagtcacagaacaatcactaaagttttatcaaaaacataacgcacattattgtgacacacaaaagtcacaaaacaatcactanaattttatcaaaaacataacgcacattattgtgacacacaaaagtcacaaaacaatcactanaattttatcanaaaca

SEQ ID NO: 35127 - DNA, 1079 bp, Heterodera glycines
atcagccaaagtttaattgctggaagttgctcacggccgaactttacacaaatagatgcttcgagagcgcaaattgccaagtaaagccttgaaaaccaaatgacaatttattgaaagcccaaaactaaagtgaattgactgaccaacattgcattcccattcgcttaattttcggatcagtcacgtacaaataatattgtctaaaagattcaacaacaaataaactaaaagtcaaatataattaaattaccgaattgtgggggcagcgatcagtccgatgaaaataatgtgccaaaagacgataggatgggaagtgtcgatggctaaaacgtgtttcaggaaaaacacgttcagctcggtggccaaccagaccattatgaaggcgtaaatggcaatgcacctcttaaggcccacgagtgtctgaaatgaattttgccgccaatttcaacgagtcagtttgttaccatatgcgccttccccggaccgtttttgtggtcggtgtttggcttgtctaccatcaaatcgctgccctgcagccaattgacggttatccaagattcgggtgtgaattgaagaacgacccgcttcaatttgccacgcaaagttcgaatatttctaaaaagtgagtgcacaatttaatggatttttgttagaatgcaaagaaattcaaaaggcacttgatgctctcccaatgaaactgctgcatctccaaacaacgacaaatccaaagaccgcaacaaatacccaatccgttgcacagcaaaacatccaaaatgatggcatcccaccaacattcttggaaattgggcaacaaatgggagaagacaatctgagggactccgtttcatttgatggcaatgcaaaaaccaacctcagtcaattcccaccaaatgctaatgtaccaaccttaaacaatgattaactgaaagcaaaatatgtgcaaatgttcacagatgatgctgtgccgaatgagcagtgctttcattgcccagccgaggaaatgtccgaccgcaaaaatgtccatgtaccccaaagacgctccaaatcacatccgagcaattcacgcgtacatctgtaca

SEQ ID NO: 35128 - DNA, 507 bp, Heterodera glycines
taacagcttctcacctgtggctgtttttctgcttatcagttcatttcttcacattctcccatctcaattacgtggaatgcgtcattcagcttattttgtggaaagaaaattccgactcatttcctttcattttttacatcgttttctgtcaacttcggcaatgccaactaaacccagcagacattcgccatcaaaaatcgtccatggagcgggaaaaagcatttggtttgttttttgatttgttttcccatttaaccaatgtaattttgctcaaagggttgaatttactgctttggctgtcgaatgcaatgcggtcaatttgggacaggtcgtacttttcatattttcttttattcttttcattttagggtattactgattctccaatgccggattttctcgcgcgacatttggccgatatcggaaaaagttccgaaaggaccgatatccacaaggtgaaacccacccattcaattcatatgatattttcccttacttggctttact

SEQ ID NO: 35129 - DNA, 862 bp, Heterodera glycines
actttgcttttttgtccatttattccaatcgactagtgctttaaggttttgtctttgactttgcttttttgtccatttattccaatcgaccacgttaattcattctctatacatttagtgtcttatttcatgaaattatatataatttaattttaaataaagaggcaaatttttacagaaaataaatagacgctgactaattagctaacatttataaagaaagtagaaatttgattaaatgcatatacaaaatattacttttttaaaatttgtataaagttcctagtcgtatgtgctttgcgttggttggttggcgtgggtgagtgtggtggttggaccgtttttgcgatattgtggctggaaaaaagatgcgatttcgctatggggagcgcggccgtctgggttcaagtgcttgcttgcgcttgtgctcggcattgaacggtgatggctgctgctggggtgccacctttgtcgtggcctcagtttccccagcgattggcagctgtcgaaatgaataaaacatgcagctcgtctgtgtgttaaagaaatttggcgagttaattgacttgtgtaaatgtggcctaaggcacaaatgctgtggggaactcagcactggggatgctgaacctaaagttggtggtggtgttggtatacgagtgagtggcgtattgccatggttgacaagccctatgagttcgtggatcggaactccttgcctggggaccagtgtgcttgcattcgaaaaaacacgagacataagcgcccgaaggcctctggcctgaggaagtgtcctaaccgggaaatccggaatgctcgtgtgagtgcctgtgcactgccctcggagctgtgtccagcggcgaga

SEQ ID NO: 35130 - DNA, 952 bp, Heterodera glycines
  unsure (1)..(952): unsure at all n locations
tgccattccggcccagtccccatgccaatttggccatgttcagtcccgccctgctgtttatgccaattccgacccagtccccatgccaatttggccatgttcagtcccgccctgctgtttatgccaattccggcccagtccccatgccaatttggccatgttcagtcccgccctgctgtttatgccaattccggcccagtccccatgccaatttggccttgttcagttccgccctgctgtttatgccaattccgacccagtccccatgccaatttggccatgttcagtcccgccctgctgtttatgccaattccggcccagtccccatgccaatttggccatgttcagtcccgccctgctgtttatgccaattccggcccagtccccatgccaatttgaccatgttcagtcccgccctgctgtttatgccaattccggcccagtccccatgccaatttggccttgttcagtcccgccctgctgtttatgccaattccggcccagtccccatgccaatttggccttgttcagtcccgccctgctgtttatgccaattccggcccagttcccatgccaatttggccatgttcagttccgttgcgtttgtgccaactcaccgtcttccgttttcttatttttcttccgcctctgctgctctgtcctgctgctcagtttggttttgttctgctcaattttgctttcgatctgctccatctcttccttcgccaattcttcgatttcttccaattcataaattttattttcgtattcattttgctgattttcaaaaatttctttgatttctctttgaagtttgcccatctttttttcgaattgttctctccgatttcgtagtgattcaaatattaatttttgcttcgctgtacggaactttttcnaattttttaaaaatcacgcagccatttgaacagaaaattcgctctatgtgatt

SEQ ID NO: 35131 - DNA, 1134 bp, Heterodera glycines
aaattcgaaaaatttgatttttcgactttttgttcgagtccgggattcggatttggttgaaacgggtgccggattcgtgatcagcgactccgaaaacccatggaaacatgttttcatattttcttataaatttcgttaaaaatttttcccagtggcgcctcggcaccccagactattaatttcccgtattttcaatctctccccggattagccatttatgagttttgtgaaacaccaggttgttctctctccccggattagccatttatgagttttgtgggtcataaaattatcggccctaataagttattcaaattttgtaattctgattattgttagctgtgatcgccgcgtcaattttttaaaatttaaaataaataaaaccttgtatatattgcaaacaatgtttttttgtgtcaaatttatccgattattaatcatcctaattatcaataattacacgaatttacaatttttaattggctaaaaagaataaaaggggtttgaagcattttagaaaatggtttaattgattggtaaaggatgaatgcagcagaaagcgaatcaaaaaattgttaattggttaacttgaggggacccgcgatcgaatggctgggtttaatctaattggagtaatggggtgctctgattgtacattcaatacgttttctcgttgtcaaagataaatatgttggaaaaacatagaaggctgatattatggataaattcgtttatgacatatctgtagcgatgaagatcgataaggaagtaacggaggaaaatgaaaaagacaaattgcaatgtaataaatagatagctaacgataaaataacgagcaaatgtatcaaaaaacgaacagaataggcaaatggggttaacggtttcgtaaatttacaattttcggtcaaagtgtacggacatttgccgaaaggtaactcatgtcaaacaatcatcggcatctatgcaagaacgtccgtcttattctattccctaacgaccatctcaaatgatgttccgattgggctggtgcgcgcactcctccaattcgctctcattgtcagcacgggttgcattttttggatgttggtcttcgtcgaggcatgaaagtttgccgtctggtccctgtgagagagt

SEQ ID NO: 35132 - DNA, 1380 bp, Heterodera glycines
gcccgttttttaaatttggttgggaccagacgggcgcttcgcgcccgttttttaaatttgtttgggccagacgggcgcttcgcgcccgttttttaatttggtgatttttaggccgctcgcggcctcgtacgggcgcttcgcgaccgttttttaaatttgtttggaccagacgggcgcttcgcgcccgttttttaaatttgtttgggccagacgggcgcttcgcgcccgttttttaatttggtgatttttaaaccgctcgcggcctcgtacgggcgcttcgcgcccgttttttaaatttagttggggccagacgggcgcttcgcgcccgttttttaggggcacaacagtgattagaagaggtgcaacagtgattattaaattcattaaattaaaatgaaaatattttttaacaaatttaattaaaaaaatacatgaaattctatcaattaaaaaaataattaatttaaacttataaaatttatttatcaaaaaaaattaaatataattttttatttattaactcaacaaaatattttaaattaattaaaatcattgaaaataacgtaaaaatacaaagaaaaataatgtacaccgcccggcttcgaacttggcccccccccctcaaaatgatgcctcagaatccccaatcacacagggattctgaggtcttgactatgtcaaaagtacaatctgattacgtattcgtgatcagcaccctaaaatagccctaaagacatattttttgaagatttttggtgaaaaaatttttcaactcaaaaatcctatgctcacccctttggtcccgaatgccaaaatcacttttatttttgtatctttttttaaaaatgtgataaaaatgtaaaataaaatttatattatagagaaaaaaattgcggatttttgtagtattttacttttcccgaatagcttttcagaaggcagctacgaatttttttctgaaaaatcgaaaatttccagaaattctggaataactttttttttttttctgataaaaaactcaaataaatcccataaaattctcctgatttttctctatttttaaagctttattatagttaaatcgatgaaaccatcaccgagttatgaattttccaatattaacccaaatttccaagggccaaaaaattgccaaaaaataaagaatttttaaaaaattccaaaaattatgaaacttaaaatagacattatattcgtactcagcaccttattttaccccagaaaaatatttttcacccccattttcgtccgaaaaaaaatttccgaaaatttctagggggcctagctcgaaaatttttgaaattttccagtcatgaagcacaccattcgatagcatttaaaattctctacaaaaatgttcta

SEQ ID NO: 35133 - DNA, 1186 bp, Heterodera glycines
  unsure (1)..(1186): unsure at all n locations
cttggaaaatcaaacacaactccgcttaaaagacagatttctgtctgcaaaagaaatagaaatgtgaaaaaagatttgtctttcttatttagcttattttatcagtttcttttnggtagttattgagatttgattcgtttttatcaagtgtctctattttaaattaacacccctttttcgggaaaaaattcataaaattttttattattttcgaaacaaatcgacaatttttaaatttaaaatttaaacaaaattatttgtttttgaagaaaaacatatttatcattattattttattataaaaaataattttaaaaaaacaattaatccaattaattgcgttgctttatttgggcattttattatttttgaaacaaatcgacaatttttaaatttaaaatttaaacaaaattttgagaatatatttctaaaaatgatgttttcggacaatttccgatctttgggggtcaatagtctaatttagctgatgggagccgttctattagatcttttttggaaagctgccaaaatatgtacataaaatatgtaaatatggatataaatcgcggattacggaaaaatatggatatagaaatccatcctagaagcttcaaaccaaactaaaaaaatgtttttcgtgcgtttcagggctcgcacattccaattccatataattccaagccctaattataacttcacaggtgttggatacaaacaatggctgatggcaacgaatggaaacgagaaccgcttttccattttgctagaattgtttgtttggatttgatgaaagcggtgagttttaggtcaagggcgtagccagacccttggcttctgagggggtgggaggggggctcaagtcaaaaactcgatttttggtgtatttttctgtttttattcgattttagggggtgtatttttcgttttttgaaatcccgaagtagcgagggtgtattacagaatttttagctttttttcgccaaaaaattactgttttttgcatggtttttcacacgtaattaatttcttttatgatgaatttagtctttgatcgcgtcacattgtgccaatgttatttatgcgggcaaacaaaaagatattgatattgaccataggaacatcaaattaaggctgcaagaaattactacccatatggctgattggatagccaaaatgctggtaaaaa

SEQ ID NO: 35134 - DNA, 849 bp, Heterodera glycines
  unsure (1)..(849): unsure at all n locations
gagcattttcgaaacacagcaatgccatgtggtcaactgcaccactcacacacccacgtataatttaagagaaatttcctccccgatgcccacttttctctcgccgaagatcagcaaggagaaagcttactttattggtgaattgccaaaattgataccaaaatataaataattaaagcactatcaaagttaataaacatgttttgcgtgcatttccggccttacagccgtttaaaaaaaattatgaattgtcctatatttccgatccaagtcataaatatgttggcaaattataacacatcattataaaatctgtatcaaattaattttgctgcataattacaaaaaattcctaccaataaaaaagtcctgacatcgacagagacattttgaattaaataattgcttaagacaatttcctctcacccaaccgtaaaaatggcattaatttgtcatattcattcgagatcggacaaggagttcagttgggttttcgtttataaagcccaaaaaccaaagaaaaactgataatttcttggacaaaaaagccaacagtactcgactcaattatttttcaagtccgtattagctcaaaaaatatccaccgattcctagttttaactttaataaagtgccctgatagtaatggaaactcctgtttataatgcagagctaatagattggggattatcacaataccaattacagagagagagagcctaatttcatcagttacagataattatnttgtgaatggtccaattcttggtcaatttgatgcgcaccgttctcagcctaattatcgtctcgacatggattttgcccaatattgtggcaactgagacagtc

SEQ ID NO: 35135 - DNA, 861 bp, Heterodera glycines
ttggatttttgctccccataattgtttgagtaccccaaacggacacttgaaaaaatcgatttttttgttttcggggcagtccccccgaaccgatgcgcccagatttatggggagaccgaatccttccggaatagcttccctatagcctgtactttaattctgcgttggatttttgctccccataattgtttgagtaccccaaacggacacttgaaaaaatcgatttatttttgttttcggggcagtccccccgaaccgatgcgcccagatttatggggagaccgaatccttcgggaatagcttccctatagcctgtactttaattctgcgttggatttttgctccccataattgtttgagtaccccaaacggacacttgaaaaaatcgatttttttgttttcggggcagtccccccgaaccgatgcgcccagatttatggggagaccgaatccttcgggaatagcttccctatagtctgtactttaattctgcgttggatttttgctccccataattgtttgagtaccccaaacggacacttgaaaaaatcgatttttttatttcataaatattttttcagaaaatgctctgaaacgcaccaaattttatttacatgttagtttaggcactctgatgcttttctatcgaaagggagatgaataaattttttaaaattttaatccttttaaacaggcaaaaagttaggcttaactttttttcagaactgatcagagcgccccaactttgcaggatactgaagggaaagaataacctgttttacccttagcttgcatcagttttataaaaattttcaaaatctgagttcctataatttattttttttcaaatttgaggggggg

SEQ ID NO: 35136 - DNA, 1291 bp, Heterodera glycines
attcataaatattttttagaacgtgctctgaaacgcaccctttgttaattaaaagttaaataaggctctctgatgctttcactatcaaaaagggagatgaataaaaaatctaaaaatttttaattgctttttaaatttgcgaaaaattttaggcttaactttttttttataaactgatcagaagcgaaccagattttgcgagggcatcaaaaagacaaggaaaagcactgctatgatgctaactccagtaattctgaatttaaaattttttattaatttttaaagcttcactattttatttttttagcaaaattaattcataaatattttttcacaaactgctctgaaacgcaccaaattttatttacaagttattttaggcactcagatgctttcactatcaaaaagggagatgaataaaaatctaaaaatttttaataattgtttgagtaccccaaacggacacttgaaaaaatcgatttttttgttttcggggcagtccccccgaaccgatgcgcccagatttatggggagaccgaatccttcgggaatagcttccctatagcctgtactttaattctgcgttggatttttgctccccataaatgtttgagtaccccaaacggacacttgaaaaaatcgattttttttgttttcggggcagtccccccgaaccgatgcgcccagatttatggggagaccgaatccttcgggaatagcttccctatagcctgtactttaattctgcgttggatttttgctccccataattgtttgagtaccccaaacggacacttgaaaaaatcgatttttttgttttcggggcagtccccccgaaccgatgcgcccatatttatggggagaccgaatccttcgggagtagcttccctatagcctgtactttaattctgcgttggatttttgctccccataattgtttgagtaccccaaacggacacttgaaaaaatcgatttttttgttttcggggcagtccccccgaaccgatgcgcccagatttatggggagaccgaatccttcgggaatagcttccctatagcctgtacattaattctgcgttggatttttgctccccataattgtttgagtaccccaaacggacacttgaaaaaatcgatttttttgttttcggggcagtccccccgaaccgatgcgcccagatttatggggagaccgaatccttccggaatagcttccctatagcctgtactttaattctgcgttggatttttgctcccctataattgtttgagtacccctaaacggaccact

SEQ ID NO: 35137 - DNA, 924 bp, Heterodera glycines
  unsure (1)..(924): unsure at all n locations
tgaaaattaacaaattgaaccatcaaaaatggaaaaataaaaataaagaaaattcattttaaaaatagctatagctaaattcaacaagaattgcaacatgattaaatacatatagtgggattccaatcctcaatagaattacaaatttaaaacaaaaagctatttgtaatacaaaagtatgcacatgttaaaaatatataattgttgttcaagcaattaaaaatgaaattaattagtgcagagataaatgaataatcaagtaaaatgaaaaattaaaaaggaaaagcacatcgattgttattcaagaaatgaaaattcaataataaaaattaaaatacaagactaattatgacgaacattttgtttcattgaaaataaaattaaaatgttgaatgagataaatacgtaatatttataatttgtaattgaaccctattgtctgttagggagattctttgatcatgacaataaatttcgatacaaaattcttcttataaattagttcactgaaaattttataaaatcagcaaatagaaaaatttaggtgacgcagtggccggtgaaaataaactcacaaccatcgagtaagaaataatgcaaatacgtttgaatattgacaacatttctatgactaacatttctgacaaaattaaagtattaaattaataggaatataaatttggcagcatcggcagaataaattattaaattgatagaaaaagataaataatgtgaagaaaaaatgctccacgagttatgagaaaaaacaagatgcagtataattttgactaattgatgtgatgtagaacataaaaggtaactcgcccggtgggactcgaacccacgaccccagcaatccgtgccgtgctctaaccactgagctacgggcgcttcttttagaggntctctcaggtcctttatccc

SEQ ID NO: 35138 - DNA, 952 bp, Heterodera glycines
tttccaaacatttattagaacacaaccttttttaaaaaacggaaaattttttcaattttaaccttttagcaaggtttaataaacgatttttaggcctatcggatcatatcaaattccatccaattcggacaattatgaaaggagttatagtcgaaaaacagggacggtcccagggggggggggtacgtaccagggggtgggataactctcgcctctcgtctctcgcctctcgccaactctcgccatttttggtactctcgcctctcgtctctcgcctctcgttttttgtgacgagaggcgagagttgaaaatacacccctaaagattgaacttttgagcagccagaaaaattttcaaatttacgcgaaaaaaaatcttaaatctctttctttccttccttaatgttttctctatttttggatagctccaattcaaatatggtctgctggctaaaccttctgcctttcattatttttctcttgggttcaattccccaacggtacagaatttttttaataatttctttaaattattttcaattgaaattttaattaataaaaaatatttcaatttaaaaattattattttttctttttttaaacagcctaaaactgcaaaattaaccaaaactttgatcattttttgacaagttctgttaatatattacactcaaaattttagaatttttccggcggcgcctatcggcggtgccgattcggcaccgccggaccccgcacccaatgttccaaaaaaattttttttggaaaaacagcgccacaaaaaaagcgacttaaaaacaaaaaatttaaaaaacaagttttggtcattttttgaataaaatctgttaacaaatccgaagacaattttcaaaattttttcggcggcgcctaccggcaccgcccgaccccaactgtccccgaagttttaaaaaacgcaccgcaaaaaaaaggtg

SEQ ID NO: 35139 - DNA, 922 bp, Heterodera glycines
tttccccttccactttctcttcctttctctaccttttttcttcctctttctcgtctccttcctctgccattttctcagcccctttctcttcctctaaaatcttccactttctattaactttcctggttttcttcctcttacactttctcttcccttctctttttcttctctttccgcttccactttctcttctcttaactcttccacattctcttcaacttcctctatcggtccctctttccattccactttctcttccctttcctcttcctttttatctttctcttcgtcttgctctcatcttcctatttctgttacccgtcctctttctcttcctctcctctttgttttcctattttgaattattgcacaattcacgtaagtaagaatttataaaaatttatttgttttcataaaataataataatataacttaaaaacgtttatgaactcaaaaaattatttttcttattaattatatagatttgtatttgtatttgtattttttatttaattaattcaaatctaattagaaatacaatattattatttattttaataaatttaattaatgaaaaaactaaaattaaataaataaaattaaaaatggcaaacaaaaaaggtgaacggaaaacaaaagtgaacagaaaacaaaaataagaaatcgaaccaatgacacacagaaatcgcgaccaaagtgcttgtcgcttgtcctccctttttagggcacttcccgggtccggacccaaacaaccctgggtcattcgaaagccaagagtttgtagatgtgcacaaacacattaattttttgatttgacccattttaagagaaatgccaaaataaggggaaaaaaattattttaggggcaaacactcaaaatagggatttttagcgtgaacattcaaatatagattcctgaat

SEQ ID NO: 35140 - DNA, 1001 bp, Heterodera glycines
  unsure (1)..(1001): unsure at all n locations
tttcaagccattccttttttattttattctttttgcaattttagtatgaaatttcatgccgtttatttttgtttaccccccttttttgcattttccgcccataggtggcaaaagatttgtgcaaaaaatttaaaaccaaaatggcgaatttttatattattcttttttaatgtgtatttaaatattaatcataaaatttaaattcattgagactgattaatataattaaatttaattattttatcaatcactgagttttttttggattgactcagcacgattcccttcagtctgtaattcataaatcagaaaaatttttggaggaaaaaaagacattaaaaatagaatttttattttgtcatattttattgggatcgatccatttttttcttaaaaaattggcttaaaagcgcaaaatttagtcatttttggataaaatctgttaacaaatcgcattaaaaaataaaaaattttcccgaaccccctggttccccaaaaattttggaaaaaacgcgccgcgaaaaaaacggtgttgaaagcaaaaaaataccggtaccggtggaaaagttggtaccggtaccggttttttgcagtactaccggtaccggcatttttacaattacctattaccgctctaccatagtttaaggctttaagctcgaagaataaaagccggaagggaagttagttattatgattaattgaagtcaacttaagagtcgaaaaagaaaagtgaaatggaacaaatgaaattcaaagaaagttcttaggaaattgtactttttgaattgaaaaaatatgggaacgttttttatagttaaataaagagggagggcttaataaaatcgaattgaattttgttcattttaaaaacctttagattatctaattataatttgtcgaatattttttttctaaactcccattaatttttttattttcctcacccatggcacatccgcccgattgcatttcgtggatatccgctnattatttgcttt

SEQ ID NO: 35141 - DNA, 941 bp, Heterodera glycines
aatatccatctgcgcgttttgaaatgttcgtccactcggctgtcaaatcggcgactgatcagtgtgattccaagtccaagctgagaaggcgcaagaaaagcgaacacttcgagccaacaatcggctgagatgaagctgaaaaaataattttctaattttattaatttttattgttttttttacatttcttttttgggagggcgtcgtccttttttgacgtggtcccaaaagaaccaaagaatggtgccacatccgaccaacagaacagtcacaacgtagcaactgaagaaaaaaaaaaagaattttggggaatgagtgaaaatgaatggaatggtacagcaaaaaagggcaaagccaggaaagccaaatgtggaaagaattagtggttgaaaaaaatttcatctttgcaaccttggccaacttttttggtaaagaaaatgtgatacgatgtaaaaaaacgtacggaattctcgaaggcattacgggaacaaaaaaaaaaagacgcgaaatttgagcgaatgaatgagagtggagggaggagaaaaaagatcaatttatagccaaactgattcgtttcattcaaaagttttttttttgatcatatctttttagtagagtagagcgggaccgggaattttgggcttaaccgggaccgggaccttttcgggttgaaaaaccgggaatttttggctgggaaaaccgagaaaaaacccgggtctggtcccggtcaaaaccgggacctcggtactcagttgtccgtgttttggtcccggtcccgctctactctactttttagaataacgaaaaaattttaaaattttacgagctaataaattccggaacgaaatattccgatttcgggaaatcgcgaaaatttatcttagaaacgaaaaataaatcgagcgttatccgttacgaccgagaagaagtttttaaagaaa

SEQ ID NO: 35142 - DNA, 963 bp, Heterodera glycines
tttccttctgaaaagcttgaataaagtcaatctgaaccagaggatttgagattacaaaacaattacataaagtcaatttgtgattttgccgtaaaaataagaaaagtccgagtattctttattaatgttatccgacaccatcatagaccattttttacttaatactaactaatgaaataattattaattaaacagttaaattggtagaaaattgtattgatttaaaatttaattaaaatctttaatgtttaaacatatgtaatgattgaaatatcttattgaaaattgtcttcatttaaagaaatttcatgaatttcttaaattaaaatacaagtatctaccgttgatacaacgcaaggacatgaatcttctctagccgagttagtaaaattaaattaataaaatttcattaattaaacatttattcgtatgcgattaaattgtcaactaattcttgatttataaactaaaataacaaggcagaatatacataaaagcattctttaaattaaaaattcattaattatacgaaaagcagactaaatatttatttattatttttcaaaatttatttttcaacttaatgttttgggattaattaccacgatttgagcatttaatgcgtttccaaataaactaaaaaataaaaaaatttgttttattataaaaaaaattcacgaaaagaagcaataatgaaatgcctgaataaatatgattttaggtcattagcttttgaagaacaattgagtttattttccatgaattattgtgaagcaatgccatagatcaaacatatggcaattgaaacgtttcttaatatttaaatataagttcataaaaattaaaactttcactgaaatacctatatgggcgcaaatgacggttgcgtcacatgcctcacagcaatgtccaaccctatgataccaccgccaaaactaatatagaaaaaacttagaaaaaatc

SEQ ID NO: 35143 - DNA, 1433 bp, Heterodera glycines
ctgcaaaatttaaactcatcctgacaactataaagtgaatattaaaatcagctttttcaaacttcatgatctatatgacttaaattcccgtccataatgatctgcattagatactcatttaaaattttaaattattataattcttaagcatttataaaaatattttaataaaataaaaaaaaccaacaatttttgtccaccaatttcgccggcacaaattcattgttggccatcaaattgtccaactcatcgccccccatcagcaaattcagtgtgtgcagtgcgcccaccgtttgccgaatgcgtttcagcagcggatcattggccggaaaattgggcaaataatgggcgaagaattggccgtgccattgggctgacatttcccgctgatcggcgaaggtttgccgctcaatgttttgtatgtcgttgtcgagacacttttcgactagttggctaatggtggtgccccgtatggcattccgttgccttttccccttgggcgtcgtctctttggcacttggcaatgccatgcaaagcattcgcgcagtccgccgggccggcacttcgtcgtcgaacagatccaacacactcaaaaccatgaacaaatacataatgtggggctcgtccttttgcctttgactttgtaccgccgtcttttcacgctgatcatttagcaaaatgtgttggatggcacggatcagtgccaattccatctctttggcacgtgccgcttcggtgttttgagcgtcaaaaatattttcataaaaactggccacctttttttcttcagctgaatattttttatttttttatttaattaaagaatttttttttaattttggataatttttaattaattaaagaaaaaatgtttaattttggatatatttttaattaattaaataaatattttttaattttagataattatgtttaattaattaaataaataattttttaattttggttaattatttttataattaataaataattttttaattttggttaattatttttataattaataaatgtttttttaattttggctaattatttttataattaataaatgtttttttaattttggctaattatttttaattgtaaaattattttcaatttcgatatttttattcccctttttcgccttttcttacataattttttaattgttgcaaattcattcgctttttctttcgaaaaagtgtaaaaatccggaagaacatcaatgaggtttaaaagaattgacatatgtagttttagaattttatttccttttgtttcttgctcaaaaactttgtcataattttccgcattttcacagtccattttatgccaaacaaaatcagaatcactgggctggacattttcagccttaaaatggtgccaattagcgcgccaattaggcaattatgccacacacactctca

SEQ ID NO: 35144 - DNA, 876 bp, Heterodera glycines
tctccaatttacaattttcatgatcactttttgtgatattctcaatatttcaatttcttatatccaaatgtaatctgtataagtttacagtaggaaattgtaatttgggggttattggcgatttcaaatcgatccttccggaacactgatgctgtttatatttagagcgtaatgagctgaaaatgtcagaattcaaaaagtggggtcgcgaaaatagtaaatctgaggttattggcgcttatcaacctgatccgtctgcaacacttaaacagtttatatttaaagcctaattagcagaatgtgaaattctctcatttgttactttatgatcatttttgtctaattcgcaaaattacagctcattcttcgcgaaatataaactgaatcagtgtttgcggaatgaccgagctgataatcgccaataatcttcgattacaattttcttggtcacctttttggaattccaccatttcaactccttatcctctaaatataaactgaatcagtgtttgcggaggaccgagctgataagtcccaataatctccaatttacaattttcatgatcacttttgtgatattctcaatatttcaatttcttatatccaaatgtaatctgtataagtttacagtaggaaattgtaatttgggggttattggcgatttcaatcgatccttccggaacactgatgctgtttatatttagagcgtaatgagctgaaaatgtcagaattcaaaaagtggggtcgcgaaaatagtaaatctgagggtattggcgcttatcaacctgattcgtctgacacacttaaacagtttatatttacagcctaattagcagaatgtgaaattctctcatttggtactttatgatcattttt

SEQ ID NO: 35145 - DNA, 873 bp, Heterodera glycines
cataactaagaatagatattctcagaaaaatggctatctcttttttctacagccttccacatgaggttttccccgaaaacgcattactatatacggttgagccctacaaatggtcggttggaaaatggctccataactaagaatagatattctcagaaaaatggctatctcttttttctacagccttcaacatgaggttttccccgaaaacgcattactatatacggttgagccctacaaatggtcggttggaaaatggctccataactaagaatagatattctcagaaaaatggctatctcttttttctacagccttccacatgaggttttccccgaaaacgcattactatatacggttgagccctacaaatggtcggttggaaaatggctccataactaagaatagatattctcagaaaaatggctatctcttttttctacagccttccacatgaggttttccccgaaaacgcattactatatacggttgagccctacaaatggtcggttggaaaatggctccataactaagaatagatattctcagaaaaatggctatctcttttttctacagccttccacatgaggttttccccgaaaacgcattactatatacggttgagcccaacaaatggtcggttggaaaatggctccataactaagaatagatattctcagaaaaatggctatctcttttttctacagcattccacatgaggttttccccgaaaacgcattactatatacggttgagccctacaaatggtcggttggaaaatggctccataactaagaatagatattctcagaaaaatggctatctcttttttctaaagccttccacatgaggttttccccgaaaacgcattac

SEQ ID NO: 35146 - DNA, 620 bp, Heterodera glycines
agcaataagtgtggcctctctcaacttacatgtcgtctgttactttggcacgcacagtccgttcaattccaaattacggcacgagttgcacgcgccgttgtcgttggaccgcgtgcacccgccgatgcattccctgtgacacaactgagcatcctcggtgcaaccggcatcggttttaagtgcgttcaaacaggctgaagaaaatgggaattatacaaacaattaaaattatatcattaaacagctacaaattcctgcttgttctccacggcactggaaaagttatttttctatttaattatttttacttctttggcaatgcgtcgcattccaacacgccactcgatcagtgtttgaaatccgtgcacattgtctcggctcctccatgccggaacattcgtttttacaaatggcgacctcacttaaatacgaaaaaaatcgttaattgttgaatgcccacacaacgccaaacggacgaaagacttactcaatgattctgtcgcgaattgtacccaccaaaattgagtcccagtcgaggtcatgcgcatagcaaagaccttaagggccaaacggacggggaagcaattcaatggaaattcaaagtgtggaagggaatggat

SEQ ID NO: 35147 - DNA, 541 bp, Heterodera glycines
ttccataatttttcagcgtataaaaatctctaaaatcgcgtttttttgcattagctgctcattctgctctacctgtaacagtccatgccgagccgtgcatccaattgtttgatgggcggcgtgccaaaatcgtccgttgtcgccacaacggcgggcgacgcattgtcattgtcgcgctttttcaacgattttttgaagacgggcattttgccaaagaaaatgcaaattcaaagagaaaaatagaggatgctaaaagagagttgaaattggaatgcgtgagaaaatgtaagcccaacgaaacgaaacaaaggaaatgcgagtggaaaaggagggagggggggggggggtcattaatgattaaaaggatcatttgcgaaggaatggacaaagcgaagagccggggaaaaggcaccttctccctaaacagaaaagaaaaattaatgcagaggttttcatttaatatttgttttaataaattccgctggtggtatatttattcggcaccgcttcaaaaaagatgaaaaaatgccataaaagggct

SEQ ID NO: 35148 - DNA, 737 bp, Heterodera glycines
  unsure (1)..(737): unsure at all n locations
aaataaagccgtaaataaggggggaaaaaattccaaatttaggggtataatttttaaattgctgttttttctatgtaaataagttaaaagcaaaagcaaacaatcttattcattgaatacagttgcaaataagatacatttcaaaattttcaggaataaaggaggttttattttctaataagaatttcaggctactttaattaaattaattattttctgattcttaggggtgtattttttgaaattttttaggtcgattcttaggggtgtatttttagaaattttttaggtcgattcttaggggtgtattttttgaaattttttaggttgattcttaggggtgtatttttttgaaattttttaggtcgattcttaggggtgtatttttttgaaattttttaggtcgattcttaggggtgtatttttctgaaatttttttggtcaattcttatgggtgtatttttcgttttttattgcattcttgttgataaatttcccaaaaatcgcgaaataagtgcgaaaataagggcgaaacgccaaaatatgggcaaaaaacttattttaagggcgatgatgtaaaataaggatttttaagggcgaacacccaaaataaggatttctaaggtcgaataagggtgttanaacgcaaaattttcgaacaaaaaatgtgtttttcgtgcatttctcgtcgagttaaagccgcagaaaaataaaggaaaactttataatccgggccc

SEQ ID NO: 35149 - DNA, 397 bp, Heterodera glycines
cgcgaagcgcccgtcctgaggccgcgaagcggccgaattcttcccacaaaattaaaaacgggcgcgaagcgcccgtcttgagaccgcgaagcggccaaatgcttcccacaaaattaaaacgggcgctaagcgcccgtcctgaggccgcgaagcggccgaattcttctcaacaaaattaaaaacgggcgcgaagcgcccgtcctgaggccgcgaagcggccgaattcttcccaaaaaattaaaaacgggcgcgaagcgcccgtcttgagaccgcgaagcggccaaatgcttcccacaaaattaaaacgggcgcgaagcgcccgtcctgaggccgcgaagcggccgaatgttctcaacaaaattaaaagacgggcgcaaaccgcccgtcctgaggccgc

SEQ ID NO: 35150 - DNA, 1277 bp, Heterodera glycines
actccgtacaaaaagtcctgtcttaacaagactccggtcctgtggcattttccgaaacattaaccggactatatcagttgcccatctccgtctagaaaacaatacagttttatttttaagatttgaaacttaacctaaatcagcacagagcatacatttagcatttgtttattagctgtattattttaattaacgttttttcttctttccatcacttttcctcctccattattttgttcatccttttttttccattacattggcaaaaaacttcccgtcggtgaatcatttcttccattccaattggccacttttggccaatccttcgtttttcattttcattgattcattttacatccgcataaattgttgcataatattaaatgacatttttccgaaccaaagtcttcaaaaatgttcaatttcttttttctgctgatcttcgcttcttctgcccaaaatgcgtttcaacaaaatgtaaaatattgtaaattcgacattattttgtttaatattttattttttttgtctttatttttgatttagaattttacattttagcctcaaaatttgtccatatatttatattttaataaaatttttttttttattttgcagataatagatgcttcgtggggggtatcgaacgataccaagaatgtcaatcgatcactttgtcaatccgttcatccgtcccatctccttaatccatccatcaattaggcccattcgccgtgccgttgttgtgctgttttggtacatttggtgttgccatttcttaatttaaagaaaatggaggacgaatttatttgcataggccaattcatgacaagtttcacgatcgtttttaaaataatttacccatatttaaattatttttaccgataaacaattccgaaatgcctcaaaacgagatcaagcattaatttgcataatcggaaaataaatcggtaatattttattgaaaattataaattcattaaggtcttaccacggcggcatattggacatgttttatgtccgcttcttaacctataaaagattttttcttcatatatgcacatgtatgaaaacatagacccgaaaagccttaaaaataccgagttttcaatgcaatggttgtggaaaatgtgctgaaaatagcgtcattaatttcatgtatttaattatatgattttatcttacgttacacggcaacggtctgacaaatgtctccaaaggaatttgatcgagacgggttgcgcaatcaacacgttgctgatcaatggccataaaat

SEQ ID NO: 35151 - DNA, 1014 bp, Heterodera glycines
taaagtagcggggaaaagcattttatagtacgttggatttggcggccggattttggcaaataccccttgacaaacagacagcacataaatgtggaataataaccgaaaagggagtctacacaatgagaaagctaccatttgggcttaaaaacagccccgccatttttcagcgaattatgaatgaagttttgtcggacattggacatacatgtgcatatatagacgatatcattgtgtatacggacacatttgaagagcacatgtttattttggagaaaatttttgaccgaatacgtaattttaaattgaaattgaagcctcaaaaatgtgaattttgtaagagcgaaattgtttatttggggcataaactaaactgtaaggggtacgagccgtccatcagcaacaaagaagccatacagcatttcccagaaccaggaaatgttaaggaaataaaaagatttcttggactggttggattttttaggaaattcataccaaattacgctgcaaaagctgccccattgacattattgttaagaggaaaggaaaacgagacgaattttaagtgggagacagaacaacaaaaagcatttttggctctaaaaactgagctgacaaagtccccaagcttacgacccccaaattataaaaaagagtttcatttatttactgacgcttcacaaatcgcttggggaggggctttgatgcaaaaagataacgaagggacactgtacgcagttgcatactgcagcaaaatattaagccaaactgaggcacgttacccacccacccatggggagctggcagcaattgttcacgcgattggtgttttccattcaattttttacgaatgtgacattaccatttataacgatcacaaacctttgactttcctgttatccaaaggaaagaccaatcccaaattgaacagatggcttctaattttccaggatatcaacccaacaattaattaagtggaagggaagaataatgtggtggctgatgctttgtcga

SEQ ID NO: 35152 - DNA, 776 bp, Heterodera glycines
  unsure (1)..(776): unsure at all n locations
tctanngagtcactttacaaaataatacccctggggagaagggagtgggaaatatgatttcaaaattttcaattttttatagtctaatctactcaaaacggttcagaattcaataaaaataacattcacggtgcgaaaaatggggtttgacaagtttattggggaaaaaaagactttacaaaataatacccctgggagaagggagtgggaaacatgatttcaaaatttttgttgaaatatttgtcgtgctctgaagggcgtgggaggggggggggcgaaggcccaccacgaggccgcgaagaggccgagtgagtaccttcggtgcaggaaaattattaaattttaaaattttttaattgctttttaaatatgccaaaaaatgtaggcttaacttttttagtgaaaattcgatcactcatattttttgctaattgagcagaagcgtaccaaactatgcagggatactccccggtaaaggactaacttacactgaaatgagcgccgagctagctggctcaaaaaaaattttcgaaaatctgagtctttcgtttttatttattttttgcaaaattaattcataaatattttttcagaaagggttctgaaacgcaccaaattttatttacaagttaataaggctctctgatgctttttctatcaataatggaggggaataaaattttaaaaattttttaattgctttttaaaatatgccaaaaaatttaagcttaactttttagtgaaagttggatccctcatattttttgctatttgag

SEQ ID NO: 35153 - DNA, 1168 bp, Heterodera glycines
cattaaaaaaagaattctgaaaaagtagcaaaatatttctatgtgtgtgttttgagttttcctcccctattttttttacatttttcattgggtaaaagtggcactgatcaagaatctgacatttattttttgcaaaaaattttgctacccctcccccataaaaatgccgattccgataaagaaaagcacttttctaggatagtattgcgtagcaaaacccacaagtaccaaaagtttattgttagaatatatgccgattttaatgcatttataacccatggaagcacaaattctattttccatttttaggcccggatccccgattcccaatttcttgaaaaaaattttcattgcagaattctaatacaaaactcatagtttcgatttctaaggtagttcttatcatttttcaaggacaatttgtttaatataaatgaaaaattgaacattacgttgacggtctgtttcacccaaaacttcggcacccattggctccagtacattgacaggccgtgcaatgccacggcttttttcgtacttttttgtactagattttttccactgacagccaattgaccatagggcggttgagtgacagcttgggtcatcggacagtgatcagtgatcagaatgagcacaaaaaacagcaaaaacccaggacaaatccaagcggacatttttattgattttgaataaaataaaattgaataattaatgaaatatgaattttcgagcatttgacgtgccttttatttcagaaaaaaccaaacttcgagggcaaattttgtattcttttgtcataaataaaatatgaacaaatattgaaagctgatgctgttaaattttggttagattgtatgaaatgttcacttcaataaagctgaacaaatgatgatcttaaattgccggtattctgctatatttttggttagattgtttgaaatgttcacttctataaagctgagcaaatgaggattttaaattggtggtaatctgttaaattgttggtgagatagtttgaaatgttcaattaaataaagctgagcaaatgatggatttaaaatgctggcagtttgtagttagaagcacaaaatatgaaatagcaattttgttaatttggcaaattttgacaataggttcattttaccaaaaaatttatgtgaaagca

SEQ ID NO: 35154 - DNA, 1204 bp, Heterodera glycines
  unsure (1)..(1204): unsure at all n locations
aaaaaatcgatttttttgttttcggggcagtccccccgaaccgatgcgcccagatttatgggggagaccgaatccttcgggagtagtttccctatagcctgtactttaattttgcgttggatttttgctccccataaatgtttgagtaccccaaacggacacttgaaaaaatcgatttttttgtttcataaatattttttttcagaaagtgctctaaagcgcaccaaattttattttacaacttaattttagcactctgatgctttagtatcaaaaaggaagatggagaaaaattttttaaaaaaatttttccttatattttggttatatcgttttgcttttggtggggtgcttggaacagtggaatcatgcgcacccgtccgatctggcaagttaagcaacgattgctgactagccaaaaggttcggtgccgtgatgaaacgaaccagcactgcttaccccgcggcacccggcacggtcccccgaaggaatggatttaattaaattctctccttcggggatttttttccattaggtcgtccgttagcgttcgattgctctagtcaatttttcaaaatttttgttgaaatatttgtcgtgctctgaagggcgtgggaggggggggggcgaaggcccaccacgaggccgcgaagaggccgagtgagtaccttcggtgcaggaaaattattaaattttaaaaattttttaattgctttttaaatatgccaaaaaatgtaggcttaacttttttagtgaaaattcgatcactcatattttttgctaattgagcagaagcgtaccaaactttgcagggatactccccggtaaaggactaacttacactgaaatgagcgccgagctagctggctcaaaaaaattttcgaaaatctgagtctttcgtttttatttattttttgcaaaattaattcttaaatattttttcagaaagggttctgaaacgcaccaaattttatttacatgttagtttaggcactctgatgctttttctatcaaaaagggagatgaataaaatttttaaaaatttttaattcctttttaaacaggccaaaaagtttaggcttaacttttttttcagaaactgatcagaagcgccccaaactttgcagggatactgaaaggaaaagaattaacctgttttatcaccattagcttgtcatccccagtttttataaaannaattttc

SEQ ID NO: 35155 - DNA, 371 bp, Heterodera glycines
atttggtataacttatactgccaagtaaatacaggctcttatatgtctctttccttttgggcctgatgacgacctccatttcattgttagcgccagatctttcttccctttgcttaagtgcctgatcactcttccctttgctttaatggctgatccgacttccctttgctttagcgtgtgatcaaccttccctttgctttaacgtcggatcagacttccctttgctgaacatgactgatctggcttccctttgctataatgccagatcagacttccctttgctttagtggcagatcatgctaccctttgtcttacagtatgaatcgacttccctttcctttagtgactgatcgagcttccctttcctgtag

SEQ ID NO: 35156 - DNA, 473 bp, Heterodera glycines
ttaataaaacggaaaatttatatagaaacggacggacggacgaaagatgaaagaagcgccggcggacggagaaaagcggcagagaatccaaagcgagaaaatcaatgggagggattataaaatttaattttacatttaatttattcgagatttttagggctgagaaaaggcaaatggaaaagggaaaataaaagagaaaaaagagaggaaattaaattcaaaagaaaagaaaaaaagggaaaaagaggaaattgaaaggaaaaagcaaaaacagattttggaatttgaaaataaaattggaaaaagcagcacacatttgtcgtttgtgagatgggagaaaagagagagaaatttgggcacaaagaaatttaaaatggcacagatgtgaattttggtttttaatattaattttgcacaatgcatttgccatttacaccaagtttcttaataataaaatattttattttattttt

SEQ ID NO: 35157 - DNA, 909 bp, Heterodera glycines
aattggatgcgctaaattgtttgagaagctttttgagcgtaattacgatttttacttacaccattttttgctaggcttagatcacatgcgattttcggcactctgataattttagcgctcataatgggatgtataaaggcgattgtagaaggaattggaagcgctaaaattgtttgaggagctttttgagcgtaattacgatttttacttacaccattttttgctaggcttagatcacatgcgattttcggcactctgataattttagcgctcataatgggatgtataaaggcgattgtagaaggaattggaagcgctaaaattgtttgagaagctttttgagcgtaattacgatttttacttacaccattttttgctaggcttagatcatatgcgattttcggcactctgataattttagcgctcataatgggatgtataaaggcgattgtagaaggaattggaagcgctaaaattgtttgaggagctttttgagcgtaattacgatttttacttacaccattttttgctaggcttagatcacatgcgattttcggcactctgataattttagcgctcataatgggatgtataaaggcgattgtagaaggaattggaagcgctaaaattgtttgagaagctttttgagcgtaattacgatttttacttacaccattttttgctaggcttagatcacatgcgattttcggcactctgataattttagcgctcataatgggatgtataaaggcgattgtagaaggaattggaagcgctaaaattgtttgagaagctttttgagcgtaattacgatttttacttacaccattttttgctaggcttagatcacatgcgattttcggcactctgataattttagcgctcataatgggatgtataaaggcgatt

SEQ ID NO: 35158 - DNA, 657 bp, Heterodera glycines
atacatgaaaaagggggggggggtgggtcaaccgaacttttgctggcatttgtagccgttttttgccaaaacaatgactgactaatttgtccattttagggtcaaatgttttcaaaaatatggtaaaatgccgttagtcgtcgccgtttttttttgaaattttaattcaatttattaagaaaattaattttcctaaatgtgccaatttcttatttaatttatttattaatgtttcccttggctttattaggtggaggaactgcttgaaaaggcacagacacagagccgggagtggaaaagcgcgttgaagcagcgggatgtggcactgcaggactacgagcagacaaatgccgagttggcggacacgcgggcacggctggccaaggcggagggcgcactgcgggaacaggagcagcgcaccagacagttcgaggtgtgtgacaatttgaatttcaaataaatccgaatccgactctagaatttgcgacaattttctttcgatccaaattcgaaaaaaaaagaagaagcactttttcaacgaaataaagctgaaagctgcaatcgcaatgaaaaaatcaacacttttaaacaataataataataaattattaagagttttatgaaattggtaggaaaaatgggtgcaccccaaaattt

SEQ ID NO: 35159 - DNA, 1012 bp, Heterodera glycines
tgaaaatatttattttattattttcataattataaaaacatagctttacgactcgctaccccatctgggcacccaagagtgcatgtgctgaacgaagaggtggaatggtcagcatcggcagacaacccctacgatctctcgcttctgaaagtttgggtcattcccccgcgaaactgtgatgtgccggttctcccagtgagagtgggtgaacggctttgctttccgctttgcatgaagtgtgccagcgatcacccgacaggcggagttgatgaaaattaccactgcacacataacgattcacaacgtggttgggtcagcacttgcacatctttggaactgaatgctgccctggacgagggttatcgggtcaccaaacttttccgcgtattggaataccaaagcagcgatgatcaattgttcaaatcgtacattgcggaatttatggcgctcaaaatccaagcatccggctttgacaccagtatcaaaggcaatcctgagcttgaggaagcgtttgtgagggagtgttatgagaagtttggcattacaatcgatccaacaaagatggagccgaacaaagggaaacgatcgatagcaaagctctgcttgaataacttatgtatgttgtctttaaatatattatttttaaataaatttctagggggtcgattctctcttcgcaactttgggctgtcgcaaacactcatcacagatgaccctgtggttctcgctgaatatttggacaaccgatcgctcgaggtcacagcgatcgacgaattggacgctgaacacatactgatcagttatgagaaaaagaaggagtgggtcgaggaacatgcatgttccaatattggtataataatttatgaaaacaaaattcataattaatttagtaatatctctttggacaacttcggcggctcggctggtattactaaaggcaatgcagaaggtgaaaagggaaccaggctgtgagctactttataccggtaataaaaaataaataatttaaaaa

SEQ ID NO: 35160 - DNA, 434 bp, Heterodera glycines
aattattatgtttttgaatatattataccttttattaataatggatgttgttcgcgtttccgggatgtcaatccaaagaatcataaaatttcttcacttttttatcttcagatgctctcattggtaggtgttgccatttcaactcttcccatggatgccattcaattggcaatggaaggaactaattaagtcaaaatttaaattaaaaaaataaatcaactattaaatagagcaaagaacgacttataaatgaacccaaatatatcataatcagaaaaccatggaatgaatggaaattgaatgcctcaaaatttaaaaaatgtttcatttcacattatttcgatttgtaactgtttcttctttttgccgatatgcttgaggattgtcccgtggctctgtgtaattcagtcatcgcttatcaatggattttctgc

SEQ ID NO: 35161 - DNA, 998 bp, Heterodera glycines
ttagttatgtgaacgttatttttcgtcgctgagaagagatgatttctttttttaacttgttattgactacaaaaattaataattaatatttcttttgtatgtagcaatatagaataaattttttattaaattgtatcatcatttttcgttttttattttaaaatagttttctttttattactatttttcaaaacttttttatattgtcattttgttttattaggcacattttgcagataaataaaaattttctcatcatctatcaattatcatttaataattataattttaatttattaaagaatttaatttgtcaataatcctttcacttttaactgtttaattttaaaatttttcttgtattaaaattgatatagaatttaaaaaaaaataaaattataaagaaaaaaattgtaatatttttttacttcgtcagcattataatttatagttttaataaattaattataaaaaattgattttatccaaaatttatttaaaaagcattcaaaatggttcatcgaattttgcaaaccgggactatagttccttaacaaatttaaaaagactttaaattagggtccctccccgagccgttaattacttcattacaaaacccgaacatatatttacttggggtatttaataatatattcaattatgagatgaataattagttattaaattcttttattaataaatttaaaattaatcgttttttttacgtttacaaatatttcgttttatttgtatttttttcatattcttttttctttaaaccatgcttgctcttaaatgcttgtaataatttattaaaatctttttcaaataattatttataaaaatataaataatttaataaagaaaaattaattataatgctattaaatattttttattatacattttaaaaaattctttttgatttgaatttataaaataatgttttcattcaataaatatattcatttttttggtatattatttacaaaaatttt

SEQ ID NO: 35162 - DNA, 365 bp, Heterodera glycines
cgccatgagatgggccaaggtctgctgatctatctctaccgccttactctcctgaagccaaatgaacaccttgtatgcaaggacgtctcccaaacatactgctaagaggtgtgatatgcattgctcaaccctacactcgcaccagaacaccaaatcaacgacctgattcaaatgacagctgccaaatttcacttacataaactctgtgagcaactccagaagctgaaccggtcgaggttttggattacatcctaccgacttaccttgaaaatttagcctcaagacttctgaactcttgtatggaaatgccaggacatgaatggaatcataaacagcaaacccatattttactggaaaagatctac

SEQ ID NO: 35163 - DNA, 329 bp, Heterodera glycines
tcattgccatgcagatcttaaagaggtgaacatccttgcttatttccagtgaagcatcccacgctaccagtaatctctaattgcctaaaatacaaattgagctgcactacctattgtagaccctcccatacatgaagaatgacggagattcttttgaagatgtgtgaacgaatgagaaatcacttatattagccatttcaatctatacatcaatctcgatgccgattacgtcgatatattatgtcataatattgtgaatagtcctgaaagccctctcatttacgtgatctgcttgctaccaatgaagcgatgcgaatatatgacccatg

SEQ ID NO: 35164 - DNA, 911 bp, Heterodera glycines
  unsure (1)..(911): unsure at all n locations
aatttcaaaaaaccgtaaaaaaataaaaacttgctttctcaattcattcaatagctcattggaaaggctcttttaaacctctacaacatctgtatatgagttttttgcgccgacaaattttcttaaaattttgaaaaaattcacaagtgtttgatgaaaagtcatagataaaatcaatgatttttcaaaatcagagttcagatttgtgatcagcacatttttttaccctaggaaaaatgctttttgaaattttactatttttcccatcgggaccacaattctacacctttgcctaaaattgcaatttctccctttcgtatcccccaggacagaaatgtggccactcctcgcgactattattttggtaagccttcggattgggaaaaaaagacggcaaaacgacgcatcattagccgaaaccgagggaattggcccacttttgtcctttttcagccctcgcccacaccgtccgcgaccatttggtcagccgatggattcgcacccaacagcactattacgagaaggacccgaaggtaaggccattcattcccacgttcgattgcatcgttttcaattggtttcagcgcgtttattacctttcgttggaattttacatgggccggactttgtccaacacaatgctcaatttgggaatgcaagcgacggtggacgaagcgctttaccaggcgaacgaccgcattttatattacgaattaagtttatttggcattccatttcagctgggcctcaacattgaagagctgcaagagattgaggaggacgccggccttggcaacggcggactcggccgactcgccgcctgctttttggactcaatggccacgctcggcattcccgcctatgngtacggactgcgctatgagtacggcattttcaagcaactgatccgc

SEQ ID NO: 35165 - DNA, 1075 bp, Heterodera glycines
  unsure (1)..(1075): unsure at all n locations
ttcgtttaaaagagtctatacaaaagaaaatagcatcctccatacatttattaaaaaataaacctatctaaaaatcaattgttgaattccattttattaaatgcgtataaatatattagttagaaaaggaaattttgactccgataaattcaattgaaactgcgaaaattttggacttattaccattggacaaaagaaaattgaaaggacccaaaaattgacacaaaataaacgtatttatcaaagcagaatgtttttattaatgcccctatttccgtaagatgaataaagtcaggtgaataatgaaaatattcgaccaaaattatatttcaagaaatgcaaaattaaatgaagtatttttttataaatcgttgccctccttaagaaaaaataaacatctgttttttcggattaaaaatcgagccaaacaattatatgaccgtaaaacaattactaccatttaaataaacatgattgtcgccaattttttcattggtgacgagaaggcgggtcaatccccgcctattgcacaaatgaacgggacaggactcaatcgaagcaaaaagaatgagggatgttcttggagaagatcggggcgagtcctgattcatcaattcattcaaaattgatcattcctaatttttgcccctttttcatccaatttctcatatgcatttctccatttcgtaccattcacattttgcccgttcctttgtcccatttttgccccatcgaatcccttcacaattcaaatcttttctcatcggttggctcatcttcggcgaactttgtgctcagattttctttcacaatttctcactttttacatctgccaattcacattcaatttttgtgcgcccatttcctttgttcgcaattcgcttctagaattntctgtccattttttgtctctctcacaatttgtccacgtgcatggccttttgcccgcccccttcgaaaattgtctatttaagcgccccggncaaggggtcgctctcttctcctctcttctcttctcttcccctctccttcgcnttcatatcggtctgcctgtgaccaaatcctccaattcccc

SEQ ID NO: 35166 - DNA, 1172 bp, Heterodera glycines
  unsure (1)..(1172): unsure at all n locations
ttcatgtcttgttccacgtacacttgcttacgctttatgccctttcccatgattccatttgcgggattgtttataaattttttgagatggtcaaaaaagggcatacaaataagcatgaatatcatatgcatactttagatagattttataacaataaaaatatttattttaaataattaagtattgtaacttatattatatgtattttaattctaactcaaacaatcaaaaatgctttttaaaattagtaaattagtttcgaaattcaagtgtcggaatttccgctagtgtcggattttccagtgtcggattttccggtgtcggattttccagtgtcggattttcctagagccatttagattcatataaacatttatttagaattatatcaaaattgagattgttgccgttggcacgggtcattacattctaattttttttgatcatatctattaatataatagcaattttattttgcttataaaggaaggtccccatgtgtccgtgggatttccgaatgaaacttggtgggtggatagagcacccatgggttcttaagaaaaatgtttttattttctgccaaataagcacgagtgccgagttatgacgtgcctaacttttctagtgataaataaattaaataaatattcattcactcttgtgctgtcaagtggtgtagcggtagtacgctagtcagcaccttttaagccctagattcgggtaaataattatttaaaaaataatttgaatacttaaaaaatcgattaaatttaatagagacatgcgagacaaacgcaaaaaaggattctagaacatgagtgataaaaagaatattaaacattaaaacacaatttcagagaatgtaaaacaattcaaaatttagaggaaaagaaaagtcagaagttaaaaataaaatggataataaaaatttagtataatcaatacaaaatatcaaatttattaagcatgtataattaattagtaattttatttgaatttataaaagtcaaaaatgaagcaacagaacacggaaggcttaaaagaagagaatcaaaaaacaaatcatcaacataacaaaaaaaattgattaaaaaataaaagatataaatctaaaataaaatttctagaaagtgagaataaaccaaaatgntatgtggtgtggataaccaagt

SEQ ID NO: 35167 - DNA, 468 bp, Heterodera glycines
ataacctgggacctagaatcaggaaaatccaggcctggatcatagcacaacccgaactctagaaaaaaaaaaatgttttttagtccattttcaattttttgtctccaaggcaaagccaactgaggtattttgccaaattatgaaagaatcgaagggagctcattcggcctagattacgaatgaatcactgtgttcgggtgtcttttttttgtgggactcaaatataaggccgcaaatataggaatcggattctccgaccgtgaaaacctctaaaatgacttcactttgtgaaaaaaattgaaaaatttttttgagtagggtttggggtactatcggcactattacctttttaagtttttttaaaaatttcacgtaactcacgttgtagctaaaattaaacgtcagattcgtgatcagcaccaaaaattagcctagaaaaaattattagaaaaaaatttcagggggggg

SEQ ID NO: 35168 - DNA, 1022 bp, Heterodera glycines
  unsure (1)..(1022): unsure at all n locations
tcgtctgagtcttgaggttccctctcctcctttttgtctcctgattcttgagttttcaaattttacagccgaatataagtctcgatcttctattagaaattatgattcatttaatttatatttcttgccagagttttggtataggttttgcctcgcttgattcatcacatttacccatgtttcttgggtttttaaatttgaaactgtctaaacaggagctccgggctcattgaagttatgatgattttttggaatctaagcaatgaaacagcactaattacccagcgttcttgatacagacaaaatctttgtgacaattatgggcagatgatttggtttgttaatgaattcagggcccataatcttagtttcgtgagcactcagaagtttcggggcccatttataaaaaaaaattcaattaaaacccaattaagaatccattgtttttctacttatcgaaaaacctccgctcggtgccggtggtggtccaccgccgccaccgcctgcgcaattaacgatgattggccctccaccgccgccgccgccgccgccaccaccgcaacaacatggcaccggagggggcgctgctggtggtggaccgccaccgcaacagcaacaggtgttaccgccaccgccgaagaaaaatgtgttggatggtgacgggaaaaggaggcaaaatgccaataaaaatgatggcaaaaatgccaaagatgaagcagctgcacgaacaaagcacgtcattggcagaaattagcttttatttgctaaaaatgtaacaaacaaataaaaacaaatcaaaaattcacaaagcccaaaaatataaaagctgcattaatatgggatctcgtcaaattattttgtcggccatttttaagaaaatgataataatttttntatagaataaaaactttttatttaaaagttggaaaattctggactataaatctaggttttggacncaataaatatattactttgattcattcaaataatcttatattcattaaaaaagtagcaagctt

SEQ ID NO: 35169 - DNA, 960 bp, Heterodera glycines
atcaaaatggggattgaatttacgagttttaattatcaaaaaattcttttggccatatgagtgaaacctgatttttatttcgcgaaatttaattaaaaaattctagcgtctatggtttttaaatttttaaattcaattcacttatatccaataaattccattattttgtccaaattatgatagaggctttgatggtttaaaattatcggtatggtttttaaaatttcgaaaatttgaaagttcgttgcttaaaaaattatgaatattgcagattttcgctctgatcatgactggttagatgacatgatcacctgcttgaaggtgaccggcataaacgagcccaacttttgctgtgccggcttggttccaccggtgtgtaccgtatccattgtttgcgtcgtcgtggttgtacggtaatgattattgctctctttgggatcagaatgataagctgctgaggttgttgcctaacaaaaaaaacatttaaatagtattttttaaattttaaaaaattgtagccaacgaaatctcttcgactttatccaataatttgtaaaatttcccgatcactagtgatcgggatcgagattatcattatatcaatcctactttttatattacacactgtacctttaacaaagattataaaaatttgacattcatcgaaacccaacaaatttgaagtttcgaaacgaaaatttaaatgcctattatatttgtgccggaaagcctttgccctaattaacggactcaaattggcaattagcacctcattttccccgttctgttggtgttgctgatcaatttgtaacagttgaatggacgactgactcgcgcccgccggcgactgttgcggctggaagttccagcgtcgctgcgcctcctcccggcgtcgcttccgacgctccatcgctttcaggtcaacgccgcgcacctgtcgcgtgccggacgccactatgt

SEQ ID NO: 35170 - DNA, 739 bp, Heterodera glycines
atggtgaggttgtggacactccacgccgaccccctgctccaccaccaccacctccaccgccagggagacgtcctccgcgtggaccccctcctccaccgacggggagacgccctccctctggaccaagtcctcctcatccctccccacccggaagtcctccgcctcgtcctgaacgtccccaaagaccaagtagagcttctcggagaggtggtcgtctggagaaatggaggaaaggtcgatacaatatacagcaacggcagccggtggtgtgggaccttcttgcagaagcagctgctgccccattgcccgaaagtgacgatgatgatgatgagtacatgttggagagtggattcgcactgccagcgccgtcacaatattatggcgatttgcctgtgctgcccgacaacgcgaacgaaattgaggagatggacactgctcagcacaggattgccaccagaagaaaattacaaaaggatgaggcaaatgataatgatgatgatgatgatttacgacgcaaaagatttttggtttatcaccgttcacctccacggctcccatccccgcctcgtttgaaaacaaaaattgaaccaagaccacctccacagcgtcctaccgcaaagagagaaaaacaacaggcaaagctggattggaagaaaacccaacaccctactccagcgcctcgggcgaaaagagagccagaacttaagctggacccgcggccatccacatccaggcaagc

SEQ ID NO: 35171 - DNA, 552 bp, Heterodera glycines
tctttttagaatcaaaaaataccgttagcaggcacccggactcgaacccattgcaacactgaatcagcgagaccaccaaaccatctaaatttggtccctattgggtgggtggttcgagtcctcgtgcctgcaaatgttttttttgacattaactaaaaacacagaaatttggggttcattccagcaggattcgaagttggtcttaaatgaacgactgttttcatgtcttcactttttttgaagacttttttgatttcccccaattttttgcagcgattccctttggctgttgaagagggctccgctcggcgtcgtcgctggtcaacaaatggacgaagcgggtcaggagatgaacacggcgcactgttggcaatggacagccgggcacagtgtgctccgagtgcaattcgaagaccgggacattgggtactaagcatttattttgggggggggggaatcaaagcatcgaattttggtgttcgttgctcccccatttctccactttttttaaattggacacaccaaaccaatgcatttaaaaatgcatcaaaa

SEQ ID NO: 35172 - DNA, 935 bp, Heterodera glycines
atagaaatgaatctaaattaaataaatatttttttttattttaaatatttattttgtgataactttttgtgcaaaatcgtcaaaggctgccacagtttcgaatgaagtattaaagctaaaaaatgcaaattaaaaatttacttaaaattaatttaatgaataaaaaaacagtcaaattacaaaaaaaaagagtaatattttaattataaataaattttttcaattaaataaaaataaaaatatgaaagaacttaccgctcctcagctttgatctgtagatgcaatgcaattgcattgatgttgcctgaatatatttttattttacattttcctaaaattattttaaaattttctaaatttatttttaattaatttatttacatgtgtgaaattttggctttgattccaagtcggtgtatgtctcaaccatgaggtcattgagtgctaaaaatggaaaaatttcgaaaattaaaaatatttccttaattgacacaattttaattttaaaaaaatgcaatttaaattttcaaaaaattccgtaaagtaaattttttaccgggattgcagcacggataaccggtgggattgtggaaacaggtggccaatggcagcggcatccgaggcgggtaataataacgatggacctaattagacacaattagttttaattatttgattaattttttacatcatttaacgttggcaaatatttgctgtttattgtttgataatgagtgccctgaaattaaaaagataaaacgaataaaaaaatattttcattaaattattttgtttttttttataaacattttacgctggtaaatttgtgtgtgttttttttcatttttgtgtgttgtaatgtgtttcttgtatttgtgaatttctaaaatgtgtattttggtttttgatgaatgtgttttcttagctatttgtgt

SEQ ID NO: 35173 - DNA, 730 bp, Heterodera glycines
attcattccatttttaaagtcccattttgctaaacatttctgactttactgtgcagattctcccaccatcagataaaagcattgtctaataaatcccaaaataattcacttaaattgtccattttttttatttgcatttaataataacaaataaaaatttgaatttcttaattgttttctaaaatattgatttgccattttaagcactttaaaagggatttcaaaaattaagatttaaattgagctaacattccgactcactttggccttctcctcgtagaaacaacaattttcaaattggtccgatcacaaattccaccgtcagatcaacccaaatctcgagaaaatccatgggtcccgaattcgagaagctcgacgccggctgcggcgcgcgtttcggtcacattcccgggggcaccaggtgccggaaatgttgggctggcaggagttctcatcggacgaatcggtggattgggacccgtacgacggcttacacgccgagaaacaggtggagagattaggggaaaatcgagaaaaactgagaaacatgggaaacgccagagtttaaaaaagtaagactaacaagggaaccacccgaactgtaagtcagaaatgcatatgtgttatatatttttttatatgttttggggccgtagaatccaaatatgatattcatttcggaccccgaacccgaattcgaacaattaattttattaataacatttacgag

SEQ ID NO: 35174 - DNA, 1033 bp, Heterodera glycines
  unsure (1)..(1033): unsure at all n locations
caaatgttttcatgccagaaaacggtttcgtgaactgactgagcccgtcaaggcgttgttggctctgctcaaatacccgttcatcatgctccttctcctcctgctcactgtttttgtcccctctctccaaattgctctcattgtcaatgtttccctttagcttctcactgtgacgatggtattgctcaacactcttcagttgttttttggcttcaaagctcttcccgcctatgtgcaatatatggagcagtatcgccacactttgggcattttcggagcgttgggcgaaattgccattattttgtgagtttattttggccatccccttcactttctcttccccccccctattcaggtacattatgctgtcttcgcttgtcggcctttattctgtccctttgatccgtcgccttcagccacgtcgtgggcacacttcgatgactgccataatcactaattgtgtgatcattctcgtcctttcttccgctcttcccgtcctcgtcagaactttgggtgtgtattcactaccctccccaaattgtttcccttttttgggtatcacttcgtttgatctcctcggcaattacggccgaatccattggatctccaacttctctcttgtctgggggtacaaccttctcttcgccgccgcttccattttctgtttggccaacaaatttactcagcccgtccgtcgagaattgcttcgccggttttttctttgtttcttatttctcttctaatatattttaggttcactgctcttgctagtcgcaaatgtttttctacggaaaggagaaactcgccatgtccattgtctgatacgtactctctgtcagatcacgaagccgaatttaacccagaaaaggattaaacatattgatatgttcttttgccatgtttttgatttttgtccgtttctcctccccattntctctgaagctttagacaattntgtcagtgcaactttttatgagaatnnttagtaatatgtaaatgaaaaaacaataaaacataaaagtgttgagtaaac

SEQ ID NO: 35175 - DNA, 492 bp, Heterodera glycines
caacaatttcctcttaaaaggaaaaagccgtcgccagccaatgccaacttggaaagaatgtcggcacttttttcgaaataaaaagcatatttaagcaataaaataagccaaccacaccaaccaatcagcatcattaattaattccatcaaatcagccaaaatcctccaaaaatgccttctccgtccgtctctcttctcagcatcgtcgcaattttctgtttgctgtgcaaatgttgcgtttcggcaccgcgtaattaattgcttttaattagctgtaattataaggaattgcttttctgcagatccgtgctgtcccggcagccaaaaagtggcttcgttgttggttaattacgttggtattttccgccatttctcttccaagtcatcgctttgttcggatgtcgacagtgttgcggggggattgaaaggccgtctgatcggcggcacgaacgggggacacgccactcccttggccgacatcgaatcacctct

SEQ ID NO: 35176 - DNA, 1512 bp, Heterodera glycines
aaaaatatttaaataaaagtcgcaacctttggtttgcaaacacaaaaaaagagaagtgttgttcttattaattagagcatggcgaatccaggaaaaaaatatgtatttacatataaatcgcagccttaattattgtatagatattattgatatatttgtcattacatgcacatatgtagggtggtttcgtttacaataatctaatttgtgtttatattttttgcgttcagtgcctaactacaattactttccttcagctattttttaaaatttagccatcatttcatggcgcataatatattataacagaataaccacaaaaaaaattgagcatgaaggtcatctttatgttttcgccaaacctagcgcggatggttttatcaaatttttgaggtgtgataacaaaagcaataaggacgtgcagccccgcgggcgtctgcgcgtcaaatcgaatgacgaagtcttctatccagtcgatgagcatgtctgcggagcaaacccgccgcgagcggcagcacaccgcgtcgtgacaggttagcttatatcaaatgccgaagatcttgaatgcatatttggccccccccccccacttatccactccctcgtcagtcaccgcttcatcccccctccccccctatgccctggcatgtgtcccccgccccctccgtttccactgacttcttctgacgcaatgaaatcaattagttccattttgtcctcatcactttgaactgctcgaattgcgtccgcaatggctgcctttgccaggaaatcgtgctcattgcctcgcaacgcggagataatgtccaattggtagcttatgagaaaatgtattatgatgagagaatgtttgattttacgaattggcaaattccggaaggcttaaaatgccctgagggggtgaggggtttgacggagtgcaaagctgagaaatgttgtccggagaagtgatcggacctaaagaatcagactcagctgaaattatagttaatgaaaagcaattgctgacttgaagactcagtttttggttccgaaagcattaaattatttaatgaactgattaattattgttaattattatttggttacgctcactaaatacttaaattccttatctttcaactaatggacgctaatcagccaaataacatattttacttttaaatggaatatatggatagggcaggggggcggggtgcccaaggacataatattgccaatatcttaacttatttatccaatatccaacaatagcagtctttatttggtgtccaatggtcatggaacaaagggcgacccccaccgattcggtctcggggacagagacttacgatggacgggaaacccctgctgctggagggagagaagaagaagcagaagaacacttacaaagaaagagtctcgatcagttagtatagcaaataaaatattcaatgacataaaaatgaaaaaataataattttattcataagaaggcatcatttaagacaatttactataatagctttaaat

SEQ ID NO: 35177 - DNA, 1203 bp, Heterodera glycines
  unsure (1)..(1203): unsure at all n locations
taattaattaattgacaccacccatcccctacggctgacaattagtgccctcttgaccgctgaccaattagtaccccggtcagtgactaattgacacccctccccgccagctgtcactttttaaatcaatcaaattttatgtcaaaaaaaaaagtacatgaaaattttacacacccctctcataggtctaggtttccctaattaattgacaccacccatcccctacggctgaccaattagtgcccgttgaccgctgaccaattagtactccggtcagtcaattagtgactaattgacacccctccccgccacctgtcacttctaattagtgtcagctggcgacggaatggcagggtttactactaatatgtgctgaagcagcaaaaaatggtccataaagttcttggggcaagtgtttttataattaacaatntaattagcaccaattagcaattacacattttaattgatcgtaattgacccaggaattgagcaattgcaacgaccaaagaatgttaatagcctgtgatgctgctgctgctgatgattgattgatggataaaataattcatacatataataaaatttgaaaaaatatagtaatttttcatatttcgtcgatccccatatgaaaatgaaaggcaattctatttccataattctctttctctactccactgtcacttcttatgaagggtagagatgcatacttttgtgcggctttccctcctctttctttctctgcttgcatacagaaagtggacaccgcaaaaaaaaacttgcatctctacccttcataagaagagacagcagtggaggtagagaaagaaaatcatgaaaatagtatgtgtgtggaaacgaaattctctgcccccaatgtgctaatccactcatttccatatcgacatttccaattgcagtttccatatcgaccgtttccatagcaacgaatttgtgtcctttccaaacaccaaaaattttcaaaattttttggcaaaaatagggattttcaacggttttgtaagctaacataggatttacaatgaatgttaagataagagaaaaaatggaaataattatgacaaaaaggaaccgtgcaaagctgcaacacaacggccattcatacatttttcacacgctgagtgcgagcggtgaaattcgcaatgggtcatgtgaacagcatcatgcgcgagacgtccattg

SEQ ID NO: 35178 - DNA, 707 bp, Heterodera glycines
  unsure (1)..(707): unsure at all n locations
ttaataagaattgatttaataatctcttaacaatccaaagcattacttatttttgtaatttaattcacncaaaagcttgcatttattgttttaaattttaaattatttctactctttttatccatcatttatactaccaataaaatcgtttaaactgaattcattaaatttgggttttttgttctggtccccggaccaattttgggcgttgtacttgcaaaaaaaaaagtagaattttctgtaaaatcatttgcctgattgcttaaatagttgtagagaataatataatcaatcgatggtgccgaaaatggatgagtcattttgagaaaatggcaatgagcgaaatgggccacggaacagcactctctgctgctgatcagttggagcgatcactcaccgttttactctccccaaaaaacgcatcagtcaacggaatattcattcattttaattatcattaccattaccattttcgttttattttattttgtcaaaagaatgtccgtccgccgttatttctgcttcgttttgctgttgtttttccagcaaaatgtaaaaaatttaatgcttttttcacccgccggagatcgcattgaaatttttcaaaatgacatcattaaagaaaataaagaataattaaaaaggatgccaagcatcaaaaaggctttgaaatttattcctttattcaaaatattttataattaatt

SEQ ID NO: 35179 - DNA, 919 bp, Heterodera glycines
  unsure (1)..(919): unsure at all n locations
atttgattggcttatatctctcaactagagatagggtaagggattcaaacggtttttcagtttttttaaaattcttttaattcttttttcgttacaacaccaaaaaaaaagatcgaataaacaaaaagataaaaaaatgtattaatttaccgttacgcgtttatcgactggtaaaaacatacggtagtttacacttgaaaactacagcatacgatttaaaaaactaaaattttcaaaatgcaaattttttattttcccccattttccattacataaatttaattttaacaaatattcataaaaaaatttaaaaatttcaaaatttcttggcattcataagtttatttttgttgcttcattagtactactgaacatataagtggataacacaaatgccattaaaacaacggcacagatgtaattagtggacaaattcatgccacttttgtcatcaagaaaatccatgccacttttgttaatcgcggaattatttttgttttcttgccctccggcgctgctctgttgcactaattaatgcctctattcatccatccttcgggcgccaggtgaatgcgcaatttgttggctcccactgtttccaatacaattttgtcatccgtccgtcttcaatttttctcgacaaaatcctccccccctccggcgtgaccaattttgagtaaatttgtcacacattttctgtgggtgggttggtcaccataactcaactccgcacaaataatatgcatataattggcttgtcgccgcgaggcacacgccgtcgccgtccgtcgtcgccatcgttgttcagcagcaattcaacaaatgacgccaaattgcccggaanatgtctggccattcatcatcgtcccgcccgcccgccgaggagggcattnntgggggtgggtgtcaccggcgacgg

SEQ ID NO: 35180 - DNA, 1056 bp, Heterodera glycines
cggtctccccataaatctgggcgcatcggttcggggggactgccccgaaaacaaaaaaatcgattttttcaagtgtccgtttggggtactcaaacaattatggggagcaaaaatccaacgcagaattaaagtacaggctatagggaagctactcccgaaggattcggtctccccataaatctgggcgcatcggttcggggggactgccccgaaaacaaaaaaatcgattttttcaagtgtccgtttggggtactcaaacaattatggggagcaaaaatccaacgcagaattaaagtacaggctatagggaagctactcccgaaggattcggtctccccataaatctgggcgcgtcggttcggggggactgccccgaaaacaaaaaaatcgattttttcaagtgtctgtttggggtactcaaacaattatggggagcaaaaatccaacgcagaattaaagtacaggctatagggaagctattcccgaaggattcggtctccccataaatctgggcgcatcggttcagggggactgccccgaaaacccaaaaaaaaattttttggataaaaattatttaaatgaactgactagataatatttaaaataggttatttctcttcctttcagtatccctgcaaagtttggtgcgcttctgatcagtttctgaaaaaaaagttaagcctaaactttttggcctgtttaaaaaggaattaaaaatttttaaaatttattcatctccctttttgatagaaaaagcatcagagtgcctaaactagcatgtaaataaaatttggtgcgtttcagagcattttctgaaaaaaatatttatgaattaattatgcaaaaaacaaataaaaacgaaagactcagattttcgaaaatttttttgagccagctagctcggcgctcatttcagtgtaagttagtcctttaccggggagtatccctgcaaaggttggtacgcttctgctcaattagcaaaaatatgagtgatcgaattttcctaaaaaagtaagcctacattttttggaatatttaaaagcaattaaaaatttt

SEQ ID NO: 35181 - DNA, 636 bp, Heterodera glycines
taaattctctcaaatgttcaatggttgtgttggaagcttttgggacaggcactctaacaactctaagcttttcattttctaggccatcagtaaaatggatgttaatccactgatcatccaaggttccaattgtggagggccaagaataagcataatttatgctgtgtagcccacaaacccacgagccattaaaatagacaggcttaggaagacgaacccgaaatttatttggggcattatcggcatagtctgggctattactgggcaaatggacaaaaaaagtgttagacatttatacaaattaaaatgtgatgccaatgctgatttacaagtatttatacaagttgagtctcatgaatccattctctctctgggtatcctacaaatttcacgagcacttccattgttccgtcgggcattttccgtttccgaaaaacgcgttcaattctgtaagttgtttcagcatctctacgtacgggggccaattcttccggatagaaaaatccattgaacttctctccttttgcatcgcgtaacttgtattgcattggtttcttgtggcgtttgacttcatcaatttcaagaatttcatcgcatataatgaggtatatatcctttctcgaatttccttttgct

SEQ ID NO: 35182 - DNA, 817 bp, Heterodera glycines
  unsure (1)..(817): unsure at all n locations
taaaaggggacaagattntggagggatttcacattcaacattttgcctgaaagatctgacaaaagatagtttaagaatcaattggatttggaaattataatttctaaattagaaataatttgatcagaaaatttttatgttatgaaaacatgtctccggatgtgttctgtttcgctaatcacgaaatatatgttagggctccaatttttaagtgctaaaaaacaaataaatagatttttgagaagatttttgtagaaaaattttccttttcttaggggtattatttttcatttttatgcattttgttataattttgggcaaaacgccaaaagggttaaaataagttttttcaaaattttagattctaaaaataaaaacctagaagataggtgctaataactagagcccggaattttgaaattgccgggaccggggccgggacatggaaaatggaccggggcgggatcccggtaccgggagtcccgtttttccgggactcccggtcccaatttttgggccggggccccgccgggaccgggattttttcaaaatttttgaaattttgattaaaaattcgaaaaaatcttataattttacattttagcttagaattatatcaagccatgtaaattgaccttttttgcttttcaaaaccctttttacaacgcattttttcaatgagacttggcgtacagatgggtccaccgccggagaaaattttaaaaatttgtgtataatttgttaacagatttacaccaaaaaatgacaaagttttgcgattttgacccaattttttaagagaataaagagttttatg

SEQ ID NO: 35183 - DNA, 1324 bp, Heterodera glycines
ttattacgtgttcagtccatttaatttaatttggaattaaaattaatttttattcttatgttatactattttttccacatttctaagtctaactatgcaaaataaatatctatgtgtgcttataggtttaaatggaaaaaaacaattaactatttatatattttgcaataaatgttatactatataattttgtttgtatatgtaatattgtttttgtattgaaattaatactattttttcatgattaatcccatcacgtcatcgcatctcccagcagaatcacacaaactcttttttacatctcaggaaatgcgatggaatagcgaagaaatggccataaaattagccattatagactcaaaagatgtcttcaattttgttattataataaaaaaatgttattttttaaatgtttttatttaaatattgcatattcttttaaaataattattgtctatttaatttattctttatgtgcaatttttttttgaattagtttattattcatagttatgtaattaattttatcacttttacatttttgtctaaatttaatgcaccgctaaaaatgcacaaaaaattattgtcgcgtttattttattacatgaaaattccattcaaacattcatatgtacggaaaaatcaaaaactggtttaaatcaggaaaaattcatcaaaaattagccaaagcatttgtaataacactttttaaacaaaattaaatattattgaaaaaataataaaacaaaaaatagtaaaaattttatttaaaaataaatgatgaaaatcaaaatcagtattaagttataaataatattaaaaatagatattaataaagattttctttgatattttctttagaatattattactttctaaaaataaaagccaaaagaaagttacatatattatcagggctcgcaagttttttttcaaaaaaaaacaaatgaggctaaaacaaagattttgaccccaaaataaagattttttgaaaaaatgtatttttaccatgtaaaaacagttaaaaaacattattggcttttataaaagcaaaatacaacaaatttgcacaattacaacggttttattattgaaaataatatttttttcaaaaaagtgtcattcaatatatttttcccatccaccgatctgatccaacagtttgtgattggaaatgagcatctgatacatttctgggcaagtgagatcaaaatttattttcgtctggaccagagccttcatggtttcgactttcaacgaatttcgatcatcagtccattgtgagccgcaaagggaaaaaactctctcgacaaatgcatttgat

SEQ ID NO: 35184 - DNA, 1297 bp, Heterodera glycines
gaccactttcaaaacaatagtttttcggagctttatcgacttggtattttttttgggaaaattttggattttttcccggaaatagaaaaaatttttgccctcagcgggacatttgagtcccgggcccataactcgtcagggattggttttagccaaaaatcgtcttagaacatttttgtagagaattttaagctctatcgaacggtttgctatatgcccggaaaatttcaaaaattttcgagctaggccccctagaaattttcgaaaattttttttgggttgaaaatgggggtcaaaaatatttttctggggtattttgatgtgctgagcactaatatgatgtctattttaagtttcatgatttttggaattttttaaaaattctttatttttttgcaattttttggccctcgggattttggccaaatatttgaaaattcataactcggtgatggtttcatcgatttaactataataaagctttaaaaatagagaaaaataaggagaattttatgggatttatttgagttttttatcacaaaaaagaaaaaagttattccagaatttctggaaaaattcgaattttcagaaaaaaattcataactcggttctgaaaagatattctggaaaagtaaattactacaaaaaaccgcaatatttttctctacaatataaattttatttggcaattttatctcttttttgagagatgttacaaaaataaaagtgattttgtgattccggactaaagggtggtgacgcaggatttttgagtggaaaatttttttcaccaaaaatcttccaaaaacatgtctttaggggttatttgggccgctgatcacgaatacgtgatcagattttacttttgacatagtcaagacctcagaatccctgtgtgattggggattctgaggcatcattttgaggggggagggggcaggttcggatccggacggtgtaacattatttttctatttatttttgagttatttttcaatgcttttaattaatttgaagattggttgtaaattttaaatttttttttaataaataatttcattattattttttatctgtaaaaaataatattatttcaaatttcttaaatattcaatgcattcgatttttattctttaataaaaaacttttccttatttatataattttaaaccatgttgaacctcttcttatcacttttgtacctcttcttgtcactgttgtacctcttctattgtaactcatttaatcactgttgtacctctttgtttttaattaattccaaatagtgatttataaa

SEQ ID NO: 35185 - DNA, 871 bp, Heterodera glycines
  unsure (1)..(871): unsure at all n locations
tttaaaaatattaaatgggcaattaaaaattatatatttaattaaaactcattgtacattatctatttatttttattttttgcacagagtgataagactaatacacatccgttaaatttataggatggaattaaggaaattccaccctccttttagggtcgggtgatttcgacgcagttatctcgacctgagaaatttaaaaaaattcacaaccccttagggtaatgaaaaaatgaaaatttcggaattaatgtaccgcacaatgacggagaacaaaggatgatgatgaaatgtgatggtcgggaataaatagggggcgagaatggataatcgtgttgttttgccatgcccattatattgatcgattcaatgcgggctgctaatttcgattggtccacccgccgacgtcagctgtggtggcccgtggccgcagcccatccccaaaatgacacacaaagcacatttatgtattctcctccctcccttccgtgaccataaatccaaagagccatggaatttaaattttttaaatccgtattagaaaattgaattctgggtttataggattacgtagagactggcaatttcaaatttatggatcccgctgcgggattggaattaagatcggccatcataattggatgaaccaataaaatttaatgatttttatgttgctttattacacactttttgatgttttgctcttcggatctagagttgtcgactatttgattagattttggcatgatttttgatgatttgctcaagacacaagtgtttgtgcgaactttcagttgggtagtagagaaattgaaaagcgaaaaaagcaaacaaaatttttanaaaaattaaaattcgataaatgaatgaa

SEQ ID NO: 35186 - DNA, 864 bp, Heterodera glycines
acattcacggtgcgaaaaatggggtttgccatctaagattggggaaaaaaagactttacaaaataataccccctttgagaagggagtgggaaacatgatttcaaaattttcaattttttctagtctaatctactcaaaacggttcagaattcaataaaaataacattcacggtgcgaaaaatggggtttgacaagtttattggggaaaaaaagactttacaaaataatacccctgggagaagggagtgggaaacatgatttcaaaattttcaattttttctagtctaatctactcaaaacggttcagaattcaataaaaataacattcacggtgcgaaaaatggggtttgaaaagtttattggggaaaaaaagactttacaaaataatacccctgggagaagggagtgggaaacatgatttcaaaattttcaattttttctagtctaatctactcaaaacggttcagaattcaataaaaataacattcacggtgcgaaaaatggggtatgataagtttattggggaaaaaaagactacaaaataatacccctgggagaagggagtgggaaacatgatttcaaaattttcaattttttctagtctaatctactcaaaccggttcagaattcaataaaaataacattcacggtgcgaaaaatggggtttgacaagtttattgtggaaaaaaagactacaaaataatacccctgggagaagggagtgggaaacattatttcaaaattttcaattttttctagtctaatctactcaaaacggttcagaaatcaataaaaataacattcacggtgcgaaaaatggggtttgaaaagtttattgaggaaaaaagactttacaaaataata

SEQ ID NO: 35187 - DNA, 1039 bp, Heterodera glycines
cgaaaaatctcgaaatagttaactaaagtagtgagtaaaagggtaaaatagtgaccaaatagtggcaaaaagaccgaaatagtgacaaatagtgacctaattttcagccaaaaattaagcaaaaataatttttattcactggttgcagttgcaaatgagctacatttcctttataaaattctcttagcaaatattgacattttttaaatcaaaaattttgtcaagaaaaaaaattttgggggagaatttttgaaaaatttttccaattcttagtggtgtatttaaaaaaaaaaatttttggtcgattcttaggggtttatttttttgaaatttttttagatcgattcttaggggtgtattttttgattttattgcatttttgctaataaaatctttgaaaaatgtcgaaatagttaaaaaatagtgaaaaaacgccaaaatagtgaattttcactattttagtgacgaagcgtgaaaatagtgattctagtgatcgatagtgagatccaaatcgaaaaatttcaacgcagaaatgcgttttttgagctcctttcttcaaaacaatcgagcaaaaaaaatagttaaatcactaaaagttgcatccctagttaggtatttgtgttttcggttttttcctttctttctttatttattatttttacttgattgccgacccgtctatttattgtaatcaataattttgagtttcttcgactccagtaaaaatggaatagattggacaatctgatagcgaataaaaactttaaaaataacgtttttaaagcgattgcactagaatttcaaatttttttgttattatacataggcgatttggtccatttggctttagaattcaaaaatattttaattaatttatttttttattcataaatacttttttcgggagtgtatttgttggtgtggtaaactatttggcgcttcatttttcctcaattctttgctgaaaattatgtcgctatttggacttttggtcattatttgtcactattttggaattttttaggccctaaatatatcc

SEQ ID NO: 35188 - DNA, 318 bp, Heterodera glycines
  unsure (1)..(318): unsure at all n locations
actgtaaatgctttancacttttggaaatgatacgatttttactgacccgtcacacttttcggcaatggcacgatttcagtcgacccggctcttctctcgcactttgtccttgaaataaataataatgtcaacctaaataagtttaaaaaattaaattggacattcgagaaaaagcgcttggccatagagagagagggaaagttggtgcggtgcgggggggggggcaatggcaggaattgcagatggtgggaatgcaaagcgtccgatttaaataaaggtggctgggccgggcaattagcattttgacggtacccccc

SEQ ID NO: 35189 - DNA, 882 bp, Heterodera glycines
ttttagattcaattttgaaaaatttatgtccatattttgacatttttgccatttatgtccatattttgacatttttgccatttatgtccatatttcgcgatttttgccattttatgtccatattttgcgatttttggtccatattttatggccatatttcgcgattttatatccatatttttaccagccctaataattaaattagcaattattaaaatcagtttttaaaagaaaaaaaaacagagaaaaatgtttgcaaggcttttagataaaataaataaataacctataaattaattattttttaaggatgcgattaaaaacccagacaattatgtgctgaaaccgagcgaagaaggcggtggaaacaatttttggggcaaaaaaatcacggaaaaactgcaaacctttacaaagcaacaactttcggcatatattttaatgcaacgattgaagccgcttaaaatcaaggtcaacacattgcaattattgcttatacaaattgcaaaaatattaaataaaattaaaaaagccaccgaacaaagacaaaaatgataaaatcgatttatcgattatgcgaatatattgtcattattattttgtatttttcttaaattattttttttatttcagaattatttggtccgtccgcataagcggccggttaagctggtggaagcagtgagtgagctgagcacatttggctaccttattgcagatggtgatactgtatataaaaatgtctccgatgggcatatggtaaacgacggaggaatatttaaaaaagttcaatattgaaactagagttgagcgggaccggggcgggaaataccggttttttcaggtcccgatcccggtcccggtttttggaaaacagaaatc

SEQ ID NO: 35190 - DNA, 1782 bp, Heterodera glycines
  unsure (1)..(1782): unsure at all n locations
cttgtgtgtctacggataagggccgaaacacacggaacaattattttattaagttttaataaaaaagaggacaccgtactgaagaggcccagtctctttttattaatttttgcacttttcgcgaaacgtcccatttttgcacttttcgcgaaacgcccatttttgcacttttcgcgaaacgcccattttgcacttttcgcgaaacgcccatttttgcacttttcgcgaaacgtcccatttttgcacttttcgcgaagtgacctagcaccgttttcgcgccagcccgagtttctggttcttactttttcattgtcgatcaaatctaacaaacttggtaacagtcgaatgctttacatgtttagaagctattcctaaacaattgattggcgaaaagacaattcctaaaaaaaatataagtgaaaattggaaaaagtcagaatttaaaacttttttcttaattactttttcaaattaaaaatcctactcagtctcaacataatacatattgcaaaaaacggacttaatttttcccaaatttaagacaacaaattcatgaaatagttaaaattatcgaaaaccactaatctgtcattaaatcttctctccatttgtttaaccttatttaatgaaatggctaaatatggcaaattttaaatattaattctgctttgatagatgactttcgtttaactaggcttttttttaaatttcgcccttttcattgcgcgatgcatcgcatcaaaatgcataatttagtaaatgccattgaaaaggttcagccaaagcaaaaaaaacggaaaaagagctgaaaaagcaaaaatcgaaggctaacaaacgcaatgggaaggagaaagagtgacaaaacgaatgaaaagagatggacagattggcacttctgctgggagaggggacggaaaatcatatggactttttattttttggtgtgttatttccaaagggttccaagatgaattttgcataatatctttggcttaaaagccacattcagagtcgaaaagcctcgtttaaaaaaagttttccaagtcttaaaaatcaagcgggtttgatagaagaagcggtgcaataaaagctgctcttggaatttttaattcaattgttgaaaaaattatcatttttgaaaatttagcactattggcctctcaaaaccaaaaaaagatggtaaaacttctcactctggtaaccctgggttttatttttcaaattctcaagcgaagaattggtattttctgtttgttgttgatattattccaccgtccccctttcacctctttttaccgtctttttcggttctatgtatcattcattctaaatttaatttgtctgtcttctgtcataaaattattttggcatttaatctaccaaaatctcaaatgactaaagatactttcgtgttttaaggataagaaaggcttattgcggactcccgccttagtgcgtcaaaattaagttggtatagctgattgagtactaaaaatgtttgaagaaccttgggaagggggaaaatcatagaaaaaaattgatcaagcgcaagtggggatatggtctagtggttaagtttacattcttttataagtttacaccttagtccaatcccctgactggaatattagatttattttacaattttaatttaggtaattaaattttgttgctagtaggtttttgtaacttgaattatagtaatatttttcctgagttttttttagactttacataaaatccacaactttgcctttttgacgcanaaatcgttaagaattt

SEQ ID NO: 35191 - DNA, 135 bp, Heterodera glycines
cgtgcgcaaggtggcgcagtacttctacccgcagacgcagaccaaggtcatgaacgagggctgggccacgttctggcactacaccatcctgaaccgcctgcatgaaaaggggctggtcaacgacggcttcatgat

SEQ ID NO: 35192 - DNA, 1252 bp, Heterodera glycines
cggtctccccataaatctgggcccctcgggttcggggggaccttcctcgaaaacaaaaaaattgagtttttctagtttcctttgggggtcctcaaacattttggggagcaaacatccacgcagatttaagtccaggctataggggaagctattctggaagattcggtctccccataaatctggccgcatcggctcgggggggacttcctcgaaaacaaacaaatcatattttacaagtttccgtttggggtactcaaacaattaggcccccccccccccccccgcccttcagagcacgacaaatatttcaacaaaaatttttaaaaattgactagagcaattgaacgctaacggacgacctaatggaaaaaaatccccgaaggagagaatttaattaaatccattccttcgggggaccgtgccgggtgccgcggggtaagcagtgctggttcgtttcatcacggcaccgaaccttttggctagtcagcaatcgttgcttaacttgccagatcggacgggtgcgcatgattccactgttccaagcaccccaccaaaagcaaaacgatataaccaaaatataaggaaaaattttttaaaaatttttttctccatcttcctttttgatactaaagcatcagagtgctaaaattaagttgtaaataaaatttggtgcgctttagagcactttctgaaaaaaatatttatgaaacaaaaaaatcgattttttcaagtgtccgtttggggtactcaaacatttatggggagcaaaaatccaacgcagaattaaagtacaggctatagggaagctattcccgaaggattcggtctccccataaatctgggcgcatcggttcggggggactgccccgaaaacaaaaaaatcgattttttcaagtgtccgtttggggtactcaaacaattatggggagcaaaaatccaacgcagaattaaagtacaggctatagggaagctattccggaaggattcggtctccccataaatctgggcgcatcggttcggggggactgccccgaaaacaaaaaaatcgattttttcaagtgtccgtttggggtactcaaacaattatggggagcaaaaatccaacgcagaattaaagtacaggctatagggaagctattcccggaaggattcggcctccccataaatctgggcgcatcggctcgggggggactgcccccgaaaacaaaaaatcgatttttttcagggtccgtttggggtactccaacaatta

SEQ ID NO: 35193 - DNA, 963 bp, Heterodera glycines
aattcctattatgttgtaattaggttatgcgttattattattcgtaatattaattgggtttattccgaccgaataattattactcatcaaactctctttttcatttttatcaattttatcacaatatttacagataaaaataattattattatttaaaaatgcatgcatttatcatttcctctcattttccccttttaatgggactgatcgaaattgtgattccgcagcaaatcgtcggcaatgatttggctaattgcctccaccatttttgctttgctttgccactttttgtccgtcgtctcggcacttccaacgaatgagttttgccgaaaagtgcattttctgtcctttttggcgttgctgaatgaatggcatattcggcggagaagaaaattgtcattcgacacgcgcaaataaatgggaaaaataatatgcctgggaaaattgaagaaataaaaatgggattaattaaagcagcatccaaatgaaattttattaattaatgcattcgaatgcatttcatttattattatttatatatattttatggaagtctttctcataaattgctgaccaattcattatcggtgattactaataattcattccaacaccaaggaaatatcaaaatgagcgcgaaaaatgcgagaaataacaaaaatataaaacaattagtaagaaaaacgaaaaaagcaaagagcactttgatattaatttaaaaaggcatttaaaataaataaaaaaattaaaagaaggtggaattattttattgggattccaattttcaaaaattgcccaattcttagaaaggcattcacattttaatacaccgaggcgaaaattcattgaaagttggaaacggtaaaagaatgaattagttaattatccttacgagcctccgattcaatggccaaccgtaacagctgcttctgtgctgcaatgccagagattgccatttttta

SEQ ID NO: 35194 - DNA, 773 bp, Heterodera glycines
gagaccgaatccttccggaatagcttcactatagcctgtactttaattctgcgttggatttttgctccccataattgtttgagtaccccaaacggacacttgaaaaaatcgatttatttttgttttcggggcagtccccccgaaccgatgcgcccagatttatggggagaccgaatccttcgggaatagcttccctatagcctgtactttaattctgcgttggatttttgctccccataattgtttgagtaccccaaacggacacttgaaaaaatcgatttttttgttttcggggcagtccccccgaaccgatgcgcccagatttatggggagaccgaatccttcgggaatagcttccctatagcctgtactttaattctgcgttggatttttgctccccataattgtttgagtaccccaaacggacacttgaaaaaatcgatttttttgttttcggggcagtccccccgagccgatgcgcccagatttatggggagaccgaatccttccggaatagcttccctatagcctgtactttaattctgcgttggatttttgctccccataattgtttgagtaccccaaacggacacttgaaaaaatcgatttttttgttttcggggcagtccccccgagccgatgcgcccagatttatggggagaccgaatccttccggaatagcttccctatagcctgtactttaattctgcgttggatttttgctcctcataattgtttgagtacccccaacgacacttgaaaaatcgattttt

SEQ ID NO: 35195 - DNA, 1555 bp, Heterodera glycines
  unsure (1)..(1555): unsure at all n locations
atatgccgccgtgcgccattaatgaggagcagtgcggtccacagctccatggaacaacaccaattaatcatcattaacaaaaataagcatcataatgattataattgctaccggaagttcatgcgaagcacgagcgcatgccgccacgaccacacgctgttcgacgacgacacgcactgctgcatgcactactgattgcatgccgttgcacgtcgtcactgtgacgacatttgtgatgcttgttgcccttttgatttgcacgccctgcgacagcacgagtggaaggaagacgcgcgcagcgactgcggcaggcgacgaactgtgcgatgcgcgaggactcccgatgttgatgcgtaagttctgtgtgtacagcatgcagtgttgcataccatgccgtcgcccagtgggagccgaacccttgggcgcaaaaggcgctgcaaaactttatttattttgctgcgatttagactgttttctaaattatttttaatttaaaaatttaatgcttggcaccggatactatcttaaaaatttgagtttagtttggaaattttgtaggatgaaaactcaaaaaattgaaaatattaatttatcattttaaaatactctttttttggataattctttattctggaaagtctcaaatttttaaataaaaaataaaattaaaaattgttccaactgattatgattatgaggattaattgacttttaatagaaagtaattataatttatgatttttttttggattaaccaacatttaattgtttgcttgtaccgtattttgctctaattatcccccagtctctattaatcccgcagtctccaattatcccccagtatacgaggtgttttgaaaaataatccctctatcataatcccccagtctctaattatccccccttttctgaggagattgaaaaataatcacccatgggctataattagagcatatacggtaattgttatacaaaatgattacagcgcccaatcagacggtgctgcagtgcacgcatgacatggactgcttgccaccagcgtcatgcaacaagcgctcgcgcgtttgttgcgtgcaaccattggatcaggccccaccgcctgttggctgccccaagggtatgttgcctaattagctaattccaataagtggggggggcgaaggcccaccacgaggccgcgaagaggccgagtgagtaccttcggtgcaggaaaattattaaattttaaaaattttttaattgctttttaaatatgccaaaaaatgtaggcttaacttttttagtgaaaattcgatcactcatattttttgctaattgagcagaagcgtaccaaactttgcagggatactccccggtaaaggactaacttacactgaaatgagcgccgagctagctggctcaaaaaaattttcgaaaatctgagtctttcgtttttatttgttttttgcataattaattcataaatatttttttcagaaaatgctctgaaacgcaccaaattttatttacatgctagtttaggcactctgatgctttttctatcaaanaagggaga

SEQ ID NO: 35196 - DNA, 749 bp, Heterodera glycines
taggatggcattgtgaaagatggactgaccgatgcttacgattcggtgcatatgggcaattgtgcggagaaaacggcgaaggaatgccaaataggacgggaggagcaggacaattacgccattcaaagttacaaaagggctgctcaagcatggcaggcgagaaaagaccgtgactcatttagaaacagcaatttcttatattgatagaatgggcaaattggacccgaaattgtaccagtggagataaaaacgcgcaaagggactttcaaaatggagcgggacgaggagtacagcaaagtggactttgacaaactgaaggcattgcgcacagtcttccagaaaggcgagggaaaaaaacaaaacacataagtaatcgttaaaatgtttttttttcttccacggcccctgacgcttaattccgatgcataagaagtgataaataaaaaataatccccggccacttctgaatttttaagaggaactgactaaaatttttctttaactttagagaatggcacagtgactgcgggaaatgcctccacgttaaacgatggcgcagccgccgtcttaatggccagcgaggaaaaagcggacgcacttggggtgaagccaatggccaaagtaatcgcctacggagacgcagccacacacccaatggactttccaatcgccccggcgcttgtcatccccaaggcactgtaatagcaaatcgttctcggtcgtttcataaaatccgctagcgatttttt

SEQ ID NO: 35197 - DNA, 871 bp, Heterodera glycines
  unsure (1)..(871): unsure at all n locations
attgtcattcctttcaaattgtcatctcctcacctaatcgatgtcaaagagaatagcaaatttttctcctccttctgacaacactgccccaaaaaattttttatccgaccttgaccaactacaaatccccaaagaaattgactccgacaactccattcccgactacgccaagttgcttattaagcagcttcactccctcttaagcaccgcctccgtcctaattcattcacaggctgcggcagtcaacgcggtcgaagaggaacgacgactgagaacncgtcgttgttacaaatgtgcccgaaagcaaatcggacaaagcgacggagagagcccgggaggaccgtgccgttgtggacgaaattttgaatgccacggacgttgatcaggcaccaattgtcttccgtgtcggcaaacgaatggatggtcgaccgcgcccgctcaaaatggaattcccgagcaaacacgcagcgcggcacgtcatccgcatgcgcggaaaggtgcaagcgttgaatggtctacacactgtacgcatccgtgaaagcatgaccaaggaccaactgtcggagaggcggaaactgatcgaagaatgcgggaagaaaaggcaggcggacaacggtgattgggtgatttatgccaatcaggtcgtgctgagacaggacattgaccatattcgaaaaaatttttaaattgtccaaccaaatcacttcaaattacccataattattacacaaaggtacaaaaatttttccggtcagtaaaaaatttttaccaaaaaattaatcatccaaattttttaataaaaaataaagggaatgttaaatgctgtctagtaaacataaggtcaataatgaataaaatcgatgaaatagca

SEQ ID NO: 35198 - DNA, 715 bp, Heterodera glycines
ttttgataatataagagtcagagtgccttattcaacttgtaaataaattttggatcgcgttcagagcagtttctgaaaaaaaatttatgaattaattttgcaaaaatcaataaataatgaaccctcctccttaataattttcctgcgcccatggtactcactcggccgcttcgcggcctcgaggggggccttcggccaccccccccccgacctttaaaattttgataaaccagaatatgaccagataatgctagatatattgtaaaataaaaattaatggtgttgataatattatcgtcttagaagcggataattaaaagtacatagcgcaaatatgctagaactactggtataatttaatatttaacaaattaatattttgtatttggattcccggacataccgggatcaggtaccgtgcattttattttttttaaaccgagcccgggctaccctattccaagtgaaatttcacatcagataattttgtagtacaaaatttaatgtaaatgttggtattctataaaacaatatgctttaaaggaaaaatgttgagttgtctttctcctacatttgtaattaatcacaaaattttttaaaaggcatagagtagacattttggtgaatatatgttgaatttaatgattaatttttgaaaaagtcagcagcgtatgcctgatgttcccggcagaaattgctggtcacggcaattatg

SEQ ID NO: 35199 - DNA, 756 bp, Heterodera glycines
ttccctatagcctgtactttaattctgcgttggatttctgttccccataattgtttgagtaccccaaacggacacttgaaaaaatcgatttttttgttttcggggcagtccccccgaaccgatgcgcccagatttatggggagaccgaatccttcgggagtagcttccctatagcctgtactttaattctgcgttggatttttgctccccataattgtttgagtaccccaaacggacacttgaaaaaatcgatttttttgttttcggggcagtccccccgaaccgatgcgcccagatttatggggagaccgaatccttccggaatagcttccctatagcctgtactttaattctgcgttggatttttgctccccataattgtttgagtaccccaaacggacacttgaaaaaatcgatttttttgttttcggggcagtccccccgaaccgatgcgcccagatttatggggagaccgaatccttccggaatagcttccctatagcctgtactttaattctgcgttggatttttgctccccataattgtttgagtaccccaaacggacacttgaaaaaatcgatttttttggttttcggggaagcccccccaacccgagggccccaaattatggggagaccggatcccttcggaattacttcccctttacccggaacttaaatccggcgtggaattttggttccccttaatggttggagaaccccaacgggaccctggaaaaatccaattttttggttt

SEQ ID NO: 35200 - DNA, 978 bp, Heterodera glycines
gaattattttttaaataaaaaattctctcgaaaattctagtaaaagtgccagaagataattgtgccactttttcacaaagtgccaaaagataattgtgccactttttccatggtgttctactcacattgtgccaccgccgaagagggcaatttggcgggatcatgcgatatgctcggcaccatatcgagaatgccgaagatgtcggcgacgaacttttgcacggaccaaaagagttggcagaagtcgacgatacggagtgtgggattgcattctgtcgggtaatatccgtccgataatgatcagtcatcgtttaaaaaaaaattattgcgtccaaatattttcgttagtgccgtttaattggtaaaatagtgcgttggagatgaacattgcgattatgtaccgcaacgaccgcgagcagttcaacaagaatgcccgttaatgggcccagaagcacgcctgttactgttttccatttcttttatctttccgattcccatttttgttggttttttctcttatcatttttctcacaatttgcaatttttttttccaaaatttcaaccctttattgggtgcaactcgtccccttcccccctccgaaaaatttcgtaaaaaattataatagaaaaaaaaaatttttttttttgacacgaaaatctcaagaaaaaaattttcactgatttttggaaaaatttacgtatgtgtgcaccctattcttctcttttcagtaccttgactgctttatctttttgatttgctaaaaaattgatttatgtatttcagttattactgaaattcgatttaaagaaaccaaagttaacaacgtagtaggctttttgttcaaattcttaggttaaatggatacgggattcgttataggcattctgaaaatcctttgtcgtttactaatgtcgttcctaatacgtccatgaccaacagtaaccttttttacaaatttagattgctttcctatggcg

SEQ ID NO: 35201 - DNA, 1381 bp, Heterodera glycines
  unsure (1)..(1381): unsure at all n locations
taatataattaatttannccaattaaatttcacgtgacgatgcggaataataatttaacgtgggaatcatgaaattagcaaanatactgtgttaattttcattgaaaagattgaattttatattagctgattttcaaaatcaaataatcctgctgaactcctgaaattattatttaatatatgtaattttntaattagtttatgctcaatggaatataaaatttttgcatgatgacattttatttttatgcttgcaaaaaataatttaattataatttttgtttgatttattaaaacattcttgtaacatattataattaattttaataggtccattcatttatttgaagctaaattattctatttcctaatagatggcgaatttataatttcttgattaaaattgatatttaatttgtattgaatattgatctttagtttctttatataagttttattgttcaaaatcatatatcaaaatataaataatttaataaaaaatattttttatattaaatgatttatatttaaaaagaggttctatcattttatgcattacactaattcataaaattaattttatgtgtaaacaatatatattattcttatctaataggcacaataaatatggctccttttatatatactttgattaataattattgtttttactttcatgccattttaagggaacccattcacataactcttcaaaaaatataaaaaatattttgaattttgaacatattattttttttttaatattgtttacataagaactgtttataataaattataaattatcaaaataaagaaaaaaaacataatttttcgacatcataaattattagacaaataatttattttaaatttttttaatgtttacgatatttattcttaaattcaatataaatcaacaaaaaatccagaaaacaatttcaaataattaatgcaattatcttttataacatcaactttagataattaaaccttattttatttttcattttaaatattttttagtgtatttaaaaattcgaacttccattatcttcacatttttcaatttaatgttcagttaattttttgttttattttttgatatttagaatttcaaaatttttgttgaactttcttttcttttcatgaaaaattttcgatatgttctaataagtaaggaatacacttattgtcaatgtttactgcgtaattatttatattagttttattcatttatttattcatttattttctacgttttttattttattattgtttctgcctcgaataaaaatttatttacataattagttttatccacccatgatttcaaacgcgattgttcattggttggttggcattttatctatcttcccttaaa

SEQ ID NO: 35202 - DNA, 1081 bp, Heterodera glycines
ggggggggggcgaagccccccacgagccgcgaagagccgagtgagtacctcggtgcaggaaattataaatttaaaattttttaattgcttttaaatatgccaaaaatgtaggcttaactttttagtgaaattcgatcactcatattttttgctaattgagcagaagcgtaccaaactttgcagggatactccccgttaaaggactaacttacactgaaatgagcgccgagctagctggctcaaaaaaatttttcgaaaatctgagtctttcgtttttatttatttgcaaaattaattcataaatattttttcagaaagggttctgaaacgcaccaaattttatttacatgttagtttaggcactctgatgctttttctatcaataatggaggtgaagttcagaattcaataaaaataacattcacggtgcgaaaaatggggtttgacaagtttattggggaaaaaaagactttacaaaataatacccctgggagaagggagtgggaaacatgatttcaaaattttcaattttttctagtctaatctactcaaaccggttcagaattcaataaaaataacattcacggtgcgaaaaatggggtttgaaaagtttattttgaaaaaaagactttacaaaataatacccctgggagaagggagtgggaaacatgatttcaaaattttcaattttttctagtctaatctactcaaaacggttcagaattcaataaaaataacattcacggtgcgaaaaatggggtttgaaaagtttattggggaaaaaaagactttacaaaataatacccctgggagaagggagtgggaaacatgatttcaaaattttcaattttttctagtctaatctactcaaaacggttcagaattcaataaaaataacattcacggtgcgaaaaatggggtatgaaaagtttattggggaaaaaaagactttacaaaataatacccctgggagaagggagtgggaaacatgatttcaaaattagcaattttttctagtctaatctactcaaaacggctcagggggggataaaaataacattcacggtgcgaaaaatggggt

SEQ ID NO: 35203 - DNA, 818 bp, Heterodera glycines
tttttaaaagcttttttgtttgaacgccgttattgccctttgaaatactttaaaaacaatatttgaactttttttaaaaggattcttacgaaacaacatttttaacattaatggtaaagaatttcagaagtcacttttatctaaatgtgacatattatgaataaaatattttatgtgagtacgatggttctcatgaattagtcaaaggttgagttgaaccacctaaaaattttatgctacttttattatttatgataatgagaaaaattattattcgtacaaaatatttttttgcaagttatgcatgagttgtccagaagtagtgtaggagttgttacgaatttctaaaaaagttgttttagtagttcaagagttgttgtattttttctacaaggcctacatacattatctttgtccgatgtcaagatatataaaagctttaagaatcttttcttttttacattattttaactgtttctgctgtatttttactaaaaaataatttttttttaactacatatatacattttctatgactgatgtcaaggtatattgaaaattttaatgtcaacaattgttttacattttttttactgtatattttttaaaaagctaatttaaaattttttttaatgccttacaatgataccaatccaaaatgttggtctttagtcaaaaatacataataaatattttaattattaaattgaaaagtttaggcgtccttattggaacagcggagtgatcggcttgcgcacgccgcttggcatttgctcaatcgtttttgccgtgttaattgccgccattctttccggtga

SEQ ID NO: 35204 - DNA, 693 bp, Heterodera glycines
aagaaaatgccaagagaagggtgcgaggccgcgaagcggccgagccattttcggttttatcattcataattttacaacacatctgtacttcctagcgggggatgcgccgaaggcgctaaccccgctagttttattaaaaaggttactgtcgaaaacacctggtttaaaactagcctaaaaaataaaacgccaatacattcaaatttaaaaaaacttttggtgggctttcatttttttctgctacaaattttttgtttatcttggaaatgtatgtacacatgcacgaagaatgcatttattagtttgtttcatttggttccctcttaatttagcaaattccaaattttactaaaatgagcgaccattcgtcggacgattcaagcggggctgagggtggtgatacttaccaagtttgtgaaaaaaacagcgtcccatcactttttggaatttcaatggattttttctaggttgaacgggtgttgaagaagcgcattatcaaaggggggaaggtggaatattacatcaaatggaaggtttgaatttagaaaaactttttacattttaaatccgtcccctttccttttcagggctacgaaaacatagaggacaacacatggtaaagatgctctgttttttttctgaatatttgcatttttctttacgtttccgaccccggcgcattacttttcgatt

SEQ ID NO: 35205 - DNA, 870 bp, Heterodera glycines
  unsure (1)..(870): unsure at all n locations
ttgatcatctccataaatatctcgtttttaatcatttacccttgaaatacggtagaaatcaatcattttgagatgtccaattttgaccccaaccctatctcagcgagtataaatcatagcctaaccatccaaaaggcaattctgtagtgaactttgtgctctatccaatgagcctattcaaaatttccaaaaaaattttcctaaccccctaggaatttttttctaaaatttccccaatttcaagcaatttttgactttcctggtcaccatgaaagagtgatctgatcaagttgatgtaagagacttttttgatcagtatcaaaagataagctagcatgaattatttcaggtttttaaatgaattttaaggtggtttttcatgttctgagtaaagacttttttccgccctttttttgagtaaagagtgatcaaacgactcatgctcagaattgactagatcaaaataataattttgtgaaatttgatcggcttggtaaagacttttttccaccagtgtaacaattttgaccctaactttattgaagttcaataaaatttttcgaaatttaatataataatagagaaatctttgatctatcgaattatataaacaaaattaaaaacatggaggagaaaattcgtcgaattgaattgaaaaataaatttatgtacagtcatggtcataagcagggttggccgggtccgggtacccgaccgngtccagatccggatacccggcttttttataatttttattaattttattaacgcttnttagatagncaaacaaattaatcnaaaaacttaattttgcttatattctatttttaatattttttagaataaaggacatatttaaacaaaaatttt

SEQ ID NO: 35206 - DNA, 189 bp, Heterodera glycines
aaataaataaattttttaatttcttttctaattgtttatttttattactgtttctgtcgtttataataatttatcttttcaagatgacccatgctttcgaacgagtaaatcgtgttcttctatttaaatttatccttttttgaattattgactttttcttcattttaatttattaattattttatttgt

SEQ ID NO: 35207 - DNA, 214 bp, Heterodera glycines
gttttgaatttgtttcgggtgaaagaatgtccttgaaagtttttcgaagtttgcaggacgaggcaataatttaaatggataaagtccttgagtttacagggaggcatttatgctcaaataagttagcaaatccctggcctgccaattttgcacctttttaaaaatttatataacctcgaaaactatcaattttttggtttaaaaatttttcttt

SEQ ID NO: 35208 - DNA, 780 bp, Heterodera glycines
ttctcagaaaaatgtctatctctttttaggacaattttctatctcgtaaccccgatgctaatccgttccgcagagcctcttcaaaattttttccattaccgcaagagttgcggaaattgtgaattaattctcagaaaaatggctatctctttttaggacaattttctatctcgtaaccccgatgctaatccgttccgcagagcctcttcaaaattttttccattaccgcaagagttgcggaaattgtgaattaattctcagaaaaatggctatctctttttaggacaattttctatctcgtaaccccgatgctaatccgttccgcagagcctcttcaaaattttttccattaccgcaagagttgcggaaattgtgaattaattctcagaaaaatggctatctctttttaggacaattttctatctcgtaaccccgatgctaatccgttccgcagagcctcttcaaaattttttccattaccgcaagagctgcggaaattgtgaattaattctcagaaaaatggctatctctttttaggacaattttctatctcgtaaccccgatgctaatccgttccgcagagactcttcaaaatttttccattaccgcaagagctgcggaaattgtgaattaattctcagaaaaatggctatctctttttaggacaattttctatctcgtaaccccgatgctaatccgttccgcagagcctcttcaaaattttttccatttaccgcagagttgcggaaattgtgaattattctcagaaaaatggctatc

SEQ ID NO: 35209 - DNA, 1061 bp, Heterodera glycines
gtgagtacctcggtgcagaaaattattaattttaaaatttttaattgcttttaaatatgccaaaaaatgtaggcttacttttttagtgaaaattcgatcactcatatttttgctaatgagcagaagcgtaccaaactttgcagggatactccccggtaaaggactaacttacactgaaatgagcgccgagctagctggctcaaaaaaatttttcgaaaatctgagtctttcgtttttatttatttgcaaaattaattcataaatattttttcagaaagggttctgaaacgcaccaaattttatttacatgttagtttaggcactctgatgctttttctatcaataatggaggtgaataaaattttaattgctttttaactttgggaaaaagtttaggcttaactttttagtgaaagtttgatcactcatatttttttagtctaatctactcaaaacggttcagaattcaataaaaataacattcacggtgcgaaaaatggggtttgaaaagtttattggggaaaaaaagactttacaaaaaatacccctgggagaagggagtgggaaacatgatttcaaaattttcaattttttctagtctaatctactcaaaacggttcagaattcaataaaaataacattcacggtgcgaaaaatggggtatgaaaagtttattggggaaaaaaagactttacaaaataatacccctgggagaagggagtgggaaacatgatttcaaattttcaattttttctagtctaatctactcaaaacggctcagaattcaataaaaataacattcacggtgcgaaaaatggggtttgacaagtttattggggaaaaaagactttacaaaataatacccctgggagaagggagtgggaaacatgatttcaaaattttcaattttttctagtctaatctactcaaaacggttcagaattcaataaaaataacattcacggtgcgaaaaatggggtttgacaagtttattggggaaaaaagactttacaaaataataccgctgggagaagggagtgggaaacatgatttcaaaattt

SEQ ID NO: 35210 - DNA, 718 bp, Heterodera glycines
cgctgctgcttctcaattcgttcaccgttcgttgattttttccaagttggtcctatggccaattttggttttattttcaacagtttttcactctgtaggtcgacctgcatgtctcgaatttcttgtccgagctgccggttttcgcgtcgcagtccctccacttgctcttgcagcgagtcctgttgtgtggccaaccggtgtgcttccgcagcttgcatgcgcgcctcacgctgcacagcgtccaactcactctgcaggtcgtccgcctgatgacggcactcgtccacctaagaaagacaaaatatgccatgtaattagtgatggtattaaaacattattttgagggacttattattttttaacaattgttaattaattacctgtttgtcatgtgcgcgctgccttttttccatttggagcgactgttgggcaagcgcatcagcgtcaatgcgtgccgcatcggcctcggaactaagccgtgcacgctgaaattgtgggccacaatatgattttctcaaattaagtaattagcgacgtaattaatccattatataaccggttaatttttttaatacgaaaactttagtttgcctttttctcaatatattttatttttctgacttcaatcccaatttttttttacctgcttttccagggactgtagccgtgcattgacccgcgtccaattcgttctgtaactcagcaatttcggccagtt

SEQ ID NO: 35211 - DNA, 712 bp, Heterodera glycines
ttaaatttatttttaatttttttttaaatttaaaatttccaaaatgggccaattattttcatataaaaatgcttctagtaaaagcagtgaaaattcctaaacaaagaaaattttataggcaaaaaatggtaatttgcaagggttgacgaatttgagtctaatttaaatatttttcatggacattttttaaattttggagaccgtaaattattttaaatttttttttattttaattaatttgcaaattaaatttccatgaatattttaaacaaataaatatttcaaaaatatcgaacatttgccggtcttcagctacagtcaaaccaaaattaaaaatattttcactgacatttttcagatttcggaccgaaaattctgatcaaagcggctaaattatattaaaaaaaatcaaataattttaaataataaatttgccattataatgtttccatgaatatttttataaataaaaaatttatgttgaaaaaaaggtttttaaaattaaatatatataatttaaaaagaaatatttttccctaccgacactctcaaggacacatttaggagaaaatttcattaaattgacattttcccatgaatattttaaaataattttaaatgattttcgacccaaaaatctgatttttagagccgttctgatttagaaaacatttcaatcgaagccttgttctaaccagacaaaaagttaaag

SEQ ID NO: 35212 - DNA, 953 bp, Heterodera glycines
ctctaattataatatttcgttcttaattgatctttttgataatctttttttaacataatttgtttgtttaaattaattttatatatgtaaaaattatattcttttattttgtacttaatatttttaattgaattaaatattttaaaaaattagttattttaaccaataaacaaaattgtgactcaccacatagttctggcaggttccactgaaaataaaatgcactttaaatgatttttaataatatttttatataaatccgatcattgggatgttcggaaaagagaaagatcgtttccgtttgaagaaaataatcgctaatcactgatcaaattattattttttgaatggtaaagaaggaaatgagtgattaactctaatcgctgatctaggaagtcgttgaagaatgtctgatcactgacttctgatcagtgattaattcaggaaacttggtctgattgctgatcgagtcaaacattgttttgggcctcacctgtccacattctgtcggcatgcttcttcgtccaaaatgggcgctttttgcagttcaccagctgtacattttttaaatttgttatcaacccaaaaaagcattaaaacaaaaaaaagaagcattaacttaaattaatcaccaaaaagcaaaaaataaaaaaatatggcgatgcgtcataagctcttttttaaaatatggcatttttggcatttataccattcaaaagcccagttaaaatctttgaaaattcgcatcgtagcatttgttcggcaaaaaggtgtcctcatatttttaccgaactctaaatacggtcatttgtcgcggattttcaattttcgcaaaaggcatactgtaaaagtcacgcatcgccaaagcggcacaacccaaacaacacaaataagcaattatttagagccatgacatttcattgttcaataaaatcccaccatggtactgactt

SEQ ID NO: 35213 - DNA, 1059 bp, Heterodera glycines
agcacgggtgccacgcatgcccattcgccaagccctccgtctcaactgagcacgggtgccacgcatgcccattcgccaagccctcgggttccaactgttcacgagtgccacgcatgcccattccaactgagcacgggtgccacgcatgcccattcgccaagccctcgggttccaactgagcacgggtgacacgcatgcccattcgccaagccttcgggttccaactgttcacgggtgccacacatgcccatttcaactgagcacgggcgccacgcatgcccattcgccaagccctcgggttccaactgagcacgggtgccacgcatgcccattcgccaagccctcgggttctaatgctgcacgggcgccacgcatgcccatttcaactgagcacgggcgccacgcatgcccattcgccaagccctcgggttccaactgctcacgggtgccacgcatgcctattcgccaagtcctcgggttccaatgctgcacgggcgccacgcatgcccattccaactgctcacgggtgccacgcatgcccattcgccaagccctcgggttccaatgctgcacgggtgccacgcatgcccattcaactgagcacgggtgccacgcatgcccattcgccaagccctcgggttccaatgctgcacgggtgccacgcatgcccattcaactgagcacgggtgccacgcgcatgtgccggtagctgctgctgcacgaacatccagacacgcatctttcggtagctgctactgcccagtcaacctggactgtgcacccgttactggctacaactcgaccggctagggtaagcaagtgcacgctccccacgcatgccctcagagcggctagttattattatataaaaataaggggtgtagccaaacttcaaaaagcgacctaccgcacttcccgtagggctagcgggatgaacttttttttaaatgaaagaggatctaatttagaaacttttgaaccgtgcaacttttaattgctcttgcacttttttcgagaaaactaacttttttgatttacttttttttttttgccactttt

SEQ ID NO: 35214 - DNA, 1000 bp, Heterodera glycines
  unsure (1)..(1000): unsure at all n locations
aaatagaatataaaattcaaaattcaatttttaattatacaataaattcttgaaaataaaactttgttttgtcaatttagcccaggcaatatctcaataaagtgcgtattttaatgatatgtaaaatatttattataaataaaatttagcatttgttaagcaatttgtaacggtttttggtggaaagaagtgatcaatggttgatacatggagatagatattgattgatcagaatgatgagaaaaaaaattggcactttgcaacaaaaggccttttcaaaagagtgggatcaaattgtgggagagattcaaaaagagtggatgataaacacatgggaacattgagaaaacaaagatcattatggattagatcaatgaatgataatttgatacggaaaggtatctgctcggactgataggcattgatcaaagctaatcgatcaattttgatgtttaagcttaaggattgcactgatcagctgagaaaatttgaatgtgcttctaaacaacagcgtttcacgattagttagataaatgggagcagaaaatgggccaaaatatgtggctaatcgtctgatcagcttttcggaagctcaaagaaaagtgatcgaaaattaataataaaatacgatcgatcaagcactgaccagcaagaaaatgctaagcaatcaaaactgatcagtcattatgtttattattgatgattgagtccgatcagttgagataaattgtttcccgtttccgactgccgtcacccactgcagtgcccgcactcatcgaagacgcgttgcgtgccaacatttgcgcaccgccggacaccgcaagtgaattggcgttgtccctgccgccacccgtcggcactctttgaatggcactgnntgcacccgtcgcattggcatgccgtaacgatgctctgaaaagaagggtcatttacccttagtctcctttncagatcaaacagattttgaatttganngattctgtttttgttttattttttt

SEQ ID NO: 35215 - DNA, 466 bp, Heterodera glycines
ttgtgttctttctaaatttttttttgtaataaactttttgtccaaaaatcataacaaattttttattaaatattttttaggtcttagatatttcgggattatttttttttggatgaaagcattgacaattacattaaatttgaggcatggatcaaaaggtcggacaatgtgctcatcgagttttgttcaatggaatcggttaaacgctttgccgtcatgatgagcgagggcagtgttccctttctgtcaagaaaaacggggttccatgacttggctacggtactttcagaattatttaaatttttgccaaataataattgcctatactaaatttgtttcatgtaatttcattaattttgttaattatgtaagtttggtcgccagcaattctttgcacttgtctatcgtgacacgggcgttgacattctgcgcactaatggcatggttttacattgttcataaaatt

SEQ ID NO: 35216 - DNA, 1333 bp, Heterodera glycines
  unsure (1)..(1333): unsure at all n locations
gaaattgacgaaacgttggtcgtcaaacggtagtacggggtcggccggatcttagagaaacaggaagtatggctattcggtggtgttgagcgcgactcaaattgggagcgtgtttttatggttcctgtagaatcccgtggtgcggctcgtcttcttcctcttattcagcagtatatacttcctggcacaacgattgtcagcgatgaatggcgaccgtaccgcggaattcctaaccttccgcaaaactatgttcattggacagtgaaccattcacaaaactttgtgaacccagccaatcgccttgcctatacccagaatgttgaatcgatgtggaagaaattgaaaaggaatttcaaacagcagtttgggaacaagactgaaacatacgacacctatttcccagaatttatttggcgtcagcgttttggagaccgtgaaaatgcgttttacaatttttggttgcatgtctctgagttttatccatgtgaacattgattattttctttttcgtgcatttgaatcgatttttagcaataaatgtgaattttgttaaaaaatcaatttttttattttgttcgaatccgggtcaggggttcggaatcggtcaaaatggatgtcggattcgtgatcagcgaccccgaaaacccctagaaacatgtttttatgattttttgaaagttgaaaaaaatttttaaaaaaggggggggggccatctaaactatattttaccgtcggcttccaaacaatggtggagtcttcaatgcaaaaggtggcagattcattcattcgtccagtttccaaacatcatcaccattttgttccctgccccttttttagtcattcccacgccttttctgcaagttcaatcgcgaggtgttctgctggatggaccgttggaacggactgacgctggcgcaaattcgtttgatcgaagaggagacaaagaaggcattggacgaggtgggcttctactctgacaccgtccaattccaccgctttacgtaatcattgcccattttgctcagatgcgcgcgactggcaagccgcgggggatgaaaggtaactgaacgccgccgatgaaccgagtgacgtgccgcgatgacgctgatctatttgctcgttatattgtatcgtgccgatgacgctgatctatttgctcgttaaattgtataatatgtaatataattcgtcaccatttgtcctttctttcacccccacgcattcctttcggcacttattgtatactgaacacactcccaatttcctcctgattgatgtgtatgtattattgtgattatgttgacaganaaataaatgttcgagattttagaat

SEQ ID NO: 35217 - DNA, 820 bp, Heterodera glycines
  unsure (1)..(820): unsure at all n locations
tgacgaanntatgccgtctaggtttgcttgtgcaacaacctcatcatgtcttctcgactgagcaacctgaccaaccatgtgcgccgtcacgcctcgttgaagcagtaccggtgctgccattgccaatattcgcacaatgaaatggccaaagtccgctgactgattaatttacccacaaatccttctccatctcctcattcattaaggtgcgtctgcacatgtcccacaaccatcaggacttcaccagtcagccgatggacatgctcagttttgagatgcaactccaatggggtcttttgatggagcagtgttttcccgagcattccaaagtgaacactgtccattaaatgctaccaaattgaatatctcacttttctttcattagcgtttcggcccctccgccgcaaattcgcagtttcgcaatttggaagagttgcagaaatatgtggacatggaggtcgaatggacaagacaatccgtcacaccactcgcacttgtccatttagcactcctacacatgcattgaatgtggcgaagtgttgacgggctatcagctggtcacccacttggaggatgtccaccgtcaagagtgtgtgccatttgcgtgtggccaatgcggttaccaggcgagcaagcacaaatgccagcagcagacagagcccacccacattcaccttttcattcacagagctcgtcccaatggaaagttagactgcacatcagcgtaaaacacccggagagagcggcagagataacggtggccactctacccgcgggaagcaatttcatgctctttttgcagaagttttttgccgaggtg

SEQ ID NO: 35218 - DNA, 1045 bp, Heterodera glycines
  unsure (1)..(1045): unsure at all n locations
gatttctgaaaaaatatattgnacaaaagtattttgaaaaaaatctgaaaatattttaataataagtttaaataatataattaattaatttttgaaaataaatttgaaattatttaaattaatttaaaaagtaatttaaattgggaaataatatttaaaaacaatgtttgtccatatactacatattactactgatttgggaaataaaatttgaaataactaattaatttgagaattaaaacaaaatatttttaattgggggaataaaatttgaaataatttaataaatttaaaaaataaatttgattaggcctacgaaatggaagaggctatgtaaatgttcatgggggcggagtggaagatttgttggagagattcgctggatggagtgatattgtgaatgatttggtggcgctttatatacggcaatattggcgccatgctgtaattggttattacagcatgcccacaaattttgttcaaatcttccacccccaccccatcccgcagtcgagaattgacaatttacacaaatggcactccctggcacgcaaaatcgcaaaatcccttcccacaatcctgaaattttcctttccgccctcccattgttcaaatcttccacccccacccatccagcagtcgagaattgataatttacacaaatggcactccctggcacgcaaaatcccttcccacaatcctgaaattttcctttacgccctccccctccctaccactttcatcgttggctataggtaattatcggtaaaaaatcttgtcccccccctcctgcccaaaaatcaaaactttaaaaaatatgtgcccttcctatagtaattacggcacaaaaaacccctcctcacaatcccaaaatttacttgccctctgtgcaaccccccccccccccctccttaccatttttcactcgctgagggtaattatcggcacaattttgccctcccctccccctccgcccaaaattgcatcgggggggaagggggagggtaagtgattggaccagtttcccactcttcgatcgtcgtac

SEQ ID NO: 35219 - DNA, 732 bp, Heterodera glycines
attttaaaattttttagttgctttttaaatatgccaccattgtaggcttaacttttttagtgaaaattcgatcactcatattttttgctaattgagcagaagcgtaccaaactttgcagggatactccccggtaaaggactaacttacactgaaatgagcgccgagctagctggctcaaaaaaattttcgaaaatctgagtctttcgtttttatttattttttgcaaaattaattcttaaatattttttcagaaagggttctgaaacgcaccaaattttatttacatgttagtttaggcactctgatgctcagttcatttaaataatttttatccaaaaaattttttttgggttttcggggcagtccccctgaaccgatgcgcccagatttatggggagaccgaatccttcgggaatagcttccctatagtctgtactttaattctgcgttggatttttgctccccataaatgtttgagtaccccaaacggacactgaataaatttttaaaaatttttaattcctttttaaacaggccaaaaagtttaggcttaacttttttttcagaaacttatcagaagcgccccaaactttgcagggatactgaaaggaaaagaattaacctgttttatcacattagcttgtcatcagtttttataaaaaattttcaaaattctgagtctcctattattttatttttttttcaaaattttgaagggggggggggggggg

SEQ ID NO: 35220 - DNA, 1456 bp, Heterodera glycines
  unsure (1)..(1456): unsure at all n locations
ttgagcagcaacatactagtaatatataaattaagaaataaaatttagctttcatttttaaaataaaatgaaatgggtattaatttgaaatttaatgcttttatagaatttaattgcaatactaacaaatatttttgtttttattcagctgtaatattggcaagtattttttgttggttatttgcatattggcaaatttataaaacgcgactggcggttttataaaacgtgcaagcaccttaggtaggtattagttatacttatctatgtaactaattgtaaaatttaaattttaacttgctatttttgaattaaaaaaatattttcgatttaggctctgaaattttgcaaatgtttgaaaattcataactctaagtgggccacatggtttttattaaggaaacattttttcatccaaatttaacaaaaaatagttttagtgttattttggctgctaatcacgaatctaatcatatttcagttaacttcgatcgattcatggggatgtatttttcgttttcccgctggattatcgggatttgcttaaactctgctttttcactttgtgccaagacctattcaaatgcttatgtaaatttataattgattaactggattgagaaatttaatagggactgaaattatttttacaaaaattccaaaatattttaatagatatttaagaaagatgccaaaatatttatccaaaataaaaaattagagcaataaaaattgaaaatttctttttgatggcttgactaatggggatacttttttctttttttaacaggcaaatattaggggtttgttttggcagaggttagaaattcattcaaacactgatctcttggagaacatgttttagttaaaagtgtttgcttccatacttttgcacctgactgtaaatgaattaaggttaggtctcgataaattatctagtttatggagtctcgactttcgcggcaaaataaaacattttcatcgaaaagaattcatcaaaattaacgagcaaaaaaaagcataaaaaatgtgtcagatcaatttgtccatttaataatcaccaaaacggccgatcatttctcaattaaatccgcaaagttcgagccctttttccgctgctttgacccacttcttcttcttctgctggttgtggagacaatgggctaaattaagtgcaacatttttgaattttgatgaacattttggcaaaagcaaatgagtcaatggtatcaatttagtgaaaggcttcatacattataaagaggaagtcaactaaaatttctgcgaaataaaaattttttgcgacgcgcttttttaaaaaaactttttgcaggaaaattttttgtagtataaatgccatttgttagcagattttgtctaaaaatgactanatcttgagattttgggctagttttttaagatanaatangtttgaggggggggggggggggggggg

SEQ ID NO: 35221 - DNA, 1069 bp, Heterodera glycines
aagagaattgagcagagaatgaagaaagtgaagctgaagggaaaatgaaatgaaagccataaaaacgaattctcttttgatggcacaaaaaaattgtccatccgatggcataaaaaaggactgtccatcctccgcctctccccccataaaaaatcttttgccgcctcacaaaaacatcgccaaattgaagaggaagaggtagcaggagaacagcatgttcacgtgctgcctcagctgcccttcactgaacatccgctggtccttctccaaattcagttccttcataaggcgttcgatgtgcgcattctaaaaaaataaaatgcaaaaaccatcgcttttgccaaaagcatttgtcaattttgcaaaaatacccactcgaattaataatttcttttttagcccatcaattcatttttcccctatatatgccaagtccattttagcccaccctcctcagttcggcacttccgtcgcccgactcatcggtcgattgttcgtcgttcggatcatcccgccatttctcaaaatcgaattttagccaacgatacgtttgtttctgctcgtcgcttgccaaaatgccattgccccaaaatgtgggcttaatcttagccaaagtgaactcgacgcgaatcccgccgactcgagtcagttctggtgattcctgacagaaaagccggacttccatgtctttgcattattatacgaacattcacagagtcaaaaagtgggagtcggaaagtatatttgatgcaattgttggcagtattcggtgaatacgcaaaagccgaaaaatccactaaacgaccatcctccaaaattcgaatgtcgatgtcctcaaaaagttaaggatgcaacggaataaaggagggttttcaccgaacctttgcctccttaacgtcaaccttcaagtaaatatgctctaagtcttgcgcccaatagacaaatggtcttaagttctgttgcgtgtccataaaatactgtacaagtaaaaaaaataaagccataaaacagtattttaggtatattgggtcatctaactactaacaataaaacaatacaaaatcaaaat

SEQ ID NO: 35222 - DNA, 126 bp, Heterodera glycines
ggaatggtcagacacaacaaataaatataaatgaaaataaatcaaattaaataaatgtctctcgggtcccacccgaacagtagccaggggcgtgactggacaatccgacagtggacaatccgacag

SEQ ID NO: 35223 - DNA, 818 bp, Heterodera glycines
attcacacaaaataataaaggaaaatatgggaccctcattcttcgtgcatgccgcagtttattattttactgtgacacgtgcgaactgtcataggaaagtgttggcggaaccactcaacatcggcaatttcacgacaaaagttctattgtttaaacgaagcaaaagcggttcactaagtgtccaattccgtagtttcttaggcaacaacttttttaacggtaaatgccattgaacattcgaaaagaaatttggtggtggtggcgagactgtaactgtccgattaccggccccaatttttggggtttgaatttaattttgaaaaaattctgattacactttcataaaaagagctcgaaaaactgtcgctgttgttgatgttgcagatgtatgaatgtaacaagtagcagaaaaccaacacaaatccattccccatccctctaaaaagtgcccatgaattatttcattttgcttaaattattttgattttttgcctttttgtgccattcgtccgagcagagtccgaaaaatgggaatttgtatgctttaaaattactcaaataattcatgtttaaattgaaattaaatactaaattcaatactttctttatctaagaaaattaaatgaattcaacgttctgaaaataattttcgaaacaaattttttgcgaagaaaataaatttaggggatgagctttttttaaaaaattggatttgatttctactagtagagcatgttttgtaaaattccggatcagcttcaggatcggcaatcaggaattgaacatggacaggattttgtgcgtaattttgtccaaat

SEQ ID NO: 35224 - DNA, 758 bp, Heterodera glycines
tggcctaatggctagtctccttgactgtcccttcttctttcccctggttcaatccctctacagaaattagtttattttcaattttttttttttttttgtatactcgtgggtttcctataaagaaaatatgattcctcatagtttattttaaattgatacatattttatccttttttaaatgaaaatcctaccaattgagcttaataatcgcaaaaaccaacctttttttgttgaaaatctgttaacaaattgcacccaaattttcaaaatttcccccggcggcgcctatcggcaccgccggaccccttctttcccaaaagttttttggaaaagagctccgaaaaaaagtgatgtgaaaatcaaatctgaatttctattaatattcgatgatttagaccaaaaatgattaattgtttgagataattgaagaaaatttgtttgaaaatatttcattgatttaatttattatactcaatgaaataattttgtattatgttcacttgatataaattaagctttgaatttttttgtaaaatttttaataaatttttttgaaattttaaaattgaaaggatgattgcgtttccaggttgttgaatgcacatgagaattaataacttcttaatctggcgatttaaactgatgtcttgtcatattaggaattgaaattaaatgtggccaaaaatagggaagagaacccaatgaaaaaattaagaaaaatggctaaattgcaaattaaatcgaattttaaccctttt

SEQ ID NO: 35225 - DNA, 472 bp, Heterodera glycines
  unsure (1)..(472): unsure at all n locations
aggggaaaaaaagacanaaccctttaagaccccaagggagaagggagagggaaacaggaggacaaaagacncaaaaaanaccaccccaagcgacacagaacggggcagcaagacaacaaaaanaaccaacacggcgcgaaaaacggggccagaaaagnccaaaacgaaaaaaagacaacacaaaaaaagaccccagggagaagggagagggaaacaggaaaacaaaaaagacaacgacaacaagcccaagcaacacaaaacgggacagaacccaaaaaaaacaacacacacggagcgaaaaacgggggaagacaagcgcaacggggaaaaaaagacaggacaaaacaagaccccggggagaagggagagggaaacaagacaacaaaaaaggcaaagaagacaagccaaagcgacccaaaacgggacagaagccaacaaaaaaaacagacacggcgcgaaaaaaggggacaga

SEQ ID NO: 35226 - DNA, 440 bp, Heterodera glycines
ctaaaaagaataaacattaatgttgttatggatgagcgtccgccggctgcccgccggcagctcattgccttcgtctctcatctctcctctaacactctctccactctcttattttgaactatctctttttgtttaatttggacaactgtttatctctaatgaaaatatttggcccgccccgataaaagccccgatcacattttttattccccagtgatcactttttgtttttcgcaacttttccggagagacgagaaataaaggcaactgttaaacctaaggcgtcgaatacatttcccattttcgggcgccaccgcgccctggcggtgccttaggcaccgtcagcggcccaacggtggcacatacaaaagtgccccatgaaatggcgctcctgggtttcgaacgcgctcctttcgaggccaattggcgcatataaaatt

SEQ ID NO: 35227 - DNA, 892 bp, Heterodera glycines
  unsure (1)..(892): unsure at all n locations
tggctcgattctgtccagaacattgtaaaagaaaacgttaaaaaagatcaataaaaaaagaatgcacatttcacaaataacaaatttgtcaacgaaaccaaaagaattgaaacaatcaaaacttaaagaaattgaacaaatttggcgttctgttagaaagttggcaaagtgtaaaagagaaagttgtcggaatggaaagtggataaacgtatgtataaattgtgcaaaaactgaaactgcagtttttaaaaaataccatatactttactgttagtttctctgaatttggattgaatttattgttcgaaaaatcgaagttcctcgctcgtatatacctaattgctttgatccattaaaatccattaacacaaaattgtgccaataattaattatttcattgtgattttaagatttatttttttatctttagtttgtctcaataagggcgctaaaattggctgaagagactcgcgacagttaaaaaattgggatttatactctaaaaatggacacctccaatttttcaattatgaaatttgaaaaaagcctcaatcgcataattactcaaaaaattaactacagatactgatcaccttatgtccgtcaaacattcgcatgtcgtgatgagcttggacgcacctgaaatgccaaattttaatttttgtttccaatccattatccatcgacggcacaaaaatttaattttttcgcttgatcatcattcattaatataaaaagtcatgaaaaatcgccaaaaagtcacgaaaaagtcataaaaaatgtatgttagaagcttcaaacaaagtgtagaacacttttgaagtcattttaaggtcatttagagtcagcaaaaaaaaaagtcatttgacttanattcccatccctattcatt

SEQ ID NO: 35228 - DNA, 918 bp, Heterodera glycines
  unsure (1)..(918): unsure at all n locations
ccttaaagaatagagcacaattgagttagaacaggccgtttaatgtacgtcatatagtttagggaacttgtgataaaaaagtaaataatgcgatcggtcgttttgggagaagcggacgaaaagccgatcaaaccgagaagagtaatcgagatggaattggtggaccaaccgacgaaatcgaccagcaaaatggagaacagcgacttgaacagacggcgaacatccactaaatttggaattaggtggcaaaaattgtggagacaattaacaaatgacataattaaatgggcaattaacaattgattgacaactaattcatttcctcctttcctttcttttttcttgcctgtgctattcccattctcttttcgcgattttttgtccattttgttcatgtgcaaccaaatgaaaatgtaaataaaaatggcgatagattccaacgcaaagttcgtctttgccaatgcgttcaccgcactgccaagcggagcggtcgttgtacaagcaattggcctgagaatttgataataatttaaaaaataatagtaattcatttcaaaattcaaacaattgagcccttaaggcattttgtaaggcgatgatcatataacagaaggaatacaatgcgcacagaaccaatgcaatgccaacagctgaccattttttaaccgatctgtacctaaagtatttcaaaattaagggaaatttttaaaatattttttaataaaacgcaacaaattaattattacttaattgggaagatagcgccaattaaacggtcaatggcaatgaaaagcattagaggaaacgagccacagaacagaaacaatggcacgaactgaaacataaggcattccgagactttcattgagggatagcctanacagcgaagctcaatgaaaaaaaacatttagtgaatcg

SEQ ID NO: 35229 - DNA, 115 bp, Heterodera glycines
ctcactcttatcccgtccatccgttcattcattcattccattctcggcctcctcctccccctgtcccctcacacatttgcccaacctcacaaaatgcaagtgaaggggagagaag

SEQ ID NO: 35230 - DNA, 1463 bp, Heterodera glycines
  unsure (1)..(1463): unsure at all n locations
aacaattaattaattactcattaagagaaattatgaatatttttaatttaaatcattttttaaaacaattgaacaaaccaatgcccatttgataaagtgttttgctgatcgagagtcccgagaaattttcaagaattttttgggccttgttctcgaggtcttggaaaattttgcttttcaaccagccctaattaaaatacttaaaacttatgcttttgtttgccctttggttggctgatcagtagtgattaattattatacatatttatttgtcaacatttccgatcggttaaatcgcaatcaaattttgtttcattgctcggatcacttggggaaatgatcaattgacagaatattggatgatggatgcatttgttgatcatattcattcattgttttggccctgtttcaatttcgattcgaattctttcataggtatataacaggggtgggacaactctcgcctctcgtctctcgcctctcgccaactctcgccatttttggtactctcgcctctcgtctctcgcctctcgttttttgggacgagaggcgagagttgaaaatacacccctaaagattgaacttttgagtagccagaaaaattttcaaatttacgcgaaaaaaaaatcttaaatctctttctttccttccttaatgttttctctatttttggatagctccaattcaaatatggtctgctggctaaaccttctgcctttcattatttttctcttgggttcaattccccaacggtacagaatttttttaataatttctttaaattattttcaattgaaattttaattaataaaaaatatttcaatttaaaaattattattttttctttttttaaacagcctaaaactgcaaatttaaccaaaactttgatcattttttgacaagttctgttaatatattacactcaaaattttagaatttttccggcggcgcctatcggcggtgcagattcggcaccgccggaccccgcacccaatgttccaaaanaatttttttttgggaaaacagcgccacaaaaaaagcgacttaaaaacaaaaaatttaaaaaancaagttttgggtcattttttgaataaaatctgttaacaaatccgaagacaattcaaatttttttttttgcnggcggcgcctacgggcaccgcccgaccccaactgtccccgaagttttaaaaaacgcaccgcaaaaaaaaggtggaaaaaatggacaaataatagagtttgtttctagaatagatatatttcatgaaaatattttttaattttcatgaaaaattttaaagatttttgtttggatttttcatgacttgcactcggtttaaaaactaggactctgacccggctttctgtacccgggcataccctgaaccgggtatttgccccaaataccagggcccggaacccctaattttataatacgatttttggaagttttttaaattaaaaaa

SEQ ID NO: 35231 - DNA, 369 bp, Heterodera glycines
aattctgacaaaaaaaattttttttttgaaaaatttgaccaaaatatgggacccaaactatagtagtaccggaagggggaaattttgaaggtgaattaggttttacaacaaaaaatatttcatttttttcgcaatccaaatttgaacgaccccctttcaaaatgaatcactttttaattattgagccccaccaggcgtaaggcaataaccaaatatcactttttccagttattttgttttcaggtaccatttgcaccttctggactaaaagtgcggtatctcaaagtattcgaaccgaagctgaactactcggaccatgacgttgtaaaatgggtgcgttatatcggacgctccggcttatacgaaacg

SEQ ID NO: 35232 - DNA, 1685 bp, Heterodera glycines
  unsure (1)..(1685): unsure at all n locations
tagaaattttgaaaatttttttgggtgaagaatggagtgaaaaatatttttctggggtattttgaggtgctgagcacgaatatgatgtttgtttaacgtttcagattttttgaaattttttaataaatttggaaaatttttcatttttttgggcctcgagaatttgaggtaatttttgaaaattcataactaaacttaggtttgtccaattttcatagaataaagcaagaaaaattgagaaaaataaggacgattttatggactttatttggaatttctatctgtaaaatgaaaaaagttattccagaaattctggaaattttcgaattttcagaaaaaaattcagaactcggttctgaaaacctattttcacaaattaaaataatgaaaaaaaccgcgatttttttctctattttataaattttatttcatatttttaacactttttcgaaaaaagttataaaattaaaagtgatttcggaatttgcgaccaaaggggggagtacatggtttttgagtggaaaaattttttcaccaaaaatctttcaaaaacatgtcctaaggggtattttaggactctgattacgaatctgaaatcagatttcagttttgaccacgttaagacctcagaatccccgtgtgattggggattctggggcatcattttgagggggggggggtgcgggttcggacccggacggtgtaaattacttttctttttattttataattttttcattgtttaatacatttaaattattaacaaaaaaaaattaatattttaaataaattatttttctgtgtgaaagtcattcttttaacaccccaaaattttcggaatttttttttgggccacaaggggggtgaaaaatattgttctggagtattttgagcacgaatacgatgtttgttttgcgtctcagaatttttaaaaaaattttgcaaaaatttgcaattttttgcccttgggaatttgggttaaaatttgaaaattcataatcataacttatgactgagttgctcaatttaattgttttaaagctttaaaaatagagaaaaatcaggaaaattttatgggaattatttgtaattgaaatctctaaaagaaaaaaagttattccagaatttctggaaaaattcgaatttttagaaaaaaattcataactcggttctgaaaagatattctggaaaaataaaatgctacaaaaatccgcagtttttttctctattttataaattttatttggcatttttataatttattagaaaaaagttataaaaataaaagtgattttgggattccagaccaaaggggggtgacaggatttttgagtggaaaaattttttcccaaaaaactttcaaaaacatgtcattagggctattttatgacgctgatcacgaatacgtgatcagattttacttttaacatcgataagacctcagaatccctgtgtgattggggattctgagcatcattttgagggggagggggggggaagttcgaatccngggcggtatacattattttttatgtgtttttttgcttatttttacgtttttaataantttcagntaataaataaaaattattatcttttaaataaaaaacttttgaagaattantttttcaaaattccctttaaaatttcatatgatgaaacatatttcactatatggtacatgc

SEQ ID NO: 35233 - DNA, 1312 bp, Heterodera glycines
ttctaattcgcgttttacggaccgtaactcgggcgcaccaatgctttgcatgctgtggcggagtgcctggattactggcattcctgctttgatttttcgacctgaactcagacgtgaacacccgctgaacttaagcatatcagtaagcggaggaaaagaaactaacgaggattcccgtagtaacggcgagtgaactgggaagagtccagcgctgaatcgcagctcctctgggttgcgaggtgtagcgtatagaccgtgagcttgggttggcccgcttgttcaagtttcccttgaccggggctccagagaaggtgcaagacctgtccaactggcggtgcctatccatctttacgtgtcttggagtcgggttgtttgggatcgcagcccaaatcaggtggtaaacttcatctaagactaaatacggccacgagtccgatagcgaacaagtaccgtgagggaaagttgcaaagcactttgaagagagagttaaagaggacgtgaaaccgatgaggtggaaacggacagagctggcgtatctggtctgcattcacccgtttgttgctgtacgttgtactgctagcctccagactggggtttgctgtccttctgttcagtggcgaatggggcatttgcaggcggagtgcgctgagatgctcggagtagctgcgtgagctcggtcttgaggccagccttttggggtctggtacccggatcgggggagtgctgtttactctggttgaattgtgcaatggttttcgggtccgtgttgactcgagctgggggtcggtggcggtcgcgtgcgacacgtaccagcaaccagttcggtccagctcaggctctcacttgtgcgttctcggtgtaaaagccggtcatctgttcgacccgtcttgaaacacggaccaaggagtttagcgtatgcgcaagtcattgggtgttcaaaacccaaaggcgcaatgaaagtgaaggcttcttacggagctgatgtgtgatccctggcactgcggtgttggggcgcaacatagtcccgtctcgatcgcatgcgatggggcggagacagagcgtatgcgctgagacccgaaagatggtgaactattcctgagcaggatgaagccagaggaaactctggtggaagtccgaagcgattctgacgtgcaaatcgatcgtctgacttgggtataggggcgaaagactaatcgaaccatctagtagctggttccctccgaagtttcccccaggatagctggagctcgttaagcagttatactcggtaaagcgaatgattagaggacttggggacgaaaatgtccttaac

SEQ ID NO: 35234 - DNA, 902 bp, Heterodera glycines
  unsure (1)..(902): unsure at all n locations
tctctgatgctttttctatcaataatgggaggtgaataaaattttaaaaattttttaattgctttttaaatatgccaaaaaatttaggcttaactttttagtgaaagtttgatcactcatattttttgctaattgagcagaagcataccaaactttgcagggatactccccggtaaaggactaacttacactgaaatgagcgccgagctagcttgctctaaaaaatttttcgaaaatctgagtctttcgtttttatttattttttgcaaaattaattcttaaatattttttcagaaagggttctgaaacgcaccaaattttatttacatgttagtttaggcactctgatgctttttctatcaaaaagggagatgaataaaatttttaaaaatttttaattcctttttaaacaggccaaaaagtttaggcttaacttttttttcagaaactgatcagaagcgcaccaaactttgcagggatactgaaaggaagagaaataacctattttaaatattatctagtcagttcatttaaataatttttatccaaaaaatttttttttgggttttcggggcagtccccctgaaccgatgcgcccagatttatggggagaccgaatccttccggaatagcttcactatagcctgtactttaattctgcgttggatttttgctccccataattgtttgagtaccccaaacggacacttgaaaaaatcgatttatttttgttttcggngcagtccccccgaaccgatgcgcccagatttatggggagaccgaatccttcgggaatagcttccctatagcctgtactttaattctgcgttggatttttgctccccatatttgtttgagtaccccaaacggacacttgaaaaaatcgattttttttgttttcg

SEQ ID NO: 35235 - DNA, 844 bp, Heterodera glycines
tcccacattatttaattaatttaagtggttaattagaaagttatgcgtttgacaccaccaaaattacccgtctcggttggtcccaaaaaaataatgagaaaacttaaatatataataaattacattgcagcgaattgagtcacttcattgaactttgagccaatgttaattgaaagtgatttttcatcaacaataatatattcatcaaaaatttccatcgcttttctaaacatttaaatttagttaaattatttgtaagcgcaaggaaattccaaatttagagtcagaagagtgttaggggtcatgagatattaaattcaattaatataatgggaatttcaactttttataatttaaaattcaaaaaaattaatagttttaaaaaagctataacaaaaaaagattaaaaatattttttatttgtgtttttttgtaaacaaaacgattttttagaattttgaatgctcagaacatttgagctcttcgaatatacaaataaattgtactatttatttgttttgagcaaaataacaatgaatttttggaataaaaatgggtacaatgtccataatattgcgactaaacgaaaacgaccaataaaaaaaaaattgggaggagaaaagcggagttattgattcagagagagttggaatatgtacatggataaacaaagataaaaatgaaggaatgacgaataggtaggtcactgaaagatgctattaaatggatgcgacccaactgacaatgaatgaagtgagtcattagtagggtgagtattttagtggcaaaaatcccaataaaataggctaactgaaagccgcaaaaccatgccaacacaatggaa

SEQ ID NO: 35236 - DNA, 1665 bp, Heterodera glycines
cttctgcacaccatcgaaatggtcctcattaaaatatagcatcaaaggtgtgtcgtaggtggtgtcaatgtacttgtagatcggtttatactgtcccaacgatccaaagatgaacacagcaaagcggtgttgtcgctgcgcgttgttccagtagtcaacgacatgaggcacaaatgtgtccgcgtcgtagccaaccaaatccattggtgcattaacctgctgcatgagctcaaccgcatcatgataaagttgtccctgttgtccgtattggttgttcaagtaacgggaaaacttccagcgaggccaattgcacgttttggcgaccattgttgcctgcagcgcgtagaaaaggcagaagtggttgtcgttattgcgaattttaatcaggcattggtcattaattcggtggtgaacggccgttttgacagggcgacgagctccccctttgacacgacgtttggatggtagtccattacggtccagagtcgtgatggtgacggtaaacggctcaccccataacgatacatttttctgttgtttggactgcgccacttttttgaactggttgagaatggtgtcgagagtgttgtttgtcatttgtcgtatcgggattgggatgtcgccgccttccagcagaggactgctgatcatacagccgaggtgtgtaggttcgatgtttcgctcacggctttcaacaattgcttcgtcgatgcagtgttggaaaatcccagccaacaatgcctcaggcgtgctcggcaaatccgtaatggtgaatttcgacttgacttttaacgtagtggaatttggccatgtgctcgatgttgttctccaattttttaacgtagtcctttgcctcttttgatgttccttcgccttgctgcaccgatccaaggaagtgtacgacacccaagagttcattgatcaggaagccttgacggggctttttgggcgcggagagaatatgatcaatggaaaagttagaggagcgttttcggggatgattgtccattttttttttaatctgagagtggagtgaaaaggaatgagcaaaatctcggtatttatatgcgagcgccggcatggaaatggcgtgaaatggtgaatgaataataaatatttggacatggaaaaatttcaaaaaacttaaacaaaactatggcctgaagagcagcacaccgccacccatgaagcacaagacgacagggcacctaaacgactcgggaaattagtcaagtcaagcgaaagacctcaagccctaaaagacaaattgctgccaggataaacggtgctttttgtaattaaagcaaccgccctggttaacagcaaaaatatttattttaattatacggtccccaaaatccccattaaataatacggtccccataaagcacaggacaagtgaggaagaggagaggaaaacagcagatgtgcaaaaaaagtgaaaatttttaaaatgaatcgggaaaatgaccgggtgtacgatacgcgtacttaggccacgcccacttgcgcaccaaaattattcccaacaagaaatcgaaatcattctttattcaaattttggaaaatgaaacgcccccatttcacaatgctcttccaatgagtgagaaaaagcccaagcttcgtcgacggctccccgctgaataaaatggcgaattgatcagt

SEQ ID NO: 35237 - DNA, 1475 bp, Heterodera glycines
  unsure (1)..(1475): unsure at all n locations
tttcctctcctctacaatcaccgcctcatttcttcttattccgccgcaattagtcatgaaaatcagcagcaattgatgggttcacttgtgacagcattaggctaacggcgaagtcttcgagtcacaaagcaaaagaatcgaactttgtcgaaaatgtgaaatacccgaaaactcccaaattttcaattttattcgaatttacgcgtccgtcccatcaattcttcgaccataacttttctcttacttaatcacgcttaaccttctaattaccaatcgaaaccacatattccccagtcccacatttcaatcaacgaccagagccatccttgcatacctacatttcactatatgaattattggaaacctgaccagatttgttgatttccgttaccattatatccgcctcaacaagctagtaaaatagtgcctcattcgcacggttttgtccacttttcgacaaataccgaaagtgtcgaaaaattttttgaaaaatcgagtggtcgattgaagattgactactttcggntatttgtcgaaaagtggacgaaaccgtgcgaatgaggcactattttaccagcttgtcgagccgaatataatggtaccgaaaatcaacaaatctgttcagtcttccacaaattcctatagtgtcaattttttttttgaaaaatcagtggtcatcgaaattgacacttacggcatttaaatgaatagatttgtgtattttcggtaccattttggccagaaatgtcaatttcaatattatatgattttatggcttggtaacctatttttactaatttgcagcatctattcgttgccctcttcgtttccaatttggtacatcatggatgtactcagttcgtcatgttcgacggcggtaccgngggggggggggggggggggtgacagattatattcaacgagttcacngccagtcatttatcattgatacactgtttgcgtgagtagttgctatatactgtcgagcttgatttaggccgcttgatctcctctcacttgatgggggcaccatacaacgcgcaggagctgttccactggcggagtctacccagcttgacatgccatgaaggatttttaattgataccgacaaaaatatcaatgggtcctcttcgatgaagagtagagatggactatatttaaaattcgttaaataaccgagtgggatcatgacgaggaaaacggatgaatacggacagtactcggattcggcactcgatacaatatgaaaatatatggatttaatgcgagaataacattgagagctgggagtcagaattcggcggctacctagaaatagagttggctaatggagtctgattttatacgatttctttttaaatacgaagcttccctatgggcctttttcatgtttttattttcatcgttagaattatttttctattgataaataatttatttttgcatctttcaaaagtattttcttcatataatt

SEQ ID NO: 35238 - DNA, 988 bp, Heterodera glycines
ttagtaatcagaacgccaaaacttcgcaaaacttaaaatttttttgggattttccctcgtaaaattagaagagccgatctcgagttaaaaacttaagttccataaaataaacttggaatcgctagaggaggtcaaaatatgggcctatgcaaaatttgaagaaaatttgaacatagggaaaaatttttcaactaggtgaaattttcaataattttaattcttttttagccaagtccacaatttaagcccaaaccaaataaaatttacaatattctccagaattttcccttcaaaatgagcataaaatggttttatttgctctagtattcaccaagttataagctaaaaaaatttcataaaattgtcgatggttgtacgtaaccaacgcttttcgaatatgattttttattgccacgaaaacttttattaatgaaaaaataattctgccttcttctttaaaagaagaaattgaaattaacacacaacatgaggaggacttgaacctgggaccccacagtttggtgactaactcacagaccactaagacgaaaaatctagcataattgtacttggagcccaaaaattgactcgctgtgtaaaacaattaccaaaaataattcaaaagtttccaataattttaaaatttcattaccaaaatatttctctctttttttttttttgctgttgcctttccattttctcacttttatttcttctccggtcgagtaataatcgccgctgatgtgtgtgatttctccaacatgaattcaagttttccatttttattcattgatgcgattgagtggagggtgaaaaaaatgaagtttcgatggcattttgagtaattagtcaatctcagacagttgaaatattttaataaaaatgaaataaaaaaacgaaaggggccttttttggaaaaacggaaaaaagggggggaggggaatgggcaaatgaaaggggcaaaaaaagggggggggggggggggggg

SEQ ID NO: 35239 - DNA, 1006 bp, Heterodera glycines
tccccgaagggagagaatttaattaaatccattccttcgggggaccgtgccgggtgccgcggggtaagcagtgccggttcgtttcatcacggcaccgaaccttttggctagtcagcaatcgtcgcttaactcgccagatcggacgggtggcgcacgattccaccgttccaagcaccccaccaaaagcaaaacgatataaccaaaatataaggaaaaattttttaaaaaattttttctccatcttccttttcgatactaaagcatcagagtgctaaaattaagttgtaaataaaatttggtgcgctttagagcactttctgaaaaaaatatttatgaaacaaaaaaatcgattttttcaagtgtccgtttggggtactcaaacatttatggggagcaaaaatccaacgcagaattaaagtacaggctatagggaagctattccggaaggattcggtctccccataaatctgggcgcatcggttcggggggactgccccgaaaacaaaaaaatcgattttttcaagtgtccgtttggggtactcaaacaattatggggagcaaaaatccaacgcagaattaaagtacaggctatagggaagctactccggaaggattcggtctccccataaatctgggcgcatcggttcggggggactcgccccgaaaacaaaaaaaatcgattttttcaagtggtccgtttggggtactcaaacaattatgggggagcaaaaatccaacgcagaattaaagtacaggctatagggaagctactccggaaaggattcggtctccccataaatctgggcgatcggggttcggggggggactgccccgaaaacaaaaaaatcgatttttcaagtgcccggttgggggtactcaaacaattatggggagcaaaaatccaacgcagaaaaaaaagttaagccaaaactttttggtctgtgtagggaggaattaccaattattataaattgactagagcaatcgaacgctaacggacgaccta

SEQ ID NO: 35240 - DNA, 963 bp, Heterodera glycines
ctaatttttttttaattgtttaatttgtattagaggattttattttttatatatcacttttttaaatttcagccaaaaaatactgcctctatgggctgattggtcaatgtttgcaggaaattcacattcaaaatttgcccaatgttttcttgggttatgtccaggcgcgtcttttggagtttgaggtgggaaatacgaaaattttattgaataagccatgccattatttaattcgtatctgtaagggtgccttggcgtacccccccccccccccccccgtggggttgtaaataatgggaaagaattaccaatttactaaaaattttcacttcaccctaccacttacatcaaaaaactctttttttcagaaaacgggtgtcgataaatcatcactgaattttattttatttttttaaatatttttttgcgagaaatcactcataaatttttttttgaaaaaaactaaagctagaaacaaaaattttcagtttttttcttatttcggagtatgcgaacaatggggggcggtatatccgggggaagaagccaaccgctcaagccttataaaaaagaacatgacgcaccaaacaatcttcgcatttatgcatccctttagcacttgagatttataacccctttttaggatctttcctaccaatgtttgcttcacatttgtcaaaatgcgggccaattgttcgaatctgaggaattcttgcaaattgatcagaatttgctgtgtgaattattcgggagtgatcagttgatgatcagcaatgaatttgcaatttggaaagctgtaatttatacttataattttgtggcatttaaatggatttgtttgttttccgtttggcactccgttgggccgacgaaaagtgccgtcaaaatgccatcgaatgttccgctgagaatcgtcgtgctgcgcttggcccggcactgttcaaaattcgcttccctctcatt

SEQ ID NO: 35241 - DNA, 913 bp, Heterodera glycines
actagtaattttccactaaaacaatgtaagtgagacccaacttcgtaaaaaaaaagattcacgaaataggaaaacggaatccaattcgtaaaaatttacggaataggaaaagatcgaatagactcaaaagcgtaaaaatttcgggttttagcacaaaattcggtttttcccccaatttggtaaaaattttaacgaaacgtaattcaaaaccgtcacaaaatttgttggttttttcccaattttcaaaaaattttcccatttaccagtgctttttcgattttggttgaaaattttacgaaatttcctcagacctccgtacgatttacgaaattgatctccccccttgtccatcgatgattacaatggttgaaaaaataaaatggtaatacaaaaatgccgaacctgtgcgtaccgaaattcgttgtgccaacaaacggccgccgagcacagcgatgccagtgcaaatcatatggccaatgattccacccaaaataacgccttaaaagcagaaatttagggaattggttgaaaataccaaccgacaacgtcctctcttgcgcccaaaacaattgtggtcagctgagaacggtcgccctaaaaattgaattgataaaaatgttggaaaatgggaaacgcaactgacccattcagcaagaaaagtgagcgtaaacgatttgacaaaaagcgtagacacaaatgaaatgatacgccatgccgaggaacttgaaaaggtaaaagatgaaatttcgattcggagtttggcaattcaattgccgaaccaggttaggcctgttttccccaaaggccggacatcggcacttttcctgtcctatctgattgtgagtccgtagtttagtgccaaattccgcatattttacctgccgtccgcttgggtcgaatccgcgcccgtctc

SEQ ID NO: 35242 - DNA, 969 bp, Heterodera glycines
tattcccgaaggattcaggtctccccataaatctgggcgctttggttcggggggactgccccgaaaacaaaaataaatcgattttttcaagtgtccgtttggggtactcaaacaattatggggagcaaaaatccaacgcagaattaaagtacaggctatagggaagctactcccgtaggattcggtctccccataaatctgggcgcatcggttcggggggactgccccgaaaacaaaaaaatcgattttttcaagtgtccgtttggggtactcaaacaattatggggagcaaaaatccaacgcagaattaaagtacaggctatagggaagctattccggaaggattcggtctccccataaatctgggcgcatcggctcggggggactgccccgaaaacaaaaaaatcgattttttcaagtgtccgtttggggtactcaaacaattatggggagcaaaaatccaacgcagaattaaagtacaggctatagggaagctattccggaaggattcggtctccccataaatctgggcgcatcggttcggggggactgccccgaaaacaaaaaaatcgattttttcaagtgtccgtttggggtactcaaacaattatggggagcaaaaatccaacgcagaattaaagtacaggctatagggaagctattccggaaggattcggtctccccataaatctgggcgcatcggttcggggggactgccccgaaaacaaaaaaatcgattttttcaagtgtacgtttggggtactcaaacgattatggggagcaaaaatccaacgcataattaaagtacaggctatagggaagctattcccgaaggattcggtctccccataaatctgggcgcatcgggtcggggggactgccccgaaaacaaaaaaatagatttttttcaagagaccgtttggggtactccaacgattaatggggagcaaaaatccaacgccgaattaa

SEQ ID NO: 35243 - DNA, 1226 bp, Heterodera glycines
atttctgttggagacagagttttactcagaaattattcaggaaaaataggtacttcaaagaaattccacttaccttggaaaggtgtatttagagtcatagacatagaaggggtcagaacaacaatactaagctgtaattcgcctcagtctaatccaagagtagtacatattaaccaacttaaaaaatgcatagaaccccttgggccagcatgcactattcctaagcttgatgatgatgaagaaaaagcattacatgaggcaaatgcaaaggaattaataaatgaaccgggacattcccacaaattaggtcaaaaatcaaattctgaagttgaaaaagaagtagaagaaacggatgaacctgagcaaatcagtccgagatataatcttaggaaaaaaaaatccgagagcaagaaaactcagtttaaataattaattttgctttggcaagtaaaagttcagaaagaggggttaaaaaaaaaatataaataaataaaacagttttaatttaataagaaaataaggaaacaaataaaattattagtgtcgtatccattcagcatgccgactgcgaaagttgtcatatcgcaagatggaaggaaactcgtgccattcttcacatcagcatatccattttccaatcacttctcctgccgatttgtcattgatggactcgaattttcgtccagtgagcaaatgtacatgtgggccaaagcgagcgttttcggagacgaagaagcggcatctgcaattctgcggacgtcaaatccgaaggaatgcaaacgcattggatcgcgaattcggttgttcaacaccactgcttggagacgaataagcatattcgtcatgacctgtgctaactggcataagtataagcaaaatgaagacctgatgcgccatctcttcaattttggtcccgatgctgaatttgttgaatgtacagcaaatgacgtgtactggggtgcaggagtggcgctttcggatgttgaaaaaatccgcgacataaaccgatggcctggtaaaaatatccttggacggattctctcagccttgatgaagaaattcctgcgtaagaaatctggtgaaatgaacacaaaaaaaaaataaaaaataaaaataaataaaaaataaataaataaatccaagattttttttaatattacatataataataataataatttaattataattatattaaatcctataaattttttcaaataacaccg

SEQ ID NO: 35244 - DNA, 836 bp, Heterodera glycines
attaagcggcgaaaaaagccaaaaggggaggaatttgaatggaacgcgcagactctgtgacggcctctgcaaattgggagggaaagtttttgagggcattggcaaacggaaaagcgtaaagagagggagggataaacgcactattttaaaatttaggggatgaaaatggcaaatgttgaggggggggggggttaatggagtgggagaggcgccggacggagcgacgatgacagtccgacctccccccccccaccccaccaatgccatctttttttacgccggtggcaccaaaaatggatggcccgtgggtgatgaagcagggaaatgggcaagaaaaagagaagcaaggcgactggtgagttagacggacagataggtggaataagcctaattggatgcagtgggcaggaacagcgcccacagggaaacgaagggaaaggggggggaaggcaacggagacgttcattaatgcctatttttgcttatttcggatttgagcttcatgtgcctattttggactttccaagaaatcctcaacaaaaatgaaaaacccaccccaaagaattgatccggaagaatttcctaagaagtgtgaaaaatttcccaaaagattgacccgcacatattacataaaatatttcatttacaaatttgtccttatttgcaaaaaaacattaaaatatttactagtttcatttacaattcaaatatttaatttgtacttgttctactattaaaaagcggtaacaaagattccacagattttatggtggcctatcttgtgcctatgtattttgccattgtttctggctttgtctcgaacccattactattat

SEQ ID NO: 35245 - DNA, 139 bp, Heterodera glycines
ataagtagcagatggctaagcaaccaggattagattttcaaagtgctaaaggcgggctcggcgagctgaagcgcagacttttgtttgtaatcggcgcgctgattgtcttccgtatcggctctttcattccgattcctgg

SEQ ID NO: 35246 - DNA, 1013 bp, Heterodera glycines
  unsure (1)..(1013): unsure at all n locations
ttattagaaagcgtaaaatgtatantcatttcttaaaaaaacaatatacttcaaaaaagtaaaataaatattaataatgcgtataaaaatgaaaaaaaaaatcaaaagaccaagcattccaacagacgccgaagttttaatcaatgacataattttcccgctttatattatcaatttctcgccaataattaggcaatttttcacattgttttgaacttttaaggctcgtacttggcttttttgtgaaaaagtatgtgtaatgctattcggataagtgggcaaccaacgaaaaataaattttacaaaaatttttaactaatttatttatttatttcggacgggcacaaaccccgtgggttgtcagtcgcggacagtctcgaattatcgggttgttcaacatttcatcaatgtgccaaaattttaaggtagaaactgcaggaattgtcctggacaaagcgatttgagacgggtgtacgacttgcagaatgtccaaataggcgaacatcttttaatggatggtgtcatttaatttaaaaatttatccgatttatttgaaccgataaaattgggaatttaaaaataactaactcaattggtgctgagccgttataaaaaaaagccattaaaagggccttataaaaaacaatcaaatggaaattttcaacaaaaaactgcccttaacttttgtcaaatcaaccaaactaaacattcttggaatcattcggtagccctaagaattctctattagctaacctaaatttcaaaaaatttggttgagcaaagttatgaccaaaattacccaaggaaacgggttttcaaacatttttggtcataattttttttataaatgacatgcaccactccatttactttaaatttatttaaaatgtataaatatgacacaaagttttcaaggngaaattgccctagccggtgctgaaaatttgacgctgggtgaaatataaataaaaaagcagacttttaatgtctgccttgccgtctacgtcagttgg

SEQ ID NO: 35247 - DNA, 1693 bp, Heterodera glycines
  unsure (1)..(1693): unsure at all n locations
tgtggcacaaggaatntaaatgcctaatntattatatattntaacaatttattttttaatttatgattttaggtacccacgaaatgatattttgcttgtgaaggaaaatgaatttgattacggaactccagtgaaaatcaacaaattagttggctttttcaataataacagaaaataaatgcaaaaacgaatttttttaatttaaatttttatcatggaatgcatttttaatttttttttccacttttttgcgggtagcattttatgagagaagcacgaaaacccggaaaacatctttagacgaattaaaagcatttaaaaattcctttggcacttttagatttaaacacttaaaatcatttcctgattgttatattgtggttgagtccttttgtcatttgtaggatgggaatttaagtcaagaaaaatctccaaaaaatcgacttaaaaaggcatgaaaaagtcataaaaaacgccaaaaagtcacgaaaaatgcaaaaaagtcatgaaaaaatagccaaaaagcgacataaagccaaaaaacactaaataaacccaaaaaagtcttgaaaaattaggcaaagtaattaaaccaaaatcccctgttttaacattttccgaatagcaagcaatttaaaaacgataaattttaacgaaaaaatatacatttcaaaggcattactccgccagatttattattatttttcagtcctgccatttgagtcctaatgctataaaaaatttcagtaccgtttcgaagattgactttttttgtaattttcttcattaaaagtcaaattttaccttaaaaagtgaaaaaagttacaaaaacagaaaaaagtcataaaatcccaattgggctaagaaatgaatttattatattttacaaaataattaaatttgattccccctttttttagtttttggcactcagttcgccattctttcacaagttgttttttgccaatcaagatgcttcttcttcttcaaataattcactcagttacgagccaattgttcagcttgatcccccgtcaattccgctccattttaagcaaatgattcagactttgcatatgggagatttcgttttaaacggttttaaaaaccaaagttaaatttttaattggatttccagataaaaacattgaaaacattcttcgtgtggcaaatcgttttttggttgaagaaatcgaaggcatatgtgccaaatttctgttggactcaaattcgaagatgacaaatttgggacgttttcgcattgcttttaattacggcttaaccaacaccaaggcattattattatataataaacaaatattataaaaaatttatcgtcaattaaaattttatttaaaagaaactcttttaaaattatgattaaatcaaaaataattataaaagctgcaaaccttttttaagatatttaataattgtaaaaattttttatagcatttaattttaaatcggatgacccgcggcgatttttctgagggaaaaaattttatggagctcttcagtgaaatggaaatgcttagtgaagaagcgaaagaggaacttatgcaccgctatcaccttctttttcccggtgcgcccaaagatggcatgagaaaaaaacaaaaaattgccgatcaaatcgatggtgtttaataaaaatccaaaagttatttaacatttgccaaaaacgatcgaa

SEQ ID NO: 35248 - DNA, 617 bp, Heterodera glycines
agtgtcgcattttcttgaaatgaaaaactttctctcgatgtcggattttccaccggtgtcgcattttcagggagccattttatgataccaaaattgttaagattaaccgttattagacaaagttacgacaaaaaacactttgaccataaacatatttcccatactgtaagacaaaaggctcaaattttaagatgttgacgccaaaaaaaagtttaactgcgacgacaaatagtttgaaaaataattgttttttgttaccagaatttccaacaaaaattgaaatggtaaattttttgaatcgggaaaatcacaaaatattcaaaaataagacaattagagaattttagtagaagcacaaatcattgaaaaagaggttgactgcggggcagggctgctcgcaactggatttgcaattacggaaatccgtaatccgtaattgcggcgattttctcagttacgaaatccgtaatttcgggggtccaaaaaccccgtaatccgcaatccgtaattttcaaaattttaatttttttaatttaaattttatttaaaaaatcctataaaccttataaaagcaattaaaagcatattaaaaagtaaatttataaaagcaaaatcat

SEQ ID NO: 35249 - DNA, 663 bp, Heterodera glycines
ttttcggggtcgctgatcacgaatccggtatccatttcgaataccgaacccgaattcgaacaaaaagtcaaaaatcatttttcaacaaaattcacatttattgtacaggctactttaattaaattaattatttttctaaaaatttattcattaaataaaaaaaaaattaaaatcgggccatatgtataagagcctgcaaatcgcaagcgctttgtctcgaggtcttatgaaaacgtgccaaaattccaaaaatttttaatttaagattgaattgttcctaattaatttgttgtaacttattacgaaaaaagacaatgttttggagtacaattgcatcggaagaaagagaattggacaaaaaattaaaggctgaagacagcgatttgaagactattctcgatgatgttcattgtttgcaggaaatacgcaattcgcatgaaccccttataaaattgtaaatagttttttttattgccccaataaatttattttacagccttaagagggaagacatcttcaaacagttaatcacagccattttaaagccaccttttgacgatggagacgaaaaagtggaaccaaaagataaatatcggttgtattttatttttatttatatgtatttctgtttttgccttagatttgttcatctgtgttgtgaag

SEQ ID NO: 35250 - DNA, 1088 bp, Heterodera glycines
  unsure (1)..(1088): unsure at all n locations
tttatataaaaaagatttatataaataaaaactaaaaatcaattatgcatgcaataaaaaatggtagcgaaactttgttctaaatctctaaatttaatgtctctaataaaaatctaattgtttaaaaatctttagtcatacaatgcaacaacacaaaatatgattaaattcttttacaccactcaaatttgcgccatttactgcgactttaagaatatctgtgcaaaataaaagtaattaattcttaaaaaatatttgatttggattctttttaattacaagataacatcgaattaaaaatgtaaaaaaactttatagcaatatgattaaaattaagcatataaaatgatattaaatttgtcaaaaatacctatggaattcaacgttaaaggttaaaaggccaaagtttataattcataaatgattaacagattttaaagcagttcaaaatttaattaaattattacaatgagaaaaaatgcattaatttatcatttaaattaagttgaatataaaaaatcactaagttacttttaaaatattaaaataatatcaaaaaaattttcaaaatttttaaaataatttaaagttagtttaaaatctcttaatatgaactcagcaatattataattaagaaatattcaaataacataaacaccattataaagaataaaattatattttaaattaacttaaatttagcttcaaattgtctgctgattataaatttcataagaggaattttattttattaaatattcataattgattaatttttaacttaatcttttaatataattcgtgcacaaattaccatttaatgccagaaattaaattaaaaagtatattataaaacgaaaatttaaaatgaataacgaattattaaaatcagtaaaaaatattttatttgtacataatttgacagcaaaaattttgcttccaaaaagatattaaaaaacattcacccagaccttttttttgtacttcggcaccaaaatttttaatctcttccgaaaatattttaagaatcagaggaaatgttataaaatgagtaatanaggaagaaatgagtaatacagggcaaaaag

SEQ ID NO: 35251 - DNA, 1033 bp, Heterodera glycines
  unsure (1)..(1033): unsure at all n locations
caaatgacgacaaatggacggggacggagtgaccaaggncaacagcagaagcaatgccaaaatacngaagcattgggcgatcagccgcagaaaagggacggcacgnccgaaggaggcggaaagggcgcaatttgtgggggagggacgggaggcaatcttttgtaagagagaggggagagataattaacaaaatagcgttacatcaatttagggacattttgaatctgttgagcaaaagagcggaagcggcagcatcaaaggaaaaagggcaaaaggaggagggagagacaaggggaggacgagagacggaagaggagaaaaagactgtgaagagaaagtgcaatgtcaaaagagagtcagatgaacagcagccacaagggagacagtggacggaagacggacagagaaaggaaatagtggaaggaagagaagaagaggacgaaactgcgatggacgaaggacaaacacagacacatttgaaccattcagtggaacacattctgaaggacggggaagagaaagaggaggaagagttggcgaagaagagagcaaagacggaagagaagacggaagggaaaacggaagagaagacgcaagagagagaaacggaagagagagaaacgaaagggatggaggagagagagaaggaagagacggaagaaatgcaagtggaagatggatatcactgtgccaacagagaagaaagtgccgacttccgactggatcaaatggacagatttgcccttttccttggcacggcttttcctccagcggcgttgagacatttaatgaaggaaaatccattttttcgcaaattttgttcatcgttgcgcgcagataatgcacttacatttgaaagtgtaaacaaagtcagttttgagttcctaagtttttacaataaatttcaatttcagttaatggacactcattttgctcgaatgaaagacaaaatccggcgaaaattggcacatattcaaagttcagttctgctggtggacatccgttgtggccgttgctggcggcaccgaaaaaa

SEQ ID NO: 35252 - DNA, 1480 bp, Heterodera glycines
  unsure (1)..(1480): unsure at all n locations
caatcaaacccaattaaaataattaaaaccaatcaaagcaattaaaaccaatcaaagcaattaaacccaatcgagttccctttccccttcncctcgcctccacccgttcttattcccctgtccccaattttactttacacttttcgtcgtctgcttccctcgagggaaaagaaacatcgatcgacgaacgaccgactggtgtttgatcaataggagagctctttccttttcatcacatcatatccattttgggaccaaaaagtggcacaaacaaatgccaaccccaaaaagacgtaaatcacaataattatgtgtcaattagcatgggtttgtgtggtcataggtttaaaaaaacgtttcattactaaattatatttttctatttctttttttcaaactaatgatcatttactatttatcttaacacttaaaatgattagcttgcaaaaaaggactaatgagcaatggacaatctctcccggcaccatttgtcctctgatgagtgaatgaatggccaatgtttattcgctttgtccgtcgttctctaataatattttctcgtcctttggctcattttctgtccctccccccatcttttttgtccaaatgacctttcattttctgatttgtcacttcgttttccctccaattttccaaaaatgtgccaattttctctccctaagttttgggaaacatttctttgcctttctttctgttttcaaacggttctctttaaccaccgccaccataatatatgcaataattcaacttacaattagctggagggagagtttattgaggccaattcgccgtagacgacccaaattggccaacgacaacgaaacgacagccactgaatccatttaaaagccgctgcgagtgccatgttcttcaccattccgtttttcctcgagcggtaagtcctaaatcccggccttccgtcgaccatttcaattctcagtccgatcactctctcatcccttcgtcttccctttcgtttgttcgtctgttaagtttttgctttatctttctgctctctgtcacttctctcatttcatttaagacttttcctgaaaaaactatcagtttggtcaatcataaataaatccactgaaaagcctgaggttcggtttcagtttagcaattcattttcatgcgtttttggggctcagaccatttaaagtgttcaaatcattctttcgtcgatcactttactctttctttgtcgcttctgatcgcttcttcctgaacttgaaaaaaaaaattgtgccgctgctggctaaatgcttttgctaagggttgggttaatgtttttttgggaatgtcttcccctgccttaccgtattcgctgtccccttacagtatgctcgaggatcccttttctccgctcactttgctctccatctccgccattatcactaccattttcgctgttcttctgcggaatgtaaggacatacgcatccatcactttttaattt

SEQ ID NO: 35253 - DNA, 1228 bp, Heterodera glycines
  unsure (1)..(1228): unsure at all n locations
aaaataaaatttactttttttggtcgcatgtgacgatgttcaatttgtaaggacattttattactttttattaataaataaattagtgtatcagttatttagtacatttataattaaatattttatgattatttatttataaaataattttntaaataaaattcgttattatctttttntcatcatgaaccaatgtccaaattatttcttgttccgctaactttattttttagaaatgactttttatgatcctaaatacttttaattctaatcgtttaaacttcctactctttttctacttaatttcaaagattggaatttttaatgtttttaattttccaaatctattttaaaatacctttaattgtgttaacatttttgtagaaattttttcttatgcgaatttatattttttttcaattaatattttttcaagtttttaattttgttatttcacttcttataatataattaattatattaatgtatttagattaaaatattcaaaattgtgttttatatttcctttatttcttgtttagtgcgcttgccttcacatggccggtttcatgatattaattttatatttttgtctcaaaaatttctttttccttaaaattttgcccttcacaagcttcatcaaataggagttaaaattaaaaattatttatatttaattatttatattaatgtttcatttagaagatgaatgctgattctatgcatttattaagttttatagtttttaaaccttttttatccttttatttcgctcattttatattttgtcgcaaaattttttattccattaaactttttatactcattagtaaatgtggatttcaaatttttataagagcacaaaaactcaaaaaatttttggattaataataattgtaatataatttcaataataatttgttttaaattgttttatattcagaaaaatatttttacatttatcctatgtaattattgacttttacgttaaatcaaaatctattcatataatttgcgtcgttcttatgatacaatatttactaccataaccattttatttgtttttaaatttttgtattttaatanatgaatacgttttatttattcttatgaaagaacaaattatgtgagtcatattttggtattaatttggaaaattttactctagctaccttgttcaaatccagcataattgatatcgggacataaaaaggcttttgttgcatta

SEQ ID NO: 35254 - DNA, 658 bp, Heterodera glycines
aatactcatagaaatcgaccaatcttggcatatttgacaaaatacatatagaaagaaaaataaaaatttaccgaaattcataaatttttttggtgaaaaatcttagaaaatagagcttaattccaaaatttagcgctgcctatcggcatcacagggcccaaaaagtcataaaccttattaaaaaaattggcgcaaaatcgcaaaaatttagcatattttggacaaaatctgttaacagatctaaccaaattttcaaaattttcccggcggcgcctatcggcaccgccggacgccgtaccctttctccttaagtctttagaaaagagcgacgtgaaaaaagatgttttggaaaacaaaaaagtaataaaaattttaaaatttcaagaaaaaaaaattaattctatacaaaatttctgataaaaagaaataaaaaaatataaaaacaatacaaatattattatggaaattaataaatattatttccgaaaaaatattaaaaaaattttgactatttggcataaggcaaaaattgaaaaaccccgaccccgaccccgaaccccgaacgatttggcaaccccgaccccgaaccccgacacttccaaccccgacaaccccgaaccccgaattttccaaccccgacgtcggggtaacaacccta

SEQ ID NO: 35255 - DNA, 1498 bp, Heterodera glycines
agcaggaaaacacaattggagggatgcgcgagcgtgaaacgactgctgcgttggaacttcgccaaagggatgggttggtggacaatttggtgaaggagagggctgaactcgagaaggaaatggtacggacacgcagagaattcgaaagtctgctggcaagacaagagcgggagacggaaaagcaattggtacgccatcaatgccttccttacctcaacggattttccccgaaaatattttgtttttcatcgtgtaacgacccccccctgcacagctatggtttacataatgaaaagtgccgaaattcactcactctacatgctcaattgatactttttcctcaacttgcaattcgtttctttccattttaatacaggaggagaagaggcaggaagtggttgctgagcaaagggccaaacatcgcacagaaattgaacagctccgtgtggtgattcgtcaacataagtcagactttgaggcggcaatgcaggcatcgcggaattagaaactttgtttccattttttgttttaggaggcattgcgcgaaactcaaaaattggcggctcaaagggaggagtactttaacaactggcgtcaacttgaggagaaattggaccaatataagcaaaaattacgttcgactttaagcagaaaaatggttgcaaaatgcaggtggtaccaaattaaaaaaacaaaatttatcacaaaatgttgcagtgaactcgttcgtgatttgaaggacatcggaggtgtgtattgaaattcgcagggggaagtttgggctccaaatcgggaattaaaaaataaataaaagtattaatgcttttaaaaaggctatatgtttaatttaaaagcatagtaagttgaaccaatacggaatgtaaaatttttaaggaaattatctgatgaaactcaaaattttatgcttttaaatagcattagacgggtctctatattttcgggtccctataagccgggtattcgggtcatacctgtgcaagggggaggggtcagccaagaggtcttacgatcgactttggcccccccccccataggggggtcagagcccatttccattacgatcgaccattttttcaaattttttgcctgctgaagatctttttttgcttttcgggtcaaaaaaatgttcttcgatcattttaaaaaagttgagtgtaattttgtaaaagattttcaccaaaaatgaccatttttgaattttaagcctacttttttaataaaaatataggattttatagaagaaagggaaaaattgaggttagtcgatcgtagaaattttttcaaagcaggcaaaattatctcttacgatcgacaattttcctcacaaatcggaattagtcgatcgtaaaaatttggaatttttaatgacatttgttaagaaataaggcaattttccgaattgtctataagaaatttttgattaaaatttcttttttcatagttacgatcgactttttcgctgacttttctctctctc

SEQ ID NO: 35256 - DNA, 739 bp, Heterodera glycines
ttttggcattggcacggcggacaaatgtacaaatgggtggacaaacaaaaaagagccgaaagaaatgcccgagggcaaataatccctcccccaatggcacaaaatttcaaaatttgtgtgcttttggcaataattatttgcctttcacaaacaaatgggcaaatgaagtgcccttaaggggagagacaagaattgaatgtgatggcaatggtcagccgaaaaaatgccgacaaattcaacattggaaaaagtccatttgtgccctaattgatttggttgaaatgtaataaaaatgaaataaaaaatgtcatttaaaagatataaaatccattatttttatttattaatatcaagtttaattatttcaaaaaattataattaattttacccagaggaggaattggtgagaaacggcaccacaggacagccatcactttgctcaattgtacatgatggagcgttgttcagagatagagaaggaatttaattcaccccttcccaaccaaaaaaatcagatcatattccaatgagcgaccagcagaaatcgctttgggtatacatataaaacacgtagaattactgcgaaatgagtgcgtgcttaaacggaaaattagtcataaccaacaaaaaaggaagggtcccggatgtccgtgggatttccgaatggaatttggtgggtggatagagcacccatgggttcttcagaaaagtgtttttattttttgctgaatgagcccga

SEQ ID NO: 35257 - DNA, 483 bp, Heterodera glycines
tccccccccccccccccccctcctcttctttttttttttttttttttgttttttttgacgggcaataaagtaaggagccgaacaaaaaaaaaaaaaaaaaaaaaaaaaaaaaaaaaaaaaccttttttttttttttttttttttttttgggggggggggggggggggggggggggggtggttataaaaaaaaaaaaaaaaaaaaaaaacccgcgcgggggggggggggggggggggggggttttttaaaaaaaaaaaggaaggaggggagggggggtgggggggggagaaaaagaaaaaaaaaaaaaaaagagtgtttttttttttttttttttgggtgcgccccctccccctcccccccccccccccccccccccagataaaaagaaaaaaaaacaaattaataaaaaaaataaaaaaaataaatatttttttttcttctccccggcggggggggggggggggggggggggggggggggggg

SEQ ID NO: 35258 - DNA, 929 bp, Heterodera glycines
aaaaattatttttgattccattattttattagtattgtgtactttttttgactcttaattaatttaataattaattgcctttatttcttttatcgatcgattcgccctttcattttccctttttaatccgaaatattttactctatcccaataaatcattgggctgcgaatttcccatccgccaacgcatttttttttattcctcggctaaaaggacgtttttttaaattatcgaggccaaaagtttcttccaactgacaaatgaatttgcccatttcccatcgaaacttcggcggatgggctaattcagttgtgagcttttctgacaaatttcacgattttttcacaatgattcggtcgatctttgtgatcagaaagtgctatagggaacagctgttattagccaatgggaaatcattttggattatgcgattctcaattggcctaaagatcatttgaaagaatgtgccgggggatgatggccatggattaattggcaaattgagaagggacaaaaaaaaagctgaaaaaatgcaacacaaactcaatgactgacttgttctggatgacttttgcaaagccaaaatccgtcagtttgatgtgtccgtggatgctaaccatcagattttccggttttaggtcgcgataagcctaaaatttgaattatttgtcgattaaatatttccgttttgccacgatgttacaatttgtttggaatgaagatactcaagtgccaaaatgatctctgctgagtaaaatttgaccacagtgctggagaacttgcgcaatgctcgaaaataggcgaacagttcgccgccgggcagaaattccataacatgtacaaattggcacggtctttggccgtgtcccaactgaaaatcatattaggcatttaaatatttaaatgattgtcattaagctcacagtcg

SEQ ID NO: 35259 - DNA, 802 bp, Heterodera glycines
aaagaacgatttcacctgtacaacactcattaataatgcagcatatttctccgcttcgctgcgcaacaatttttgtgcctgatcactaagccctggcgaaacttaaaaaatattaaaacatttaaaaaatggagggggtcatttgagtgcggcacagtttaagcttttctaaaattaaaatatcaaagttaggaaaatcatattttaagttttttgccataacatttatgtaacttaacgaagttttttgatattttcagtctattagaaattattaatgccttcgaaacaatatcaaaattatttaatttggttatttaaaagaaaagttacaaaaaattaaactctctctttgcactcaaacgattcggttcgaaacttaaagcaaaattaaatgaactcattaaaatttattgatttttttaaaattttgccattgcagacccatatgtgagtaaatgatcgcccgaataagtacaaattcttcattgatcagttttaaacgggcaagtggctgcacgacattacgcatcattttgtcacccattctcatgacactgaaatttaaaaattatcaaattaaatcttaatttagtaataagtttaataataataataattcactaacactgaatcctgcttataaaatgaattttcggccaaattaactagcattatgccatctggtgtgcacagaacgtcacacctttgttgcaccgaatagaaactgttgcacaacacatacaatggcatcgcaatattactgcacaaggcaatcttttcaaagggaattattatataa

SEQ ID NO: 35260 - DNA, 1228 bp, Heterodera glycines
tatctaacaccgccgtaatttcaaccataattaattcacaaattgtcagatgtctcgtggacaccggttcaagtgtcacggtggcgtcaagggcgctgatcgacattcttggctgcaaaacggtaccatcgcatgaggacgcaatcagcgcaagtggtcacataatttcatttcgtgaaaaagcaaaggtaatgctaaaagtggcagacatttgtgtcccaattactatttattttgtaaatgaacaaaaatccgtctgcaaccgagactatcaattaattcttggatgtgattcactccgacattttggcccctttaccgtagacatagagaaaaacaaaattcaaattggaacccaatggataagcttaggttcgaaaaattatgaattaatgaacaatattcgagcctttgctgccgaaaattacacaattccaccttcaagccaagtaatgatcagagcaaacattaaaactgccttacagccaaaacacagcttagttgtggataagcccgatttaaatttgctaagcaatgaccttgggattgtaccaagtgtgtcggctccatttgtggaggatatcccgttgacaataattaatccatcaaatgatcctaagattttattcaaaggcatgcatttagcctatttaaacgaaatagtcgaaaatgatggaattttctacgaatcagaccaggagaaaattaaaagcgggaatcctgacccaaatggattaactgatccatcattcaaaattgacctctcaaaatctgacattaatgaaagagaaagagaagcacttaaaaatcttttagaagaatttaaggacatattttcaaaaagtcaatatgatttaggctcattttcaggtggcgaacatcattttgacacgacaaccgaagctccaatttcttcgccgccaagacgaatgccatataaatacagagatgaattaaagaagcatattgaacaattgcttaataaaggagtaatggttgaatctgagacaccatgggtcaccccttttgtagtagtacagaaaaaggatggtggaattagaccatgtttagattttcgaaaattaaatgaggtaatgatacccgaccgatacccactcccgagattagactcaattatggaaaaggtcggaagttgcaaattctacagtagcttggacttatcctcaggatatatgcaaatcaaactcagtgatgacacatcatggaa

SEQ ID NO: 35261 - DNA, 810 bp, Heterodera glycines
  unsure (1)..(810): unsure at all n locations
gagaggttaaggatggatntagtgaaatattgttaaaagcgaattagtaaattaagcatttggagcccatttctgcagcaatgagttccattttgggaatagtcaaatttgttcctttatgtttggttttaacttttgttttggaaaaaattaaaaaacaatcagaaaactcggaattgggattggaaacacataggaaaacagcggcacacatggcgagatttgaagcatcggaaaaacaatgtaattcatatgatagattttgaagggggagagtgaggggatttcgggggatttcaattttctcagcgggtacccaatttttaaaaagatgattccattcattttgtgaatttagtgtaattggttggtcccattcgacagattccacgcaaagagtttgcataaaaatttttaggggaagaattacgggggaaatgagtccaagggggtcaaaattagaagcaataaaagacaaaattgaccttttagtacataaattttcagggggtggtgatacggttaacaaaaattgtcatttagagtgttccatgatacaccaagaaatttatgtatcgtaccactgagcatacggtcattagggagatcagaaattgcttcggacgaattgctggcaaattcccttattggtaatgacacagtttcaaaaagggaaataacattcgaaatcttatttttaccaaccaatgggtcatcacaacatatcaaaaggttatcaacgtaaatatttgacaatatttcttgggataaatgggacggattagtggttagatgataacgaattatggc

SEQ ID NO: 35262 - DNA, 847 bp, Heterodera glycines
  unsure (1)..(847): unsure at all n locations
gctttccagggtcgctgatcacgaatcgggcatccatttctacctatttcaaacgcggacccgaattcaaacaaaaagtcgaaaactcacaaaatttcaaaattcatttttatgatcgaatctgtgcagaatgattattttttggtgttgcaatggtttcagttaatttttgtttttgatcccgaatactcagccatgttccatgaaaccaaaccttttgtggagagctaagcccatcaaacggaactattctcagaggattgccgattaaagcatttgatgtttggttcaaaaaatgacccaattcgtttgtacaataatagagcaatttgcattctcctgaataggtaattattatttgaaaaatacaaaacatagtttaataagtatgtaacctgttagtttgaacggcgattccaaaatatttttgccattattagagaatgaagaagcaaccatgatttttgtgcaataaaaaagcttttaaagtttcaactcttacttgttaggtatgattaatatctaaagattaattttgagtttatttaaatttttataggatagataataatcagggattctttttttatgtaagaaaaatcgcgaaatatgtacaaaaattcccaaatatgtacgaaaatatgtaaataaaaatttttttaacggttatcaaaaattgcaaaatatgtaggaaaaaatggcgaaaagtccaaaatatataaataaaagtcccgatttttgttcgcaaacacaaaaaagaaagtgtttttcctactaattaacacaccgtttcaattttggcctctcagttccanaaaggtttgcatgtgtggcgaagtggtttttg

SEQ ID NO: 35263 - DNA, 1034 bp, Heterodera glycines
ctagagtgccacgggaccgggaattttgggcagacccgggaccgggacctttttgggttgaaaaaccgggaatttttggctgggaaaaccgggaaaaaaccgggactagtcccggtcccggtcaaaaccgggaccttggtactcagttgtactcagttgtccgctaccaggtcccggtcccgtggcactctaggaacaaacccttaacctatccgttttttgactataacttttttttctttcatcgaaatccaacaatcttggtatcatttgaaagcttaaaacatgtttagaagttgtttcaagcgatcgcttcccgattcaacaattaccaaaaaaagttataaattgaaaattgcaaaagtcgaaacttttgaaattttttctttataacttttttacagactagaaaatctttttgctttttgtaattactaatagagcatgtgaagggcttttgaatgataccaagattgtttgatttcgttgtaatgaaaaaagtggttctagtcggttttacgcgtcccatgacattttacgcgtcccatcacatttttttgtgtccatggcggggatggcattccgaggccctgaggccacaaattttcggaagtcggaattccgtgccatccctaactaagaggaaacctatttttttgtcgtgtatttagtaaattttcaactaaaaatttcgttgctaaaccaaagtatcatgtcaactcatacacaggcaactcgatcaatggcttagactaggcgtaggcttttttgcaaatttcttttatgtgtttactgactgttgacatcaataagtttgcttagggttgcttttgcacatttcgataatcaaagtatacaatcaagaacaattagacgattcggaaggtataaagttttgattgacggttcgaaacaagggtaatccttcggaattggtgtcccgaggggaaaaagagataaaaatttttgtgcgcgtaaatgatgggacgcgtaaacagttgttgggacgcgtaaaatgtgatgggacgcgtaaa

SEQ ID NO: 35264 - DNA, 1005 bp, Heterodera glycines
agaggattttatatttagagttatcccagaaaaatggctatctcttttttgataattttatacacatacaaatgctctcgagcatgatagggagggcggtgcgcaatagaccttttatttttgagggaatttttaaatttatactctatcccagaaaaatgtctatctctttttttgagaaattttatacctcacaaaagcgcttgcgtatgagacggagggctgtgcacaatcgccattttatttcacagaggatttttatatttagaggttatcccagaaaaatggatatctctttttttgataaattttatacacatacaaatgctctcgagcatgatagggagggcggtgcgcaatagaccttttatttttgagggaatttttaaatttatactctatcccagaaaaatggctatctctttttttgataaattttatacacatacaaatgctctcgagcatgatagggagggcggtgcgcaatagaccttttatttttgagggaatttttaaatttatactctatcccagaaaaatggctatctctttttttgagaaattttatacctcacaaaagcgcttgcgtatgagacggagggctgtgcacaatcgccattttatttcacagaggatttttatatttagaggttatcccagaaaaatggctatctctttttttgataaattttatacacatacaaatgctctcgagcatgatagggagggcggtgcgcaatagaccttttatttttgagggaatttttaaatttatactctatcccagaaaaatgtctatctctttttttgagaaattttatacctcacaaaagcgcttgcgtatgagacggagggctgtgcacaatcgccattttatttcacagaggatttttatatttagaggttatcccagaaaaatggctatctctttttttgataaattttatacacatacaaatgctctcaagcatgatagggagggcggtgcgcaatagaccttttatt

SEQ ID NO: 35265 - DNA, 367 bp, Heterodera glycines
aagttggaatgtaatgagaaaaaaaatgggttggtgagtgaatcaatcaatttgtgtaatcatatcgtgcttttgatgtccatgtcgagcagtttcggtggacggcggttgcgattcgaccgtctgacttcgttctgttcaggttcgtttggaaccggttgcttttcagcaggttgttcgtctgcgaaacgcacgcaacgttgacgctgagtagtgttcggttctgtcgcgggttcttggtgaacaatttgaagatgttgatgcgaaccttgggactgttcgggaatggggaaaaagtgacgcatttgattgctgtgcctacgcacaatggcatttaaaattggtacttgaactttccaaaccacac

SEQ ID NO: 35266 - DNA, 1308 bp, Heterodera glycines
taattcctctttccctctctgatcagtcattggtcatccttctgacactgtgcatcgattgatcagagtttttgatcagtcgcaaaacaatgcattattatgataagcatggtccgctaattaattaatgatgccgactttaacacagtaaaaagcccatttctctctctccaaaatgctttttcttttgctttccatcactaaaatcgtttcggctgatcagaattcgaattggcaagaagcgtatgccgagaatatggccaggtttcttaccatcgcttttcccattctttcccaaatttcgtaaatttattttcttaagattttccgactatcacaacgattgcgtccatcgctgcgacgatcacttttggcgtttgtccgaatggctcgcgggcgtcgccgcctcctccgtgtccgcttacggtggcggcgtgcccgcgcgtccgtcggcaatgccgcgatggaacgcacgccacgcggacttgaagcaatgcgcggatgcgacgatgccggaggaagacgcacccgcggggcataaaaagcgaagcaatgggacgcggacaaaaccggcacccctggtgttgccaattgttcacggcgacttcaattggacaaaggacggaaggaccaaaaacgaagccaacggacaaccgatggagtgggcaaaaacacagggggacaattctgatcaaaatggatgaaagtgatcgaaagacgggtccaaaatagcaattgtcactgatcagcagaatttccattcattccccaacgacggcattgccaattgaaagtgccggggagaaaaagcgactttccggggggggggcaaaagtggcatttcgtagatggcctttgccaattggccattctttggctcagaatgcaaccgtccgttacgctggtcatcgaccactcctctgttgaccatcgtcccaaagtgctgcttgtcgacacgggccttccctctcatcgtcaagccgttctttccgggtaaacttttcgtccattcgttggcccattcattcatttgaattgctcccccattttttggtcttttatggcatggcattgcgccacgccgtgtgagtaccgtcgtcaccacccatcccgacgcacattccatgggcaacctcaacctgttcccatgcgcggaggtctgtctagatcatttgttttctgcttacccaatttttgcgcttcgctttaattcagatccattccggcaccgccacttttcgtgccaatattctccggcctcagtcggccccttcatttgtaatttgtttaatttatttgcattttcct

SEQ ID NO: 35267 - DNA, 1262 bp, Heterodera glycines
ttcggttaagaatgtccatacatttgccaagtttatggacgatctttatgaggaatataagaagcatgatgaaatgggtaaaagttgcactttttgagttttaggcgttcatctttaatatgagcgtattttttagttcttaaagtagtaccaaagatttatttgagcatttttcgagaaaaattggtttttgcctaaaattccttagcaaagaattaataagaaccgaaaaatttaccaccaagaatcgaactactctctaaaaaattggctttttatcaacaaaatccatggaatttactcatttatcatttaattggagagccccgtgaattttatttaaataaaaacggtaataaaagaacaatattttcagactcaattgtatatcgtgtgtggaagaatcgaatagaaaaatattgtgcgaacaaaaaaaggacaattttcaatttgacatttgttaaatgtgcggcagaaattgcccatttccgagtgattaaccaaaacaaaaattcaaaagatgcttatgtgaatttaaaagttgtcccagataagtatttgcaagatggatttgttggatttttgcattatgacaaaacacttggccaacaaattgctgagaaatttgaaaaagaaatcttttctaacaaagaacaaattaatgaaagggtggagaaccaaattatgcaattggccttctcatttgcagcccgggtgatcctctgcataatgtaagcgctttattaaattctaatgggactgtaattgtagcaattagctgtgggcgcttttttttgtaaggaatgcccgtttggggtttttttgtaaggaccgcccatttacgataattgactcgtcaaaataataaaaaaatgataatttataaacgtcaccggacgactttttgatcataatttttttcattccaaaccaatcaaaatttgaccaaatgtaataattttcaaaatttaaaaaattttcgtttatgtacaaaaaagttataaccaaaatactcaaaaaagtgacattttctgcccgttttagccattgattttttgtaccttactaaaatgaatttcgcaattgatttttgaatgcacacaaattttgtgcagctcgtctaaaaaaaaattattttttaatcatttttaaattagctaaaaaattattaaataaaaaagcaataaattattactttaaaaaattttcacgacacataaaatatgagtattgcagatacggaaggtcggaaggttttgact

SEQ ID NO: 35268 - DNA, 622 bp, Heterodera glycines
  unsure (1)..(622): unsure at all n locations
ggtcgtttcggcgcggcgttttcggcgcagccgtttcggcgcagtcgtttcggcgcaagggtcgtttcggcgccgccgtttcggcgcaagggtcgtttcggcgcgaaaccaaaattaaaaaacatgatcgtattaagttttgagtagagtgcgacgggaccgggaattttgggcaaaaccgggacttgccgggacctgagaagccgggaccgggaaccgggactttttaaaaattcaaattttaatttatttcaattgaaaataacacaaaattaaatttttattttgttttttatttaataaaatccaaaagttaaagcataattaaattaatgaaaattttcaaactaaatttatttaaattattttaaaaaataatcatttttggattaaatggtcgaatattattagaaatttatattacttttctgatcattttttcggcgctctttttgcaaaaattcatttaaaaaaaataataaaatatatgagaaatcatattttgtcgaagggaaaccataagtatacaaaaagaaaattcaaaatattttaatttccgtaggggattgaaccaggggaaagaagaaaagaaaagtcaaggggactanccaatagnccattt

SEQ ID NO: 35269 - DNA, 1267 bp, Heterodera glycines
agaattaattggtgttaattgggaataatttaatatttgtgattgattttcttattatctaaattgtgatatttcctattcaatgtgattttcgtgcttagtattagtcactcttttttgttgttgatcgttctgtctaaattgctccacctccgcttttcctctctatttaaacacgcacgtttttcgcttcaacgcattcttttcatctgacatcttattatatttaccaaataaaacttcttttatttattcggtatttatcccccccttattcaccccgccctctctccctcgcgccttcccatttttgcccccctttgccgcccgagtcaacaagtggtgccgttagcaatcaaagatgtcttcagctcgatgccggatggctttggggcccgcgctgttccgacttcggcaacatgtcactacggccgaaaatttgctggacgagcccgtgatcaatgccgagacgaccgaaaaccttgaacaggaacgggggcacatcacccgtatcctgtcaaggatggaggtcgagctggacgcgtggggtgccattatgaacggactgcaaggcccagcgagagaggcggaggaagcgcttttcactgcctttattcgagatgaccggcacttgacggagtggttggaagatgcgcgagaaatgctggctcacatagcagcagaactcgcagatgagcccaaccagccaatcgcggcgggaggacagcaaccagctgttgctgtgaatcaacccgtgccagccgtgccattcgtcaacaatgccgcatttctcggcggtgccaatgttcaacagccagctgctgttgccaaccatgccaatcagccaccattggtgccaaataatgcccaaatcgtgccaaacttgccggctgttgctgcgcctgcgcctttagccactgctcggctgccgcagctcagtcttcctgttttttcgggcgaaccaatggaatggcccgcgttttggcagagtttcgagagtgccgtcgaccgtgccgcccttgagcccgtcgacaagctcaactatctccacggttgcttacgcggaaaggctgctcgtgccgtaaccgcctaccgtggaggggacaattatgcccatgccgttgccgcactcaggcgactcttcggagatccacggaaaattgccgaagcacttcagtccgaactgatcaatctccggcctgtggacgatagcgttggatcactgcaacacttcctcgagactttggagcgtgtgtgccgccaactt

SEQ ID NO: 35270 - DNA, 1055 bp, Heterodera glycines
  unsure (1)..(1055): unsure at all n locations
aaacaacccgctgatgccacgtcgaagaaaagtcncanaatttgacatccataaaactncatttttcatagccnagcgtgttaaagcaaacccgaaactgataggaaatttaaattgatcataatagaagtntaatttttatttgtcccatgcattttctgggaaatcttttcgcgaaaagttgaaaaatttcaaaacggcagacaacagatgcatttcaaacaattcaacaatataatataaaatttaggcaaaaatttttgttccttcctctttggaaatggtcttaaattttgcttgtaaatattcagataacaagttttttttactgaaaattttttacacactacaggatgaaacgcaataaataatgtttgtagacaaaagaaattggcgaaaaaaattgcctcaacaatcagtggtgaaactgaaagaaaaaaacttccccaaaaaatcggagcttttccgacggcatcagctgcatttccaacagttcaacagtataaataaatattaggcaaatgaaaaatttttttccttcctctttagaaactgtctaaaaatttttgttgttaatattcagaaaacgtgttttttttagtgacaatttttttcaagagaaggatatgaacaatcacttataaggctcatgcttggagataaaggaatcggaaaaaaaaattatctcaacaatcagtcgtgaaacagttcaataattcggaagcagtgccatattgggaaaagatgcacaagtagagtaggctcgaaataaaggcaactgccgaagattaacaaaaattcaaatttattggccccgttctgctttgacaggccatatctcgccagggagtggcggtagaccctttgttgatacatttgaaaatgtagagcgcgtctagctcattcgaatagcatcaaactggtttgtttttgtcacgaaacaacccgctgatggccacgtcgaagaaaagtcccaaaatttgacatccataaaactccattttttcataggccagcgtgtttaaagcaaacccgaaactgataggaaatttaaa

SEQ ID NO: 35271 - DNA, 932 bp, Heterodera glycines
tgcacacccctttgacacgtaaaatattccaaaaaaagagatagtgattttttctggattaggccggagaaataaaaattaccagctatttgaaatgcagtgggcaagcacagcgagtcgcttaaatgcacaccctttgacacgtaaaatattccaaaaaaagagatagtgattttttctggattaggccggagaaataaaaattaccagctatttgaaatgcagtgggcaagcacagcgagtcgcttaaatgcacaccctttgacacgtaaaatattccaaaaaaagagatagtgattttttctggattaggccggagaaataaaaattaccagctatttgaaatgcagtgggcaagcacagcgagtcgcttaaatgcacaccctttgacacgtaaaatattccaaaaaaagagatagtgattttttctggattaggccggagaaataaaaattaccagctatttgaaatgcagtgggcaagcacagcgagtcgcttaaatgcacaccctttgacacgtaaaatattccaaaaaaagagatagtgattttttctggattaggccggagaaataaaaattaccagctatttgaaatgcagtgggaaagcacagcgagtcgcttaaatgcacaccctttgacacgtaaaatattccaaaaaaagagatagtgattttttctggattaggccggagaaataaaaattaccagctatttgaaatgcagtgggcaagcacagcgagtcgcttaaatgcacaccctttgacacgtaaaatattccaaaaaaagagatagtgattttttctggattaggccggagaaataaaaattaccagctatttgaaatgcagtgggcaagcacagcgagtcgcttaaatgcacaccctttgacacgtaaatattccaaaaaaagagatagtgattttttctgga

SEQ ID NO: 35272 - DNA, 925 bp, Heterodera glycines
  unsure (1)..(925): unsure at all n locations
tgaaaactacagcaacagtattcaaaagatgaccttaatacttatgacagaaatgaccgccgttacggtaattggaaattgacagtaatatattatgaagtgatttttaaatattaattaatccgggggatcactgtagcaacgatttggatcgtgacaattattactcaaaattaaggtaattatgcgccacgaagtggctttccggaagattacaactttaatgacctaaatcgtgacaattatgatccaaattatgataattatgttccaagcatagatattgacaagcgttattcaaagaatggtaatagttgctataatgtcaagttgccaaaaagtttaatgttataaccggtaatgttcaatttatttaaaacttgtaagattatgattttggaaattacgctaacatattaatgaagtaattatttaatatttatttttagtaaagtggagactaattatagttattattttatgtcacagtgcaaagtatccagagtgacaattattacactaaattaaggtaattatgcgccaagaagcggttttccggatgataaaaatttgaatgatcaaaatcgtgataattatgacccaagttatgataattatggtccaacttatgataatgatagcccaaaccgtgatgctgatcaacgttatccaaaaaatggtattaatagctataatgatagcgttgaaacgaagtttatgttataaatacaaatataataatatcaatatgcctattatataaaaattttggagataattttaggaaaaattcaatttaattattttaagaaattggcaaatgccaaagtttcttcaacttgcaccatgtcaggcagcaatttttatggacttgnagctagaagacgaaaaatcaagaacagcaattngaagtcaaaaaaatgag

SEQ ID NO: 35273 - DNA, 1072 bp, Heterodera glycines
aggtgagggagacagagaggaagagaagagagaaagacctttaaaggaaaaaagcaaaaatacaattaaaaagagagcaaaagataaagagcaatcgagaagtgagaaatggtaacgatagaaaaagagggggaaattgatagatgatagagagagaacagagaggatgggaaagagaaaagagggagagcgaaagagagagagaagagagaaaaaagtgagaaagaagaaagcagtgagagagaaagagcgaagagagagagagagagagaggtaaagagagtagagagagcgaagggatagagagaaagagagagagagagaggtgagaggatgagaaagagagcagagagagagagaggtgagaggatgagaaagagagagaataaagaaaaaagtgagaagggagaaagcagtgagagagcgaatagagagagagaggtgagaggatgggaaagagagcaaagagagcgaagggatagagagaaagagagagagaggtgagaggatgagaaagagcgccgagagagagaagagagagagaaggcagtgagagagagagcaaagagatgggggagagaaagcagagagagaaagatatcagagaaagaaaaagagagagagagagagaagagagaaaaaagtgagaggggagaaaccagtgagagagagagagaacgaagagagaggtgagagagagctaagaggatgggggagatagagcagagaggatgggggagagagaaagaaatagagaaaaggatggaaagagagcgaagggagagagagagaaagagagagcgaagggagagagagaaagaaacagagaaatagaaaaaaggagaacagagtgaagagagagagagagagcaacgagtgatagagcgaagagatagagagagcagagagagagcgaagggagagagagagaaagagagagagagagcggtgggtgatagagcgaagagatagagagagcagagagagcgaagggagagagagaagagagaaagagggagagggagaacgttagagagagagagagaactaaatattgagtgaaaaagggaaa

SEQ ID NO: 35274 - DNA, 1268 bp, Heterodera glycines
  unsure (1)..(1268): unsure at all n locations
ttttttgcgttaaaaacccttacatnttgtttgtatttttttctctatcgatatgcaaaatntggagtggatctaacgtatagaaaaaaaattaaacgtagcgaagtaaattcggtttttctctattaacagagataaagaaatagtacgccaaaaagagaatgtttttttctctgcactctctatttattggttcatgtctcgttttttgaaacggtgtgttaagctatggagaatccaggaaaaaatatgtatttacataaaaaaagaatccctgataataatattttagctctcttctgtctctccatctttgtcttattctatcttgttccttctaataaaaattctttttcatcatatttcacttcaaacaaaatttaagtatcacaatcagtctcaaaaaacatcccaaatagcattgtcatcaaatttattaaaaataaaatttaagaagcctaattccttgaattaatcatctcatacaatggagcgtttattgcgattgggaggccttagtggtttgggagcaggttcattgaacgcaacaccacacgattcgaaccaagttgacacttcggaaactgtttacatcagttcattggctttattaaaaatgctaaaacatggacgagctggcgtcccgatggaggtaactaaaaactaatattttttatatttacacaccaaaaaaagtattaatcaaatccgctgaccgcaaatatcagagacacacacgtgtacgaatttgaaatggttaaatgaatgatattagtgatcagcggatgatttatgtcaaatttaaatgttccttttaggttatgggtttaatgctaggtgaatttgttgatgattatacggttaacgtgattgatgtctttgcaatgccgcagtctgggacggttaatttgtttttttttgtctgctttatttgccgataataattgaattttaagggagtttctgttgaggccgtcgatccagtctttcaggctaaaatgttggatatgcttaaacaaactggaaggcctgagatggttgttggttggtaccattctcacccgggatttggttgttggctttctggggtcgatataaacactcagcagagttttgaggcgttgtctgacagagcagttgctgttgtagttgacccaattcaatctgtgaagggaaaggttgcctttcttattagtttaccggtcaaattacattttaggttgtcatcgatgcttttcgcactattaacccacaggcaattgcactaa

SEQ ID NO: 35275 - DNA, 826 bp, Heterodera glycines
ggacaaatggacaaagacagtgagtgagtgggattggcaagggacaaatggacaaagacagtgaatgagtgggattggcaagggacaaatggacaaagacagtgagtgagtgggattggcaagggacaaatggacaaagacagtgagtgagtgggattggcaagggacaaatggacaaagacagttagtgagtgggattggcaagggacaaatggcataggacaaatggacaaagacagtgaatgagtgggattggcaagggacaaatggacaaagacagtgaatgagtgggattggcaagggacaaatggacaaagacagtgagtgagtgggattggcaagggacaaatggcataagacaaatggacaaagacagtgagtgagtgggattggcataggacaaatggacaatgaaagtgagtaagtgggattggcaagggacaaatggacaaagacagtgagtgagtgggattggcaagggacaaatggacaaagacagtgagtgagtgggattggcaagggacaaatggacaaagacagtgagtgagtgggattggcaagggacaaatggacaaagacagtgagtgagtgggattggcaagggacaaatggcataggacaaatggacaaagacagtgagtgagtgcgattggcaagggacaaatggacaaagacagtgagtaagtgggattggcaagggacaaatggacaatgaaagtgagtaagtgggattggcaagggacaaatggacaatgatagtgagtaagtgcgatcggcaagggacaaatggacaaagacagtgagtaagtgtgattgcaagggacaa

SEQ ID NO: 35276 - DNA, 948 bp, Heterodera glycines
aaaaaaatactttacaaaataattcccctgggagaagggagtgggaaacatgatttcaaaattttcaatttttttatagtttaatctactcaaaacggttcagaattcaataaaaataacattcacggtgcgaaaaatggggtttgacaagtttattggggaaaaaaagactttacaaaataatacccctgggagaagggagtgggaaacatgatttcaaaattttcaattttttctagtctaatctactcaaaccggttcagaattcaataaaaataacattcacggtgcgaaaaatggggtttgaaaagtttattttgaaaaaaagactacaaaataatacccctgggagaagggagtgggaaacatgatttcaaaattttcaattttttctagtctaatctactcaaaacggttcagaattcgataaaaataacattcacggtgcgaaaaatggggtttgaaaagtttattggggaaaaaaagactttacaaaataatacccctgggagaagggagtgggaaacatgatttcaaaattttcaattttttctagtctaatctactcaaaacggttcagaattcgataaaaataacattcacggtgcgaaaaatggggtttgaaaagtttattggggaaaaaaagactttacaaaataatacccctgggagaagggagtgggaaatgaaaaaatcgatttttttgttttcggggcagtccccccgaaccgatgcgcccagatttatggggagaccgaatccttccggaatagcttccctatagcctgtactttaattctgcgttggatttttgctccccgataattgtttgagtaccccaaacggacacttgaaaaaatcaatttttaaattttcggggcagtccccccgaaccgatgcgcccagataaaggggagaccgaatcctgcgggaatagcttcctctata

SEQ ID NO: 35277 - DNA, 1188 bp, Heterodera glycines
  unsure (1)..(1188): unsure at all n locations
tttatttattttaaaaaatatgtgaatcttaaaagataaataatcattntatgtagaaatacataagacnatagatacattaatatttaaaaaaatattaagatataaattagagcgcgacatttgggggagaaaaaccgtcaaatcttttttaaggaatagttgaaaattttttccaaattgtcaacgggttcattgtaaaaatattccatttatattttaaaaaattctatttccaacaataatatttctaattaaaaaattatttatttggttgttgaaaaatagggatggttttgaagaaatgcttaaattttttgcatgttgagctttaataagcatgaaaaacctatttcgaacttggttttaggtttctaggccaagtctttgtgttgaccgaatgtaaaacggaaattatccccttaaattttatacagttttctaatttttgttataatttaataaattccaaatacgatctcttatttttgtcttattttttcgaaaaaaacccgtgaattaaattttttgttaattaaaaaaaattaacgttgaaaacccttggctgcattaaagcccccagcatcattaatttttcaatttatgaataaaataaattattaactgcttaatgatacctaatttttgcatggccacgatttgtttgattgctttttcgtataagtcaaataaatttttattaaacattttattagcacaaaatttttcctgccattcattttcccatttttccgtttcattttcctttttttccaatttttcaatttcattttttgcttttattatgttaaaaatatagtcctgcaaaactgtaatcattagttcgaatttgtcagttgagtaatgtccaaattgtgagcttttcacttcactttccctttttggcgtttccttttccgaatttggtgaatttttgccaattttatccatttcattttctttacatttgccaattagtctaagctgaggctcttccataaaagctaagcccttttcaatgaattggttgttagaagggcttaagtattaattaacgagaatttatattttgtaatattttntattaattaaattaaatttttttaattattttctttactcaatgaaaattcgatcagctcattcagcaccaaatataatttctccaacaaaaattgagtccttcaa

SEQ ID NO: 35278 - DNA, 923 bp, Heterodera glycines
gggtatattcctttccacaacaaacaacgcataaataaatcggcactttgttcttagacacccccagcaaaaataatgctccgccgaaaggtacaaagtgcaaagatcaatcagtccaaagaatgaaagggacggcggcggtcaatggaaaatgaatgaatgaccggcacggcattcaattcggcatcgttggacatttgttatggcaaattgaaacttccgttcattctttggccatttgccattgcttttttggtccttttgccattttttctttaattgttcttcactaattcgctcaattagttgtgtaatcgcaaataaaacacaaaatttcgttttctcattttctttccttttttgtttgaatttgctcaaacgaaacgcaatttccaaatgaccttttttgtctttctttctcccccccccctccctcttttgcccccattctcacataattttggattatgtggtttagtcacccacaattagaacactcttcccccccccctccgtttgtccctctctctctctctctctctctctctctccctctctctccctctctctctctccctctctctctctccccctctctctctctctctctctctctcttacccttatcctctccactcttttgcttacgctctctctctttttttgtacgttatgcctcccccccccatccaacgacctggctttttctccgatgaatcatcccccccattcgtttcctttttctttcttttggctttaccccccccccgcttttcctccctcttctgtcccgcatatttctcttacttcgctgttggtgatgataaacaacaatcgatacacacacacatcacaaaaataacagcatatgaatgaacacggtctgctgttctgtgctgtttttccctcacaacgccgggggg

SEQ ID NO: 35279 - DNA, 890 bp, Heterodera glycines
  unsure (1)..(890): unsure at all n locations
gacccattcaaaatcaaaataccaccagacactttttatgggcttcgaaaactttattattttataggaagtatgttagagtgcctgaatacagcaagccaaataaaaattatcaatgacaaaaattcaattatccattttaattttgtttttgggcttaagcgcgccaccgtttggggattctttactgataattcgaacgcgttggcctcgcgttttcggtgttcatttcaaatggtgcaattaaatgctccttctgtggtaagttgaaatacgatttaatgagagaaataaattattttaattaattttccatttaaaggaatgggacgtcgctttggtcactttcgctgaccgttcattgttgagaaacagttggaatgctctttccaatgcgattcatacagctttaattcgggtaggtacatataaataaaatgtttttcaataattatttccaaatgatcattactagggctgtaaattttaggcaagaaaaatcgtgaaacattatttaaataggtacaagaaagacaaaatatgtaggtattaaacaggtacaaaaattccaaaaaatgtattaaacaaagttttattaacgatttttttagtctaaaaagcaaataaaaaggttaaattttggttcttttactgtgttaaacgaataatttaaatattttcttagaaaatttaatatttttaaattaaaatttgtcaagaaaaaaataataatttgtgtggatgaattttccagaattccaattcttggggtgtatttattgaagttttttcatgtcgattcttagtcatcgtaaaagcccctaaccaactggaatatacttctttcttgcttatcttgcgtnaagccctagtcattnggaactgctttc

SEQ ID NO: 35280 - DNA, 931 bp, Heterodera glycines
tttccaaaatttcacgatcaaatgcgctgagaaataattccagaacaattagtatcggcgtcattatgctgagaatgcggtggaaattcccttgactgtagaccagaaaaagagatagccatttttccaaaattttcacgatcaaatgcgctgagaaaaaaattccagaacaattagtatcggcgtcattatgctgagagtgcggttggaattcccttgactgtagaccagaaaaagagaaagccatttttccaaaattttcacgatcaaatgcgctgagaaaaaaattccagaacaattagtatcggcgtcattatgctgagaatgcggttggaattcccttgactgtagaccagaaaaagagatagccatttttccaaatttttcacgatcaaatgcgctgagaaaaaaattccagaacaattagtatcggcgtcattatgctgagaatgcggttggaattcccttgactgtagaccagaaaaagagatagccatttttccaaaattttcacgatcaaatgcgctgagaaaaaattccagaacaattagtatcggcgtcattatgctgagaatgcggttggaattcccttgactgtagaccagaaaaagagatagccatttttccaaaattttcacgatcaaatgcgctgagaaaaaaattccagaacaattagtatcggcgtcattatgctgagagtgcggttggaattcccttgactgtagaccagaaaaagagatagccatttttccaaaattttcacgatcaaatgcgctgagaaaaaaattccagaacaattagtatcggcgtcattatgctgagaatgcggttggaattcccttgactgtagaccagaaaaagagatagccattttccaaaattttcacgatcaaatgcgctgagaaaataattccagaacaattagtatcgg

SEQ ID NO: 35281 - DNA, 373 bp, Heterodera glycines
cttaaaaataataaaaatatttttaaataaataaatgatcgccttggatgggattttacaaaatctttttcaattaatcacttttttcattcataattcacaattccatcagttcacggctttagggcaattcgttttggctttctttcaacaatttgccatggaattcttcaaatttctctgttcgatttccctccattcatttgccccccccctttccctctcagctgttggcttttccttctgtgctgttttttcattcttttgcatgcgactcttttcttttctgcgcaaatccctcgaggggatggattttcggattggaagaaaggctttaacggccttggagggactgggggaggggggggggggg

SEQ ID NO: 35282 - DNA, 1189 bp, Heterodera glycines
ctgccaagcatccttcattttaccatctgcttaaacatttaaagaaaaaataataaaataaaattttgtgttaatatagcaataacttatttggaaaattttggctttatccaattatccatcatgaatcgcaataacaaaagcacgacttgaacgggtttaaacagcttttattgcgcttttaccgcagaatggggaaatgcttttcatcgctaaagcgtcatcacaatttgcaagccgatgatagttcagtgaaggagttccaacatttttcaaagggtttcaagcagcaggccgggacttcatcaacaattgcccaacacaatgctgcatttaggcataaaaacgggaattaacattgcatttaaaaacaagcatttagatcaaactcaaaattggcaatgcaaacttctttttcatctattggaaatgcacgatactgtcgcaatcagcaaaaattgtcaaatgatatgtcaaattgtaaaaatttgcagagaaatggagcaaaaaatgcatactgtatttttttgggtttaataaccaacaaaataagcaatcaaaatgaattttgacttcagctgagggagtgtccacttcattccaagccattcaaaaacttgttgcaatgttcgcatacgaatctcggtctgacgaagaattggagtttcaggcatgcaaaatttggacaaaacaatgattattaccaatgatggtctttattcagaaaggcgacatcatgtatttaatggaaaactcgtaaattgcaaattttcacaaaaattggcatttttgtgtttctattaagcaaccttgactggtggtatgtcagaaacatgaagggtaaacagggatttgtgccgagttcctttgtcgcatttgtgaaaacgccgcaagcggaggaatggtttgctggtcgaattccgcgcactgttgctgaacgattggtggtggacaaccattttccgcccggaacttttttggtccgcgaacgggaggtggaccaactggaatacgcattgaccatccgtgacatggacactggacatgggccatgcgtgaagcattacagagtcagacagaccgatgatgcccaaggctacttcataagccataaagcggtgttcaaatcgttggatgcgttggttaaatattattcaggtccaaatttattttttcgtgttactttact

SEQ ID NO: 35283 - DNA, 718 bp, Heterodera glycines
gactggttgtcgacactgggtgaatatgttactaatttacttccctaacgaattacaattttcagtcgttgttcaccccaaacgctccgagttcttccttaacagtcacgtggcgatcaagggcactgcttgtacgccacattacactgttctgcgggacgagaacaatatgtcgatggacacacttcaaacaatggtccattacctctgctttgggcatcaaattgtcacgaagccgacctcattgccctcgccggtgtacatcgccaatgaatatgtgagtcaattcgaataacaataaaaaactacataaataattgaaatcatttaggcgaaacgtggtcgagacatctactcatactacgccaagaacggtattgacaatttggagctcttcgcaaagaggaaaggggtggaatggccgctgcgcactcatgatgacatgaccaaagtcctttctttcctcaacaccaaagacctgagggagctgcgcatcaacgcctgataagttagtgatggatggattatgatgctggtttttgctttccatttgattgttcaactcccctcacctttgcctcttcaattcgtgcatttgctttcgtttcttttggtctttctttgtgcattctcttcttttttggaatgattttttccttctccgtttcattgtaccaatccttttgttgtttattatattctgagctttaataaattg

SEQ ID NO: 35284 - DNA, 932 bp, Heterodera glycines
aacaggaagcagccctggagggacgactcaaggcagatatgtatgcgtatggcattatgcttatcgctggatatggtgctttgatttttgctggagcgggattaatcctcgcgcttgctgcgttggtgatcccagttgtcaaccgtatgtggaagctcgagaatgagtcttcgcgacaacgggatgtgctcaatgcactcaaaagtcaagtggacaacaatcagtccgaatgcgacaaattgaactttgaagtttttaaattgaacaaaaagtgtgcacacttgcccagtgactagtgtaatattggtgctacattttttagaaaaatatttcgctttttatctgaataaagttgttacattaaaactttaacgatttattgccgattgtaccctttctctaaaaaattattattttttcgaacgagaacaaccctattttaaccatatgacataattagcaacagcgttttgggtagatgtgaaagtattgtcatttttagggctacgatttttaggctctaaaaacaccaaaaataggcactaaaaaccctcatttttaggggtataaaatgacaaaattcattcaaaaaggtaaaaaaaaaaagttaaatcagtatcgagtcacattattttttaaattcaaaaatttgtctacaaaaaatttttaaagacgatttttgagaacatctttcacttcttaggaggtttattttcagaaaattttgggtcggttcttaggggtgtatttttaaaattcccaaaaaatcgcttcttaggggtgtatttttcgtttttattgcatttttgttaacaaattttggccaaaacgccaaaataggctctttcaaaattttttaggcgctaaaaataaaagcctagaaaataggtactaataactcgaaaagtagcttaacaacagcccaaaaaaac

SEQ ID NO: 35285 - DNA, 1007 bp, Heterodera glycines
aaaaaaaaaagttataataaaaaaactgaggctggcgccaaaacgtcggcgccaaaacgacccagtcccatctttaggggtgtatttttcccgaaacttcgggtaaattacccgaatacgaagctcgaagtttcgcccgtccctgatcggcaccgccggaccccaaaaactcctattttccacaaaaaaagaaaccaacattttgtcatttttttgacaaaatttggtaacaaaattcataaaaaattccataaaaatttcccgacggcgcctgtcggcaccgccgccggaccccctgtttcaaaaaagttttttggcaaaactgcgccgaaaaaatactgatttgaaaattttcagttgggagccctgtgttttacgctaataaaatatcgttttaagatgatttttcatattttttaatgcgttttcttagccgctacaaacatctgaattttagtaggtcgtgaatttaaaaaaaaacttgggaactcttccgacaattggcccgaggattgacctattaatttatcgttttttttatttgattggctgtcaaatagtcactttttggttagattatgcagaggaatctcaacaataaattaaacgcctatttatcagtttttctattggaaataattaaaaaattattaatttttttaattgtgcgaatttttcataacgaattaaaaaaagtaaatttattttttttatatttttgctgttttaaaggcccaaatttccatgaaatttttaattgacgattttgttttgcctcaaattaggaaattgttttaattaatgattaattgaaaagcattgttgaaaataaatgaatgtttcgacacagaaataagaaataaatgttggaatgattcatttaatttgtgtttaaaataaatgtgaaatgttaaaaacattgcttacatttcgctcattttttgtttgtttgtaatggtttcgccaaaagtgtaataaaacattttttattagtaatcatcctttta

SEQ ID NO: 35286 - DNA, 1316 bp, Heterodera glycines
  unsure (1)..(1316): unsure at all n locations
gggattaagttaagcttatggagggtgaaacgatgcttggccatactatctgtcgttttctcacacacaaacaaaaatgattcttacacaactgatgccccaatacccgtgatcaaagctgaaaaatgtttctcacgagatttaattgaagcagaacaagtcgatagagaacaaaggaaagaacatttgaagtgtgagtcagaaggcaaagtcatttggcgtcaaggcttatcaaaggtacgagaaactgacttaaaaaacgatacagatccgttggatgaaaattcgatttcgaataattatccttcatggatattagttcgtcgtgcttacaaccgaaagaggcaacagcaacaacgcaccgattctaatgacccttttgatgtccccgaaagaatataattaacgaaattaggatcactcaaactattaatgagaaaaacaattgttggcactgaatggatgatatataaaaatcgtgatattggaattatgctttttgcatcaaaaattcaattagaagctgctaaaaattgcaaagtaatggtagcagacgctacatttgagatagcgcctagaggatttagacaaatatggcttattcatggactggtaaaaatcaaaataactttgtgcattaaaaattactaaataatttaaagacgtatggtgctatttatatgcgctgcctttgctacacatccaaacagaattacaaaggctgtggagagaatatatcaaacagaaagaagaaatagctaaatttataaatacattaggggtgccgggtctactaaaaatcaaatgcagcgaaatagtcgcaccttaaaaaaaatttgaatttgattaggatttaaaagaaaatttaaacgaattcttcgttactttgaaaaagaatggattaaaaattgatacaaggagggtgtggaagttcaanggaatcaagaacccgaaacacaaatccagcagtagcttggcattctgtcatttaaagttaaatgaagaaaataaaatttaaaaaaggtcaaagtttagtgataataaaataatagacctcgttgacgtttttaaatttgtacaaatttggacatactttttaagcaatttagttatcaacataaatagataatcagattggaagctttttataatgtcaaacctaaaaatatagctttaaatgtaaagcatactgaaatataagtccgatcgatatccgtcgctatcctttatttagtgtgtttttcaaaacttaaattaaaaattcaactcggaataaagagtataatgtgttttcctagaatgatgtataaaattaa

SEQ ID NO: 35287 - DNA, 1052 bp, Heterodera glycines
  unsure (1)..(1052): unsure at all n locations
gtaaagtccacccaacttcctccactcgtttttaaatgtcaatcttttcagggttttttattatgcctccgagtaattttaaattttcattttaaaaattcttcgtgtataatgtagtgtaaatgttcagcggataaaattacctaggaagacaagaaaaaataaataagttcctttattttaatgattttcccattaataaattcctcttcaaaaggaaggtaattcaaatgtcttaaagccttaaacgtggcgttacaacagattttgttacctgtctgaaaatatagctaatcagcggttcgtccattttgggctgatgatcgatgaattcgaataggtccatgccacagccgcacttttccatcaccagctgataatacttgtcgttttcaaacacgccgagcacccgcacaatatttggatggctcagattctccagcagatggacttcaattggcaccattttgttcgctcttttcgggcactgaatccaactttctggcaacactttgtccttgcaaataaacttcgatactgccataagtccagtgcctttttgagtggccaatttcactgaaccaaaagttccgtttccaatttgttgaaaactgaaacggaatttgaaagttactctgttggatagtgcctataattagtctcttacgtgtggtagcatttggagtactctcctcgtaccgtttcgtcgttttcgtctccgagtgcattcaccggcacttcctgcattttaagctcaattccatgtggagcttgttcttttgggttccgtcgttcactcattgcaaaagcaatggccgattcagactcgaaaatgttcaatccgccgatagaaaagcgtgccattcgttcccgcattgatttcttttttggcggtgaagcaccgatggcagtgacacctccgttttcgaatattttgttgaccgtanagatggaatttgctgtgacagcaatcactctgttgttattagggcgtcggagntttgctcgttgtcctcctcttggtagcccgcctcctcactcagagtctcaaa

SEQ ID NO: 35288 - DNA, 930 bp, Heterodera glycines
tttctaatcccgaattaattggagaaaatcttctgagactcagacaaagaacctaagtgaaactaagatactaggattaaatgcaacaaattattgtactatcttaaccaacttcattaaattccctatttttcatatggcgtcgcccaatatttgccacaaaaatgttgtctgatctttgaaaatttttgcctgctttttttgccggctttttggctttttgagatgatagtccccaagacttgacactctcaagcatcattaatcacccagcacccaaagaatggcaccaccaatttgcatattacatgaagaaattccgctgttggggatttccatttcggtgaacacaatcgtacgtgccatcggaatgtgcagcttttcgttgcccaagtttaatccaggggcgccaaatgtgcactcgcacgagtaattgccgccgcctctgttcatggtccaatcagccgaaattttggcacaatccgtgtctttcgcacaatcccaagacaaatagctgaccatgtctacaagttatttgaacaagaaaatgcattaattttaatgaattttttaaataatattttaataaattaattattttaattaaaaattttttttgaaaagaataaaaagtcatttctagaaaatctttcattaacttaaattttgagtttagttagttttttttgaaaaaaaaatatttacaaaaaattattgacaatcatacgcattttagtaccaaatttgggtcttttaagcgaggtcaaataacgcattccaatgtcattaccggttttacagtttgccaagtagcaaaactgttggcctttgtcgcattctttgtcctcaagcgagccgtatccatcttcgtcataagtaccacgcatgcaaatcaaagcttttatttttttaattacataaattacggtc

SEQ ID NO: 35289 - DNA, 737 bp, Heterodera glycines
ccgacgacgaacgtcttcgcatcgccacagcttactcactgattgaccggcttcaagtggctcagcggcattggcaacccgagcggctggtggtttctctcgcttccattcacgaacgattgagcgaaggtgccaatgccacagcgcaggagcacggtcgatgcaatgcggcatggctaccttactgcaaacccagcaaaggcgcgctgctggtatgtcgagatggatcggagcttgctgaagagcagctcaatctcatcggcaatgggcgaacgatcagcgagatcatctcctggcaatggaaatccgatcacacactggtcttcacaccggttagcgtctgctacccgctcagcaacctccaagtccgacagtttgacctgctggtggatgctctcatctccaattacccacgtctcatccttcgaccacatcctgctgacttgttgctcgtcaagtccgacgtggacgtggaattccacatcaaggagcagccgggtcattgtgccctcggaattcgtgaatggccattgcccatgcaagcacccaaaacgatccacgtcgccagtcaggtgtcaatgtgggtgaagaaatacgacaagtcagcagtcttcgccaccgccccacagctgtccagcaatgtccagcttttcctgaactgtccgccgcctcgggttacctacggcaccatctacagacagttggcacacgatccagtcccagacagcatacaggag

SEQ ID NO: 35290 - DNA, 924 bp, Heterodera glycines
agtagaaaagagagatttcggagaaaaaggagatgaaagactaaagaagagaagaagctgacacttccccgccaaacggcaccaacaaaaacgaattatgaagtgatcaactcgttaaacttgactttgtgtgtttttaagaacaccgtatgccacatgtgggttaatttttttaaatttaaaattgattcaatttttggcattatgccatctccttgcttgttggttcactaaatacaaattatggtttacataaagggagggaacggacagggagaacaaatgagtgcattttatcattacagtattgttttggcttctgtagaaatgaatggaggtggcagcaacaacagttttctctgtgtaatttttgactgtaatgcgtataattggggctgtgtggtcgctgaacgcggtgtgtctacgcttaacgaaactgtctccgcactaattgctctttgcaatgcgcataatttctcctcgctcggaaatcgtcttttgctactcgcaaaaggagccaagcaacaagaaaagaaattgttcaccaacgaacgaattactgcgaaagaattgacaaattttgggccggccattgaaggaattattcatcaaattttggctaagaatgtttctgctgaagaaagccctttcaatttgtccagtgcattgtctttgagtatttgcggtatgttaatgagattacatcatgcatttacctaatttttttttttggcgttaggggccaattaatattagctcattttaaacacaaccactaattttagcattccaaaggttcaagaagcaatttccctcttcatttgggcatgttgtcttcataaacctttcggaacaatttacttctgagcaaaatgccctgctgaatttgtttttcgctctcgtcagtactctctgcactttcat

SEQ ID NO: 35291 - DNA, 744 bp, Heterodera glycines
tgtgattggggattctgaggcatcattttgagggggggggccaagttcgaagccgggcggtgtacattatttttctttgtatttttacgttattttcaatgattttaattaatttaaaatattttgttgagttaataaataaaaaattatatttaatttttttttgataaataaattttataagtttaaattaattatttttttaattgatagaatttcatgtatttttttaattaaatttgttaaaaaatattttcattttaatttaatgaatttaataatcactgttgcacctcttctaatcactgttgtgcccctaaaaaacgggcgcgaagcgcccgtctggccccaactaaatttaaaaaacgggcgcgaagcgcccgtacgaggccgcgagcggcctaaaaatcaccaaattaaaaaacgggcgcgaagcgcccgtctggcccaaacaaatttaaaaaacgggcgcgaagcgcccgtctggtccaaacaaatttaaaaaacggtcgcgaagcgcccgtctggtccaaacaaatttaaaaaacggtcgcgaagcgcccgtacgaggccgcgagcggcctaaaaatcaccaaattaaaaaacgggcgcgaagcgcccgtctggcccaaacaaatttaaaaaacgggcgcgaagcgccagtctggcccaaacaaatttaaaacacggccgcgaagcgcccgtctggtcacaacaaattgaaaaacggtcgcgaagcgcccg

SEQ ID NO: 35292 - DNA, 967 bp, Heterodera glycines
ccgaatggcgaagaatgtccacgaaaattgtcgcaattcgctcatcgacgttcaaaattaagttgggcttctaaacaaattttctgatgaggagggcgtctgggtttgctgtcactttcgaagttgtgatttgctccactttgagtgcgtagtcaaaaagaggcgtctcctgtttgaagaaggtcttgttcttcgctatctctttcagtatttccactcttttgtccgggttgtttatctgaacaatcgccgccatttctttcgtcgctgtgcccccccccccccccagtctcaccgattttactctgtgcccaatccccggaatgagtttgcccagccgcttctgctcattcacaaattgcatggcactcagtcccgtgtccattgcttcactgaaactcttcgcggccccgtccaaagcaccgccaaaacggtcaccctgaaaatgtcaattgtaaatccgtcactgttttcagcctcctctacttttacgacaacccggtgctaggacattcctaaattccgacatgggataataaaataaaataaaattgcttaaagtcaaccaaattaaacaaattggtatcattattctcaatagcttttattttcatcagaatattaatttcaaaaatagagatttcagaatttcattcgaatgataccaaagcgttaaatttggttgattaaaagaattttataatctctttttattatcccatggcggattttcaaatggtcagcccactgccccacactcacaatggtcaataatccggaaaccagcgacgagatcaagtccttgccagcccttgcacaaacatttgtattgtgggcaccgctaacggcgggcccgtggtcggcggtagcatcaaacaatttcgaaaaacgatttgcatattcgggcaatcgttttctgaaaatgaagggtcgagagagtagaaaggaagggaaggcgacttggaac

SEQ ID NO: 35293 - DNA, 1105 bp, Heterodera glycines
  unsure (1)..(1105): unsure at all n locations
tgcaaattttccatatacgagaaaattttttcgatctgtttttcgagtagaggccataaaaaccccgacaagaacgaacattgggagcataaaagaagcgaagatggacagacagagggcaacccgaatgataaaagtcaaaacagtcaactcttttgcgttactggaaaaagaaatttgctatacaatgatgcacaaaacttcacttacttaacacattcaagatgttccaaaacagtagattgaatttcttctccataagcacaatagccgagaaaaccgacaattgcgtaaacgatagtcgaaatagcgataccaccggacaaaacgccaaagggtcccaacatttgactgggctttttgattcgcttctccaaaggaagcacctaaaaataaccgaagatattgacaattttacaaacattatgacatcgtaccaatgactgggcaaggcaagagacaatgatggtaccactcgctttgaaaaagccttctgcggatggcagggcaaacggaatggaatgggctctttccgtgaatacaatttgggacagcatctgaaagagtgaaaagaaaagaattgacaaaacatcagcacaaacaaagagaatgagtgtcaaactggtgatcgtcaacccatctccgacaaggcacataactgagaggatacgcatggacataatggaattctgaaaaggtgttaaagtgcacagcaattaacaaatgactcatccacttacgagagcgacaatcggaagcaatatgaagagaaaccatcttgggtcttttcccttgggctcattgtcagctttttctttatcaaagacctgcaaaaagtttttgttttgataaacgcaatacaaacacagcaaccgtttgaaaggtcgatgcaatgaacagatagtacatgatacataagccgaattggtggacgattatgattatgttgacaatgttccttgaaaatggcaaggattcatgaaaagagaatggcacaaactttgccaatggtccataatttttgatccatccaaaactgactntgcacgattgttccgccaaatcgccgaaggtcagaaacggaattttgaggctaaattanaaa

SEQ ID NO: 35294 - DNA, 885 bp, Heterodera glycines
attccggaaggattcgagtctccccataaatctggggctcatcggttcggggggactgccccgaaaacaaaaaaatcgattttttcaagtgtccgtttggggtactcaaacaattatggggagcaaaaatccaacgcagaattaaagtacaggctatagggaagctattccggaaggattcggtctccccataaatctgggcgcatcggctcggggggactgccccgaaaacaaaaaaatcgattttttcaagtgtccgtttggggtactcaaacaattatggggagcaaaaatccaacgcagaattaaagtacaggctatagggaagctattccggaaggattcggtctccccataaatctgggcgcatcggctcggggggactgccccgaaaacaaaaaaatcgattttttcaagtgtccgtttggggtactcaaacaattatggggagcaaaaatccaacgcagaattaaagtacaggctatagggaagctattcccgaaggattcggtctccccataaatctgggcgcatcggttcggggggactgccccgaaaacaaaaaaatcgattttttcaagtgtccgtttggggtactcaaacaattatggggagcaaaaatccaacgcagaattaaagtacaggctatagggaagctattcccgaaggattcggtctccccataaatctgggcgcatcggttcggggggactgccccgaaaacaaaaataaatcgattttttcaagtgtccgtttggggtactcaaacaattatggggagcaaaaatccaacgcagaattagagtacaggctatagtgaagctattccggaaggattcggtctccccataaatctgggcgcatcggttcagggggactgccccg

SEQ ID NO: 35295 - DNA, 914 bp, Heterodera glycines
attaaatatgtttgcctcagatggcaaactaaaacatttaatgaatttttcattatttttatggggcatcagggctgtatctaaggccgaaaaaagcccatatcccgattacctttgtggcacacaactgaattgacctcctaaatttaaaagtttactaggtaaaattatttatgaaaaatagctataaaaatgccataaaaattattaatttatttatttattttatttttatctttgttttctgctatgacatttggcttaaagatgatatttatctgcttattctgatgacactggtaatcacagaaaaggccattaccacaattattcatttctcatttcacattctttgctgcagtttgggagaaaattcatttacataatttggtgcaaaaatgacataatgcaagagaacattgaaggaattttgaaaaataatattaaaaataaagacaaaaatgtttttaaataataaaaataaagacaattaaaaggtttaaagagattaagcctcggcagcccatgcgggtgtcaagaatctcggagattgcgaatttcggggatggaatcagattagcggtcgaacccgtcaattttcttagggaaccgaccgagccaaatatgatgtacccacaatttgttagtaaatttattttttaggcagttcatcgaaaattaattttaaaaaattaattcaaattaaatttttcgaataaaaaaaataattttaaattttaaattgatcaaagggcggcttcactaataaagcttcattaactctcattatccatctcaacaaataccttttctcccttttgatcaatgcaatgagcgatcaattaacaaagtcatcacaaaaatgggattccttttaaggagattaattccatcttaatgtgatctagattttc

SEQ ID NO: 35296 - DNA, 860 bp, Heterodera glycines
attttaatgtttcactcaccataagggaggtgagcaccttcgaagtgatcgaagcggacactgtgccggaaaggacgacgcaaactgatcgggcaaagtcgaactgaatgagccgagaatttaaattcgatttggtttttgatcaaatcgtttaaagttataaacttggattagcaaaaagatataaaattcagcttagaaatcaaaggatatcctagaaaaattgatccgacaattttatttttcaaattaaccggattaccaattttggaactgatcgaagaaatttatacttttgtaattgattcggactcccattttagaactgatagtacaaacaaagcctgttcaacttattgggcagccgggtgtcatgataactcgtacaatgccctaggctaggcctaagctttaggctaggtctaagtttcggctttcttgggcctagacttaggcttaagcttaggggctttattttgtaattttttattgtatgagtttcttttgtatgaggtgcaattgtacgggtttcctttatacgacttgtcattgactctaaatccgattctggacatgttttaaattatataatattgatcaccgaattgccgtcaacccaatgggtgccaaccgccaacaccgaggcgatcagtgccaccacaatggcctgcgtttggaccagcgcaacatttgagtacagagtggtcagctgctgctggggctgatccagcaagccaaggttggcccgggtggacagccgcgaggccaacgtcatctccaaattgcctttgaggccgagcaaagcgggcaccaggatcaacgcctccggcacctcggacaggaagagccaacccgaggct

SEQ ID NO: 35297 - DNA, 1160 bp, Heterodera glycines
taacttttgctctaaaaagaccaaatttttaatccttgctcttattcgatagatctaaatgttctttatgagcctgtaaaatttcaaaaaattttattaagtttaaaaaaagttatggccaaaaatgttcgaaaatcacgtttttttgagttccccgagctataacttttttgaaacttaacgaaattttttgaaattttgcagactgatagagaacacttagtgctatcaaatgatatcaagaattaaaaatttggttgctttcgagcaaaattataaataatttttcgacaaaatttttcataatgatggttttttaagtaacgacccagcaccaatttaagcaaatgggcaaatttgtcaaattcataaaattctgctgatggataattataattcattgcattcctccgagcgtgtcactatctgaatattaattggcttttgaagtgcatttttctgctgaaagcccaatattatgtataaatcatcatcactttttcctttttcttctatttataaaaatcactttgaaattgtcacttttattttacattaaaaaataattttaattatttttttttttttgcttaattctgatcattcacagagatgactttcctagcccattttatcgtttcgcttttgctgattgttccgtcattcattccaaatgtttttggagaggagtattctttttaaatagtatcaataattatcatcaaattagtccaaaacagattgattagcgtcaaatattttgaaaataaaaccattagttacaaaaaaaaaccgaataaaaacgtgaaaatttcgctaattttccattggttttttcagctgctgtaccaaatgttacaattccatgacgggctgtcttcagaagtgcatcattgagcacaagggggacccggcctgtcgcaagacttgcaagcccaatgtgtacaaatgcgctgccaaatgcgggccccactgtccgctaaattggacgacgacgacgccgaagagcggctaatggggcgagggacgatcaaagaaaaagccattcattcattagcgagttaattaatgagttgattaaccattatttgtgcaaagctgttgttgatccgaaaaagtcatgaaataaaatgcttgtttaaatgtgtagtaattcgtac

SEQ ID NO: 35298 - DNA, 1140 bp, Heterodera glycines
  unsure (1)..(1140): unsure at all n locations
aaatttctcaaagttaagagatagtcatttttctttgatataaagataaaattaaaaaatcttctgagaaattaaatggcgattgcgcaccggccctcccctctcacgctcgagcgcttttgtaacttataaaatttctcaaaataagagatagtcattnntcttggatataagataaattaaaaaattctctgagaaattaaatggcgattgcgcaccgcacttcctatcatgctcgagagcatttgtaacgtataaaatttctcaaaataagagatagtcaatttcttggatataagataaatttaaaaattctctgagaaattaaatggcgattgcgcaccgccctccctctcacgctcgagcgcttttgtaacgtataaaatttctcaaaagaagagatagtcaattttcttggatataagataaatttaaaaattctctgagaaattaaatggcgattgcgcaccgcactccctatcatgctcgagagcatttgtaacgtataaaatttctcaaaataagagatagtcatttttcttggatataagataaatttaaaaattctctgagaaattaaatggcgattgcgcaccgccccccctatcacgctcgagagcatttgtaacgtataaaatttctcaaaataagagatagtcatttttcttggatataagataaatttaaaaattctctgtgaaattaaatggcgattgcgcgccgcacttcctatcacgctcgagagcatttgtaacgtataaaatttctcaaaataagagatagtcatttttcttggatataagataaatttaaaaattctctgagaaattaaatggcgattgcgcaccgccctccctctcacgctcgagcgcttttgtaacgtataaaatttctcaaaagaagagatagtcatttttcttggatataagataaatttaaaaattctctgagaaattaaatggcgattgcgcaccgcccctcctatcatgctcgagagcatttgtaacgtataaaatttctcaaaataagagatagtcatttttcttggatataagataaatttaaaaattctctgagaaataaatggcgattgcgcaccgcccctcctatcatgctcgagagcatttgtaacgtataaaa

SEQ ID NO: 35299 - DNA, 1417 bp, Heterodera glycines
tcatcatcattgctgcctttcttcctcctccttctcctcctcccgccgatggtccttatccgtattattattgttgtgtttttgtgctgtgcttctccaactcgttgcactccctcacaatttctgcataaatttgttctttgctcaatgtttttaatgctttgttgttgttgctttcgtcactgtcgttgttgttgtcgttattgtgctgctgcttctgttgttgttgctctttttgcctgtgctgctcgctgtcgttgtcgtcgtcgtcgtcgtcattaatttgtgccgcagcgcgctcaacgaattggagctggtcactgaactgttggccaagctgagtggtcggtgaacacgcaggtgttttctgaccttttgctaatgctgctgctgcagatgacgactcatcgtaagcagtggtcaaacagtcaaattcctatcagggacaaacgaaagccaaaaaacagattgatcaagcaaccattttaatggagaaaaattgccatggaatttaagttcaatgaaatcatattggattttgtgtcctgtgtgtccaattagcaagtgatgctcgagaccgaaaatttccagaaactcgagactctctagcatcactgcgattagcggaggcgggggaggatggggaagcaaatttaaaaaaataatttttgaaagagacggcgagcaagcatgcgaaaaaataataggacagacaattaggagatcgaagagacatgccctcctcccaactaatgggacactaatatacatagcacaaaatattaacatgtaaaataatatatttacatactgtttgttggtccctgaaagataggccaaagattcgattagaagagcagggttgtcgagactcgtctgctgatttgagtgggaattttatagatcgaaaatttgaaatctgcagggcatagaccgggctgtggctgacattttcgagaacaataaggttccgagccaggccgttcccaaccctgtcaacaggcgggggattgccgggcactgtacttacagagaaaccttaaactttactggaaccaataaaattggataatattgtttaaattattcctttgcattaaatcagttgttatcgaatggagaaaattaaatttggtactcttctgttatggagccgcatttcaaattttctttcccagattaacaaaataaaaaaatgttttcggcacaaattgattggaattttgtattctcttttcgcttctgctgttgcatttttttaatttgaaattgcatctcataacagaagagggggcttaaattcttatatatttgtttaattaaccaagaagtgtgttgttgttgccctgctgtttctgccggtaattgtactgttactgttgtctttgcctgcttcaatcgatttgctacgccgaaa

SEQ ID NO: 35300 - DNA, 935 bp, Heterodera glycines
  unsure (1)..(935): unsure at all n locations
acagtacgattcgtagatactgtacgagttnggagggttcgtttttacacatgaaaacgagtgcaagttcaggaaagttatatataaatgcttaatttcagctgaagatggcacccaactgtctaatgagcacctccaaaataataccgtatcggccgagtccattaccgtagccaaacaggcgttgggcgagatcatcggctcatccaaaacatcacgagcaaactccgatgccaatcacgcgccagcagcggttgttgttgttgtgaaggaatcaattggcacgcaaaccgcggacgatgaggacgaggtgaaactaattaaatatttatttgatttaaatatatctcttttcattaaatatttatttgttattcgttacatttccgaaagtttttctcggaaaataagtaaaattggcacttttactaaatgccaataatggtcacttattaaaaacaataaattttcgtaaaaatgctggccattttttatttaaaatgatttaaaaatatttaaaattatttttccatatcagaatgacagcacgacggcgtcagcgaaagcaacacagactgatgcgcatgcgttgttggttggacatggcgcgacgagtgccggcagcagtgggctgagtctgatcagccaagaggaggtgcccgatcaaaactattaaccgaaaaaataaacagattaagcacaggaaaaaggcagaaattcgggattactaaacttattagtttaaattggattgaatattttcatttttgaatcatttggtcattggattttttgaagagtgatcaaggctttatcttcaaaatactgatcaattgttgatcggctatccaataattcattgagtattttcaaaatacctgatcaacgccgatcatcatttattattttcaaaatgcctgatccatgctgatctg

SEQ ID NO: 35301 - DNA, 798 bp, Heterodera glycines
aaatgtagagagcggaccggaccgggcccggtaccggtttttaccgggcccggcaaaccggtccggcgttttttggaaaaatccggtttgaccggttttccggtttgaccggtttttgagcggccgggcccggaaaccggtcatttagaaaattccaaaccggtccggaaaccggcattttggaccggtttataccggtttatgatatagccaaaaattcttcatttttatagaatttctgttaataaattgcatcgaaattttcaaaaatttctcggcggcgcctatcggcaccgccggaccctaaaaatccttaattttctttaaaaatttgctcaaaatcgcaaattttttttatttccaaacagaaatttcaaaatcttaaaaaattttccacaaatatctaagaaagaaattttttttctttttatggagaattccttactaggttttcctatactaatgcactttaccaaaaaatttttcaaaaaattctttaaaatttttaatttttttgaattttattattgaagatgtcatttattgacgcctgaagtgaaatagagccgaaattttacatctggcacgatttatggtcaattttgggtgaaatacatgtgaaaatttaaatttttaccaaaccggaaaccggttccgggccctgcaatttgaaaatccggtttcaccggttttccggtttgtccggtttttgagaggccgggcccggaaaccggttgcttctgaaaatatcagaccggtccggtccggcacttttggaaaatccggtctttaataaaa

SEQ ID NO: 35302 - DNA, 879 bp, Heterodera glycines
gaaaaaacatcggtcacttgaaataataaagtccaaaattttgtccaggaaatccggattttttttagcctcgacctgcattttttcatatttggcctggaaaaacccaggtccaatatttaaatttacatgaggggttaactctactgtgtggagaaaaactatgtacatattaaaattttcaaaaattgatcgaagtaaaaatcatcaaagagcgatgaactaaaaaaacgaaatgacatttcaacatcatttatatcaaaaatacgctattaacaagacaaatacatcaatcattgatcagacaaaacgacacattggataatacacaatataataaacaatatgaatatgtctttggaggcgtaaacagaacgattatacaataatacagcaatatatgtgcatgggaaatacatattggagtttcttttcattaaacggcataattcgtgacatcaattcacttaagaaccctccgatgaagatgatgcgtcctctgtgccttcagaagtggcgtccgaagtcccagaactcccctcagattttcgttgtaatgaaaagaaaaagtttttgaaataggaacctaatcccccatattttttttcatcagcattaaaaaaatctaaaaaaattcaggtaagcataactttggatgctgatcaaaaaaggtagcaacaccaagttgatcagatcactccttcatggtgatctgatcagcccattttggctgggaacgaggggtaaattttaaaaaaaatttctagggggttgggaaaatttttctggaaattttgagtaggcccattttatagagcacaaaatttgctaccgaattgcctttggaatagtgggtctaccatttaagcccggtgagat

SEQ ID NO: 35303 - DNA, 975 bp, Heterodera glycines
  unsure (1)..(975): unsure at all n locations
aggtcttaaaaaatgtaaatggattaggggtgcaaattatatgcttcccagttcacgaggtttcgaattaaaaatttttgtgttaatttttaagtttagaaaaatacgaatttttaaaaatttctacgtgaatgaacaatttggaaatttcgcagactaatagccaggtattaaggtatttactgtaaatttgaaattattttgacaacaatttatcgtgaaacttatttagtacatataatttgcatcccaactaatgacatcattcattccacataaaattagccgaattcactaatcaccgaactaattaattataaaatgacatatattcttccttttttatagatagtttttgtttttcttcgttgctcatcaccaataaatccatctgcttctcggcgattgcaagaagggtgatgataaagttacgacactcctccaaattgagacgtaatgaatcaacaaatttgcggtcatattcttccaatgtttcgttgccctcgtgtctttaaaaataaatatttaaaataaattttttaattaaattttattaaggaacgcaatgcatttttatataattaaatatttgatttgtaactgtttttttaacactacacatttttgcaattcataaaaatataacggacggcaaaagcaacaaaatacaactgaagttttggacacctcctcaaaaaatttttttttaattggaaaagtttataaaatttcaaaccacggggatttggacctacgaacccaaccctaatgagttgtttttaattaatgggtgaaaaaatgaattgtgctttaattgtttgcaaatgcatagttaaaataaaaataaatttgtatttcggattatgggcgtatgattaatttggcagtaataaaaaatataaccctttccnattgtgctccantactatgncgtccttatgataagcgcccattttcttnnaaatttttaaatta

SEQ ID NO: 35304 - DNA, 938 bp, Heterodera glycines
  unsure (1)..(938): unsure at all n locations
ttctgtgttttgtctctctcactgttgttagacaccacacatatgtcgtgtatgtacacacatcgccacactttttacacgcacacattaacaaaaacacaacgccatacgccaaacatttttttttatttgctgccgccatctttttgctggcgcattcaaatgttgtggtggtggtgccctcggaaacgacgaaaagaacaaaattaattgcttcccccccccccnnccctccctctccctcaattaattggggagccccgtgggacgttttattccttcctcttgctttgtcctccccccgcccccctccccccggcggacggtggtggttgtagtggcatttttaattgatgagtccaacccatcgccggaggctaacatcgacaagccggcggaacctaagacaccaccgcgtcattcatccatgttcagctgctgcctcatcgccagcctcccgttccccgtcaccgtcggcaaacagtacaacaacagcagcagcaacaaccggcggagaggcttcatttgttgccggaggcggtgttgccatgacatcatcatcatcttcatcattagcattgtctggcagcatggcacaccaagaagatgatggcagccattctgttgctgatgagcaatatcgacagcatgatcatctccatcggcaccagcagcatcggcaacgcgttttgcagccggtgccggctgagagccaagccggaccatcatcatcagcagaacagcagcaacaactggtggcggacagctcatccggcggctactatgagccgcgcggtggttggccgttgcggaccaggacatggccggacgggcgccgagttggaccggacggtacggtgctgaaatggcaaaggttgcggcccaaagttgtgcttccaacaccaccaacgactgcaacaaggacaacaaggccaata

SEQ ID NO: 35305 - DNA, 772 bp, Heterodera glycines
tttagaaccatcgggtaaactctttggattatccaaattcatgttaaaaatttagctttcggatttgagtcaaaaagaaccaacagcatcagtatttttgtattataatgatgccaatttgaacctgataaaacagccaacaaaagataaattaattattttgttttatttctgtgataatctttataaaaaattcattcccttttgaaagttgcaaagaaattctgggggacttattgtggcacctctctattagacacttgtctaatagctcctgtaatctggttttgcaactttaaaaaaagtaacaaattacgaattagcaattttatattcgaaaattaaatcgtataaaatcaaaaaattttcgcctgcagcgtgcatataaacaaataaacttttagccagcagatattcaaatacttactttgttgcaaatgaccgtatcgcgtgtataattaaagatataaataataaatataaagaagaatatcattctccagggaacagattaatatgtttttacatattttttgtgcatatgctatcgcatgaaaaactcaaaaatagcgtttattttacctgttttcaacaatctgagcgagtttatagcacataaaaaaccatcatctaaactattaccggggttggttaccgggaaaataattgagttgctctaagccagttttagtttaaacgatcaaaaacgcaaaacaattgaccttaatgctcctaacttttctcacccattgaaatgtttgcctcttacata

SEQ ID NO: 35306 - DNA, 1126 bp, Heterodera glycines
  unsure (1)..(1126): unsure at all n locations
gttgttttttctgaacgaaatgtttgtaaggaaggggtgaaattgttaaaaattgagtcatcatttgtcagtccctttcacatttctgtgctgtcagcgtggatttttaacagataagcatagctgtgtccccaaaaatggtacgtaatgcgatgtggcggttcttttgctgttgtgtgtgtttattcagcattccttttggaaaacaaacacacacatcgaatgaaaggccgaaaactttgctttgtattaagttttaacattaattctttttttttaatatgtactaatttgatccgattttgttctttttaaggcgccggcaaatcgagattgatgtttggattttttaatatgaacaaaatgccaaattttgttataattatcacgacaattttaaattgcctttgcattcaattttggaaaactttgtcatcgacacaaatgaaactttttatttcagaaaaatgaaagccttgattttggttggaggttatggcactcggcttagaccgctaaccatcacacaacccaaaccgcttgttgagttcgccaacaaaccgatggtaaatgtagcgcagaaaacaattgctgaatgattttaaccatttgtctttttcgggtggtccaccaaatcgaggcattggccgccgtcggcgtggacaccgtcgttttggcagtcaccgctcgcattgaggaccttttggccggagaaatgcgaaaggaggagcaacgcattggcatcagggtgaaaaactgatttcaaaatttcattttgcaatttatgtttaattttagattgttttttctgtagaggatgagccgatgggcaccgccggtcctttggctttggccagcgatttgttgggcgatacggagcccttttttgtgcttaactcggacgtcatctgcacatttccgttcgccgaaatgatgcactatcacagaaaacatgggcgacagggcacaattgcagtcacaaaagttagttatttctacgtttgtgggggatgcaaaaagttgaaatttttggatttgcataaattaactcactgngactaattttttanatttcgaattccacatttactttaggttgacgagccgagtaaatacggcgttgtcg

SEQ ID NO: 35307 - DNA, 955 bp, Heterodera glycines
cagctcggtcattccgcaaacactgattcagtttatattcgcgaaagaatgagctgtaattttgcgaattagacaaaaatgatcataaagtaacaaatgagagattttcacattctgctaattaggctttaaatataaactgtttaagtgtgcagacgatcaggttgataagcgccaataccctcagatttactattttcgcgaccccactttttgaattctgacattttcagctcattacgctctaaatataaacagcatcagtgttccggaaggatcgatttgaaatcgccaataacccccaaattacaatttcctactgtaaacttatacagattacatttggatataagaaattgaaatattgagaatatcacaaaagtgatcatgaaaattgtaaatttgagattattgggacttatcagctcggtcctccgcaaacactgattcagtttatatttagaggataaggagttgaaatggtggaattccaaaaaggtgaccaagaaaattgtaatcgaagattattggcgattatcagctcggtcattccgcaaacactgattcagtttatatttcgcgaagaatgagctgtaattttgcgaattagacaaaaatgatcataaagtaacaaatgagagaatttcacattctgctaattaggctttaaatataagctgtttaagtgttgcagacggatcaggttgataagcgccaataacctcagatttactattttcgcgaccccactttttgaattctgacattttcagctcattacgctctaaatataaacagcatcagtgttccggaaggatcgatttgaaatcgccaataacccccaaattacaatttcctactgtaaacttatacagattacatttggatataagaaattgaaatattgagaatatcacaaaagtgatcatgaaaattgtaaattggagattattgg

SEQ ID NO: 35308 - DNA, 984 bp, Heterodera glycines
  unsure (1)..(984): unsure at all n locations
atgcgggcccatgaaaaaatgcagttttccgggtgccaattttttgtgaattttcattcgggcgcgtcataagcggattgttggtggcaaatgcaacaaattttgtgttatcgaatgcgctaggcgggctcgacatttccaaatgtatcaacaaagggtctatctccactctctggcaaggtatggccagccaaagcagagtggggcataaacaagaattttttaatctttggtatttcctctattttgtgcctgctctacatttatgtcttgtgccaatatgcctattgcaacagaaatttattcagctttcccgacaaattgttgagataattattctagacgatttttttatatctcaatgcttaactatcgcctttttgtttggcaactggtagaaattggcagtgaaaaaaagtttgtttgtaactatttacaataaaaatttatgtagcatttctaaaaaggatgtaaaaataagttcttgcgtaatatttttatattgtgtgttgaagaatttgagtctgcttctgatgcaagtggaaaatttttcagcttttctcgaaaagttttttcccagaaaaaggatgggacaaataaaaaactaaacatctctcatgaccaatttaaatttccttacattttgggtttactttactatgctggcccatgaaaaaatgcagtttttccggtgccaaatttttgtgaattttcattcggcgcgtcataagcggattgtttggtggcaaatacaaacaaattttgtgttattcgaatgcgctaggcgggctcgacatttccaaatgtatcaacaaagggtctatctccactctctggcgaggtatggccagccaaagcagagtggggcataaacaagaattttttaatctttggtatttcctcgtattttgtgcctgctctacatttatgtcttgtgcctaagggagctattgcaacaganaatttattcagctttcccgacaa

SEQ ID NO: 35309 - DNA, 964 bp, Heterodera glycines
  unsure (1)..(964): unsure at all n locations
tcagaagcagactcaaattcttcaacaacataatgtaaacccccaaggcaagaaattatttttacatcctttttagaaatgctgcataaatttttattgtaaatagtcacaaacaaactttttttcactcccaatatctaccagttatcatacaaaaaggcaatagttaagcactgagatataaaaaaatcgtctagaataattatctaaacaatttgtcgggaaagctgtataaatttcagttgcaataggcatattggcacaatacataaatgtagagcaggctcaaaatagaggaaataccaaagattaaaaaattcgtgtttatggcccactctgctttggctggacataactcgccagagagtggagatagaccctttgttgatacatttgaaaatgtagagctcggctagcgcattcgaataacacaaaatttgttttcatttgcccccaaacaatccgcttatgacgggccgaaagaaaattcacaaaaatttggcaccggaaaaactccatttttttatgggccagcataataaagtaaacccaaaatgtaagggaatttaaattggtcatgtgagatgtttagttttttatttgacccatccgttttctgggaaaaaacttttcgagaaaagctgaaaaattttccaattgcatcagaagcagactcaaattcttcaacaacataatgtaaaaaatattacgcaagaaattatttttacatcctttttagaaatgctgcataaatttttattgtaaatagtcacaaaaaaacttttttttactcccaatatctaccagttatcatacaaaaaggcaatagttaagctttgagatataaaaaaatcgtctagaataattatctaaataatttgtcgggaaagctgtataaattctgngaacaaacttttcaagaaagctgaaaaattttcaatcgcatcagaagcagcctcaaatt

SEQ ID NO: 35310 - DNA, 792 bp, Heterodera glycines
cattgcctgccggttctcggcacagcaaagcactaatagggtgtttgactcacttcaaaaaataattccatacccaaaagttttttacaaccacatattgccaatctaatttcttgcagattgaaagccatccattgcctgccggttctcggcacagcaaagcactaatagggtgtttaattcacttcaaaaaataattccttacacaagttttttacaaccacttattgccaatttaatttcttgcagatttaaagccatccattgcctgccggttctcggcacagcaaagcactaatagggtgtttgactcacttcaaaaaataattcattacccaaaagtttttacaaccacatattgccaatctaatttcttgcagattgaaagccatccattgcctgccggttctcggcacagcaaagcactaatagggtgtttgattcacttcaaaaaataattccttacacaagttttttacaaccacttattgccaatttaatttcttgcagaattaaaggcatccattgtctgccggttctcgggacagtaaaacactaatagggtgtttgactcacttcaaaaaataattccataccccaaagttttttacaaccacatattgccaatctaatttcttgcagattgaaagccatccattgcctgccgattctcgtgacaataaagcactaatagggtgtgtgactcgcttctcaaaaaaattccttacccaaaaactttttactaccactgtattgccactctaatttcttgccgatttaaagctatccatt

SEQ ID NO: 35311 - DNA, 991 bp, Heterodera glycines
gcggtgccaatgccaacaatgggataaatgcagaaatggtaagcaattgtaattaaattttcaaaatttaattatttttctcattttgttttaaggcgatgcgatggcagtgattgagcccggcggaacagccaatgccaacgaggcccagcagcgaaagaggagggtgagttcgggcaaattctgatggactgtgggtccttgtcgggcccagcttttgcttttctggcccagataagggctcacccctgaggtgtgggcccagattgggctcacccttggggtgtgggcccatgttgggccccttttgtcttttggagccctgattgggctcacgggctgtgagccctgctgtgtattaatcatttaataaaaaaaatttttttttcataaaccgcgttcgggggcagccaagcgaaaagcgaaggagcgatctgttgctcaaccaagagcacctgctgctactaccaacaacccgcacatgccgtttccaatgatgatgccgatgatgatgccaatgatgatgcctttcaatttccccttcccgcctcctccccctccaccatcacaacaacaataattttttttttgcattttcacatttatttttatgcattttcatttatttatttttgtgcttaccttcaataaatcaaattacaaaattcacggtcgaaattttcagtttttcttaatgtttactaataattcaatcaatgacagtgtgattaaataaagatggcaaattttattggttaatgaaaaatgaaaatattaacgattgctgtaggcaatgaaaaagtgatcatgaggaaatacagtaggagtccaatcacacacatatggttaatccatgcggtgcatagcaaatgaatgtgccaacaaatattggttgatgagtcaatgagaaaaggtcccggttttgtccacaattaccggtaccgctctactctagtttttagcatttcggcatttttgtgtttatgaattg

SEQ ID NO: 35312 - DNA, 1181 bp, Heterodera glycines
  unsure (1)..(1181): unsure at all n locations
ttcattaaataaaaaatataaatatatatgtctatccatattttacgggaaattcttactctatgctattatcaaacataaaaattattaattctctattcaaatttaattggactaaaaatgcttttaaaaacattctttttcaatatccttaaataatctaaaaagttagacacccaataataaattaataaaaaatttaaatttacggtcaagaatttaaaaaaatgaatatatgggaagcatttagaaaaaataaattttatcattcacttacttaaaatatctcgaaaatttatattaaaaacaaaaagaaagttaagatctttgagattaatatatttaacacataaacatcacaaatcagttgagtccgtcggtgaaaatttagaaaatttcagtggaaaattgttaagaaaattgtaaaattgccaataaaagaacaaaaaaatgaaaaacttaaagtaaaataagtttaaatttattttttgaccagagaatagagatgtggtggcaagaaatacaattattaaatttttgaataataaaaaaaagcaattagaacaaagcaataaaattattttctttaataaaattaaaacaaaaagaaaaacagatatcatgacaataataaataaatcatcacaaaaaaaaaatttttttttaatttattttgaaaattgtcgttcatacaataaaatgaaaataaaaataaaacacgttgactttctgatctaattatatagatattgataaaagagaaattaactaatttaattaaaatatttatggattttaatttactataaatatgataaaaatgaaaatagacaagcatttctaatttggaaaaggagtgaatattacgttatggggtattcatttcaataatatgaaataaaaatggataaaatacataatatctaaaacattttcgagaaatcaaaaatcgaataaaatatttgattaaccagatataaaaaaattcaatacattcattattagggggcccgataatgaaaagaattattaaccaaaacaaaaaattaaatgaaaaagaatagaatagcctttcacccttcctgtaaaaggtatactgtaattaattaattattttatcttatataagacaagatttggagaggtagaaaantttttcgagtttattattaatttaaaat

SEQ ID NO: 35313 - DNA, 710 bp, Heterodera glycines
tctaaaagtacccattcttccataatactattactattttataattaaacgtgtaagtggtcaccccttcgttggattttatttttattttgaataaataaaaaaaagaaatggcggtagggaaatgggtcgatccctcctttttccattttatgcataaaattaccatcgaggcgtgcgttttaccagttttttgttactttatttcaaatgttgatgtgtaggcataaaacggaaagtacctgtaacttgtcagcattctcgaacacccttcattaatggtaaattagccaaaacctcgcaaaaaggagcatgcaaagatggagcaagttaggcttggcttaagcttaggcttcagcttaggcttcagtttaggcttcagtttaggcttaggcttacctaggcctagccacaaattaccctagaaatgactttatttcaaaattttaggcaggtggtcataaaacggaaaagtaccaaaaaaaagttttttcagatggcgcggttcgacttcataccttgtttttttagacttagctcgtcaagggctttcgattggtacgaaatttgtcgggattcgaccatttaaaaaaatagagtgccaaagctctcaattttatgagttttgaaccggttcaaaaatcctcgctttctttatttgttaattcatctttagaattatgccttttcaatttggtccagctaccact

SEQ ID NO: 35314 - DNA, 1463 bp, Heterodera glycines
  unsure (1)..(1463): unsure at all n locations
cgtgagctgaacgaagggctgtaccgcgtgtacaccgtcgatgtttggaatgcgttcgtaatttcgtcaaaacccgcgaaaattctctttctgcacgttgacaagcaatcgatatcgttcgagaagtttgacatcaaagaggccatctcgcacaagttgcagttccagatcagacggaggacggacagagaaacggcggcacagtgcgcaatgatcggccggagaccgccggacggagacaacgactgtccttggctgattttcaaggacaaggcaggtgaggcggagagtacggcacggcacgaatggacgggtcaaaatttacaaaattaaaggcaaccaaatgcgagctgacaaacacatcaaacagttgggctttcggttggccgaattcactcatttggttgaggtattcgctgatcaacgcattgttatcaattcacttttgatcaggtgtcttttgcgcccactctgatcaacgaattcttcatccacatcgactgctcttacgacagttccgagcccaacgaagagcccgagttggtctaccacagttcattccacgaactcgacggtccgtcccaccgctaagccatttcctttgtgaatttccgaaatttaagtgttcttttccctgcagttgcaaatgcacacaaaattggcgtttttcctctgctgaccgcaccggtgaaggagaacagagtcgaactggtcgaacttcccaaggaaaagattctcggacaccgaacgcaccgaatcggtggacacaatcagaacagattctcgaaaagacaaaagaattgaaggaaaagtatgaaaggaggagtaaaacgaaagaggagctgttagaaaagcaaagtgtttgctgattttgcccttttgtgtgcctttttgtgttcgatttccctagttacactttttgaacaattaggctttggctttattttccaaattggcaagcgaaggcaacgaaagcaattcgatcaatttaaatttgttgatcagtcaaaggtgcttgccctgtctcaaaataaatcgaaacgataaaattatgctttatgcaaaacgaattaaagacacgaataaccaaaacaaacacaatttcaaacaaacttgaaaatcggcgagaattaggcacagacgaaaataaatcaatcacacaattaacttttatttttcaaacataaacactaattaataatgaaaccaaaacaaattatttaaggtcaatttgaataatcggaacgccaaaacaaacataataaattaaataattaatgaagtccaaaaatgatatcacaccccgaccctttatgagaagacggtccctcgtctaagcaattaattgggatgagagacagaaatnaagagaattagaaatccgattgggtggtggtccaaggcacatggctcagtgacgacgacgattctcaaagactctccatctctgcgcccgcgagaat

SEQ ID NO: 35315 - DNA, 1049 bp, Heterodera glycines
tttctattctgctggctactaatttctcatttaattatttgtttaatttaatttaattagtttttcactcaactttcaccttatttcccactttaggaatcggtgccttcctcccactcgactccgttgtgccaaagtccgccgggcagcctcctcttttcgcgccggcgcaactcaaacggcggcgatgcagttggtggcttggatatcgctgctggtggcacatcccctgcggcggttttatcgtccgccgctggtggcgccgctgccgcgaagtcgtccacgacggcactggtgcgcaggcggtccagcaacaacggaggcggtgccaagtccaaaaagccggtgcagtcgaggagaagcacacaaatctgaacagtgcagcgcaatttcctgaacccgcacctgaagcggtactcattcaatgacaattgtggagaatggaaccaatcagctgactttggtggctaatagtcaagggcacaagggcatggttgattggtgtttccatgatcggcacacatcgcaaatgcattcgtggagagcaagcgattttcacactaaagccaaatcagaagtgccgagggggtcccagccgatgattacacccactcatcaaacacattccacttttgagctgttcttcgctctctcccatttcactaactttttgcttccagtcttgtagttgtaaattaaaaaatagaaattaattaatttaattgtaagcgaattatttacttcaaaaaatgcaggctgaaataaatttgctttcataatgaatggcctctgatcagactgatccacactcactcactgatcgtttgttttactttccgagaatctcgccacccgcccaaatgttttccactggcgattttcagtttttcatttgtgtttatctccaaaaatgtaatgtttcaaaaagtctttcattcatttcctttgcctgttcctccctaattattcccatcgttttgctaattaatgaccaatcacttcaattaaagagatactaatattccaactttggagttccgttaaacaaa

SEQ ID NO: 35316 - DNA, 701 bp, Heterodera glycines
atgataaaatgaaaattcaatcgcaattgaaatccaacattgtccccgagggcatgaataaggggtggggtggggggcttaattaattatactaaatcatgataaaatgaaaattcaatcgcaattgaaatccaacattgcccccgagggcatgaataaggggtggggtggggggcttaattaattaaactaaatcatgataaaatgaaaattcaatcgcaattgaaatccaacattgcccccgagggcattaataaggggtggggtggggggcttaattaattaaactaaatcatgataaaatgaaaattcagtcgcaattgaaatccaacattgcccccgagggcatgaataaggggtggggtggggggcttaattaattaaactaaatcatgataaaatgaaaattcagtcgcaattgaaatccaacattgcccccgagggcatgaataaggggtggggtggggggcttaattaattaaactaaatcatgataaaatgaaaattcagtcgcaattgaaatccaacattgcccccgagggcatgaataaggggtggggtggagggcttaattacttaaactaaatcatgataaaatgaaaattcactcgcaattgaaatccaacattgaccccgagggcatgaataaggggtgaggtggaggagcttatttacttaaactaaatcatgataaaatgaaa

SEQ ID NO: 35317 - DNA, 908 bp, Heterodera glycines
ctaaaattaaacgtcagattcgtgatcagcaccaaaaattagcctagaaaaaaatttcaggggggggggggggtggaaaaacccggaagtaccgctgatttttgacggtcaaatgctgattttgaaaatttcagttgggagccgccctgataataattggttgactttgtttatcatcaaaaataacaatgcaattattgacataccaaaaccagatcaggaatgaccaggcagagggaaagttatgggttttacttcaaattgatgagtacctattcaaatcattcattggattcactgattgatcagtacataatactatactgattagattagctatactaaaattggggtgcaactcctcgtacgaaatgaatctgatcacaaaatgatgaattgtcaacaatcacttgaggtcgggtcggatacatgccggacccgtgtacggatttttttgttgacccgtaactcgtctttttcgggctgacccgggtttagagtttgtcgcccgtaacccgtatttgtgtcaagcctgtaaccctctcccttttccgaaaatttctgtctctaataattattgatcagatcagtccagccggccacactcacttacccgattccaatttgccctgaatacaagcgagaaaaagcagcttctgcgcgtcaattccctgatcatctgcagattgcatggcttgcgcttctgataaaattgatgatgacgttaaatatcaattggaaaaatttctaaattggtaaaatttgctggcaatggcattccaaaaggacagatttcggctctgctgcagtttacgcgtccaatcaacgaccgaccgtccccagttatttagtacataacttttttcttacttgtaacaaaacttacattcttggtatcaattgaaagc

SEQ ID NO: 35318 - DNA, 1113 bp, Heterodera glycines
gagaaaaaaactaagttggaggtcgtatggggaagccacagatggacgacaaatggaaaaatctgattttaaaatatatgtagttgtagtgagagaaaaggggcgtcgctcatttggcagcgcccatttggcaacgaaaatcgtcttttatgtgtttcgtattttcgtgtatttggggtttttcgcttttttcgcacattttcagacaaaattttgtggaacgaatggagttgctacggtgttgaatacagtgcacaacgcttgagcaaaatccgaatggacactgttgatcagaaccgtgccagagacaacttgccaccccgtgccaccggcgatcagtggcaatgcacggcacaatttggaaagactggtgtgagcatgagtaacgcactgtttatgccgccgttggtcaaaattgtgtaaaacacagcgtgaaaactttaaaattaattataaaatattttgatcgggttttctacacaaaatcaatcgaaataaacgatttccgattaaaagatcaattaagttggtctctaattttatgacgttgagtatatttttaaaaaatatgcgagagtttaggataatttgaaactcaatttaatcaattttggataaaataacttccctctttaataaaattaaaaatgctaataatattttttcaaatttaattaatttactcgtcagcaataaaatgcaaaaaagccaaacaaagtgagagagggatggtggtagaagataatgatgaggaacaaagcagcagcagcaacatttgctacacttatgatttatccttttttgaatttttaatttaaataaacttattttgtctttatattaaataaaaattttgggaaagtcttttttcgcgtggggacgttttcacgtgagtacctgtttaggactgaaattgatcggatttgtgcaaaacatccatgtttcgaatcccgaacccgaattcggacaaatttcttgactttttaattttttatttcttacggctagtatcttctacgataatttgtcagtttggtcggatgtgcgtcaaacggaaaaaataattaaacttttataaaaacacataaatagtataacaaaaaataacaaatt

SEQ ID NO: 35319 - DNA, 201 bp, Heterodera glycines
agagcgaagggagagagagaagagagaaagagggagagggagaacgagagagagagagagagagagaactaaatattgagtgaaaaagggaaagagaaaaagaaagagcggttgtgatagattggaatgcgatcttttgggcaccacttgaggggttcttcaagtttgggtggggtcgaggcccattccttttttggacgt

SEQ ID NO: 35320 - DNA, 918 bp, Heterodera glycines
  unsure (1)..(918): unsure at all n locations
ttctctaattgcatgctaaaatgtcaatancgcttgtactcttcttaggtgaaatgcataaaccccgcgcgaatttccttttcccgcaataaacaaaaatattttcgtttttggatttattaataattttgtttataaattgtggcacttcgtgtcatttgcctcctccgctttctccgtttgtttaattaacccctaattgattcgcatttcttaatttgggcatgcccttttaaatgtttcattttttgtgaaatcaaagacattcgcaatagcattttttctaatcgctcactaaattcgcaatttttgccattttccgcaaatgaattcctttccttcgccccttccgaaattttctaccattggcattggcactttccttctgttgctggtgatcaatttccatttgattgcgagcaacgaatttgggcctgaagattcggtggaccgcaaaaagacggcggaaaataatgaatcatttgctttactccgacgtccgaattattttgccaaaaaactcatcgtttcgatggacgctttttcggacacggacagcgaagacgaaacaaagcaaaggacggcacatttcgaattgagcgattcggaggaagaatttaaggaatggcaggaaaggcaaagggaaaggaaattggaaaaggaaaatgccgaaatggaaaaagcggcaaaaagggaaagtgccgaaaagggaacggtgaaagacaaaaaaggaaaattaagcgaaaaaaagagtgattggaaattataaggngccaaagaacatttccaaagaaattagaaacaacctttgattaaattgtcaaatatttatttatcattcatcgtttgattttatattttcttcgataaataattttttctaaaatagctaattaatctctgccctgacaaatcatt

SEQ ID NO: 35321 - DNA, 587 bp, Heterodera glycines
aaggggagggagggagtaaggggttgtggagaagagggtgaggggaatggggggggggaaagagggaaggtcggcaactgactgatcgctaatgagtggaagggaagggcgtttcttcctaatttgattttgaaaagcttacccgtcagctcgaagttctgagcaccgcttcttcctgctttccctttccctccaccgcttcttcccccgtcgaccgtcccatgcttaattcatcagcagaaacttgttcactgttgacacaagtcactgaacgcattgatgacattcgacgactgagtcgagcacgacacgaagcgctgaagcgacttgaggaggaaaagggacggcaaagagagggggcacggccggtgcaagtggtgtcaccggaaaagacagaaaaacgcgacgacgaaggaaaggtggacaaaatggggggggggaagtactcttacaaaagtgagagagaaacagggaagaggagggagggaaaagggggaagaagagaaagggaagagaaaagggggaagaggatagagggaaatgggggaagaggagagagggaaaagggggaagaagagagagggaaa

SEQ ID NO: 35322 - DNA, 1109 bp, Heterodera glycines
agaagtgctctccggtttctccgagcccgatttggcggcacatttgcaagtacgcttgctgaccttggcccagtctctggttgatggtcaatttcatcgtggtgaattgaccaaacaacggagacatttgaaaacaggctgtcacttgagcggttaagccttcatgaggcacgaccggcagcgactgtttgaagtcaccgctgaaaatgaccgtttttcctccgaagaggagatccttgtgctggcgaattgccatctctttgcacactcggtcgatgacctcaatcaccgtgttgtgaagcatggtgatctcatcaatgatgatgagttgggcctcacgaatccgacgggcaaagaagctctccagcggaatgcttgggagtttgtctaatgacacttctctacccagacgaaacgtggaatgggctgttttcccatatggcagcaaaatggctgcacacccagtggatgccgtagcaagcactttgtaggtgtatggggcctttcgcaagcgcctaataatttggccaaacaggaatgtctttcctgtgcctccatcgccgtatatgaagaaacggcgggggacagtcgaatccctagggttcgactgtattgccaacaaaacagcatcaaagaccttctgttggtcgctgttaagtggcggaggggtatttggctgtggacgaggatttggttgccctggaggcaaattcaaatcatcatcgccaaagaaaaactcttcaattgccgcgtcagtatttttggcaattgaagttggcgggtctggcaggctaaaatgcacacagcttaagttaaagcagctgtgcagccgccaatcaatgtcggctagggcttcaagctctgctgcttggcgttgtgccggtgtggtaatgccttgcggattgtatatttggtctttgtacttgttccacaattctatggcattactcggctggccatagaccaggatgctcacaaagagccatctcatctgatctggccagcgcgacagagctgcctccgccagagttttgtcccaaattttgtcgtcttcaagaagaccatgcattatacggcctcagtgaatgaggtacaaagcaacccattaa

SEQ ID NO: 35323 - DNA, 129 bp, Heterodera glycines
ttaagaggggggagggggtggttgagtgcgcgaaattgggaggagcggtgaggggatgcctgatcagtacaagggggggaggggggttgatcattgatcagattgttgatctagaattgaaggagtggt

SEQ ID NO: 35324 - DNA, 978 bp, Heterodera glycines
aaagcattgtacatcataattaaaagcgaaaataattttcgtatattttttcacaatttatttcaaaagacaacaaaaaattgataaaatgttgaaacgaaatagtgcacaaaaagggagggatggttagacgaaaagaggaatttttaggatgggacgcaccccatctgatattcccatttttctgtttcacaactggccaacggcgactgtgctcattgacacgtagttgtccaattaaggtacttggactttccacagtaaaatgtggtgcaaattttggaactgtcccgcctcacggcggggcttaaaagcatttgtaacgcaataaaagttttttgttttgaatttttcacaatttatttaaaaaagccaaaaaatccggatccaattttaaaaacgaaaatagttcacaaaaaggagccgcctcacggcggggcttaaaagcattgtacatcataattaaaagcgaaaataattttcgtatattttttcacaatttatttcaaaagacaacaaaaaattgataaaatgttgaaacgaaatagtgcacaaaaagggagggatgcttagacgaaaagaggaatttttaggatgggacgcaccccatctgatattcccatttttctgtttcacaactggccaacggcgactgtgctcattgacacgtagttgtccaattaaggtacttggactttccacagtaaaatgtggtgcaaattttggaactgtcccgcctcacggcggggcttaaaagcatttgtagcgcaataaaagttttttgttttgaatttttcacaatttatttaaaaaagccaaaaaatccggatccaattttaaaaacgaaaatagttcacaaaaaggagccgcctcacggcggggcttaaaagcattgtacatcataattaaaagcgaaaataattttcgtatatttttttcaaaacttttattcaaaagaaaacaaaaaattgataaaat

SEQ ID NO: 35325 - DNA, 553 bp, Heterodera glycines
agggggggggcaggaattgagtgcattaattacagccgcctacagcgtgagggtaattactcaggagtcgctccatccgtccgccccacgccccccccccccccaaaaaaatggaaaatatttaaaacaaagaaaaggaatgcagaaaatgattttttttttcgcaacttattgtaaaagcaaaaagcattcaaaaattattatgaaattccttttccgtcttagacctcccaaccgcctctcagtttctcccagccaaactcggctgcgggtggaaagtttgggcataacaacaaggatggtgatgggatgggagtataattatgacgccaaaaatgttgcaatttagcgcaagggaaattgtgaagggaattctcagtcgttgctctaaagctttcgtgcctatgggtgatggagcattctcgggtgaccgtctcaatattcgctctaatgcatgtttaacatcactttttaaatatgcagtaccatcagctctcagtatatgtcctctagagccaaccccaaatttttcagggtcattatttataattaa

SEQ ID NO: 35326 - DNA, 1015 bp, Heterodera glycines
aaatttttgtgggattttaacgggagctggattttcacgagattcccgatcctgctcccggaaaattttgaactcccgatcccgctcccggaaattttttttaccggactctagttctagcagagaacttcgaaatccaatgacgaataatgaattctatttggttattttcggtattcgaattatacaaaaaaaaaattttgaaatattttaaaaagtgaaagttgattttttaggggtgcatttttcaattttcttgtatttttcttacagatttttctcaaaaacgccaaaatatgtgaaaatatctgccaaaccgcgaaatatgtgtttttatgtttttatactcgctctaaatcaaaaattggtcgaagaaaatgctatttttgggcttctctcgtcataactaagtcgcaaaaaaatatttaaaaacataaaaatcccatctcttgagtcattcaggctaattaggaaccctgaaccccacatttatagaaaatagaaaattcaataaaaaatactctttttatatacaaattcgaaacagagtgcaaaattctaaattgaatgccaaatgacatttatcgaattcggttatcagaggtgtaaggggtcagttcctgggccgtcctcggtggtgcctcaggcattcagggaagtcgccccctccgtccgcgtgctgctgccgtcttcagtacggctgtacgccgtctccgaaatgtcgtccaccgtacggctgtacgccgtctccgaaatgttctcccccatacggggggacgccgccccagtcgtgccctcctctaccgtaccgggggacgccgccccagtcgtgccctcctctaccgtaccgggggactccgccccagtcgtgccctcctctaccgtaccgggggacgccgcctccgtactcatgcgcagagacgctgccccatgccctccaacgttgggaccacgaaatgctttaagcacttttgcagcaccttgaaaaagaaatttcatgtttgcgtgccagatg

SEQ ID NO: 35327 - DNA, 522 bp, Heterodera glycines
tatttcgggatttttctacatattacatatgtacatatttttatacatattttggacttttcgccattttttcgtacatattttgcaatttttgaggatttttaaggaaatttttattaaatgccccaaaaaatccaaaatttagcaatttttcgtacatattttcattttttattttcatattttggagaatttatagaaatttcttgtgaaatttcgattttttttgagaaatatacctctaaaaaatcaattttttcaaaaacagataccaaaaattaatttttaaagtactaaaatgtgattctaggcctatttgggtcatttttattgcattttatgcctatttcaccctttacgaagaatttttccaaaaaaagtaaccgttaaaaaaaatttatttacatattttcgtacatatttgggagtttttgtacatatttcatacatattttagcattttttatacatattttatttacatatttcgcgatttttcttacataaaaaaggaatccctgt

SEQ ID NO: 35328 - DNA, 372 bp, Heterodera glycines
cgaaaattctttgaggtgtttttgcgatgacttttcctctaagctcattcattcattttccaccaatttaaagccgctttggaggtggaatatcacatttggcttattattgcacactcactccaacagtgaaacaaacgccgaaggaaattttgtttttctctttttttagttttcaaaaatatttagtagactcaaaacaaaattaccttttaatatatgaaatgatattcaaaaaatttgagtaatacagcctgacaaatgagcttaaaatttcacattataaaaataataaattgacacatttaaggattttgtcaggaagaaagaaatttcgaataccttaaatacacaaaaattatattcctacat

SEQ ID NO: 35329 - DNA, 895 bp, Heterodera glycines
  unsure (1)..(895): unsure at all n locations
atacgatatgatacggtaaagttacgaagcaaaaaatcattttggaatttacccggtaaattggcgtcaattgttctccccgacaattgtccgaggcgtgcaaaaacatctgacactgtccctttttggaggaagcgccgtgtgttttgaactcgaagaggacggaatggctgaaagggaatcagcggagtactcgagactcactctcgactcgaccctttccattcccgactctcattcccgactgattctcgctttgatccatggtcttccctccacaaactgaccaaaatcggtattcgtaacattgtctgacacaatctgacaccgtcctcgcttttgtctccacactcagccatttggcccatttgtccttcttttccgccccttttgtcccatcgtttggccatgaaattctgccaaaaaggccaaatccgacccgagaacacgctaaagtggcactatgaataaatcgagacaatttcgaccaatttggcatttgaattttcctacgcattttgatggtattaaatcaaaatttatgtctttgtttttgtgtccatctttcattactttctttttatttcgtctcgtgaatttgtcttcttttattttatttcttgagtttggtcataaaaacattaaatgtctttttcggttgtcttttaactaaaaatatttaattttcaattttattaatttttatttctaattaatttattaccgctttcttcgtttgccgtcccttcgattgcggaagaaagggccaaattcaaaaaaataatattcaaaagaataagaaaagagaaataattcatggcgaaagacgaaaaaggcgaccgacgcaaatcgaattttaattttgacctgangcaatggcaatttaaaaaatgaa

SEQ ID NO: 35330 - DNA, 1475 bp, Heterodera glycines
  unsure (1)..(1475): unsure at all n locations
tgctcagcagaaaatcggcgctncatgctgcccnagtatgttcaaatccgtttttcactattccanaagaggattttcacaaagcatttgtaatgttntaagaattatcaaaggtttatggatttcgacaaatcttaaacaatgggaatgcttaaaaatatttctccattcgcgaggtcggtcttaagcctaaaaaagccaaattataacacaaagtgccgaaaatgcaaatatcctctaatttttgtctaatgcatttctcacagttccttctgacgtgctaacattggaagaagtgatcggcatttatcagttccattgccattcaaatctttctgatgtgcccggtgggcggtgcctattgcaattttccactcggcaacgcatttctgatcggcacaagggcacacttgcgttggaaattgaacatttttcggcatttacacggcaaacttgtgaatttggacggtatagcaatgccgtgtatataaggggacttccatggcaaatgaagcacaagtgaacatggcgtccaatggcactgaaaacttttgggtgtctttctctcatgtcagaaaacgggtaggagtaattaaaattatgaaaaaatattcttattaacgtattaagacataaattggagttatgctgtgtcggcaattttgcaaatcctttcgcaaaagaacgggacggagtatttaacaaaaaattttgtcaaatagcattggttatccaaattttattgcttttacggtgagaggaaattaaatttacattgaaattaaggaattgatggacccgggcaaaggattggacaaagtgacactgacaatggcaattggagttatagcagacaaaacaaaaacggacaaatcataaaacaatttgatgtcttttaaaagtggtaaatcaggatcatttatttgttgaatcaatttttcatattagcaaaagacagtagtgatcagagagaaagaggcaaaagaaaagcgaaatacttttttattttcgaacaatcgatcaaccgaagattaaaattgatctgaatttttttaaattctaccagtttgaattaaatatttttcaataaaatattgattgattttgaaggaataattgtttttaaaaaatctccaatgttttgatcatcataattaggggctcaggataggtaggatctggtccggcacttagtgtctggtgagactttttttagcagattccatatattccaattatttatggcttggatttccaaaatttaaatgtatggtcgggcttttcgatcctccatgatcaagacttgaaaatgctcaaaatgtttaaagatgagactcaagtatcaattaaattaaatgcataaaaatagagaggggaaattttggtgttgcgaaaatggttcatctcacgnaaattgttacataatatttgttttaaaaaataaattttaattattttatttttctcatatgttc

SEQ ID NO: 35331 - DNA, 1004 bp, Heterodera glycines
  unsure (1)..(1004): unsure at all n locations
attcacactgatcacttgggtcggaagtgcctcgataagactaaaagcaaaaatgagaattataatttaatttattttgttctcaatttactgacccgcctccgatttcttcctgattaatgcaatgtcaattgtatcccagtcgccccaaaatgttggcacttttaaacgccaatcgctccccagtcaattgattggtaaaaccgaacggcatgataaagtcatcatcatcagactgaaattggcacgagatgaagcactggaaaatgccgaaaaaggaaaacaatgtacattccaaaggaactgattgtgatcaccaccttcagtccttaggttagtgatagccattcctctttcatgtgctgtaggccaacatttcgttggtccgttcgggcaacgcacttttgaggaggccgcacaatttgggcgtatgaaagagacggacctggaaaattaaaaaaatttaaagaatttgaattaaagatttgcgcggaaaaaaatttgtttttttgtaacggatctcgtgaaaatttgttagtttttgtggatttttggaaaaaattaacgatttttttctattcgggaattgggaaaaaaattatttgctcaaaaactaacgattttttttctattcgggaatttggaaaaaattattttctcatcttttcaaacccaaactcaataatgaaaattgccgaatttgccgtcagaaatttgttaagtgattttaaaaagcaatgatttttgcaatcgttgatttttcattgtttgtccatatttatttatttagtaaattgaaaatgatgtttaggttgctcaatatttataactagggctataaattatatgcttttgcatattttttctgcgcatatgctatgaagaaaggggcccaaaatagcatttctgcgttanaatttttgatttggtcaaggttttagtgcatataatgcttaatttttgggggttttcgagaataatgcatatttggccatttttgcatt

SEQ ID NO: 35332 - DNA, 1274 bp, Heterodera glycines
  unsure (1)..(1274): unsure at all n locations
tcttttattttcattctttatccttatctattcatctcccccccgggaattctttcattttagtatatttgtttatactttatctaacccaattttggtgaatatcaaaatcaattttcttcttccctaaggcaaattaacagacaaaacattcaacttaaaaaaactcccttctctaatagttacttaaattcaaccaccttataattcactagtaccaaaaatgcaaagtgaggattttgatgatggatatttacgaacgacacctgatccgtttgttgtcttgataaacaattattttttcttgtgtctttttagaaattcatttaaattaccgccgactgaattaagcaaagcacccgacgaagtgttcgatgtaattagcaaaattggcgaagggttattttgttccgaactgcttttcatttgcattgtgtaaatttaaggtcttacggctccgttcacaaagcattacacagagaatctggccacacgcttgccgtaaaaatggtgagccgtaaattatttcgggtggggcggtgtttactgtttgaataattatgctttcattgcaattccttctattaaggtaccagtggacactgatctccaagaaattatcaaagagataacgattatgcaacagtgcgattgccgacacgtcgttaaatactatgggagttacttcaaagactccgacctttgggttgggtgaccgatctttgccgatgctttttccatgtgcaataatttgagattgtcatggaatattgcggtgccggttctgtgtccgatataatgcgattacggcgtaaaactttaaacgaatgcgaaataggagcgattctcaaagacactcttctgggacttaattatttacacggattgaagaaaatacacagagacgtcaaagcgggtgctaatttaccataatatgctaaacatctcaaaatatgaccctttgttctgtatcaagggaatattttactgaacatggatggcaatgctaaggtacggatggtttatggacttgctttgcgaattaatttaatttagctagcggattttggcgttgccgggcaaatcaccgacacaatagcaaaacgcanatacggtgagtgtgatgctattttctgacaatatcaattcttgttaaggttattggcactcctttttggttaatcgacagcgtttctttaaaatgttttatttgcacctttaggatggcccctgaactgattcaggagatgggctacgacatgaaggcggacatt

SEQ ID NO: 35333 - DNA, 952 bp, Heterodera glycines
aaatagagacaaaaaatccaagcgcctcttcgttgtgtcgccgttgtccgtcttccactaattgcttaattttttgtataattatcaaaatgcaacaacaacaaaaaaaatgatgggaatatttttgtgcggcgcgttcatattcattgcctctctcaatgcactaattgcgccacaacacaacataattaatgccaaccaaattatgaataataatttgaaaacgggcgcccaccgccaaatgtccttcattcagcgaaagaaggcccctggggggaaattgtaacaaaaaatcactgattctgaggggttaggcggtcggtcaatcgttcgtccgccattcgattccatcaccatttttttttatctgattttgtggtttaggaaatttactccgaaaaaatacactaaataaaataagataatttaaaaagatggaaattaattaagggtaatgattaaaaaatttttaattatgaaaacttttaaaagcataatttaatttatttaaaaaagaaataatgtaataaagtgaaagtgatttatttcaaataatataaattattatttataataaattctttaataataataaaaaaagcaaataaaaaagacatcgccgaatgctgaagagaatgcgtctcaattaggttgaattgatgccgtaaataattgcgcagtgtgtgccgttgtttgtgtgtggagaaaaagaaaataaaggttaattttgttggtgtaaaaatggcacaaaaagatgatgatgatccatcgagaaaagaagaaaatatatttgttaaaaattcttaaaatttttggtacaaaaaattaaaaatctaaatgtaaattaaaaaaaagaaaatcattaacatattccctatataaaaagaatctacccccctaactcacttaaaaatgaaaatctcgagtttttttgaagtaggggggggggggg

SEQ ID NO: 35334 - DNA, 974 bp, Heterodera glycines
attctgcgttggatttttgctccccataattgtttgagtaccccaaacggacacttgaaaaaatcgatttatttttgttttcggggcagtccccccgaaccgatgcgcccagatttatggggagaccgaatccttcgggaatagcttccctatagcctgtactttaattctgcgttggatttttgctccccataattgtttgagtaccccaaacggacacttgaaaaaatcgatttttttgttttcggggcagtccccccgaaccgatgcgcccagatttatggggagaccgaatccttccggaatagcttccctatagcctgtactttaattctgcgttggatttttgctccccataattgtttgagtaccccaaacggacacttgaaaaaatcgatttttttgttttcggggcagtccccccgaaccgatgcgcccagatttatggggagaccgaatccttccggaatagcttccctatagcctgtactttaattctgcgttggatttttgctccccataattgtttgagtaccccaaacggacacttgaaaaaatcgatttttttgttttcggggcagtccccccgaaccgatgcgcccagatttatggggagaccgaatccttccggaatagcttccctatagcctgtactttaattctgcgttggatttttgctccccataattgtttgagtaccccaaacggacacttgaaaaaatcgatttttttgttttcggggcagtccccccgaaccgatgcgcccagatttatggggagaccgaatccttcgggaatagcttccctatagcctgtactttaattctgcgttggatttttgctccccataaatgtttgagtaccccaaacggacacttgaaaaatcgatttttttgtttcataaatatttttttcagaaagtcatgcgcacccgtccgatctggcaagtaagcaacgattgctgactagccaaa

SEQ ID NO: 35335 - DNA, 1006 bp, Heterodera glycines
attctgcctttccagccttatgggaaagatattatcggaactccctggttccatctcagttgtcaacgccgcgactgcatcgttattatatcagtcgatagaattttcgaatcgcttttaaatcgtctcttttgcgtcccttaatcttcactctgagccgagttactgcggtctaaacacgtttttggtagaattgcggccagaatttaaaaatacagtttgctatggcttcgcatcacccgcttcaacgggtgctcagtgtaaatatcgactggccattcaaattctgcctttccagccttatggaaagatattatggaacttttggttccatctcagttgtcaacgccgcgactgcatcgttattatatcagtcgatagaattttcgaatcgcttttaaatcgtctcttttgcgtcccttaatcttcactctgagccgagttactgcggtctaaacacgtttttggtagaattgcggccagaatttaaaaatacagtttgctatggcttcgcatcacccgcttcaacgggtgctcagtgtaaatatcgactggccattcaaattctgcctttccagccttatggaaagatattatggaacttttggttccatctcagttgtcaacgccgcgactgcatcgttattatatcagtcgatagaattttcgaatcgcttttaaatcgtctcttttgcgtcccttaatcttcactctgagccgagttactgcggtctaaacacgtttttggtagaattgcggccagaatttaaaaatacagtttgctatggcttcgcatcacccgcttcaacgggtgctcagtgtaaatatcgactggccattcaaattctgcctttccagccttatggaaagatattatggaacttttggttccatctcagttgtcaacgccgcgactgcatcgtattatatcagtcgatagaattttcgaatcgcttttaaatcgtctcttttgcgtcccttaatcttcactctgaggcgagttact

SEQ ID NO: 35336 - DNA, 877 bp, Heterodera glycines
ggcgcaacgaaaagtgttaataaatagcgacttctattgaaaaggtttttcaaataaataacgatttattaaaaattaataacaaatataatgatattattaattgaaggatatgagttagatgcaaaattataagtctcctcaagtttatttctttggtctgaacggggccaaaatgtcggttgctcggcaattgtcgatcgtacacttctcacagagttaaaactgattactgatcgttcatcgttagtcgtgaatttgtttttgttgttccaaagcgcagaaatacagacttaagccacaaaatttgacatattgaagtttaaataaataacttacaatcgcacaagcgatatgccaacatgtatttggggcgaaaaagtttccaggattgagtttttgaggcgtttggtagaatatttatctcttcttttggttcgttcatgcaggaatccacattatgaatcattatgaatgtgaattggttgttgcttaggtaaatttatgaatgaatttattcacgtataacctagttttaataaaataattatcgaaagacaaaaaaaatttaaaaaaaaagttatttacgtttgcctcacctttgtcgaggaattcttgccaaatctcttcggcaagcatttttccatagcaacgctggtcccattcaaccacttgctacggcgtccatttcttaacttcttctcatcatcgtctgaatagtttaaaatgttattaaaataattataaatgttgaataaaatgatcatgatttccgtttttatacagtttattatttgtttaacacagaaatacaacaagaaatcttataaatagcttaatattcgctcatattttcactgctttactcactttatta

SEQ ID NO: 35337 - DNA, 999 bp, Heterodera glycines
ttcttttgccaggttaccttgtgagtacgctgaaatcgtggtaaccggccgcatgtgtgtgcaggacgtaatggaagaggcgctggacaatttcggcatggacgggcaaagttggaatcggtacaatctgatcgaagtgtcgctggagaagggcgtgggcgagcggacggtcaacccgcaggaggaaatgctacaattggtgcgcaatctgcgcaaggttttgtgccggcatttcgccgtggccaattgcttttttgacaggattccctccggcgctatcacgtgctgcgcttttacatccaagagaaagaggaccctcacggtgaaaaatgaacaaaactccccagtttaaaatccaaattcttaactgtcgcaatggtcaaaaaaagacaaataacattgattactccttcggcttttttaaggcagtgggcagagctattgagcggcgactctggcaaatgtccacctcggacatgactgaccctttcgtcgcccattttgaacagctacggcggaatgatggaatgcttgcgatggatggagttggtgctgctcaggtggccgacctgcatcgtccatgaacaatttcgacatggtgctaaccctttttacattttatcatcttttttggtcgtaattcgaatccaatgttttttttttgtaattagttcttcctttttacttagcttttgtttttacgtcctaaaatccttgaaaaaattttaaagagccttgtaaaatgaaattttgcggacaaatatataataattaaaaaacaattagtctaccaaaccaaaaaggtctaatttgtttacttaacaaagagaatttattaatcttttttgccgaaaaacattatgaacaaatcccttccaagaaattccgctcgacaaaaaaatgtttccctcaattttcactgcccattttttgatgcatcccatcgatgggatgagaagcacaactaatcacgcttaaaatatttaaatttttcccaaa

SEQ ID NO: 35338 - DNA, 936 bp, Heterodera glycines
gaagattgaaatcatctgtttgtacgcgttggttcgtccttcaaaggatgggtaatagacgagcgagagcagcagtgtcaggatgagcgtcgacagactatgcgggggaaaacagtccgacccgtcactgtccccgtccgcctgcggcccgagtgccaatgtgcgctgcagtgttgaccacagtgaaaccacaaaactgtcactgcggctttgtcttcgaccagcaccactccctcctccagacatttttgcatcgtccaattcctcgtcgaaatggtagaggaagttctcgagcagtacacgaacgatgtctccgctctgaacacatcttatcggcaaaacaaagctaatggcgaaaaaaatgaaaaaaataacaattgtgtcatcagcaatttgagaaattcggagtgttcagtgatgctttcttcgtagagttgagtgctgagcaatgaaaggaggagacgaattgcttcggcatgcaattgaacagtgagggcactgaaattcattaacgaaaattaagctaacgaaattaatggattcagaagttacggatgaacacactttactggaatttgcgtaataatttgtatgaggagagttaaaaactgttcgggttcgttttctccgacatcgcctccgctgcgattttgtgacgccgcactttccaattgttgagcaaatgactctgaaagaataattgcatttccatcgaaccaaaacacaacaaaaacggtaatagtacggatggtacccccctttttcgaaaaacaaaatttttgaaaatttttttcgagaaaagattcgaaaattttaattttcgactttttgcttgaattcgggttcggagtccgacataggtcaaaactaatgtcagaatcggattctccgacccttaaaaccccctaatatgatcttttctcgaaaaaaatttca

SEQ ID NO: 35339 - DNA, 879 bp, Heterodera glycines
aaaaaaatcaaaaattcaaagaaaaatactaaaaaaaatttaaagctttttttaaacttacatagatattactaaaaataaaactaattccgaggtcatgaagaacttacgaatcaattactctgtaataattcgttcagggaagttgctcgtctcggatctcgtatttagagtcaaaattttttggtttgcatttaactcaattagttttttcgagtttataaatatcattatgagctttagcagataattgggaaaaaacctatttttttttgcaaattttcatcttttagtcttaaatacccgggaaacgacaaaattttccgattaatacaaaaaatgaaattttaattgaagaagaaaaacataaaaatgattaaaaagagcaaattgatcaacaacattagtgaataattaatccttccatcagagagtcgccaaatcgaatttgaaattgggcccaaaattcgcctcaattttgtaaccagagccaaacaaagaaacgaatggataaagagaaccatcagcaaaagatggatcaacgaaaagaccggaggaatctgtgaaaaagttaagggatttttgattattttaaacataaaataaattagcataaaatagacaaataaccaaattgtaatttaaaatcgtaaaattatattatttattatttgctaacccaaacgaagcccatttttggtgaaaaagagctgtcgagtgaataaatgaacaccaattcctacggtatcgccaacacggtagaaatattcgatatttgttcctttttcttttccgttaatccataaaaagccataattgtcaaatgcataagtgcccatttcaagttgaatgtctacatccaattttgtctgctgttta

SEQ ID NO: 35340 - DNA, 530 bp, Heterodera glycines
  unsure (1)..(530): unsure at all n locations
ttaataaataataaaattaattntaaattttatttntagaattactttttgcgtttgaatgtggacaaatttcgtgccttttgcagtgcgaaccgtgaacagtttttgccggttgtcagcaaagaatttttgtgcgctttgttcgtcaaagctaccgagatgggaaatttgaaatagaaaaacatatatcgtattttctaaccccttaaattaaaccccccctgaaacaaagcccgccccctttttgggttgaaaaacaaagattttaggaaatacaatacggtcttgtgcaaaaaaccagtaattaactattacggtatcggagcagtcaaaaattgatttactttaaataaaaacaaatacccaatcggattggttaataaaataatttattgtttttcatttatttccaaaatgatttcataaaataaccgtgatttaagaagtcaaaatcactctgaattttttgacttgtaaatgtggagaacacatagagctttctgcttatttactgaattagaacccccccc

SEQ ID NO: 35341 - DNA, 645 bp, Heterodera glycines
ccagacaaaataggcatcacaaaagtcacaaattaaatctacttgcgaaaatgtttttgctttgctttgtattgctaataaataacaaattacaatcttagctatattacgacgtccgcgttcctcagagatatgctcaaagtaaagagctaataaaacttgaatatgaaaaggcaccaaaaataaaacagaagaaaaaataaacgaaagataaaaaaggataaataacgaaggatatggcaaggaaaatattgtcggatggactaaccaacggagaaaggcccgcaaaagggagaaaacctaacggataattgagttaatggtataattaaaatttaaaatgaaaaaacgggcggaatggaaaataatttacaaaacgaatgaatgggcgaacggtcgtccgtttttggctatggacaaacaaataattgcgtgattcatacaatgcgtcgtctgtcgttctttttgcgttttacaattgcctaacccctaaagcgattcggtgccgaaaaaggacggcaacatcaaaggcctcccatcagacaaagacagccgccgccgttgccgttgttggcctgctcagagcgcagaatcgactcgagaatgcacgcgtatgaaatcactccgcatagctgctgctcatcg

SEQ ID NO: 35342 - DNA, 905 bp, Heterodera glycines
cagttatactcggtaaagcgaatgattagaggacttggggacgaaatgtccttaacctattctcaaactctaaatgggtatgaagccagggttgcttgactctgaacccaggcgttgaatgtttgagctccaagtgggccatttttggtaagcagaactggcgatgtgggatgaaccaaacgtggagttaaggtgccaaagtgcccgctcattagacctcataaaaggtgttggttgatatagacagcaggacggtggccatggaagtcggaatccgctaaggagtgtgtaacaactcacctgccgaatcaactagccctgaaaatggatggcgctggagcgggccacctatactccaccgtcattggcttgtacacgtgcttgtcgcgtagtctggccatgacgtgtaggagggtcgtggtggttgcgttgaaggctttgggcgtgggcccggccggagcttccaccagtgcagatcttggtggtagtagcaaatattcaagtgagatccttgaagactgaagtggagaagggttccacgtgaacagcagttgaatgtgggtcagccgatcctaaggcaccggctaacgccgtaacacactacggatgacgacttttctgtgcttgcgcagttggtccatccggttgccgaaagggaagtgggttaacattcccacgccaggctagggaaatgacggttcgcaagagctgttttgcgcggtaacgcaaatgaactcgcagacgtcgtgtggagtccgagccagagttctcttttctggtttagggtgtgcgtgcctggaagtggctcagcctgagatagggatgttgcgcccgtaaagcaccgcgggtccctgtggtgtctcgtgcgctccacacgggcccttgaaatgcgagggaagctattt

SEQ ID NO: 35343 - DNA, 999 bp, Heterodera glycines
  unsure (1)..(999): unsure at all n locations
aattttaattttgtgtccctttcagttcggattcctcctttctgctgctgaacagtgctgcggtcgtcccttcctccgcgcgcatttccaaaacacaacccctcgctgaccatcggcccgttccgctcgcgttcgtcccccgctgccttgcgcctgacccgccctgtccttctgctcacatcccccatcattcctccgtcgtctcgaatcagtcccttttccgtcaattttccaattcgtccgatcctttgccggcttcacaatgtccacaaaacatttctttatcggccatccaatcgtctaaatcccgcgttgagcatcagcaacaacagcacacttctgccgattgtggctcttgcagtttggtgtccgcgggtcagtttggttgcactttattttcaaacttttggcatattttctgagtatttttgagttggaaatggtttttttttgttgctttttctgctgtgacttggactgtttaaggtgcagttgcactttcttcggttggttcctctgccgctggtggtatctcagccaaatacggcgccaacgacgaggggccgtacttctgcccaaacagtggtaacaacgaactgcctttttcgtccaccgccacggcgaccattctccccaccaatttgaccgcgagttttggcggtgccctttccgcctcgggagcgatcacaattgctgcgacaagcggcggttatgagccctcgccgggcggaccaacgacctcatcttcgacatcatcagcatcatcgacctcaacacaggttgggaggggaattgggagagagtgaggaacaaaaggaaccagagacgacgaagagaaagaaaggaagaggaaatagtatgaggaaaagtgactagcaaacgaaatatgacacaaaaaagggaacgagcgaagggagcgagaaagagagagagagagagagtgaaaagactttcngaaggaggagagagtgagggaggagagagagcacgggaaaagca

SEQ ID NO: 35344 - DNA, 832 bp, Heterodera glycines
ttggcgaattcgatcaactaatcatgattgattacaaccgtcatattgtgaccgattcaaaaattgcataaaaagatgagaaaatagaccctccagcatcacttttcatttgtagaagcacgaaactaaattagcataccaataccctccctctcaaaaaaaacataaatgatcagcaacggaacaccaccggtcgctgactacttccacggtggaattcagacggccgagccgcttcagccagcggccgccgatgctcttctaaccgtgtaccagcccgacgagtacgcatggcccgacagcgacacgttacaacgtgccgctcaagcactgatcctcgcactccactacaccgttgtagtgcccatttttctcttctgcttcttcaccgccgtacgctggctacgccttcaacagcctggtttggatttggctcaccacctcccatataaccttgctggtccgcacctagcatctgttggggtgacgagcgccggtaacagcgaccgtggcggtagcagcagcaataccagcgcagagcacaacgaattcgagcaccacctcaacgggataagagtcgcggcactttaccctcctcacaaattgccccaattcgtttaatttctccggtgcccatttggccgagtggcgaagcattcggatgatgacggctcgacaccgcacattgaaggctcgaccgcctttggcaaaacccctgactcatttgagcttgcaccgtcacgcaagtgaattaaagcgaaatgagtctcgtgttttgtcgaacgcggtcgtcaatgtatttttttgttactttctctcgggctgatgcata

SEQ ID NO: 35345 - DNA, 996 bp, Heterodera glycines
ttctctcaatttttcaatcttagcaccccttgaaaaactgaaccaactgtggaaatggcttaaaacttcgggagtatgccgccggtctagtttttctcgaaatttttgtcgaatcgagtcgagactcgggattctcgagagcatcaccagtctctagacagacagtgatgctcgagactgaaaatgtctcgagactcgacaaaccgagacccgtacccgagaaaaccccagaccgagaccgaaaaaaaaccgagacttttgtccagtcgagattcgggattctcgacagcatcaccattctcctccagacagactgacagtaattaggccacaccaactccaagcgataggccccggagactgatgagggaagtaattgcgggcaccgcgcgggcgccgcactttccgccgccgcggcgcttttccccccgcattcacatcatccatcatccatcaatcatatttcccgcacattcattagagagacataacggtgccctggggcaggggacgggggcacattgtgaacattgtacatcatcataatcatcattcatgcttttcgtatcatcattttcatgcttttcctccccacgcccccttttttcggtgtctgtctctttttctgtttctctctctaccccacttttttttttgttacttctccaaacattcgcgacaatacgccaaagcgcattatcatcatttagcatcaaacaaatttgatgctctgatggcggtggtggtggtgatgataattgataatatcatatataatttgatttgattcacaaatcagtgcattgccacattattatgctttatttgtgccgcccccccccccgcctttttttgtccggttcaattttttggcgcttcaattttacatttaacttaatttttgggtttagggatgtggtaataatcatacatatacaagggggtgtctcagaccaagggctatacgacggacgattggcgcaggggcgatgcgcc

SEQ ID NO: 35346 - DNA, 727 bp, Heterodera glycines
  unsure (1)..(727): unsure at all n locations
aaaaaccaaaatatttaattagttttaacaaaattatgccattttttgtcaaaaatatcaaaaatggcgaatttacaaaacgcactgtggattttacgaaacgaccgaacaccctatgattcatattgtcttaccgtttgatccttccattttttttattatttgtatttgagctttatattattttttcataaaatttttttctctagaattattcaagctgtattcgtttttgattaaatgaagctttttaaatattatataaatataatactgaaaaatgaaaaattaatcaatatcacaacaaaaatccttttactgaacaaatgcggattgaaaaggaaaaacagaactttgggaatcatttaattttttaataatttcatctttgttttgcttttcctcttctcctaaatccaccacctcattctcctacccttcatcctattcctcctcctcgccctcctcctccttctcctcctcgtcctcctacccctcttcctcctcctcctccctctcctcctcctctcatcctcgtacagttcatcctcttcctcctcccccttctcctcctcctcgtcctcctacccttcattctcttcctcctcctcccacttttcctacctcttcattctcctcctccttatcgtcctcgtacccttcttcatctttctcctcctccnntctcttcagctcctcagaaatttctcatgatattcatcttcat

SEQ ID NO: 35347 - DNA, 663 bp, Heterodera glycines
tttatgctggatttcatttccaaaacaacaattattactataaaatcagtaaaaaaaattatgccaaaaatttgtaagcaaaacaataaagatgagatagaagatcacacttgtccaccaacttcggaatgctgctcattctccttaaaatggtaaatttaaaatttaaatcacatcttcccgatatgttattccaacaccatacttctttctcctcctcttctgatgatgtaaaaaatttttgttggcgccgtcgctgtttccgttttttgcccaaaacatagtccacaaaatcggtctctttctttgctgttgttgaaccctggaaaacatttaatggtttgattaaaatgggtgtgtagtttaaaccaaaaaaaaaaaaaaaatttcaatttttttaactaaatgcaatgtttttaatcattctgaattattgtccatgaaatttaattcattttccaaatgcaaatttccaccgtttgtctcttgtccaagacaaagtccaaatctgctgattgttccgttgacgccttccttttccgcgcaattcttgtcggagaatggcaagcctgcatataatgcgaaaagaaaaccatattcaaacactgaaattggaattcccaaagaaacaaaaaacacacagaaattggcgttctgttatga

SEQ ID NO: 35348 - DNA, 1600 bp, Heterodera glycines
gtcaagtaaaaggtaaaattcgacttactaacgtccatcagcgaagcgcaaacgtcgtccctctgataaattgataagtcttaaggcttcctccagcgaatcgactgtttttggtaaaacattccgtccaaaattgcgcggtttgttccctcttctaggcgacgaattttgcgattttcccgttcctcctagtgttgcttgtagatttgcaaggaaccgtcggttccgggtggattcggcagaagattctgcgcttcttgaggaccttttggcgctgttattgtttgagccaatgatggagggtgacggtgaatgatccaattctgacgccatacttaaggccttgtcctaaaaaaaaagatgcgttgataattaatcgattaacaatttaatggattcctatgaaatgcatttcaattaaacagtgggcaaattccaaatgacatgggaacgtcgtaattaattacatacctatatgtacatacataagcattaattattcattaattaatgaatttgatttaaatgacaaatgtcacaacaaatttatgtgttttgcttttaggctttccaaaatgagtcaaaatcgtaccatttgagttttagtcgaaatatcggagacccacccatgtaatctaacgatacacaataaggtggatactttttaatctatattctttagagggctttgcactggacttcataaattctgaggagtcattttcattagtttgatcgtattaactctctctgttcttttattaatcttaatccctctcctctcctcctttccgtgtgtatgtgcataccatttcgctgttgctgtttattagatctaccgctgccttttattagtcgttggactctaaggaaaagaaaggtgcgaattgcaatacatatttttttgttagttaatgacgaattgcaattctgctatgtgccagttgtcaatgtaattttcatttgtgagtacaacaaatgtatgtaagcgtaagctgtatttttactttaattttttgatccctatttttaatataaaaaaaagtgttaatttgatgcttacacgcaaaagcgtcatttttaattgattttaactacttcagtaatactcacaaacaattctggctttttaaaactgtcttccagcagatgacaagtacggaaacttcggcagatcgcctcgctgtgataaactcatcgtttgcggatggaccgcaaaatgaggagcagcgatatgatgggtttcaagtggagaaacagcggttcaacacgggtccatgtgcgagtaaaacactccctacacaatttgtgtgtttagaatttatttaaaaacaatttatgagaaaatcgtttttcttcagcatgtcgtgaccgcaagcgagtggacaagctcaaattgaccaattggacaaaccgaaaagtgctcattcttcacccgaagaacaacaacaccaacaacaacagcaaattgttcaacaagttcaagtgctcagcaacgaatcgtcagattttagtctttgttcggaaaaggagctcgaagtcttaatggtcaactcgaagacaaataacaaccctccaattatgagaagaaggccagcag

SEQ ID NO: 35349 - DNA, 645 bp, Heterodera glycines
ttctttaaaagtttatagtgctttcgctttacataaataagacatacgctattccacattggagccaaggaaatgctgtaactgagagatcctttaggactttccataatattctctctaaatatatttctaagggaaagagtcaaagataagagcccttaatgatgctggaatgtaaattcttggcttagtgtctttctgacgaaaatagagaatattagactctatgcataaatctttggccaatattgatagtctgtctttttcttgcctgagcatttcatttggaaattcacctgactttaagaattgaattaaaattgacatttccggatcctcattttgttccttttgtatgtcaacctgttttatttctccttcaatgttacgaatggaaagagttagcccaaatttctcatgaataattttaatctcggaatttcgtttttaaatttcttaccatgggtggggcgcgaccgcggcaatttgaatctgcgatgcgcgaacgcgggatctttatgtccgcgctccatccctgtttcttactaaaattttgtatttctaaattttgagtatgttaatggtcttaatcagtttaatgtctccaagtcgaatcataggcgtcagccgatcacgtatggaagc

SEQ ID NO: 35350 - DNA, 670 bp, Heterodera glycines
  unsure (1)..(670): unsure at all n locations
aattaatttgaaaaggcaaaanaatgcttcgaccaaatttataatttttcgctcagtcatcgacagttatttaattattttggaatttgcattgacattccttcgacaattgtttacattttggaaatgattactatcataaagcataaacaattttcaaagtcaccattttacaaattgttcttcatccgtgccgttgctgtaagctctttaaaaaaatatatttcaaaatttatttaaattggaatttattttaggatattcttagtttagtgcccaattccttgggcattttgcttccagcattctttggccaacaattgttgtcaatttacagcaccgtaccaaattgggcaatcgtcttgttaacctttttcacaaaaactttggtattccaagtctcaaacattgtgacagttttcattttgttgaatcgtttcactgcaattgcatttccattgcgtcacaaaatggtaattaatatttaaattaaattaattaatttccgttttttttaaatttttagctatggaaaaaacactttaggcatctgatggtgtttttgttgattgtaccaatgctaattacttttccaataatgcgaatgcgcacaatcattgttttttatgacagcaacagttttctcttagatgacaaagacccggtaaaa

SEQ ID NO: 35351 - DNA, 911 bp, Heterodera glycines
gtttgcggtaaaaaatgagaaaaaagagatagctattttttggtcaagaatttttttgtttgcgtttcaaatatcgtaagattgtttgatagggccagacaagagaaggcaactgttggtaccaagtttgcggtaaaaaaatgagaaaaaagagatagctattttttggtcaagaattttttttgtttgcgtttcaaatatcgtaagattgtttgatagggccagacaatagaaggcaactgttggtaccaagtttgcggtaaaaaaatgagaaaaaagagatagccattttttggtcaagaattttttttgtttgcgtttcaaatatcgtaagattgtttgatagggccagacaagagaaggcaactgttggtaccaagtttgcggtaaaaaaatgagaaaaaagagatagctattttttggtcaagaattttttttgtttgcgtttcaaatatcgtaagattgtttgatagggccagacaagagaaggcaactgttggtaccaagtttgcggtaaaaaaatgagaaaaaagagatagccattttttggtcaagaattttttttgtttgcgtttcaaatatcgtaagattgtttgatagggccagacaagagaaggcaactgttggtaccaagtttgcggtaaaaaaatgagaaaaaagagatagccattttttggtcaagaattttttttgtttgcgtttcaaatatcgtaagattgtttgatagggccagacaagagaaggcaactgttggtaccaagtttgcggtaaaaaaatgagaaaaaagagatagctattttttggtcaagaattttttttgtttgcgtttcaaatatcgtaagattgtttgatagggccagacaagagaaggcaactgttggtaccaagtttgcggtaaaaaatgagaaaaa

SEQ ID NO: 35352 - DNA, 810 bp, Heterodera glycines
atgaagccgtttggggggggtgacgtagaaacacgtcatttttacgaagggatgggtggctagctgtgcaagcaaatgcttcataccaaaatgacactgactacacaggtcagagacttctttcggcgaaagttcgacccgcctcccaattttgcctatttttgtaaattctctcccaatttggagccatttcccctaaattaattgcttattactattcattattcactcgattgagttcatttttaaatcatcggtcgatccttcgattggtcccaaaagagtgccaaatgcttccgccaaatgccgtccctttttccatttaaacaaatgaacggattttctcttttagcggtttccggcaattcaacttcttctgcttccaccacaaaattaggcgccattaaagaagtggaagaaagtgaagagacagtgcagagcagagaaaacgcagaagaagaaggactaccagagaagcagagaaagcggagagagagtgtgccgaggcagcaaaagaagaagaaagggtctttgtgcgattggagcgcatcgtccgcttcgccttcgtccggaagcgaagaattcgaggaagaagggcgggtggaccatgacgaaagcgaacagcagcttttcgtcgtcaatgtgaccagcttggacgaggttggagaagcgtcgtcgtctttggtgacccccctccgccccctccccgccgcagggtcccgaagtgagtcaaaacgagtgcgctaacggtcgccgtccctcggactcgacttccgcctcctcctcctcctcctcccactcttccttctc

SEQ ID NO: 35353 - DNA, 1159 bp, Heterodera glycines
tctgaggccgcgaagcggccgaattaatccataaatataaaaagggtgcggaacgcccgtcctgaggccgcgaagcggccgaatgagtccacaatatttagaagcgcaaagcgcccgtctgaggccgcgaagcggccgaatgcacttgctcatcacttatcaacgcgcatgcactagcaacgaagtcctttgcgcgaagcgcttatgtcaataccgattatattggggttccagaagtattttttctactttaaagccaactgtgcaccctagttatattactatagagaaaaagggggtttcgtcttaaaaactaatttgagtcgaacggctgtcgggaggggtctgaaagtggtggaagggtcttacaactttttgaggcgaattcaggaaaactataggttttccgctccggtggccaactgagtcccggcggctaatttctcacttttgcttgcgtttgaaggcccgtaactttttttctaaaactctgatcaaaaaatgcttgctggtaggaaactaagttgaagtgttttctaattttaaaaaaaaattccaggcctctacctatacttggaagagctgcagaaattggcaacttttcagtaccaactttattccagttcagtccccgttgaataactcattaggctttgacctgagcgcagggtggccagcagacttattgtagagctttggaagctcgattttctgaaatttaaaaatttcgaaaattttaaaaatttttcgagctaggcctaaaaaacggttttttggtttttgaattttaagaatttttaacgatttttcccagaaaaacgaagaccacttccaaaacatagtttttcgagctctatcgactggtatttttttcagaaaaatttcgattttttcccggaaatagaaaaaaattttggcctgagcgggacatttgagtcccgggcccataactcgtcaggagttggttttagccaaaaatgacctcagagcaaaattgtagagctttttaagctctatcgaatggtgtactacatgtttggaaattttcaaaaattttcgagctaggccccctagaaattttcgaaaattttttttgggttgataatgtaggtcaaacatatttttctgtggtaaaataaggtgctgagtacgaatatga

SEQ ID NO: 35354 - DNA, 1421 bp, Heterodera glycines
  unsure (1)..(1421): unsure at all n locations
gcttcattaaatttaatttaaaaataattatcctttatatattttatttttttttagtttttgtattgatttttattaattaattaaattatttaaaaaatagttaggttatgggatgatgatatttgaaaagaaagtgaaatttatgaatattgatcggatcatatagattgggtattgtgatagaagttattttaattgtgattggatgagagaggaagaggatttttttattgtcatctccatccccgctctgtcccagaatgcaaaaaaacgcacattggcaaattttcaaaatgagttttaatttcaggataaaaaatcatataaaaaatctcaggatttgagaaaataccccaaaaggtttgggatcaaaaaggaattaattggcaaaagaatttccttcacctgtcactttggtgacaggtggatgattgatgaccttcacgcggcgctgcgcggcgcgggaaaaaaacacccgcgaggatttggggcatcggatttggttaggcggctacatcatagggggagtcaaataggttttggttttgaaacaccccccatcgtgggtttttgatggggcggcaacttcaaagggctgcgccctcccataggcacgggctcgtgcgggaaacacccgcaaccaacccgcaaccttttggaactatatactactaaggtacaatattaatggaagagttcgggagttaatagatgttgggatatatcaaaaaaaattttatttatttttacatatagttatcatttaatttaggctaaataaaataaaattaaatagattttaaagaaattttttatgtgcaaatctcatgtctgaaacattttggttttatttaaaaaaaaccttatcaacttttgcgaaaagtatgattaaatttttaattttaaaacattcagcatagctgattaaaatttaattgaattcaaagataatagataaaaaaatccaaaattattttgaaattaataaatttgtccatgcaagtgccggtcccggatttgccaaaatttgcggtcccgctcaacttctacaacaaacgataaactatttctcggattttcagtcttaagaatgacgagttttaagaataattttattttatttttatcaacattcaatcaaaaattgaattaaagtattaaatatttttataattactttttaggtaacgaacaccgacaaaaaagtcatttctgcttatatanacttttaaattcatgaatgtttttattgatattgccacatgcttcgaataaaaagtcatttgtgcttctgggcttataacttttttctttgtcaaacaaacttaacaatctttgtacattcgaaagctctttacaggctatattagccttagaaagaaagattgataagctatgaaaaaatattctgaaaaaac

SEQ ID NO: 35355 - DNA, 914 bp, Heterodera glycines
ggcatgaaccagggatggcattccgaggcccaaaaatgtcggaaatcgaaattcagtgccatccccggcatgaaccagggatggcattccgaggcccaaaaatgtcggaaatcggaattccgtgccatccctggcatgaaccagtgatggcattccgaggcccaaaaatgtcggaaatcggaattccgtgccatccctggcatgaaccatttcatggatttacaccgcccaaacaagtatgctctccaaacttcatgtccgcagttttttatttattttcttgacaatactttttgatgtttataatgatatatctcaatactggtttggattaatgttttgctttctggataaatattttacaattttgcaccagtaaatttgaaagttgttagcgactatttgtccattttttgcacctaggtgagagttttttagaacctaaaaactaactgattttgacaggtgttagaaagaatgtgtttaaattttgaaaaacgaagttgcctgagactgtgagaatgacaaaaagccgataatttctccagatagctctctccagcccttctgatggagacgaacgattgtgtgtgggatcgtaagaacacatgaatgtgcaacatggcttaggaccaccaattaggagtcataagggaatttatttattcgttttgagaggcagctcacaatgagcccgaaataagtgagtccagaggcaactacttccttagcttaatgtgaattgccgcagaaaaacgctaaattaatacaagattagttaaataactattttttttaaataaaattaaatccaaagaagcctccttacataattacctttaataggcttggagcaaaattaacttaaagtaaattaaaaagaaacgaattctgtaaaaactaatctttctcat

SEQ ID NO: 35356 - DNA, 917 bp, Heterodera glycines
  unsure (1)..(917): unsure at all n locations
tgatcagtctagaacgttgggtgataaaatgaaaaaaataattaaaaaaaataatgctggtgtggtaagtgtgaagaactgtgttcctccaggcaaaaaattctaagaaaatttataagcatttgtagggttctcagcagtttccctgcaaaatttggtgagcttctgatcagtctagaacgttgggtgataaaatgaaaaaaataattaaaaaaaaataatgctggtgtggtaagtgtgaagaactgtgttcctccaggcaaaaaattctaagaaaatttataagcatttgaagggttctcagcagtttccctgcaaaatttggtgagcttctgatcagtctagaacgttgggtgataaaatgaaaaaaataattaaaaaaaaataatgctggtgtggtaagtgtgaagaactgtgttcctccaggcaaaaaattctaagaaaatttataagcatttgtagggttctcagcagtttccctgcaaaatttggtgagcttctgatcagtctagaacgttgggtgataaatgaaaaaaataattaaaaaaaaataatacttgtgtggtattaattcataaatattttttttcagaaaatgctctgaaacgcaccaaattttatttacatgttagtttaggcactctgatgctttttctatcaaaaagggagatgaataaattttaaaaaatttttaattcctttttaaacaggccaaaaagtttaggcttaacttttttttcagaaactgatcagaagcgcaccaaacttagcagggatactgaaaggaagagaaataacctattttaaatattatctagtcagttcatttaaataatttttatccaaaaaaaatttttttttggatttcngggcagtaccctgaaccgatgcgcccagatttatggggagaccgaatc

SEQ ID NO: 35357 - DNA, 100 bp, Heterodera glycines
atttagataaaaataatttattcaaatcataaaagcaatgagttcttatatattgatattcttgatattcaatttcctgaaaatttcctaaatctttgag

SEQ ID NO: 35358 - DNA, 1425 bp, Heterodera glycines
agtgctaacggaaggcggaagtcgacgggggagcaacgcgagacggaaaagcagcaccatcggacggatgaaggattggatagcggagcgggcgagcaccatcctcgtcaacaaagtgacaattgaacaaaacaccgggggaaggccaaaaacagtgccaaatttgcagatttatcccgaagagtcatcggacgacgaatcggagacggactcagaagaggaggtggaggacgagcagctgcagagggtagaggagcgggaagtggaagacgaaccaatacagctcgaagcggtggtggtcgagcggaggccgctgctgagggaagcggcgatcagaggagacggcggactggcgaacgcaacggacgcggggggaaagacagcggcggaaatgatcattcccgacagacgtggtctgtgatcagaaaaggatcgctgaattcaacccattgatcattcgttaagtgtcctttggctccattctctcaagccaacaaggctcaatgggcaaaaggaaggcaaagaaagcgccgaaattgccgaaaaattacgccgacgcattgcttcggtacgacccgagcaaaatccaagcgattcaggcgagggaaatggccaaactgcgcagagaaggacgaagtgcggactttaggtggaacaaatttgaaagaaatttgaatttaggaattaaaattggaaaggtcgcgactttttgccaaattcactgccaacaaacgcttcactcaaattgtggaatcgaatcagcccaaacaaatggtcagcagcagcatccaaacgtcgcccgtccaatcgccgattccatcgcgccgaacgtggcgactccgacggattggctgcggagttggtagggaccaaaaaaaaccaacaaagaaacattgattttgaattttgaaataaaaaatactaatttgcaaatggctcaatggatgcttggttcacaattagtcgaaaacaacggagagagaagcaggaaaagaatgagggagagagaaaaaagagagagaaaagtagagaaatatggggggagagagagagagtgaagcgagaaggtgagataagatggtatagaatgagaggctaattgacctccaagaatttatttaaatattaagggtagctaggaaatattaagcttaataaagtttactcaaaatttattttaatgttaaaagtcagttgattaatgatttaccatttaattgagggtcaatccttccctgacttttctaatcacttgtaagcatttcgctttttgtcccttcgctcttcagagtccatggactccacgtcgacctccgagatcaacgggctgaccacctcacggacggaaaacaacagttgtagtgccaacgacttggactccctctattccaacacttatttcgacctgcgctttggcggatcagt

SEQ ID NO: 35359 - DNA, 912 bp, Heterodera glycines
  unsure (1)..(912): unsure at all n locations
atgcttcggggagtattcatgacgcatttgagcaggagaaaatgctgncatcacnaatgntacagcaaattcgtgtgagaattttatgttttcaaatttcaaaattgaatttctaaaaaagactttatagaattgaaataaatacattaaaaacattttgaataattttcttattaaaaaatttcttacaaattagctaattaaaaaaaaatcattttttaatccgtcccaattttttccccagtttttaactgcaaatagagataatatctattaattaaaatgctaaggtgggaccggacaatgctcgtgtggccattgtcaaatttgcgtcagttggcaaagtgcgaacagtgcatgcttttgattcagttcaaaacaagcaaacggtgcttgacgtcatcaaaaacatgacattcagtgacgggaccactgcaatacattccgcactacaacaggtggttgatgtgaactcgtgtattcaattatccaattagttaattgagtggtatttatgtattcaattaattaatcagtttttgttctattaattaagtaattagactaatttgttattttggtgtattaattaactaattatctacgtattatcgctctctactgtcaatgcaccctcatcactttgatccgatccaatcacaacaagtatataattatttgatcacccatatttcatatgaaaaaatgctaattggaaatttaaaaaaatcgtccaatttatgagataagaataaggagatcagtggcagcgattgctccaatggatcaatcaggtcagtcatccccatcgacggttctgctgagaccagctgcacgtatatgcaggcgaatacgttgacacttaaaccaccacaatcactgagtcatcccctttccttgtaccacccattg

SEQ ID NO: 35360 - DNA, 1202 bp, Heterodera glycines
  unsure (1)..(1202): unsure at all n locations
atatatttaaaatttaataaaagtgtttattattttattcaataagctcnnnnnngnnttnnnnnnnnnngnnncntctttaaggnnnntnnnttgntnnntnnttatttatttatgtgatatataatgagtatgtaattgaaattgtttattatataatataattttatatgatttantgagtttataanatttaaattttattattttgattataaatgatagttttttaggttngtagagaanggaatgattgtattttgntgttttatgaagaaagaaaaagatatattttttaagtttgatgaganggaattggntngaagagttggggaataagngngataggngntgagttagaaaaaaaaagaattttgtatatttttngtttgatttnagtaataaatgggtaattttaggtttaagttttgaaatnttaaaggatttgtgggatggagangataggtgtngnaggggaaaattttataaaaatcccaagttttttcattttaaataaatacgacattgaacttatgggttttgagcgtgaaaattgcattaaaaattaatggtaataaaaagcattttaaaatttagaactctttttaaagttaattcaaaattaaatgtgattctgaaatacagtactactaaaaaagttaaaaatatgtaccaatatgtaaataaaaaatttatgatttttttttggtggttcataaatattgtattgaaaattaactttataaatttttcaataaataattaaataaattaattttaataaaagttagaatgtttcaaaataagaaattgcacaattatttttatttcttgtatttatttatttatctaacatgataatatcacatccttttttaaatatttttatattattattattattataattaaaataaaattattatcatttaataaatctcatggaatgtcatagcgcttgtgtataaccgagtggaagcattccatttgttgctttaacgtggggacaaaattggaactttcattaactgtttaaaagcttttcgatggattataataataataatttatattatattacttattttgatcaaattatattttttaattaagaatcttattttgctagggttntattattatttaaatgctttatttgccttacattttttttattatttcctttagattngtagctcgaa

SEQ ID NO: 35361 - DNA, 745 bp, Heterodera glycines
attattagggctgggatttttaggtgctaaaaatcccaaaataggtactaaaataggtgctaaaaaagtgcaaaataggtgctaaaaacccccaaaaaaggccaaaataggtattaaaaattcaagaaatcaagtgtgtttatgcgaaaaaatacaaatttttaacagtctatcaatttcgcgaaaacaattgcaaatcggatacattcgaggtgttcgggggtaaaactcattcgattatcggccaaaattgatttgtaaattgaaaaactgcattcaacgtcacaagaagtcaccggcgcatatttcatagattccagtacgtccggttccatatcaacatccgcccgaccgccagtcaaaattttggcgatatcaatcaatttaaggaaatgctgtaagaagtggaaagaaagtcgaaatttaggggtctatttttcaattttttgtattttccctcattttgtggctttttgataggtcaatgaggattttttggaaaatgaggatttgaggatttttgtggctttttaagaaattttgaggatttttgaggcttttggggaagatcctcaaaattttttaaattttgataaattggcataatgtttacaattatttaataattgggtttttaatagagcatcaaaacgaaaatctcacccaaattttcaaaaaaaattttgctaaattttttataaaaaccagaaaagaaccaattttttcaaaaaaaaatacaaaatta

SEQ ID NO: 35362 - DNA, 142 bp, Heterodera glycines
ttttttttttttttttttttttttttttttttttttgtttattttttacatgttttttttttttttttttttactttttttttttttttttttttttttttttttttttttttttttttttttttttttttttttttttttt

SEQ ID NO: 35363 - DNA, 1237 bp, Heterodera glycines
  unsure (1)..(1237): unsure at all n locations
aagtgagcgcttttggtttacnttttgaaattcttagtacattacaaaatgattttaaaaaggcnatttatatacacgagcattttacgggggctggaatttataaattctgagaatctcgtaaatttgctaaattttcacttttatcattggcaacactgctgaattgtgtgtgcatcaatcagttgccataattctctgactataacagcaatgggtgaattttaaaagatctgaaccttttaattaatgccgaatatggtaaaagtttgtaaggatcaaacgcagattttcggaacatataagcgcacctcatcatcttatcaagggcttcgagcagtttagcaaactcttttcattgtttgagtgtttttattattgtcgagcaatttacgaaagtgagcgcttttggtttaccttttgaaattctgagtacattacaaaatgatttttaaaaaggcatttatatacacgagcattttacgggggctggaatttataaattctgagaatctcgtaaatttgctaaattttcacttttatcattggcaacactgctgaattgtgcattaatcagttgccataattctttgagctataacagcaatgggtgcattttaaatagatctgaaccttttaattaatgccgaatatggtaaaagtttgtaaggattaaacgcagattttcggaacatataagcgcccctcatcatcttatcaagggcttcgagcagtttagcaaactcttttcattgtttgagtgtttttattattgtctagcaattcacgaaagtgagcgcttttggtttacctttagaaattctttagtacattacaaaatgatttttaaaaaggcatttatatacacgagcattttacgggggctggaatttataaattctgagaatctcgtaaatttgctaaattttcacttttatcattggcaacactgctgaattgtgtgtgcatcaatcagttgccataattctctgactataacagcaatgggtgaattttaaaagatctgaaccttttaattaatgcccacccaatatggtgaaaagttgtaaggattaaaggcagattttcggaacatataagcgcccctcatcgtcttataaagggcttcgagcagtttagcaaactcttttcatttgttgagtgtttttattattgtcgagcaatttacgaaagtgagcgccttttggtttaccttttgaaaatctgagtacattac

SEQ ID NO: 35364 - DNA, 787 bp, Heterodera glycines
cagcttgctgcctgaggtcttgctatgagatacatttccaattttttgactcgcccccactggttgacaaagacggctttcgttttgcaattagtcggtcaacattcggaaattggtctcgaattttttcggcaattaaaatttattaatttttttagcgcaaaatcaacaacaaaagcgaaattttcgcttttttgcttatttttgacataatttattaattttaagaaaatttaaatttattcaatattctcgagaaattttggcgaaaaaatgattttttgaaaaatttttcgggttttgggctcaaaaaggctaatttagctactggggccgttctaatagaggtttttttgaaaaatgccaaaatatggacataaaatatggaccaaaatgccaaaatatggaaatatggacataaatcgcgaaatatggaaaaatatggaaatatggatatagaaatccttcctagaagcttcaaaccaagctaaaaacataatttttattcactgatttcagtgcaaatgagtagggctgggatttttaagggcaaaaaaacaaaataggtacataaaaaaataatttttaaaattaaaattcttgccacgaaaatacctttttgagaaaattttttttcatttcctaggagtgctttttgaaattttttttgtcgattcttaggggtgtattttttgaaaaatttttaggtcgattcttaggggcgtattttttggttttattgcatttttgttaaggaattttgcccaaaaatgtcgaaatagtaaaa

SEQ ID NO: 35365 - DNA, 206 bp, Heterodera glycines
tttttttttttttttttagtttttgttttttttttttttttttttttttttttttatttatgttttttttttttttttttttttttttttttttttttttttttagaagagataggaagggggagggggaggcggtaggtaaagggaaaagaaacccggtattttttttttttttttttttttttttttttttttttttttttttt

SEQ ID NO: 35366 - DNA, 732 bp, Heterodera glycines
ctgaagtggccaccgccgaagagctctgtccaacaaccttacagcgcgactccgctttgtagagcagagtgaagggaaacgctgcccttcgcattgtgaccttgggcgcgcactttgagacgtgtgaactccacaatttgtccggcacaaatgttgctcatgcgcggcacacactcctgccagccgtgcatcgccatttcgtgctccaagttgtggtggtcaaaaatgatgcgcacgtcgtagccgcggatgtcggtttgtgttgtgaacgggccggccaggacgacaaggcccacgacgcggctgaaaagcggaaaatggaaatgctgaaaataaaataaaacaaaaagctcttacttcatcaccatatctggttgccactccaaatagatccaccaaaggtttgagaaaccattctcaccaattgccggcacaacggacgcaaattcgggctgaatgtgtttgttgaccatcttctgcatctgccgcgcatgcacaagtgcaaccgcctcacgcacactgggcgggagcgcctttaaacgaaaaatgtttaattttaaaatttggtattgccaccttcttttcctccacattgaaaaaaatgtttaaaaaaatgccacctcaagtccgccaattccgcctccaacagtaccgcgcatcgaaggcgtcccaacaccggggcgagctgcacacgaagcgtcacccccgccggccgtcaccagagcggcaaaa

SEQ ID NO: 35367 - DNA, 842 bp, Heterodera glycines
tgaagataaattctttaatccatttttgaatatatgtgtgatttgttcccaattttttcgctattttcgaattaattttattccattcttttgctgaatatttactacctttttgcttaattttctcttttattttgtaatatttttcaattttttctcttttttcttccaatctttcttcttctttttcttcctatttttctccaaatatttcatcaaatgactttttttgcaactttttctcttctgtttcaacttttgtaatttcaacaattaaaaatacaaataaaaataaaaatggaaataaacaaaatttcatatttttcaatgttatgcttaacaaaattataaacttcacaaaaaaaattactaatataataattgatgaatgaattgttaaaatattttcgattaatttaggaaatgcttttcaacgctaatcattgtcaattaaaaaataaaagcgttggattgattaccaaaacgaggacaaaaatatgtaaatataggacaatgattaaatattacaaagattttcatttcctcaggaccaacataaaaaacgcaacaacaaatttatgaaaaatgagaatatctttttaatatgccaatttttttttacaaaatttaatcaaagaataatatttcgtaataaaatataatccgggaccgggaccttttcgggttgaaaaaccgggaatttttggctggtaaaaccgggaaaaaaatgagacaagtcccggtcccggtcaaaaccgggaccttggtactcagttgtcccgcttttttcattaccaggtcccggtcccgcttcactctaatgaaaaggtaaatacatttga

SEQ ID NO: 35368 - DNA, 955 bp, Heterodera glycines
  unsure (1)..(955): unsure at all n locations
attagctgccatgatgaatgcaggaaatgccaaaaacggggattcgtcggggatggcagcttagtcgatgatcaattgtcatggcgatgtggtgatgtggtgattagttgtggcagtgatttttttttttcacccaatgcgtaatggtgatcagaaagctttcaagtgctgcttgctctgcagttaaaaccagttttctcattctctgcccctctctctttctctgttctatgtcagtcaaagactctctcatcagtgtgcacctttctctgtcacttcctttgcgcttgccctctgcccccggtcggcccttcccccgccccgcctctctctctctctctcgtctctccctctcccttcctctctctctatctctctcgcccctttctctcctctcctctctctccactatctctcttaactgtcggtctctcctcccattttcattcaacaataaatggcccccgggtcccacccattcttccattggctgcgctcattggcagaataaaaactgtttaattcttcttattattagtaggcacctatcaaagtatcatagttattatttttcaaaattcaaaattaaattattaaaaaatttattcgtgaaaaagtatcaaaaaatatatatatttctaaatttttccatagaatgtttccccatttcttgccaaaaaatatggcaccttcggtgcccaacaatcgggcacatcatcagcaccaccaaatgccaacaacagcaggtggacaaatgctccccttagccatcaacatcccctcagggcaaatagcacttcaggtagggtgattttatagtatttttatttgttaaaatattttattatttttataaatccattaaaatattttttttaaattccgtattaaaatattttatataaatcgaaattanaatattttataaaatatatccacgtgccacattttgttt

SEQ ID NO: 35369 - DNA, 1634 bp, Heterodera glycines
  unsure (1)..(1634): unsure at all n locations
aaagaaaaaaaaaaaaaagaaaaaaaaagaaaaaaaaaaaataaaaaaaaaaaagaaaaagaaaaaaaagaaaaaaggaaaaaaaagaaataaaataaaagaaaaataaggaaaaaaaaaagagagaaaaaaagagaaaggtnatgaaaaagaaaaaaaataaaaaaaagaaaatataaagaaagaaaaaaaaaaaaaaaaataaaaaaaaaaaaaaaaaaaataagataaaaaaaagaagaaaaaataaaaaaaaaaaaggataaaaaatgaaagaaaaaaagaaaaaaaaaaaaaaagaaaaaaaaaaaaaaaaaaaaaaaaaaaaaaaaagaaaaaaaaaaaaaaaaaaaaaaaaaaaaaaaaaaaaaaataaaaaaaaaaaaaaaaaaaaaaaaaaaaaaaaaaaaaaaaaaaaaaaaaaaaaaaaaaaaaaaaaaaaaaaaaaaaaaaaaaaaaaaaaaaaaaaagaagggggggggggggggggggggggggggcggggggggggggggggggggggggggggggggggggggggggtgggttttggttttttttattaaaaaaaaaaaaaaaaaaaaataaatattttttttccccccccccccccccccccccccccccccccgccccccccccccccccaccacaaaaaaaaaaaaaaaagaaaaaaaaaaagaaaaaaaaaaaaaaagcgcgtcaaagtgggggcagaggtgtggtggtggggggggggggggggggggggagaggaaaaaaaaaaaaaaaaaaaaaaataaatatttttttgtgtttgtttgtggtggtgttgttttttgttgtgggggggccgcccccccccccccccccccccccaccttttttctttttttttatttttttattattataggggttggaaagagggggggggggggggggggggccccccccccgcccccccgccgggggggagaaaaaaacaagaaggggtgttggggggggcccccccacccccacccccaaaaaaaccccccttttttttttttttttttttttttttatttttattaaaaaaaaaaaaaaatttttttttttaataaaaaaatatatataaaaaaaaaaaaaggggggggggggggccccccccccccttcggaaaacaccccgggggggaaacaacccccctgaaaaaaaaccacggggggttttttggggggagcccccccgtgagaaaatttttttttccccccanttcatggcctaattttgtcccacgaagacggtattgacatcaccagcagtgccttggcacccgttacggaacaacagctcccagtgctcatcgaaatgcgcgaactacgcatggagacggacacgcaattaattttaatgcggtttctcctcgtacttttcaatgtcccttttatcagtggttcgtatccccttgacagttgatggactattttttaagataattggaaaatttagtgtcgcgtcatttgcgaacacccggcataaacggcacgtcatttgcgaattttaaaaacaaacgtatgcggacatcgccatatacggaccgtcattagcggattgacgatttgcggaacgtcatctgccaattttaaaagccgacattcgcggacaaccac

SEQ ID NO: 35370 - DNA, 672 bp, Heterodera glycines
  unsure (1)..(672): unsure at all n locations
tttttcttatttttttttacacttctgttgaagaactatgctagtcttatcggtggatcactcggctcgtggatcgatgaagaacgcagccaactgcgataattagtgcgaactgcagaaaccttgaacacaaaacattcgaatgcacattgcgccattggagttacatccattggcacgcctggttcagggtcgttaccataaaatgcactgcttgtgcgttgcttcgtgggatcatgtacttgtacgtgttcttacgttacttgctcagctcggctgtggtgttttggtgtgctggcgcgaacttgtggttctaattcgcgttttacggaccgtaactcgggcgcaccaatgctttgcatgctgtggcggagtgcctggattactggcattcctgctttgatttttcgacctgaactcagacgtgaacacccgctgaacttaagcatatcagtaagcggaggaaaagaaactaacgaggattcccgtagtaacggcgagtgaactgggaagagtccagcgctgaatcgcagctcctctggggttgcgaggtgtagcgtatagaccgtgagcttgggttggcccgcttgttcaagtttcccttgaccggggctccagagaaggtgcaagacctgtccaactggncggtgcctacccatctttacgtgtctt

SEQ ID NO: 35371 - DNA, 977 bp, Heterodera glycines
  unsure (1)..(977): unsure at all n locations
ggaattaaaaattnttaaaaatttatttcatctccctttttgatagaaaaagcatcagagtgcctaaactaacatgtaaataaaatttggtgcgtttcagagcattttctggaaaaaatatttatgaattaattatgcaaaaaataaacaaataatgaactctcttccttaaatattttttcattgccacgaggtactcactcggccgcttcgcggcctcgtggtcggccttcgccccccctccgcccttcaaaattttgaaaaaaaaataaaataataggagactcagaattttgaaaattttttataaaaactgatgacaagctaatgtgataaaacaggttaattcttttcctttcagtatccctgcaaagtttggggcgcttctgataagtttctgaaaaaaaagttaagcctaaactttttggcctgtttaaaaaggaattaaaaatttttaaaaatttattcatctccctttttgatagaaaaagcatcagagtgcctaaactagcatgtaaataaaatttggtgcgtttcagagcattttctgaaaaaaatatttatgaattaattatgcaaaaataaataaaaatttctaaaaatttgatcgtccataaataatttgtaattgatcaggggctcaccaaattttgcagggatacgtatcggaacactacaaatgcttactaattttcctagattttttaaacccggtgaaaattttttgcagacaccaccacttttgcacttaaaaaaatttcaaaaaactttaaaaattcatagaaaatttaaattcataggtactactgctaaatcaacgcagagacgcctttccttgacctttttaggcccctgcaaaatctggtgcgcttctgatcactactcgaaaaatgagtgattgaattttcacataaaaagttaagcctaaaatttttggcctgtttaaaaaggaattaaaaattttaaaaattttattc

SEQ ID NO: 35372 - DNA, 881 bp, Heterodera glycines
tgatgtttttcttctcctgaagttacaaaaataataacaaattcatttccatattatttacgcttataaacaacatatggcagattaagataaagatcttttaggccaaaccaaaatttttgtttagtaatttattttgtttattttcatttttatttacaacagtgtccaattttctggtgtccatttttccattggtgtccaattttcggtgtccaatttaccgggagccccccatggggcccaatcgtactggggcccaatcggcggggcccaatcgacccggtccgtccatttcacctcatttccgccaaaagtgtaagtggcacatgtccttcttttggttattcatttattcataaaaaaaaaataaaaagtcatcagaagggcgagaaccacttactctgacgactattccggtaaatgtgtcgtagagtaagtgacaaaatatatggatgatcacaggaattaaaaaaagacaaaaatatgtgaaagtaaataataaataaattgaggtcaaagtcaaatgaggtcgaaataccaaatcacttagaaatttgttacattctagctttcccggtcttacataagaaaagtcagacctccaacaaagggaaaagtagttatttgttttttagggttgtaggagaaaaaaaaaattttttttgaggaaatgtttggaggtcgaggctctaggaaaatccgacattggaagaaacgaccccaaccttaaattttaaaaataatttatgttttttttaaattgaattgattgcattagacgcgttcaattgtaaatgatctgtttttttcatttcataaactcgtttgttatttttacaaaaaaattaatataatatttttaaaaaataaattttttt

SEQ ID NO: 35373 - DNA, 1092 bp, Heterodera glycines
  unsure (1)..(1092): unsure at all n locations
tatttttttttttgctaatctggttctgcgctgctaaatcctttcattggattcaaaaaaagattatggatcagtgatcagcattcgtttaaattgattaaatcagtgatcaatcgccgtgccgatcgacagacgaaccgccgtcgggcagacttaattaactaattaattatattgcgctgattgaatgttgcgtttgagcaaaactctgaaaacattgtgtttgattccgtttgacgtctcgtgacacacaaaaaaaagtggagcattttccgttttcatcaattaaattaacggttgaacgtctcgagagtctcgtgggaaatttgttgcgggtaaatgattcgatgtttcaagacggaaatgactgaaatgccgcggagggggcgggagtgggaagctgaacatgtctggatctatacgggttctcttantataataaccacagcagttcaaatgaaactttaaaaataaaaaaaagactaagaaaaattgcgcaattgttggaacgagaatgtgaaaatcagaaataaattcaaatattatggaaagttaattagacctacacattggcaaattttgactcacaattaacaaaattaccgtcaaatatttaaatgaaaaaaagatgcattgatggaatgacattcttaaaataatcaaaataattcaccatctgttaggcgggtctgaacccatgacaaatggtcatcaaaatttaagaggaaaaaataccttaaattaacttatttttgctttttttcatttgatcaattttttgatcagtttttatcagggcaaaaaagccaaaaattggtaatagatgaagcagccatggattttctagaattttttcatttaaaaaaaaaattttatttgagagaatgtgaaattgtttaaaaatttaacgcacgcaaaaatgttctgatttatcagaaatattctgatttgagggtagtgatctattttcatttgatatcttgaaattaataatatacattttaaaatttatggcataatttgagtattttaaaatgtgttaaaaatgatcataggaggcgaaaaacataattattatttgatacatttttt

SEQ ID NO: 35374 - DNA, 1018 bp, Heterodera glycines
  unsure (1)..(1018): unsure at all n locations
attgtcagaggtagagctgaaattaggtgatgaaacgtggtcttgattaaatttaaaaattttcgactcttgaggacaaaattctatgtctctgttgttccgggaatttaccatttagattcttgaagtcagttttgtttctaatggcagaaagaattttaaattttggctcccgaagccaaacattggctgcctcctcggttaattaaaaatttgactctcgaagccaagattcgattctcgaaaatcagtaaagcgaaaattgattctctaagccaagactgttttcgaatatcagtaaatctaaaatttcattcataaagccaagattctcgagtatcggtaagtcgaaaatcatttattaagccaaggctcgttctcgaatgtcggaaaatcaaaatttgtctctttaagctaagactcggtcttgaaaatttaaatcgaaaagtttgattctataagccaacactccgtctcgagtatcgcataacttctattatctcgatatcatttgaatacatcctaccgatgtttcttgttattttggttgtccatcatcaacagttgttcctcgttcagaccatgctgttcatcactgtcatcattatcccgtttatcgatgttggcattggcaccaccgctgctgctgctactctccgcttttttcgccattttttgctgcattttctttgcccgttcattttcaatgtccaacatgcgttttatggcattgaacaattcctatgaaattatttaatcattatttatttttctatagaaattagcaatggcttcgggggtcaactctcggtctcaggagtctcgaataaatttgggtcttcatttcggccatttttagcagactttcattaaaaattngtatttttantggatttttcaaaaattagtgaaatttttttttgaaattntggaagaggtaagtcttgggaggggatatcaccaagtaaaaaacgaaatttcagcaaaaatactttttttttctagtttattttaaggg

SEQ ID NO: 35375 - DNA, 1804 bp, Heterodera glycines
taatttgcccaacaaaatgtcagacgaccgaaaagaggcagagaaaaaaatggcaaaagcaatgtaaaatcaaaatcccaatttcaattttgttttcccttttcttcagcttcatctccggcgacgcatggctggcggtgtacgatttgcttccgccatcacaagttggactgggaattgcgacgatcagcctccgttatgactattacgtggacgaacatctcaagacgcgaaaatggacactgaaatttatccgaattcgaagcaaaattggcgagaatggcacggaaatagaaattgtcaattccgatggaaaagcattgccaattccgcaaattgaagtgccacgcaaagtcatcggattcgaatacatcagcatctcgtaaaattgggcgcgattatgcaaaaatttaagcaacttttcccctttcattttcagttacatcgaccacaatgtcatcgcttttgtcaaccgttttcgtccaattttcgatgtctgtcaaatcaatttggccatccgatcggcaggtgctcgcgctttggagaacattaagaacaacatttggccaatgatcaaacgaaacatttgtggcattcatttgtgcgaagacattttccaccgtttgcgacaattcgtcccgtcaattcacaacggctgtccatatcacttcgctttgtctctttccgttctgaggatctgatcatcaaatttccgatcgatgacagtgccatgggcttcggatggacaatcgttggccaattggctgttcactcctcgtctggacatgggccaaaggtgttcaattgcgcatgctcgtcgaagcggcggagcggttggaaagcaaaaatgaatggatttaaaacggtagtttgcagtaatttatttagtttaaatttacaatttaggcttttcgcatggctccttctcctgccaatttcattgtcgtcatttcatttccgtttttttctggtgattcaattgtcccttttgttctgaccaacgaagaggaacaattgacgttgcaattgattaacaaccaagcccgaccgttgtctgatcgtccgttgtcccattgtgcgcgacacgaacaactggggaaaattggaggaggaagcgattggctggcaattttgtgagcaatggaacagaattgacattgcaattaatgacaacaacattggagatgggtaagcgaatgcttattcgaaaaatttagatttatttgtatttgattgtttgtttttaagcctctcgacaatactcccggccctagtgatcgccgcaagtgaatgaatgatttgcggagaagtgaccgatcaatttgaattgtggcgtgggataaataatttgacgtttataaatgttctatttattgcggtgatcaattgtattgttaattaggaagtgatcggtctaattgaattatgtaattgccaaatgaatttcatgctatttgacccgtgctcataaaaattgttctctttaagttgggatccattttattgttaagtatgcctttaggataaatttagtaactgaaactgtaattggccttaagaataaccaaatttgtgatttggagttaacagttaaaactttgggacagcgggccaaagatgacctgcaaaaattttggaaaaattatcaaatcaaaaaatgatgaatttggcagtgaccgattcagagccgtacagaataatcattagggatttgatcatgaaatactttcatgtgctttatttgttggttcattagttaattaccgtaagttattttgggaatgtttcggaggactctttttga

SEQ ID NO: 35376 - DNA, 452 bp, Heterodera glycines
ctcattttcccaaccccccgcccccccccctcctattttgatatatcatagataaaatacactgtaaaaccaaccttccgaaattgtcgaactaaacgggaacacaaatacaacaattccagctcttgttgttgtgcattgatggtttctcggtcttccttgtgacgctcctcaatttcttcctctgcttgattggcccgattctccacatcttgaacaactgctcgaaacgcagcttcattcgccggctaaatgtttggcacattattattgggatttttcacattagttgtttaccctttttatatagttttctattttgaacaacattttagctgactgttttttggtaaacgaattgaaaaatataattgttccaaaaaaatataaaaatttttatttttaaatgtaaatagttatttttggcgttttgaacaatttagtcaaataac

SEQ ID NO: 35377 - DNA, 977 bp, Heterodera glycines
  unsure (1)..(977): unsure at all n locations
tcacaaattcggacatgtccacttcggtgatcagcgaatcgtcccgatcggagcgcaaatcccacaaataaatggcgccggtggagtcggcaacgatcagctccacttggttgggatgcagcacaacggagtgcaccggcgtgttcacctgaaacagaagacagcaaattgcgcagcaaaattttgtctcgcatagtaacaaaaaaacgggtccaaacatgcaaagcacaaaaatttgtgtgcatttcattttccccgcgaaaaatttaaaaaaaaaattcaaacttattgtcaggaaattttcacttgaaaaagtttcagatttttttcttgaaagatttctgtttgaaattttttaggaattttttttttggtgagatagtggtcaaaaagttcgtacatctactgctcgtcacccaaatttagtcaacatcttacttggaatatcctctggcaattcagctgattgttgcgcatatcccaaatctgaaaaaacattgccgaatttaaattttgcggattttgtgtccaactttggccatgcaatcctcccctcccgtgtacatccacgcaccgtccacttggaagcccaccgacgtcacatttttctcatggacactgcagaaaaaattagaaaaatattgtacaatatttcttgggacgaaattaaactcggactttccaaattcgtattgataccccgaattgtgtaataaacagaaattgtattgcaaatcgcagtacgagttggattttaccatcttttgcttttaattagtgtccaattaaacggtaaaaaacaaatttgtgcacaaaattcaaaatttgtctgaatttttgaccattttttanaaggaatttgataattttaaaataaatacgattcaaatttatcataattngacatgnncgtcctttttgcgtttctacgaaaatgtgtgtagtccttgcgcgngtggacattgcaaatcgtaaaa

SEQ ID NO: 35378 - DNA, 921 bp, Heterodera glycines
ctgaaatcagatttcagttttgaccacgttaagacctcagaatccccgtgtgattggggattctggggcatcattttgaggggggggggggtgcgggttcggacccggacggtgtaaattacttttatttttattttataattttttcattgttttaatacatttaaattattaacaaaaaaaaaattaatattttaaataaattatttttctgtgtgaaagtcattcttttaacaccccaaaattttcggaatttttttttgggccacaaggggggtgaaaaatatttttctggagtattttgagcacgaatacgatgtttattttgcgtctcagaatttttaaaaaaatttagcaaaaatttgcaattttttgcccttgggaatttgggttaaaatttgaaaattcatcataactcataatagaattggtcattttatatgcaataaaacaacaaaaatagagaaaaataagatgaagttaatgctttttatgtttattatatgttacatgttacttcaactgtcccctctctataaataccccacaaattttattttttgtttatttaatttctaatttattatatgttacatgttacttcaactgtcccctcaatataaataacccacaaatttttatttattgtttatttattttctaatttaatatgttacatgttacatgttatgttacatctaaggttgcaacaaccaccgcttcctcccaataattactctaccactttttttaaaattttcattattttaatatttaaatgtgttatatgttaaacttaaggaaattttacgtattattttccgcagtttttttctctatcttataaatttattgggattttataatttattagaaaaaagtataaaaataaagtgattttgggattcagaccaaaggggg

SEQ ID NO: 35379 - DNA, 1430 bp, Heterodera glycines
atggaatgttggtgggttgagtcccgttgaatggatgtggttggatgagttcccagtgatgggaatgttggtggatcgagtcccagtgattggaatgttggtggattgagtccagtgaaatgctggtgggttgagtcccagcgattggaaagtcagataattgagtctcagagatagaaatgtggtgggttgagtcccagagattggaatgtcattgaaagttggtgggttgagtgagtcccagtgtttagaatgccggagatttgagtccattgtttggaatgccggagatttgagtcccagagattgaaatgctggagggttgagtcccagtgattgaatgctggtgggttgagtcctgttgattggaatgttggtggattgagtcccagtgattggaatgctggagggttgagtcccagtgattggaatgttggtggattgagtcccagtgaaatgttggtgggttgagtcccagtgattgaaatgtaggagaattgagtgccagtgattggaatgctggtggattgagtcccaatgattggaatgttggtgggttgagtcccgttgattggaatgttggtggattgagtcccagtgattggaatgttggtggattgagtcccagtgaaatgttggtgggttgagtcccgttgaatggaatgttggtggattgagtcccaatgattggaatgttggtggattgagtcccagtgattgaaatgctggtggattgagtcccgttgaagttggtgggttgagtcccagtgtttagaatgccggagatttgagtccattgtttggaatgccggagatttgagtcccagagattgaaatgttggtgggttgagtcccgttgaatggaatgttggtgggttgagtcccgttgaatggaatgttggtggattgagtcccagtgattggaatgttggtgggttgagtcccgttgattggaatgttggtggattgagtccagtgaaatgctggtgggttgagtcccagcgattggaaagtcagataattgagtcccagagattggaatgtcattgaaagttggtgggttgagtgagtcccagtgtttagaatgccggagatttgagtccattgtttggaatgccggagatttgagtctcagagattgaaatgctggagggttgagtcccagtgattgaatgctggtgggttgagtcccgttgattggaatgttggtggattgagtcccaatgattggaatgttggtgggttgagtcccgttgattggaatgttggtggattgagtcccgttgattggactgttggtggattgagtcccagtgattgaaatactggtggattgagtcctgttgattgcaatgttggtggattgagtcccattgattggaatgctggagggttgagtcccagcgattggaatgttggtggattgagtc

SEQ ID NO: 35380 - DNA, 1080 bp, Heterodera glycines
  unsure (1)..(1080): unsure at all n locations
gccgtcagatccccgacttagcttcaaaacaggtaaagccacacattctctatcattatgaattttgatcgcctcacttcccggcaattcatggccgtaaaatgcgtttgaatttcacaacttttgccatcgcatgcaacttgtgtttttattttcaacggcgtgttggcgttgtgaaataaatcatatactgtatccatttgcaatttggacaacccttttctatacaaaaaactgggtttacggtcatacagcgaccgccattgcctttatagaaagtggccataaaatcagttcgtttaaagagagaactgcactttattctcatattagccgtcagatccccgacttagcttcaaaacaggtaaagccacacattctctatcattatgaattttgatcgcctcacttcccggcaattcatggccgtaaaatgcgtttgaatttcacaacttttgccatcacatgcaacttgtgtttttattttcaacggcgtgttggcgttgtgaaataaatcagatactgtatccatttgcaatttggacaacccttttctatacaaaaaactgggtttacggtcatacagcgaccgccatcgcctttatagaaagtggccataaaatcagttcgtttaaagagcgaactgcactttattctcatattagccgtcagaccccgacttagcttcaaaacaggtaaagccacacattctctatcattatgaattttgatcgcctcacttcccggcaattcatggccgtaaaatgcgtttgaatttcacaacttttgccatcacatgcaacttgtgtttttattttcaacggcgtgttggcgttgtgaaataaatcagatactgtatccttttgcaatttggacaacccttttctatacaaaaaactgggtttacggtcatacagcgaccgccatcgcctttatagaaagtggccataaaatcagttcgtttaaagagagaactgcactttattctcatattagccgtcagatgcccgacttagcttcanaacagttaaagccacacattctctatcattatgaaatttgatcgcctcacttcccggg

SEQ ID NO: 35381 - DNA, 1387 bp, Heterodera glycines
tttttgcgattattaagctcattggtaggattttcatttaaaaaatgataaaatatgtatcaatttaaaaaaaaactatgaggaatcatattttctttataggaaacccacgagtatacaaaaaaaaaaattgaaaataatctaatttctgtagagggattgaaccaggggaaagaagaagggaaagtgaaggagactagccattaggccatttgcacacttgggcaatgttacttttaaagaatatattaattattattttttatttttccctttgactccaattttcttcactaatttttcactcacaaatcagaccccattcttaccagtgcttgtttttcccggttcccggttgccctaccgggaccgggacctgagcttttcaaaacccggaacaccgggaccgacaagcactgaggacgaatgaattcccggcccggtcccggtcccgctctactctaaaaaaactcatcaaaaatttatttttcattaaatccatttttaaaataaataaaatttttattttcactttgtgttttttcactatgtgattttctaaaaaaaaataatattttaaagcattaattataattattcattctttattatggcttgcaggtgcgtcgccgctgcattacgcggtgttcgggcgccatttggacgtatgctcggcgttggtggaggcgggcatcgatgtcaagcagcaggcggggaagagtggcattacggcactgcacgcggcgtacctcgcgaacgatttgaacatcggtcagtcagccagcgatggcgaaaattgggcaccaatttaattattattattttttttaatacgatacatttatttaattaaatttaaaaaataataatacaggagtgcaccaaaagcatacatatacaaggggtgttgggcggagtaggacaaaactccgtcgaccgaaactccgccaagaaaattttttttttaaattcaaacatagaaaatcttaggaaaattctttcttagaaaattcgaagaaaaaaaaagttcacggattttttagtcaaatttcttgtggaagaagctggcgctgacttggaaattcgcgacgccacaggggaggacggcgctaatgggcgccgcctctgacggactagcggacattgtgcaatatttggtcacgaagaaagcacgcacggattggaaggatgaaaatggtggaggtgatactgcattattatgcaatatttgtttgaccaaaaccgaacttttctggggccagaaaattcaaatcaagcggagtcataattcgttgatcgcaagcggagaagggcagaaaattccgaaaattttggctaaatttcctttttatgttcataaaattctgatattttcccggctgtgcct

SEQ ID NO: 35382 - DNA, 971 bp, Heterodera glycines
ttttccttttcctcctcctcctccgtgtgcttcttctccctctttttgttgctcctcttttgcttcttcaccgtttgctgctgcttcttcttgcgttttcgttgcggaagtggcaaaggcgcggcgacaattgcggcaccgccgcctccgcccctttccgcggcactgctgctgccattttcgtccgtcactgtcagcagtgtgtgttggccttcgtccgatgagtcaaccttaagggatgctctgatcacttccattcattccctgatcatttcaatgattgctcaattgctgatcattccccgaattggactttgtctggccgaatgttcctggccaaattcttctgctgttgttccatcatcagcgagcagtaagtgaagtaaactctcttccgatagcgccatttcccattgtaaattgcatgtctgttgtggtgggtgccaaatgtaaaattcttaaccaacaaatgttcctttgacttgcctaaatttgcgaaggtccctcagaaatttgtacaccggaactgtcatcagacgcaagtaaatttgaacgggaatgaacgccaaagaaaagaaagcgacgaagcgaataagcaaagggttgcgcttcgcgtaaatgcgccgttcgtcgtaaccgccaaaaaaatagggaggggggagggattggcacgatgaaaaagcggcaaaaaaaatgccgaaaagactgaccgaaatcggcggccaaagtgaacgacgcgttgagaatgaggaaaacgcaggtgcaatattggaacatcagctgaacgcacagaagacgcggactacgcgtgaagatggcgatgatgaaaagggacttgaagcagaagaacaccgcaagttggagcagagtcagcgaaaggaccgtggaggggacgagggccgaagcggagggacgcgccggaggggcggcggaagcgacgcccgagggaccgcccggcagcagaagcagca

SEQ ID NO: 35383 - DNA, 1785 bp, Heterodera glycines
  unsure (1)..(1785): unsure at all n locations
ggcaagaatgtcttcattaatcaagaacgaaagtcattggttcgaaggcgatcagataccgccctagttctgaccgtaaacgatgccaactagcgatccgccggtggatttattcgccctggtggggagcttcccggaaacgaaagtcttccggttccgggggaagtatggttgcaaagctgaaacttaaaggaattgacggaagggcaccaccaggagtggagcctgcggcttaatttgactcaacacggggaaactcacccggcccggacaccgtaaggattgacagattgatagctttttcatgattcggtggatggtggtgcatggccgttcttagttcgtggagcgatttgtctggtttattccgataacgagcgagactctagcctactaaatagttggctcattgcttctgtgggcacaacttcttagagggattttcggtgttcagccgcacgaaattgagcaataacaggtctgtgatgcccttagatgtccggggctgcacgcgcgctacactggcaaaatcagcgtgcttgtccttccccgaaaggggttggtaaaccggtgaaaatttgccgtgattgggatcggacattgcaattattgtccgtgaacgaggaattccttgtaggggcgagtcatcaactcgctctgaatacgtccctgccctttgtacacaccgcccgtcgctgcccgggactgagccatttcgagaaattcggggacggttagtgttccggcttcggtcggtatgcagactggaaccgatttaatcgcagtggcttgaaccgggcaaaagtcgtaacaaggtagctgtaggtgaacctgctgctagatcattaacccnaagtgattcctattcaccacctacctgctgtccctgtgggctagcgttggcaccaccaaatgcccccgtccgctgatgggcacaggtcgttcgagatgacttgtggacgctgcccaacattacggggcagctgcctcacgagccatgcttttggggtgcttccatacgttggagctgtggtataccgctcagtgctgcacatgtgaaagcctgtgtatggctgctgcgtggcaatgtgtcggtggcgggccgcctcgcttggctggttcgctgcgccaatgtgggatgcacgctcgtggggcgacctaacggctgtgctggcgtctgtgcgtcgttgagcggttgttgtggcaggcacataacacactgactggggatggtggtttcgttcccggtcttacgtgccgtaactagcggtgtgtttgtgcttgctgctacgtccgtggccgtgatgagacgacgcggtagggcccgtgcttggcctagcacgtggcttaagactcaatgagtgtcagctcgggcaccgccagctttttctttttttttcattatttttttttacacttctgttgaagaatgaattctagtcttatcggtggatcactcggctcgtggatcgatgaagaacgcagccaactgcgataattagtgcgaactgcagaaaccttgaacacaaaacattcgaatgcacattgcgccattggagttacatccattggcacgcctggttcagggtcgttaccataaaatgcactgcttgtgcgttgcttcgtgggatcatgtacttgtacgtgttcttacgttacttgctcagctcggctgtggtgttttggtgtgctggcgcgaacttgtggttctaattcgcgttttacggaccgtaactcgggcgcaccaatgctttgcatgctgtggcggagtgcctggattactgg

SEQ ID NO: 35384 - DNA, 1085 bp, Heterodera glycines
accgaccgttcttttttttcaacatcctgagctaaccatttactgtctaatgtctatttttataatttgacgttgttttgctagagccccgccgggattttgccagggtttccggtcccggtttcaattagttagtacacaaatctgaaagtattgaatgatttactttatgtacctatgtgccaacaacttttcatgaatgaaattatctgtgcgctacttgccaacaatgaaaagccataaaatttttggtctcatgaaaatttctggcataggtacacagaaaccctgaaaattctgtcgcataaacaatcgcattcttattcattccttagatttgtttcatttgatctttggccctccaattttgtaaaaatttgttttatttcaatttttgactctcattaatttgtaaaaactgtcttctttttctgttcaaaattacacttttacataaaaaccccattttagaagacatattcactcgatcaaagaacggcttgacaaatatggaggttgaggtgaaacagcaagagggtttctatctgaaggcaattgtgaccgatgtgttggagaattcgctggacgttgtttatgaccgtggatgccgaaagccggaaactgtggaattcaggtttcaaactcagtgaataagagggcatttctaataaggatatttccatccattcggagggcaaatgaatgaattaaactcggaattggaatgaatttggacatgagatgggtttggacaaaactattttccaaaaattatgaaaatttctttggcagttttcggggttgctgatcaagattattttcgttttaaccaattccaaattcgagaaattaatttttcgatcttttcttagagttcagtttaggcattggaaattggtcgaaatatataccgattcgtgttaagtgaacctgaaatttttattaccatttgaccccaaatggcaaaaattttccttttttgcgcaaaatcgctacaaattcctgttttttttgtggctccggcgctgaaattttttgaaaaacaacaccggtaaaaaaatagatagcccggagcaaaaaaaaaa

SEQ ID NO: 35385 - DNA, 1023 bp, Heterodera glycines
ttttgtaagaaactcacttgacaaagaaacatggaaatggtcaattccgtaaattcaatgattccaaactttcaaaagttcttttcttcttttttgttctttttcgctttgtccagtttcgttttggcatattgttcagggtgttcttttttcaaatgtgcccataaagctgaagttgaactttgctcagaaagtttaatttttgttgagcaataatggcatatgtttttcattaaagtgcgattttgcgtaaaatgttcccaaatttcgctaacttttgactaaatttgatgttaaatttagttttaaaaagtaaagctctaattactaataggatattactcgaattaataagattttataaatcgtgcgaggtgatatttaatttcgccaacggtaagaaatgactaaacaaaaacatcatattgctcaaaggcagcggttctttatttatattaaatttcaaaaaagaattaataaaatttagatttctccattttttggactttgataaaacttcgttatctcaaaatattccctattaatatataaaatttaaaataaatttcaatcaaaattctgaaatagtttgattatacgaaaaaaatttgtacgcacattattggatttgtttcttttgactgtttctttgttttgtccaacaatatcattttgattgtgattttggtcaattttgttgtccatttttctttttaatgtgtcttgttttgcttccaattctttaatttcttgtttatgttcttcttaaaaaagaaattaatatgatttgcagaaaagataggactggcaacatccaattcaagcttttttaaacaaattttaagaacaaagggtttgttatggctaaaggcacgtccgggaacttttaaattagattcaaatacttaaatttttgtagatttgcagaaaaaatgacgattatttgagtgttttgaaaaaaggacaaaaaagatactgtttcgaaacaacatctcgtgcccatttttaggaaagcaatcctaa

SEQ ID NO: 35386 - DNA, 618 bp, Heterodera glycines
ccccccccccccccccccgcgagacttttttttttttttttttttttttttttttattgaacaaaaaaaaaatattttttttttaaaaaaaaaaaaaaaaaaaaaaaaaaccccccccccccccaccccccgtgtttgttttttgtggggcccccccccccccccccccccccccccacaaaaaaaaaaaaaaaaatccccccccccccccccccccgcccgagaggggaaaggaaaccccccccccccccccccccccccccccccgcgaaaaaaaaaaaaaaaaaaaaaaagaaaagaaaccccccccgggggggggggggagccccccccccctttttttttttttttttttttttttttttttttgttttgaaaaaaaaaaaaaaacaactatctttcttttttaaaaaagaaaaagaaaaggaaaaataatttttttttttttttttttttttttcccccccccccccccggcggggggggggggggggggggggggggggggggacaaaaaaaaaaaaaaaataaaaatattattttttttttacacccccccccccccccccccccccccccccccacccaacaaaaaaaaaaaaacaaattatttttttt

SEQ ID NO: 35387 - DNA, 849 bp, Heterodera glycines
cacattccaatcaccgtggactcaaccctccagcattccaatcactgggactcaattctcctgcatttcaatcactgggattcaaatctccggcatttcaatcactgggactcaacccaccagcacttcaatcaccggggctcaattctcttgcatttgaatcactgggactcaaccctccagcatttcaatcactggaactcaatccaccagcattccagtcactgggactcaaatctccggcattccaatcactgggacctaacctcacctggtacttcggcatcgcaatcaccgggactccattctgtgacattccaatcactggaactcaattcttaggctttccaatcactgggactcaacccaccaactttcaatgacattccaatcactgaaactcaacccaccagcattccaatctctgggactcaacccaccaacattccaatcaacgggactcaattctttccagtgagtttattgcatggtattggccgaagagttggcggacatggaaatgctattgggtcggcgagaaatgatgtgcagtatacgcagtcgagattggacggcgcccacccagtttttgtgcgtcaaatggctgttcactcccaactgacagctctgcgtcaatcggctaaccaactatctggtatagcgacaaattcgtccgaacaccttgcttaaaaccctcaagcggagaacattctttgcatcaacaatccgcagcaacaaattggcaatttcagcagaatttgccgcggcaaacggttcgtagaattgacaatgtcggacatgacgattgcaattaccgttgtgacaggagaaacatatacgtagaaccaa

SEQ ID NO: 35388 - DNA, 835 bp, Heterodera glycines
gtccctttataccgtggcaaccgcactcccccccccccccgctctaccgccatccccaccctgtgccgtcctctcgtgctgccccccccccccgaactctttccccgtctcccccctccgctccgtcctctgtcactcaccagatgaactcgattggggttccatgtttacggaggccattctctccgtttgttgttgcattggttgttgtggctgctgatggtggagcagtgccaattggagggccgccgtcaccgggtcgagttggtgccgttggtggagaggagggggcggcggattgttccgttgtggctaaaagcaactttgatggaacatattatttctcatcagtcgcaccacagaagcagcagcaagtgccaattgttgttctacggagagaagggatgacaaagagacggaggacgacggagaaacgcccgggggaacggccaacggatggacggcggacagagaaacggaggaagcgcaagcggagtcgaggagcaacggctgctcttcatcttcgactgctgaattagtggaagaagatactctcggtttctgctggtaatctccatttggcattgttcctttctcagaaaccctttcatccctcttatcccaccccctcctccctcttactctctccactttttcttacacaactctctcccccgctttacctcccccccccccctccttccgaacccctcttccgccttttctccctcttccctcccctcttgtctcgtcccttggacctgggagttttctcaatgctcgacccgacattctgtccgaccgtgccccttccctgtctgtgttcctcttctcc

SEQ ID NO: 35389 - DNA, 811 bp, Heterodera glycines
gtcttccggttcggttattttacaaaaacggaaccgggagtcccggtaagatcccactgggtcccggtcaacagtcaattgagttataagaagggatagacgatccgatcgtcttttcagtatttctcattcacagtcaaggttagctaattagtgttatggtcaatttgcagccactctcttccccttttcgtctctcattgtctcctattctctccctctctttttaccccttccattctctccccttttccttttcctcttccatgtctctactcctttcttcctcatccccccttctctccttccttcttcagtgggatgatcaccaaaactgacactgtgtgaatattattccgatgtttaaatggtccaattcagaaaaaaacgatgaatgggtgagatctgaggaaaggatgagaaaatatgagtggaggacggacggaccgaccgaccgaagagattgtcccccaccaccgctcgtttccttttctcacagctcacgccccggcactctatggaagtgcaaattgggaatatgcacttcccgctctccggagatgatgatgatgaccccatcattcgacgtccggggccgttgtttgcgttgggggagggggaagagccgctgagggcgcggaggacacacaaacagccccagggaggggggggggaagccgagtgatttacgacgagaaacggaacagtcatcccacatccatccatcttcatatcgtcactcatcgtcatgacaatgtcatgtccatctcacatcacttcctcctcctcccctcctctgatcacttcattt

SEQ ID NO: 35390 - DNA, 748 bp, Heterodera glycines
  unsure (1)..(748): unsure at all n locations
tctctattttaattttttaatagatttttaaatgtttggattttttttggcttaccaaaacttcatcgaacctggttctttctattctctttctaatcgccccaaattttttttacagcttaactaggccctattaagcttatttccagaaaatctcgcatgaattctcatttttaaattttttatagatttttaaatgtttggattttttttggcttaccaaaacttcatcgaacctggttctttctattctctttcaaatcgccccaaattttttttacagcttaactaggcgatattaagcttatttccagaaaatctcgcatgaattctcatttttatttttttaatagatttttaaatgtttggattttttttttggcttaccaaaacttcatcgaacctggttctttctattctctttcaaatcaccccaaatttttttttacagcttaactaggccctattaagcttatttccagaaaatctcgcatgaattctcatttaaaaaattttttaattgctttttaaatatgccaaaaaatgtaggcttaacttttttagtgaaaattcgatcactcatattttttgctaattgagcagaagcgtaccaaactttgcagggatactccccggtaaaggactaacttacactgaaatgagcaacgagctagctggctcaaaaaaattttcgaaaatctcagaatgggtttttatttattttttgcaaaanttaattcttaaatat

SEQ ID NO: 35391 - DNA, 1178 bp, Heterodera glycines
  unsure (1)..(1178): unsure at all n locations
cgcgcgttgcttttctccgtgatcaatcagccaccggtgcaaangccggtttcagcgtagaaaagcggcgagatggatcgctgagaaatcgataattatttattgattagaattaaaaaatctgttaccgttccaactcttcaattacggtattcagaatgaactgtacaccgaccggaacaattgcagcttttgctttaataaagcataaatagattaaaaaactcgatcaaatatttgggcttgaagtatttttaattatttgtataagcttgataaacaatttgtttaaatacggttaattgtggtatttaaaaaaaaaaaattcttcaagaaaattttgaatttttcatgattttttagtataattttttgtcttttaaccgaataaaaatagcgtttaattatttatttaatattaataaaacaattttgttgaacttacttcccgtgtagtaatcgtcggccgtcttcagccaacccaaatcgtcgtgtcttaaggttttttcatataattacgcataattatgcattaattagtgctaataaaatcgagatgggcaggggtcgcggttttcttttcggctttttcgactttttttttaccgaaaccccctaataaccgatcgaccatttgtgccgatctcaactaataattacgtgtgagcaattaaatgaacgttgattgcacccggttttgtggaccatttgttacaattctaaaaaaaatttttaattttttaaaaattattttttaattttatggacctgccaagcacaattttgtgacgctttgccaaaaatcagtgcatttataaatataattagtaaaaataacttgggcattttttgaacaagtgacttaaagcattaaattaaaacggaaaaaaaggaaattttatttaaattcaaaaaatatttctttccattaatttataaggcaaaaaaatataatttaaaaaaaacttaaaaataaactattttatgatttttatggataaataataacttttttattttatttattgtgaatgaataaattggaaatgaatttaaaatccttttatttatttttattanattttcatattatacatattttttcagccatttaaaaattattctgcagatagagcaacaactgtttaatgttttgtagtaattgctccaaaactttt

SEQ ID NO: 35392 - DNA, 1027 bp, Heterodera glycines
  unsure (1)..(1027): unsure at all n locations
atggaattggtggaaggttgcatttaaaatacccttttggtgaaatatttttgacacttttcaatttttttaatgtttttttgaagagacggattccaaacctcctgagcgtattccaataaaggcctaatataagttttatataacgtaatccaaattttagacgatttggatttaattattcgaaacaaggaacgcatacgtaaatacgcattccttgttatttggttaatatgatcggaaaattgtaatttgtaatcaatgtttactcataaatccctaattgtatccacagcatttattgtattcccatcaaatttatatgtttttgaacccaaatataataaaaaagttttttgaactgaaacttttatttgccatttatttccattcgaataaattatgcaatgctttgtgcataatttataagtcggatcttgctttataggatatatacattttaacatcatcagcatataatttaatattcactcctgatggtaaggcatcaggaagatcgttaatataaatcaaaaataataaaggtccaaggacagagccctgggggacgccagagccaacttttttacttgaggataaagaatccccaattttaacacgaaaagtcctattactcaaaaagctttttatccacattaaaagtttgccacattaaaagtttgccccgtataccaattttttccaatttgtataacagtaaattatggggcactgagtcaaaagctttctgaaaatcaatgtaaatacagtcaacattttttccattaataattgcatcgtacaatcttccacaactgttattagttgactcgttgtagacctattcctaacaaaaaccaattgatattccgaaattttgttgttttttagtagaanatttgtaatattcctgcntagaattttctttcataccctgcaaagtgagcagggtatagaaataggcctataatttttaggattaaatttaatccccttttttgaaaagagggaaaataactgattcctt

SEQ ID NO: 35393 - DNA, 1270 bp, Heterodera glycines
ttcttgtaagaattttcagatgacttgagaaaaagtttaaaccagaaaatcttgcaaaaatttttgtttcttcatcacaatttgcttttaaccggtttctcaattgaatgatttatgttttaaattaaaatttttttttgaaaattacggattacggcctttttgggcccaaataagcatgttattcaaggtctaaaaccaaacagaacttagtgccttctaacgctacgtttagaaagctatatgattgacaaaaactcaggtttccatgggttttcatttatatacctaaaaagaaatccctattaataaaatgtaattcctttaatttattttttaaattttcaattgaaaaataaagaattcttgtcgaaaaaattaatttaaatgtgacaacataaggagagatgaaattatatatcaaacgagcgactgggaaccgcttcacggtttccactaactcgatttgttttaaaatgttaaagcacatacccttgcacgccacgcaaatccgagttcagtttgaccaatgcttgtctggcatctgtactgtttgctgtctgtagaactaaatactttggtttagttgactttgtatgtattgtcccccctttgaattgaccaaaagtgcttaaatggattaatcaaaaaatatataaatttttaaatattcattaattacagcgtttcatatgttggtattcttccatgcgaatgatatcgctattttgaaaatggcgcttttcaattttctgaaaaagctccagaacttcggcatatccctccatctgttcctgtgttggcaaacggcaagcagtctttagggaggtcttcatgtcctgtaaaacattttattttttaataaacattttacttgaaccaatgctaaatgattattggatgcttaatgccatttttcgaaaattgaaatactcacaaccagaacaatcaatggtgatgaaccaatttcagaacatttttcaatgaattgttgtttatataaggaacgttctttgtttgggtccgtaatatcgttgtaaaagagttcaatgcgatccaatggccgtgttactacctaataaataaaataaacacgagaaatacattattcctggggaattaaagtaatcatttaatttctgtttttaatacctttgtataatcacttttggctaaaagttcgtcgaattttattgttagttctcctatttccattttgagcttttcaaattgagtatttaagtagttatgcaattgtgtgatggcttct

SEQ ID NO: 35394 - DNA, 1070 bp, Heterodera glycines
caggggaatcaacccgaaatgtcaaaaagtaaaagcggcgaaagaatgaagaggaattatgataaaaaggctggtaaagcgaagaattttgaaaatggacagccgatttttgcgcgaaattaccttggtgggccaaaatggatgcagggacgaatcttagaaaagattggagcagcaatgttccgtgtaaagaccgcccgtggagtatggtgccggcattttgatcagctcaaagctgatttgacttcgacagctgacaattgtgatcaggagtccgaatcggaaagtgagacagatgcggaatcggacgacgaacaacaaccgcaaccaattccgattgggtgtccacgccaagaaattcggcagaaaattgcgcctgagggaggtgtgcctgatcaggcattgcgccgatcaactcgcgatcggaagaaaagggtaatttttgacccctcgtgaggcgcattccgctcaaagaagggggaaggaattgtagtgtttaagtggatattttgaattttaaatgcccacatttcccgcccattttactgcccataaatatggaattgtttccacttcctttgctttttccaccattcattttgtcatttaatttatctgcatttattatttgtcctttgacctaccaattttctgtgttttatttatttggaataaatcaatattccctttaactgttgctcggacacaacacaaacgaataatgttaaaaagaaataatatgattccatcaaagaaattcttttgttacgtaaatattttttatttattcagtgtcaattctcggaatatgtacactctaataattacttagaattacaaacgaataatgttaaaaagaaataatatgattccatcaaagaaattcttttgttacgtaaatatttttcatttattcagtgtcaattctcggaatatgtacactctaataattacttagaattacaaacgcataatgttaaaaagaaataatatgattccatcaaagaaattcttttgttacataaatatttttcatttattcagtgtcaattctcggaatatgtacactc

SEQ ID NO: 35395 - DNA, 1075 bp, Heterodera glycines
  unsure (1)..(1075): unsure at all n locations
tttggtgataatataagaatgatttggaaaaagatcccaccccggaaaatgtgctggttttatacttttgaaatcgcttctgctccgcccacttttcagctcgacaagttcatccgctcaaaaccaaaaatcattttaataatttcttaaataaaaatgtcttcaatgaacgataatgtaacggtgcaaggtgaaagaaatggacctcaaacggatatcgaagctgtgaatactgacaaggtccaacccaaaccaaacacccgcagcatgatcaaaaaaagtcgctgggacaataattgtgcaaaacctgtgcaaaaggatgctgaagaagcgccagctgtcaaaaagaggaaagtcgaggacaacgagctgtggaaactcatgaagggaaagtatctattgggcttctacctgtgtgcgggtaatttttaaaactttaacaaaggtcatttaaaattttaagaggattggaacaagctgtacttcaataaaggaaaggtgctgcgcgctgtggatcatcagcacttctctgtgaactttgagatgtgcgaagattgcgcccgaaagaacatttttgccaccgatttgctggccccaccaaaaataaaaaaatataatgagtgacagattcatattgatgaactttcacacaaattataatcatttattttaatttcaacagataaagcatcaattacgcgatctcaaatgtcagattagtgagaattttaacatatttcatcgccccttccctcctttctcagaacaaggtgtgaacttcacacnncttaactgtccgaacgcccccccccaaccaacttttgtcaccgttcaaaaaaaggtgtgaatttcacaccttaactcatccgcccccccctcctccctcaccaattcaccaccacttcatccaaaaccaggtgtgaatttcacacctggtcattgacctattgacccccattcacatttcaaaaaaatcccgacccacccatcaacacctacgggactcctccccaaactacgcaataggtttaggcttaaacctatcacccccctcccgcgcaccccctccaccgat

SEQ ID NO: 35396 - DNA, 715 bp, Heterodera glycines
  unsure (1)..(715): unsure at all n locations
acaaatgttctcgcataattaaacaaattaattttttctttaatttaaatttgaaaaagcaaaatttgctctccccagcccaaccaaacgtcttaaaagtctctgaaatttctttatttttttttacaaatccaagatattcctaaaaaaatttaaaattccacctacccgttccccccccccttcccgttaaatgtttgctaaaaattaatttgaatataagttactctccccaccccaaccaaacgccctaaaagcctttgatattttttaaattttttacaaaatccaaaatatggaccctttaaatttttgattaaaattctttcgctggtgttccttttgtcgttcatccttctccaaatccaaaatgctaacttggtaatccacattaaattccaaaaattaaggcttacaaacagtttttattgaccctcgtctcctgccgattattttttttacaaattggaatgaatcaccccttagcagttcctttaataaagcacatgcttctccccctcctcttctctcttccacggtccattgttctttctgatcactttctcagcagcctgatcagcgccacaatgcgatcagtcagcagcaaataaaccagtttcaacaaaaccacagacgccgaggcggaggggaaagtgaaatgcgcgactttctccgncggcgcggccccccccgggggctcgccgccgcgccgccc

SEQ ID NO: 35397 - DNA, 857 bp, Heterodera glycines
gggatcgctcctccgccggagacggcaaagacaacctccgatttgaattgtttcgactgaatgatttgcaaaatgtgcgactgagggaaaagttacggtgggaagcggtggacacttttggaaagggcgcggcggaggaaaagcggcgatccgatcagccgaaggtgggggcacctctgatcagtcagtaccatcattcgccatgttcctcagaatgttcgtccttcgtccgtctttcgccccgcggtgactgttcagtccgctgacattgtgcgcgtccgcgccgatgccatcgtcgacccgctgaagggatcactgttcgccgcactgctccaatcgccagcggaggaaacgacggaaaaagtgttggaagcaaagtccattttggacgtattggaaatggatgacgatgaggaggaggaggagaagggaatgtcactgatcagcagggccaatgtgaggagacagctgagagggatggcacaactgctggaggaggaaagtgccaaagggaacggaacggaagagaaaaggagcgccggaaagagagccgcgagggcaaagcaacgtcagcggagggggggggggaattccaaatgaattaaacatcggcattttgttttcaaattgcccttcctttaaaaatagtttgtgccaaatccagtccgttgcagaattggagcattggctgcaggcattgaaagtgccgcaaacattcgccgcccttcggggagaagccgaacgatggcgacagacgaaaagcgccatggcgggcgccgaccagcgaatttttggcacagggagggggccgcctttgaagggaaaactgcgcgagttggcccagcgactcgtcgcgg

SEQ ID NO: 35398 - DNA, 1526 bp, Heterodera glycines
ttatttgtctaaaatttttgtaattattttaaacacgtcgctaaaaatttcattgcgtcaaaaaaaatcatctggaaaatatcaaaataggtgctaaaatttgaaaatgccaaaacagatgctaacccccgttttagatgtttttaggtgctaaaatctcgctaaatcaaaaattgtttgtaaacaattttgataatttagaaaagaagtaacaagaaatatttcataacaaacttaaaattaataattttctgactttttataaagtccaaagaagaaagagcttatttggtttatcaaagtgaaacattttgattatatatcaaacaatgaatgctttatatttatcctaatttcttcatccttcctttctcctttttcccttcaaaaaatcagtccaccaaatatgccgtatcaaaagcacaatttccagttgttatgccacgcgcattttcgctggccaatttggtcttcagctgatggccaaattgcgcattgtacaatacttcaccgttgacaatgttgccgagcaaagtgccaaaaattcccaattccggggtcacgtcttctaaaaagtcttctccgctgctttcttctccgtcctctgcccaaataatgtgattctgaatttgcataaatgaatttataaaattattttaagaatttgaaaattgaaactgacttttaaaattaagctcacaattgatgcattttcccgactttaccttcacagacatcggccgtaatttttccatcaaaatgtatgccgagcgtttgtcagcatcgaaacttgccaaagcttcgagaatttcttcgccaaaataaattttcttcacttcattgttattcaatgcgtccgataatgcatattcagttaatttcattacaaaattatttggctgttttttgactctctaaaatgaaaacaattaatgaaactttaatcacatttataatgcattttaatttattcttttacttcaataagctcagaaaatgcctgattgttctcattcccttcaattctccacatttttgcaaacgtatctcggatggctttaattaatggcgcttcttcagggtttgggaaaaatcgttcaaccatcccaggctcagagagcacctaataattaaaaaatgggaatgtgaaaaataatttgaaataatttaaaagaattagaaaaataaaatcaaaaattattttcttggcatacaaatattggacaatgaatgtgacctgttgcatttttttcgagtgtgcaaatgcggcaacaagcgatggtgctttctgttcaattatataaataattatttattcaaataattattttatatttattttaaatgattagtaaaaataattatttattttttacgatcgccgtcgatcgttcaatagtccgtcgaacttccattaaatctgcgttgtcgctaagcatattttgctgattgaacacaacagcaacatcatgtttttgatcgagacgcaatgaaaaatcattctcgtcaagtgtaagactaaattt

SEQ ID NO: 35399 - DNA, 938 bp, Heterodera glycines
aaaatatatttcggatccccccccccatgaaacaaagccaccccacccgctttcaagtgattcttctaattcacggaatatgttatctcataatctgagctaaaattctaacgttgtgcatgaaattctttagaatggaagcaacatttttgttcacttcgtcgccccgcaaatatgtacgcccataattcaaataatccatgacatttagtagttccaaaataggctctgcttttcgtgacgcaatgattgcgagtgccgccatggcattggacacgagttggggatgagacggattgtctatggacaaacattcgacgagcggacccaacacgccggctgagatgaattcgttgatcaccagcatcacggcggcatcgtttttaaagccgtccttgagcattctatgaatttcagtcactgctttaagtttcacatccttgtcattgcttttcgctttttcgacgagctaaaattgtgatggatcattaactatttgtaattgtacattttaatcatcattaatgataaattaattatttgactaaattcaggatgttttcctattttggggtcgcacaccaaaaattaaattaaacaaaaaaaaaatcggcgcgaaatttcacaaatatcacataatattctcaagatgagccattcaaagagattttagcaacaattgttgttgcatttatgtgcccaaaaaatgctttacgactgcgtaaatttgggcgcgtttttgtggaattttttaaatttttggggtgcgtcgacccaaaacaggaaagtatcaaattcactttttgttgttggcccatttgatttgttggaattgcaatcttaagaaacaaaatcacttttctgctaaaaaaatattttttcatttatttttttctaaaatatttttcatttattttattattttctaaaaatatttc

SEQ ID NO: 35400 - DNA, 1323 bp, Heterodera glycines
ggtaattttgttttttcatttttttggttctcaaatgtctactttcactggttctggttctcagttgtcccggcgctcaaattaattcggttcgactttatcaaacgaattttagacctaactcatcaagagctttcgaatgatgccaaattatccagaattgtccgttctaataagattatgagggcctcattttttcgtttaaccagaatcgcttctgaccaactttctttaaccctaaatggatttgtcttatcgagagagtctttgcaatttactaaattaattattcaaaaaaatttcatcaaaaaagcaaattttgttttaattattgttgctttgttgcattaaatattaaattttatttattttttatatatttctaaattttggcacttttttaactcaaatttgttcaacagcaatgcttgcggtgccattctctgctcgcttaccttttgcgtcaccaaatttaatggcaaatgctcagcaagctgaacgtgcaaattttgaaattaatgactaattaacgatcaaaaaccgcaacatagtgacaaaaattgaaaacaaacccaaaagtgaaagaaaaacaattaaagtaaaattgaatctaatgagaagaaataaataccatttttctctaattatcacccggtctccatttaatcccacgtctccatttagcccccgtatctaattatcccactcctttctgaggaaatagaaaaataatccccccgggggaataattacataaaatacggtaattaattactataacattaactcaacaccaaaattcgaaaaaagtctctctaaagcgtatgtcggcactttttttacatgtgaatgtaaatctgatcaatatttttaaaatgatcagacaaattgtgtgttttaaacgtaaccactttttttgaggggttttccatgaataaataaatattgaaaatattattttaaaaaattaacaatttgaaaagagtgggtgttgatgataatcagctgaaaatcattctctcccataattgctgacactttcattcgaagtaatttttaattgacgcaatttccggaagcgtgggtggcatttacatgccaaaaaaatgtgtcggtgtaaatatatggcatttcttttacgtgttcaaagtatttttttatgggtattgattattaaagtagatgatgttcagcatattatggcgttattaatgagacattcacacataaaaattttggcaatttaagcatttccgttttgcgaaaattcacaatatttctcaatgttcttttttttgttgatgaaaaatgacacaagaaaag

SEQ ID NO: 35401 - DNA, 981 bp, Heterodera glycines
aattttaagaaataagaaaaaaaatactatggctcctcttaatttcttggcgcgcaaatggcagcgctcaaaggttgttaaggaaggtcccaaaaatcgaaactcaattttccgatggcacaaccaagtacaatttgcaattttcaatcaattttcattcaattttgactagggctaggaatttagctaccaccaggcgctcgaaaaaagacaagcttatcttagccaattcggactaagccggcgccggcctatggggctaagcctgttgcgcctggtaagcctttattcccccaaaaagggactcttgacaaaacaccggcacttttcctacaaattttgacctattttcattccaaatgtttttcaaatgccatcaaaaagtcggcaccaaacaaagcaaaaagcacgcgggcgcggcacacaacggacgaagcagaagccataaaatgatgtgttttgtgtcattcattaagttaaggttggaagccataaacacacacagcacgaaacgaaaaaaacgggcggggctttcattccgtcatccttccccctgagggctcatcagtcgcagtgccatttcttcccgaaaataattaagccatactccagcccccagtgtcccgtgtccccccccccccccccgggggggggggggggggggggggggcagggggggggggggggtgtgttttattttttgggggaaagaggggggggggggaggggggccccgggggggggggggggggggaaaagaacgcccggcgtttttttttggggggggggggggggggtggggggcccccccccttaatttagggagggacaaaaaacacttttttttgggtcttgggctccgggggggggggggcgcgcgggggttttttttgttttggggggggccgttttttgggggttttaaaaaaaatttgggggaaaaaaaaggggaaaaatttggaagaaagggggggggtgttt

SEQ ID NO: 35402 - DNA, 835 bp, Heterodera glycines
  unsure (1)..(835): unsure at all n locations
attttatttatttattcgctaataaaaagttatcagaagggcaaaaaccacttactccgacgatcgttcagataatgtgtcgtagagtaagtgatataatatatggatgatcaagaataaaatcaaaatatatgaataaagtgaggtcaaagtcaattgagatcgacaacataaacgccaaatcacttaaaaaattaattctgtttttgcttttccggttattaccctaatgaatttttaagttttgttttaaattgatttaaagaatttgtttttattagtcctttatcgagttgattccacaatttgttaccctcccagcaaagggaatgaattttttgcctagtttatattttaaaatgcatgtcaaaatcaatttctcaatcgtgaaccaaaaatgtaaatttgaaatctccaaattttattttaagctttgaatttatataagcctaaaattggtataatttttaaatatacaatccgtttttaaaaaaataggggttgggcgcgggcgggaattttggggctaacccgggaccgggggccctttttgggttgaaaacccgataatttttggcggggaaacccgggactagtcctggtcccggtcaaaaccgggaccttagtactcagttgtccgctgccaggtcccggtcccgctcaactctagttttaacaattcttaagctataatttttcgataaatttggatgcctaatttattctaaaataggtacgtgagaaaataatcactncatcttgcttacttttcttcaccaagttggccaagctcataagatatattttccgctacagattgatactcctttttact

SEQ ID NO: 35403 - DNA, 588 bp, Heterodera glycines
ttgtccgtaatcagagtctgcgacagcccgtggttttgtagtgaaaagcgcccccccctaaattcaaaaattttaaagttcaattaaaaccaaaatttgcttacataaattgtttaggcacaacttggccaaggaccgctttcctttgttaacctccattttcgttgggtcaacatttataccaaacatttcctcgcactctcgtacaaactgctcctccatagcggcatttccttttatcttactattaaatccgctggcttgaatcttttgcgccatgaattcagcgatgtacgggcggaatagttggtcgtcactttgctcgtattccagcacgcggaacaccttcgtgacgcggtagccctcatccaatgccgcattcagctcaattgatgtgcaagtgtcgacccatcctctttgctggtcagtgtgctcgcagaggtagtcgttgttcacgcccccagtcgggtactactttgcgcaactgatgcacaatgggaagcacaatctgtcgtccaccttcaccggcaacaccgggacatcgatgcgacggggaggcacaacccacaccttgagcagtgccaaggg

SEQ ID NO: 35404 - DNA, 1054 bp, Heterodera glycines
ataattccccgatgtttttttccgttaccgaccaaaccgaagaaagcaaaaacggcaaaaatggaggggatgatgatgccaacttgcttctcgaacgtcttcgtctcttcgtaaaaacgaagcacaaataatgattcattggcaatgccatcgttggccatggcagaaagagtttcattttgcaaagaatcggaatgattcatcgaaataaaggattgagaaggatctgtagaaatatttatgttggccatcgatcggatgatttttcttctgtttttgggagtgattgtcctctcctactaagcttgagccaaaagtaaaatttaaatcgtcatggcctgcaaagtgtgcccttcccggaggcgaatatcgatttcatctatttttggcaccttttcgggaactcatctgatggcacccaacccaactcaacgcaatttacgccccattcgcttttcccacaacaaaaggaaattttagagaaatgactaaccaaaaagaagcggggaaatatttaatggaagtcaaaaaagaaaggttttccgagtttatttcaaacggaccttttgttaatggatctgacaaatgagcggcgaattcgccgttccattacggcaaatgttcgctggcgcccttttggcttttgggcgaatatttgcggttttaagttgcgtcagagcatcgccagtgttcgtccccccgttccatcagtgtcactccccccccccttttggcatggcttttttcctctcctccatccggcgagtgtcattttgctcttccttttttccatcctcaaaaatgacaccttctgttggcacttttgatatgctttcagccttctcaacgggcattctctctctctccccttcccctctctctctcttcctcactaatttttactgacaactctctctctctctcttctgccaacaattccgggaggggcgcgagaaaagtccattcaataaaacaaaaatcagcaccatcgcggaccgaaactgaaaatgcgtgaaaaaactgcaaaaaaaagatggagggggggggggggggg

SEQ ID NO: 35405 - DNA, 1477 bp, Heterodera glycines
  unsure (1)..(1477): unsure at all n locations
tttttcagtgggaattgaaatataaaaaggcgtgaattgagagaatttcatttctcgtcacatctnaatctattctctgcactattacatctaattgctgctgctcaccgactccatcgacaccgacacggcatggaagactcgtggcgctctcccctggaatccgcgtcgnccgctggacgatcacaaagaagctggcgccggagcattcggagccgtctacctgtgcgtgaacgaccaaggagagcaggccgcgctgaagactgagccggtcaacacgccacatccgctgctcgtcatggaggtaggcgggggaggaggggcggaaaattggccaattcaatttaaattttttttttcaccacccaggctcacgtgatgaccaagctgaacacccttcgagacggagacgagaagcacttctgccgctgcttggacctcgggcgcgatgagcaaaaggaccaacaatcgggacaaatgaagaagttcaactacatcgtcatgtcactcgtcggtcgtggcctggacggagtcgtcaaggatgccggtggccgcctcagccttggaagcgcagtcggcgtctcgatccagatgctcgccgctctcagaggactccacaccgtcggctacctccaccgcgacatcaagccgggcaactcgaccatcggacgtccggaatcaaacgaaatccgcctgctctacctgatcgacttcggaatggcgcgcaaatacaccaaggacgacgtgagtttgagtgaagcgctttgaaaaaaacaaaattaatttccctttaccctttttcagggcgcccaccgccgcccgcgcgctgcaaccatcttccgtggaagcccccgctatgcatcgattgccgctcatctcggactcgaatacagccgcaaggacgacatcgaatcgtggttctactgcatgatcgagctcttcaaaggcgcacttccatgggccaacgtgggggaaacgaaagaggtgagcgaatgggggggagggataatcagaattctgatttcattgtttttttcagatcggcgaggcaaagatcaaacgccagaagaaacaaccggaagccgttcgacaccaggcaatcgccgacttgctctccggatgcccgaacgagttcggccaggtcctcaaatacatcgtgagttcgttcgttttttcaaaattaaaaactaacaaattaaattttgcaggacatgaagtacaacgacaagcccgactacgactggatcatcgcgacattgcgcaacagcctcagcaacgccggcgtccaggaattcccctacgactgggagacgacggacaaaaccacgccgcaggtttcgagttacttcacctgatgagccgtgcagcagcagcagcagaagaagaagaatcgcncagaagcgtcaccgtgcagaattgatcatatgaccactattactgtattgtatgtattattttngtgtcatgctgccatccc

SEQ ID NO: 35406 - DNA, 1069 bp, Heterodera glycines
  unsure (1)..(1069): unsure at all n locations
ggtagaacagaggaacctcggagggaatacggctacaaggagggaaaatttgtggnggaaaacagaaaattgcccctattcttcccacagggagtcggcacccttttgacctattggttggagggcattgactctggtggaatgataagcgaccgctcagccagcgacgacccaatgcaacggtcggaccaatgacatcaaaaaagaaaccctaacaacgaaataaccattctttttttaatcattttttaaactcgctcaattatttgttgcacttcctcagtttcaaatgtacagacatataattttaacacaaacagaaatttggagaacaattgatgacaattaaaaggggaaaaaaaccccaaaatttaggaaaaaaaaagtaaacagggggtaaaaaccaaaaaacttccccaaaaataaaaattccccctccggggggggggttttttcaaaaaaaaaggggttttggaaaaacccctcttaaaaaatttttaaaaaaaaaaatttgggggttcccaaaaacttttttccccccaatttttttaaaatttttgaaaaaaaagggggtttttttttttttttgggggaaaaaaaaaaaaaaaaaaaagtctttttttttttttttcccccaaaaaaaaaaaaaaaaaagtggaggggacccccccgcccccccttctcccccggagggggttttttttttttttcggaataaaaataccgcgggggggggggggggggaaaagaaaaaaaaaaaaaaatcaccctttcttttttttttttttttttttttttgcgtccccccccccccccctattttttttgtggatggggaggaggagggaaagaggggagaaaaaaactaaaataccgatgggcatgctgagagcgcgccggccccacccccccccccccccccccccggcggggggaagggggagggggtgtgtttttttttttttttttttttttttctttccccccccccccccccccccccccccccccggggggggggggggggggggggggggggggccggccccccccccctcccccccccccc

SEQ ID NO: 35407 - DNA, 1425 bp, Heterodera glycines
ataaggtaattttaaaagcttgttggataatttaattctttattactattgatatttgaattaaagtcatttgtttgtattaaaaatattcattaaaaatcaattagttaatgtttattttgcaaaaataatcaaatgtttaaaccaagaaaattattaaaataaaaataaatcagtataaaaatataattaaattatcaaaaaaaattatcacgaaacaaacaatttatcaagaaaaacaaatatgagtgtatgcatgataacatatgctaaaattaatgatataattagggtaatatagcaaaaaatttaataaaaaacagaaaaactcaaatacagccgaaagcaaataaggtccatgaagcaagaaatagaacaaccacacggcaatatcaatatttaattaattaaattcattccaaaagtttaatacatatctaattgacaatatccttcgataaatagtaattaatattcaaaatctattaaaaatgaataagaactttatgacttaaagtccacaaatcaaacgttttaatggcaaaaataattcaaagaaactgaaaataaaaaatgaatgtataattattctgcaataagctttggcgcgtacatttgatttttcattttgctgtattttttgatgttttgagttactaatatcacattatttaatgggaggaataattttaatttcaaaaattaatagttagattctaacatttttgttatggtttttctcaattcgttaattttcttattttttgaattttgtatcattaataatatttgtataatacagtatcttttaattttattttttatttaacgtttatgttgggataatatatttcatttcatttatattttatgttgaaaattttgcttttttaattgaatatccaaaagatcctgcaaaataatatcagaaaatccatattttcaaatcaggagctaaagtctacataataaaataattattaaaatacaatcttaacccgaagttggctaaataattttaattgaaaaaacggaacgaaaggtaatctataaacatttatttaaatttaaaaaattaattaattatgtaaaaataaaaacaacaaattaaaatttaaaaaatttgaatgctggctaaaataatcaattttaaatgaaggaatattgaatattaatacaatattttttttttataaaatagaatattttaaattaattgtctaaaaaatgattgaataaaaaatgaatattaaataaattgtttatttgcagttgctaaattattaatttattaaataacgaaaaataaataaatttatgaattttatgaaaattataaaaatataatcaaatgggtaaataaatataaaacaacaagaaaaaaagaattcttttaaaaagtcacctaataactaaacaacttga

SEQ ID NO: 35408 - DNA, 165 bp, Heterodera glycines
aggcgcaaaagatgtaataagtttttgaaaactatttagagctatttcctcaaattaggtgacagtggtgcccaccggccatgaaaaaatgcgagtgacagtgtgcctaacagcccgcagcaatggacataagctcaagccctatgtgttggtcaacagaaagcg

SEQ ID NO: 35409 - DNA, 946 bp, Heterodera glycines
tgttgcacaacggactcgaacatccccttacttgtgcctttactatcttacaaaaaccactttgccaccttacatttactttttgaactgggagcccaaaattgactcggtgtgttcaatcaaaatttactatttttacagaatttggattcaattaattaattaatcattttgcagagttttcggccacccttttgcattgagccggccaagtttgaatttgtgccgcgcgtgcatcggctcaacgaaattgacgcgttgttccgcttgcgcatcatttacatcaacaaattggtccatttctggaagtactccaaggaccagcagttccgcatcccgtacattgacaacaagtacattgacttgtaccggcttcgtcaggtttccaagaattttttttcgtaaaaattcaatcaatgttttacaattccatggtatatatgagcggagactcattaatggttttaccaagatttccgggacccaaagttcacataaaatgatgtcaccgccatgagtattcctaccaagattcctggatccggagatttctaacttcccaacatttctgtatacggagatttctgaaaaaactatcatttccatgaatgtcctgccctcctggtacacaatatccacgaaacatggaaaaattttccgaaaaatccactaactattaaatttaacaagtgtttaagtcatggattcgaataaattttgggtccattttcgccctaatccaaatggagacgcggtattcagcgccgtattaattttcatgttgtctattaccctccttaccatgaaacttaatttggaaaaaactgaaatttcccgttttcagatggtcgacgaggagggaggcctaaagcgcgtgaatgactcgcgccgctgggcacacattgccaaatgcctgggctttcgcggcaacgccggccaaacaatg

SEQ ID NO: 35410 - DNA, 1268 bp, Heterodera glycines
tcttggaaatttctgcttcagcagcgtctgttgtcccaatcgataaactgaattcaaaaccgttgaaagtacccattgagaggatggttagagtgccggacggagtcccggacataagcacgcttccgaaaggcaaaaacccgtataaaaatcagcttaatgcgcttctgtgcattgtctgtctgatttacaacgaaaaacttgaaaatgagacggattataacctacttaaaggcaaggaccatcttcaaaatatcagcaaaaatacttctttcccgggagatagaatggattctcaaaaaagtccgaaagtaaacggaaaaaatttgatgggaacggaaattaaggattttttgggaaaattcgacggaattgtggcacaattgaggacaattgtttttcaagggaccgaggaggtaatggagacggacaacatcgactttgccttgacctgggatatgcagtgcggcggactcggaccggagcatcgaaattgcgtccaattgacaaccgctgatttggacccagttttggagagggccggattcggactcaaggtggccgaaggcaggctgaagccacaaaatgcaaaatttgggcttaaggtcgtgggaaccccgttgaaggctttgttggccacttttctgttaaaaaccaacgccatttcttcatctgcagccggcagaaagttggcacaatcagtgattggagcaccagttgggttcgaactgatcactttcatcggaagccgcgaagaccaaatcaaaagtggccgaattccggtggaagaagatttggaggccatcctcgagaaatggaccgaatgctgtgcagttacacggacgaaattggcaaaatgtggatttggcgccatcaatgtgccaattccgcgctcaattgaagacctcccagaaggagaaggaaaaccgtggaccgaactgctcggaaaagccggatttgtgctggagaaagtgaaggccacgtcggtgctgcgcaaacaccaattcgttacgtcgccacgcataattattggagactcaagcgcaaagcaatttgaggacttgtggccgacttctcagtttattggcgccacccaaggaagtgtttggagatgtaattcgggcattttgacgcagtggccctgtcgtcaaagtcaaagtgggcgtgattataatcgggcgtgacgctctgatcagaaacgaaacggccgacaacgtcatgggagaaagattgaaagactcatccaattgtgcgccaattccaacatg

SEQ ID NO: 35411 - DNA, 835 bp, Heterodera glycines
cggaccgacatttgcggaccgacttttgcggaccgacttttgcggaccgacatttgcggaccgacttttgcggaccgacttttgcggaccgacatttgcggaccgacttttgcggaccgacatttgcggaccgacttttgcggaccgacttttgcggaccgacttttgcggaccgacatttgcggaccgacatttgcggaccgacatttgcggaccgacatttgcggaccgacatttgcggaccgacatttgcggaccgacatttgcggaccgacatttgcggaccgacatttgcggaccgacatttgcggaccgacatttgcggaccgacatttgcggaccgacatttgcggaccgacatttgcggaccgacatttgcggaccgacatttgcggaccgacatttgcggaccgacatttgcggaccgacatttgcggaccgacatttgcggaccgacttttgcggaccgacatttgcggaccgacttttggggtcataatttctggatttaattttcaaaaaaaaaattttttcttaaattggatgatcatctgaatattgaattttatatgtgatttttcggagttaagcaagttaatgcgaatgaaaatatgaaaaatttataaagtttttccaaaaagttcatttttcaattcctcttggtgctaaaaattttgatcactttatatcatccttaagtagtgatctgatcaacttgtgcaatgcattagtttataaattcctgatttacaagaattatgttgtcattgataatgaatgtgagtaattcattttaattttgttttttaaagatataccatatattattatatct

SEQ ID NO: 35412 - DNA, 1511 bp, Heterodera glycines
ataaggttttttcaatggctttaaacttttttatattttctgttgtcattggatactaattctgcttattttaagttaactttacaatctcaaacagtaaaattaaatttatagaatttctttatgttataactttgaatactctcaaaatgataagttttatttattgtttatttgtaaaatttttcaaaatatagaacaataaaatatttgtgtttttttatttaaatttactaaaatattttgaatttaaaataattttcaaaattataaattttttgtgaatttttatttcgaaatttcagatattatttgatttcaaatgttaaaatgggagatctgagtaaaaggaaaatgttaatttctactaagcaaaaatttccttaagcatttattaataaacaagcgacacaaccacgccggaatcagaagcccagaactgagcatgaaaattaaattaaataacgatagaaataaattataacaattttactgataataataaaagaaaggcttaaagcaaagtaaaaagcctattgtattgtctcgaggtcacaagaaaagcaacaagataacattgattatttttattgaaaaaatattgtaaaccaaaatattattaattttatattaattttttcttttcatccttttaactattttagtgaatgaatgttatttatctcaaatggattttacgaaatttcccggtgaaaaccgggctattttacgaaatgcaaaaaaattacgtacgaatatcaacgaaatcggcgtggcgcccactcatagaagcaaaaaaataaatttgaaaaaataaatgataatccaagtaatagagtttaaataattcaaattaaaatttttataaattcataataaacgaaaaattaaatttttaattttcgtataattattaagtaaaagaaatcatttataaaaaaaaaatttaagaaacaaaaattcattcaactggtcggcaaaaagacgaaaatattttgcaacaaaattaaatttgaattctctaattaataaatcaaagtaacacaaggaagaaaaggaaaaaacatacatctgaacatgatattaaaatagtaaaaaaagatttaaaaaaataatattttacaatttttaataaataaatgattattcattacaattagtacaaatctaatgaaatataaaaaaagtaaaaacaaaagataactatgcaattaacaaaaacaacaaaaagcacacaaaaaataattaataaatgagtgaaaaaagtaatcagattcaaaaaattaacttcgaaaaaattatatgaccgtaaaataaaaaatatggtaatttaattaaaaaataacaaattaaaatttataaacgaaaaagaataaatgtaatttagcattgaataatgtaatataataaataatacaataaaatagtaatcattttttgtacaacatacaaaactaaattcacaaataatagctattcaattctttcattagaaattaaacatattaaaa

SEQ ID NO: 35413 - DNA, 951 bp, Heterodera glycines
  unsure (1)..(951): unsure at all n locations
tttttcttattttcttatttatttatcgagcaaaccaacggcacattagtgctcttacatggtgcaaaaatgacaaacaattaaatttgatcaaataaaaaatacaaaatgaataccgtaataaaaatgaataaaaataatcaaaggtttaaaattcacaggcgattaaaatatagtgtaaatgtggcacagaaaatttcctactcagaactcattgcttttagcaaattcctgaattcctttgccttattaatttgcaccgctaccagtggaagattattccagttttttactattctattgaaaaaattattttgagttttggccgtgtggcgctttactcgtaaaagtaaaggcctcctgcgcctttccgagaaaagaaacttttcccagcatcgaggctggtgaaccctttaattattttaaaagctgttgttaaatcattgatttttcttctttcttctaatttgtgtaaatcagtgatttttagtctttcccaatattttttgtacacaaagccacattttctaaatgcttttctcgtgagaaacttttgaacgcattcaattttatctatatctatttttaagttagggttccaaacttctgtagcatattctaattgaggtcgtacaaaagtttataggctgctgttagagtctttatttccctgctttttaacattctcaaaatttggaaagttctaagatatgcatttcgtacaattttgctaatatgttctgaaaaatgaagttttgagtcaattataattcccaagtcacgtgcattatcagactctgaaatcatttttgagttaataaaatattcttttttcatattattttttcctaaataaagtacaaaacattttccagttgaaatttctaacccatttatttttgaccatttttcaaaagcctcaattgctttatctaaaatgatttgntttat

SEQ ID NO: 35414 - DNA, 201 bp, Heterodera glycines
atactgtatcagcaagtcataaatgtagatgtttttgaaacaaattgcaaacgccaacggatattctccataataggcatagcctaagtaaaaaaaagtaatttataaatggctattaattaatttaaaaatttttattaccttcataatccatgtttcgattgctgtgaccgggctcatagccatccggcataaagaaat

SEQ ID NO: 35415 - DNA, 708 bp, Heterodera glycines
  unsure (1)..(708): unsure at all n locations
ctaaatgtgaggatttgtttctcgtagtgtgtttagctgtgtttggatggaattcgagatattgttgatctgattaaaatgtctttctacgtctctcccggcgcgttctgcggccctctttgcgacatcaatttttgagtctttggtatcttcagccttggcttctctcttcccccgttgttttttgattttgtaatgatggctgaatgcttcgttaattttgtttcccaatcccccggcggttttaaaattcatgtccggtaaataaacttgagtcgggacactgctgtcgttttcccatactttaataaactcttgaccgtttataccgagtgcggtgaatgagtaggggtaaataattgatgagagagctactgaccaatttgtgcccaattccaaagtctcggggagtcgtactgtgaattttgatgtactgttccctggtcccggtgtgttcgagggtagcacaatgtaaaagtcatccatctattttcactcattcctggttataaaatattccttttattaaatttccttccaaatcttcgatcctgtatgaatcgggtgtcgtcgaattggcaacaacaattttaaacaattcttcggtaaagtttgggaggtatccctttgaaaattttcccttttccttggtaatacgaacgatatcaccgattttaaatgttttcttttttaaaattttanattcct

SEQ ID NO: 35416 - DNA, 838 bp, Heterodera glycines
gccgccgagaaattttgtaatatttaaatgcgatttgcttacagattttgtctaaagaatgacaaatttagcgatttttagccaggagacgccttttttttgtttttaaaaaacgtttttttagacgcacttttcttaaaaaacttttggggataggggggccggcggtgccgataggcgccgccgggaaaaaaatttatgaaattgggagttttggtagcatttatatcaactaaataaatcatatcacaaataatttaaaaagtttggggaagcctgaaaataaaggacaatcttagaaaaaaggacattttagctttctaagatccggcccctccaaaaaaggaaaaatctttaaaaaaaggacacttacgagccctgaataataataatgttttcccttgggcacaaattccgatcgctaataataatgtgactcaaattctccgaatgttcggacctccaaaggcacttgaaaatgtcaacgacgaccaattcgcccgcatttgtggccaccaatcggagaatgaacaactgaatttgtaagggcggtggagcaaatatgagagaaaaactggacaatcctactgtaataccaccgtatcaaacaatacgacccatgacaacgcataaaaattttaaatttttgtgaatttttgggaaaatgcccttctgtgttatttaaatggcattctctgctcaattccaatggttttaccccgtccgatttgaggaattcgtccacaaatttgtccaccgaatgcgcactcggcacccgaaatggtcttttgatgaattgtggcatttcgtcctcctccgccatcgcccacttttgttg

SEQ ID NO: 35417 - DNA, 845 bp, Heterodera glycines
  unsure (1)..(845): unsure at all n locations
aatgaccaacgaagcaggaaattggtgtttgattgaaagtgaccctggccttttcacagaattggtaatgttatcagacacgcttttctgaaactatttttttcaattctcgagaatttaactttcggttaataccaaaaatgcaggcatttttccggaaaaaaggtttaaattttccattttccccttttagataagtgggttgggtgtcaaaggaacacaagttgaggagctgtactccattgacgatgagcagcatctgtccagcttaaggtcagtctccctccctttttcccgccatttttcttttatttatctttttcatttttagacccatttacggtctcattttcctcttcaaatggcgtcccggcgaagaattggagggcactccgatgcccgacgcccccgtgtactttgcccagcaggtgggcgctttttcaaagcattttttccaatttaaaacaaatgtatcagaaaagaattttggagaaaccaattcacataaaaaattatttaaataatttatactaaaatattcggtgttttcccgttttggagcgcacgccaaaaatttaaaaaaaaattaacaaaaatgcgtgccaattttcgtgcctttctgtggttttttttgtgtgtgaaccccaaaacaggaaaattgtgtaccaaccattctactatgcatttcttatacatacttcctgggaccacaattaatttttattaattcctccatttttccccaattccatcgtcgcattgttttcttcaggtgatcacaaatgcgtgtgcctcccaagcactgatncaccttttgctgaacattttcgtcgtccgatgttcaa

SEQ ID NO: 35418 - DNA, 597 bp, Heterodera glycines
ggaattttgtcgaaataagtgccggattaggtttagggaccaataaaaagcccaaaaacttagcaaaatcttttatttttacacttttttatttaaaacaaataataatttgtaaaatttaattaattttgaccgaaaaataaacaattcgaactttgcacaaattttgtcgatcatacaatggaggcggggcatagcttttcgaaccggagaagcagtggtctgttgtgaaagtgagaaaatgaaaataattcgtcctttataattaaaaattgatgcgcgagaggctcagtcagtctcgagaaaatttccggtttttgcggactcaaatctcggattatggacccgtaaatccagactcctggtccccaaatccaggctcgcgaaaatccagacccctgaacccgaaattgtagaaaaaccaggcttctggacaagattcttgggctcccgctcccatgagcctggaacctacggtaatccaggcccactgaacccgaaaatcagtaaaaatccaggcttggggacattggattcaaggaaagtccagcagatctctggacacagccagatagatcccatgccaactctctacat

SEQ ID NO: 35419 - DNA, 79 bp, Heterodera glycines
cccaaccagagcatcttcctgctggagcgggagcactgcatcaccgaacacgcggtgagcgcttgccggctgcgggaca

SEQ ID NO: 35420 - DNA, 878 bp, Heterodera glycines
  unsure (1)..(878): unsure at all n locations
aaaaatctgtaacaaatatccccgagggtgtcagctcatcgtcacccacttgaagtaaatgcgcccatcatttttcgtcggccctttgcgatttagacaatgttcgcccgcaatttggtctaactgtttgacatcggcggccgcttcgacgagcaaacgccactctttgccgaatcggtccaaatagcaattggcactgttttcgttgtcaattgcatcggcttttggtgtcgtcgttgtggaaaagatcgtagaacaattgctactgtcttcagctgcagttgtgctcattgtcagcaccgacgacgaggacgacaacggcggagtggcgggcggtggcacccgaaaatgttcaaaagtggcatcgaatggaatgtctttgctcagtgccgatggtgccaatggcggaggagtggcgggggatggcacccgcgcaaatgattcattttggttgggcaaatcgccgatttgaatgtcttcgacccactcaaagttcgaaatggacacggatggtgacgacggcacaattgtcgaaaatggtgtttccgtgccatatccgcgagagtggcacaaactggcgccttcttcagtgccggacaatgcttctttctctgtgccattgttgttgctgctagtgttggcaatgccagtggcagccagcgaagaagccgaatttggcacagggaactgctgaaaaaatattaaaaattattctttttgaataatttttgttagttattaaattgcttaaaattcaaaattaaatttaaaaagtcatcaaacacatattagcggggattttcaggtccctttttcacgggcccntgagatcctttttgancaattttgaatcataattcgatgannaagtgaaaatt

SEQ ID NO: 35421 - DNA, 1014 bp, Heterodera glycines
agcggagggggatataaggcatcgagataagctatcatcaagaggaagcgaccataaggaaagaggagagggaaccggagggaagagagagaaaggtgtgataatgcggcactctcagacatacgacaatcattttcgatttgaaaaagctctgcaaaaatcgcgtaaattttattacattggcattttgaatggcactattttttctacgaatgttgctgaattgtctgcttcttttcaaaatcaaaaatgattgtagaatgtttgtgcatgaatttcagtggaggatttggagtttattatgctaaaaaattgttagagaaaattaaggtcctagtgggtgttaaatcttgatcactcctgatcaccctgaagaatgacctctgaacacagaggtgcaataaacggaacgagacggagggcggacgacccaatctgacgagcgccacaggcggttgactgcggtggtctgaagggcccccgccaatcaatcagtcaaccgcctgcggatcacgcgagaactttttccgggacccagagtctcagcccaactattggccgccgtagtcgaatgtgcgctggttttaagcgcaataaaaaaaaatttaatttttaaatttaaataaataattaaaatttttcactgattttaagcaattttgcaaaatcttctgatttcaaccctaaaaactgattctttcaccagcacaagtttttggactataactttttcattgtcaacccagtcgaataatattgatatcattctaaagcttaaatataattacaacttttattttttttaattcacaaattttatgttctaaaaaaatgaagatggtcatttatgtctaaactgcataagacccaaaaagttttatgtgttaaattaattccacttctaccattcccacttactattactgtttcagataataacgatgcaaagtgaagcaaacaagcaaaaagacggagatttggttgacaaacaaaaatgttataaccaaaaatttg

SEQ ID NO: 35422 - DNA, 805 bp, Heterodera glycines
gtgcggacagaacagttaccggaaatgagagcccattgttacgcgcggtggctaatattgacagcggcttaatcttttcaattacacttattcattatacgaattaacataccgggataaagaaggcgaaacaaagaatctaaaattttgcaaaaattattaaactcttctgtcatggttttaaattttagcaatactcacccaatagtggaaatcgtcaagctgtcgctgaagaattcgttcatgctcggtgcgaagagtgttgtgatcgacaagaattcgttcatgttcggtgcgaagagtgttgtgatcgacaagaattcgttcatgttcggtgcgaagagtgttgtgatcgacaagaattcggttgtgctgtaattgtaattttttttgttatttccccatctgttaaacctctcgagttaaagaagacactctttcggacaattcgtgattgtccgtttgtatttgttgcgcttgtttccaaaattcctccatgtcttcaatttcacatccgttccgaaacacctaaaaagttcatttttgcgttttcaattttatttctgggtattttctcggtttaaagaatccccatctgcgtgtagtactacggtttcattttaccaaattaaaggcgtttcgccaaaaatatgtctatttataaatttctacacctacggtaactaccgatgtaaacatggaccaagaaaatagatatctggttccaggttaacaggtcaaatttggaaatcaaaaagcaatattcgtccaaggattccataaacacctcgggaggttgtccctg

SEQ ID NO: 35423 - DNA, 1538 bp, Heterodera glycines
  unsure (1)..(1538): unsure at all n locations
gatacttttgtcacttcgtcctagcaccaacgacataacaccgtntatntagggtcggggtcattttggcgcaggcaagtttaaagattcataacttttttttaattcgaccaaataaaataatgttgatattaatcaataggtctaaatgttctttattagcctgcaaaatttcaaaaaattatattaggttttaaaaaagatatggcgcgctgcgccaaaatggccaggaaaatgcaattttttgaggttttttggccataacttttttgtttctcagctaaattttttgaaactttgcatagacaccgaaaacccgaaaattggacacccaaatttccgaccccaaattcaactgccaaagagttcctaaataatttgaatttgaatataaatttgtggatttggatcctttatccgtgggttctttgaactgacactaataaaataacataattaaaaaaaataacattaaatctatcgttgggagcaaatttctcgtgaaaaaacaaaaatatcggtttgggttggcttaacgaaaaaattagagataaagaaaagctccgagtaattctcggctaaacaacattcagtgcagtgttagctaaggtgtggattttaagagtaatttctcgaacaggctaaatctttgtaccatcaacaaatataaacattgtttatcaataaatctcaaaaaatttgtcaagcttcaaaaaagtttgaaatgaaaaatgaatttttgttctaatatttgagtataaatttaaattgcttccatttattattgcgacaattttcggaaaatttggcattttacgaaaggacttggcaagcttatagacaagcaatcaatcaaattttattttttgcagagggccatcgttcatggttactacagtatgttatccgcataaaggcatagtacaggaagaatttttcacgccgccacattggacactttctgaaaaaggaaactttgccgggagagaggtccttcttcctaaggtattttgtgccaaatttgagccaaagtgttgaagaccggttcaaacagggccaaattgtctttccataggaccaatttctacaaaattggatctgcctggaccaaccctttacaaaataaacttggtcccgtgctatttctatgtaagtccttcaaaagttgatagaatctgggccaggatagtgaaaatcccaggactggtcatcaacattgttagaattgctcaaatttggcacttattcatgtttttttggggtttccattatcacctgtacggcacatgactttggcctgggtcgggccggcacagctcgcgctgttgccggttgatgcgtcggatggactgcacaattcggcgccgttccgtccgcagtttttgcatcgtctcgcgcgacagtttggcccggttggccaaacactcctcgtccccctcctctccctgcggttggatttcgtttggctgatcagcaactgattcgaaatgattttgatccttctgctgctgttgttggtagtgatcatgatgatgatg

SEQ ID NO: 35424 - DNA, 451 bp, Heterodera glycines
tggacagttttaggttgaaatttttcatttgatggttttttatataacgccctttttgatggtttttatataacgactcagcaccaatataatttgttaataattgtcaaatggaaaaaatgtttggagatctgaccgggaccgagaaagaaggattgtgaatggcatttcagccaaaacggtgattgactcggatttctccatagaaaatgaatatttctcttcaagcaataataaaataaaattaattatttattccttcaaaatctgagttttgggacaagatccgaccggaaaccaccaacgagcaaatgaagaaattttgagaatttaccaagaatgaaagtgcagtagtgaaactggttgcagtttttttatattaaatctcaatcccgaaattcttaaaattattttaagacctttttttatacttaaatattttgattgttaa

SEQ ID NO: 35425 - DNA, 1551 bp, Heterodera glycines
ggcgcgcaaaggtcggcgatggcatcgcaccgaccacgacggtggcgttggcgatgatgacgaagccgcccctgccgccgctggggaggggcggatgattttttagcccctccggagactgtcccccggggggacaatgccccaccaccacccgaatcgatcatttgcatatttagcggcggcgcttcccaatcgctcttcttcacccctcccacccaatcttttttatgggctggtggtccccccccccccccggggcccaccattttgctgctcgcattggcagtttttaccttcgatgaatatattggatgatgatgatataatgaaggaaggcacaattaaaagtaaatgcaaaccaaaattttatttttttgaaattttgaatttaattttaaataatgttagtttttagtggaaagtcggcttacctactctccataataaatcaattttcgagttttttattagatttgtaaatgcaaacaaaaaaatctttaggtgggaggtttaaatttgggattttatatttaaataatttttatttttattcggctatgctcggctatgaatctactttccattccttcctaaaatttacacttatacttccatataaattattgccaagttttaaaaaccaatctaaatttttatacaaattttcattttattttttactccctaataaatttaatttttttgagtttttttctcttttttccattcgcctaaaattttataaagtaaattcagcagcgtgtgtccatcctttcacaaatctcattccctgaattatttcactgatttccgctctaactgattgcccaaatttttggctaatatcgttccaaaatatttatttgcaaaattggccccattttcttccaatatctctccccctccaattgggctcaaatttggacaatccatttcctcctattcttatctgctgttttatgctcattctttgaccttgtacattcattcattcattcacatcaaattgtcaatttaatgcacaacttttgacatatcttttccttatttttattatcattttctgactgattaatttttgtgtccataaaatgattttctctctgatcaaactcatctgtctttggccatatgttggggacataaaaatttaaaatttctcgccccatttttcactcattgtttattgatcaaaactcatgttcctcttctgagcatgaagtccgatactatcatgaaagtctcagtttttcttcgtacaaattttgttcagagttccctggtcggaatccggaattatgatcactagtgatggaacatttttgtattaaaaattcactgatcaaaactcgtcgagaatctcgattctcgagttttctactgaaataaaatacacgaacattattattatttttttgcattttttggcactgattttcgcctgcctacttcgccataacctttctgattaatgcttttgatcatcttaattcccattcaatacttaatcgttatgcgttttgtttgcctgtttgctttttcctaatcaaa

SEQ ID NO: 35426 - DNA, 1099 bp, Heterodera glycines
  unsure (1)..(1099): unsure at all n locations
aggaggaagccgtgtcataaatcggganttgtctttcttgtcatgtcttttattattaatataaatttttgagaggagagtgcagcgaggaatgaatatgtgagaatggtgttgcctttaaaagaaagttatttaattataacaaaaatgaaaaatgacttcaccactttttttagattttatatagctatgcaagtgagacttaattcattcaaagccttttaatttctgtacataaatgtttttttaaataaaaaattgtctttcgaaaaggcaacttgctgtctcggtgtccgagtgatcagtcaattgaaataattatttcctatagcaaaaattaaatagaaagcatgaaatttacctcaaaatggccatgagcaatttcagttcatttttaataaacacaaaaaccaaagaatctgccagtatgcgtcgctggtgaaattttatttttttttaaaatattaccacgaaaaattataattttcataatattattaataaaagttaataagcttgaaacttcttccaataccaactgattttcttaaacgacttgaaatattcatgttaaaatcttttattttgcacattgctggaatacatacagaacatatttccagcattattactaaattaggaatttcattaatttttgataatttaattcgaataaatttgttaaattttatcccctgtgaaacaatttttgactattggtcattaaaaaagataatttcatctattgttaaaactgccaatctgaaaaataaaataaaaatgtaataacaaaatttaattagaaccgaatgaattttctcattatttgaaatctaaaaataattatatttatttgtttttaaagattgttttacctgccatgattggctacagttaccgttgttatttagttttgaaattgtttagaagttttggacttgaatattagaaattaaaaatttgtgatattgttttgacttatcgcttttttatttgagcgaacatttaattaatccaattttgaaaaaatcatatatttcattttctttagtgtaagtgccataaagtcaaggcgttggtccaaacaaaacgaatttga

SEQ ID NO: 35427 - DNA, 995 bp, Heterodera glycines
tttttccgatttattgcctttttggcgttttttccgaaaattccatcaaaaatagaataaaatcgggaaaatacactttaagaaatgaattgaaaatttttcagaaaaaacatccctaagaattgaaaaaatttcagaaaatacacccaagaattgaaaaattttctcaaaaattgatcgccaaaattcatttttttttttcttgataaaaaattctcggtttaaaaattttccttattcgaaaaacattataaaatatttaataaccatttaaatgaccaaaattaagtttttggttaagttttacgtgttttgctccctaaaaaaccttagaatttttaaatgccttttttcatgcctttttcgcgattttcgtgccttttcgtgccttttttcaattttttggtgcctattatagtgcctttttcgcaatttttggtgcctttttatccgagctctaataattacacaccctacacataagtaccaaaatttttattaattaataaaattcaggaattccgtgaaaagtttgcaaaaatggaaatggaattgaaaatggccaaattgtaactcgaaaatgtgaggagttttgccataaaaattcgactaaaattaagaaatttttaaaattatttttagaaggtacttgaacaaaagttaaagcatcaggaaatgatggtcgaacagaaggcattgaaggaaaaagtgatcaaaattgaacagaaaaatgaaaaaaaatgaaagaaattgaaaaaattttatggaattcttattgaataattcgataaaattaatgacaacaaattcaaaagctgaaaaatgagtttatggttttaattggtattttattcaaaaatttaattaagctacttcggatcaactctcaaaaatagaaaatgatcagaagactctatttgaaaaagtcagtgaattggagaagcagcaaaaacagcagcacgaaaacacgaccaaaggcgggggaattttaagcg

SEQ ID NO: 35428 - DNA, 970 bp, Heterodera glycines
gagaaagaaaagaatatattgaatttgaatcgattaattttcgtgaaatttttaataattcaaatatttgttcccaattgttctcatttgtccattttgccgtttcgatgtctccaccaaaacgtgccaaagtgtcagccgatgatgatggggagacaatttccgacgacggggagccatcaacgtccgcgggggcaaagcgaaagcaaaaggcgtcgaaaccacgccaacggaaggcgcatgaggcattcattttgctggtggacgtgggccgttcgtctgccgaaaactcggcgggggcacagagcgatcacggcaccaccactgacctcgaccgatcggtgcaaatcgtcgattgggtcctttcacgaaaagtgcgaatatttatctgggaagcggggcggaggatggaaaaatgttcatttgcaaaaaagaagggattccttccccatcccctcgggtttttctccgcatttccatgcctgaacaaaagccacactttgctttgtctcgacagattttcaccgaatcctccgatcgcttctctctgatgttcttcggccacgaaaacacgtccagcgacgaccatccgaatgtttacgtgcacaacgaacagttcgccacggcgcggatcgaatggctgcacgtgttgcagaacgaagtgcagacgaacgtcaaatgccccggcgattgtctgaatccgttggcactttccgcattttccccccaatttcagacgtcgacgccctttacgctgcgttggacgcactgaaagtgcactttgacgacgcaaaagaggcgggcgaaccgatgagcggagcgacggtcactttggtgagcatttgagcggattggacgacgagcgggcggtgatggacggagtgggtgacatcgcggccggctttcaagcgttggactgcgatttgctaattgtgtgagggaaaaaggggggggggggggggaagggggg

SEQ ID NO: 35429 - DNA, 1225 bp, Heterodera glycines
aaacaaatacaacaaattacggacttatttctgctaccactgcgcggcattgccctgacaatcgtgaaccatataggtaggtattaacagaaatttttttttgaaaattctgaaatttgcaaaattttcaggaatccggaaactggcgaactgcgcagctgtggcactgctgcagcgctgcatggcgaccttgacagcgtgcagcatggcatatgcccgtcctcgttcgtttgcaagcgtgacgtgcagcgacgaaagcctgcaacaaaaggggaggaagcgccgcgcgtatgctgttcgccaatcgcattttgccctgatgcgcgactgccgcaggtcgacccccgcactcggcatgcaaaacggtaagactactttaactaccgtaatccatttaattgagaggcgaattactgtgggtacggctcaattatactgtaacaatatcccaaattttcgttatgtctagctgtttgtctgctgacgtcaaagcatcgccaactgctggtgcagtgaaaaggcatcaccattactatggcgatagtgacaatgattatggtaactgtaccccaccgtacacctgccagccgtctaccgtatccggcatttttgtgtgctgtaaggtgccaccgatgacgggaatttaaggtcgtaattacatgacctctatttcgacccattaaattttttgtaaatgtatgccaggggaggttattcaatcgaataaattttttgaaatttctgggtccacaaaaaaattttaaatttgcattttcggaggcctcaaaaactttgaaatcatcccatggctgctccatttctggaaccaatgtgattattatagcagattatcccagtgataattcattctctgaggacagatgaaacaggaaacaaattctgattccgaaaacttgaattttccatgaaattttttaggttttcacactttctatgaggggtaagagtcgcaaaaataaaaaaatttcaactctttcattttatttccttaaaaattttcaaaaaattagtgcaatatccatcatctattttattcatcgaatatttaaaatttaaatatttttttttagcctaaaaaatctctgtccgcctagatttctgtgcactttagttaaagcatactgtattatagtttttcataagtatactgtatattattttgatagatgtatgtcacttatttgtgttaataaatttctgaaag

SEQ ID NO: 35430 - DNA, 770 bp, Heterodera glycines
ttaacaaccctccccaaaaacttgtttttcgtgcgttttaggcctgggatctcaggaaaaaatttacaaaaactatagataaaacaaaaaaaaaattaattgatcgaatctaaatatttatgcatgccaaaaattaaaaaactgtaagctttatttttctataatattttaatgaaaaatgtataaaatacaattttatcaaaaataaaaataaaataaataatttgaatgcttgttcattcctgcacactggtcagatctgactgtctcaaattagctttgttctttttaaaatttttgtccttttatgatttgggaaaacatcggcagataaagtgatttattataatccttttccatggaatgcgataaagtgtgataatttgaatagattagagctaaattttgttgtgcagcagtccatcagccagtcttttctgttctagtgctgctgttggttctgaaaagaaacattcatttccacccatttcaactcgttaggaaaataaaagttcaattcataaaattaattaaaaaatatacgggagtagttaccccacgtctatcgtcgtcaggcgtgaaaatgattaatgaccgtttagcctttgatgtgccgccgcgccgcgcgggggtttaccgcacgagacagtgcctacggggggatgtgaagagatgatgtaaaactttttggcaaaaaaacttttgtcaccgatggcggtgattaatgatcatttgtgggcggcgcggggcgcaaaaagtgctgcggggca

SEQ ID NO: 35431 - DNA, 1035 bp, Heterodera glycines
gcacttctcacaaagggggaagagtaggcgctgattgaactttacaggcattacggtaacgctgaggttgttgttaggaggcagaagtaaaacttttaaaattcctttgtaggtgttgtctgatggtttgcgccagttgactatttgctcattttgtggcaggttgatgatttttgggtgtccgagcgggtagcttgttgaaaaattggtccacgggtagaggctggtgaagtccttgtagctgattttttgtcccggttttattgtgtgaattagttttttcacatctgttcttcctccatgaaatgcgtcccgaattttgatgggtgaattctccttccagttgttgaaaaattgtttcatcattttgtcttttttcaaccgctcgttgatttcgtgttcccacaccacctctaagtcaacatagcgcctcagcatttcgtgcttctttttttccctctgtcttatctcacacagtttctttccgttcggcatcagcgtctcctcatccatattaccaaaacactcctcacacccatgccagacacacccattcacttcaattattttgtcccgcttcccatttgtgcctttgatgtagccgtccacttggtacacctgcccgcccttctcttttgaaaacgtattcgccgtaccgggagtgtgccgtctggatgttgaggttgagtgcaaagttaagtatgcaagctttggcgatcgtcgatggcttgccacgaggatgtctattcctccgtgttttccttccctttgtgtaagttgtttgaattcccgacgtagttccacgagggcgtgggtgaggattaggacgtcgttacagcagtattcgggcagtttttctttgaggtcgaatttttggtgacagttgttattataccaggtgatgaacttttggaggtcagttttcatcatttgatttggacagtagtcttcacgtggaggaaggtgctggaggaccttatcgtagtttgatgatttgttgaacatatgaggaaagtattgtttatccttaaatta

SEQ ID NO: 35432 - DNA, 1171 bp, Heterodera glycines
gattaagcttatgcttgaacctaggcttagccctaagcttaaacttgcttgggcttaggcctaagcttaatcttatgcttttttgtaatttttttattgtactaactgctattgacgccacccccccctaccccaaagaaatacgctaattaattaatcatttcataatttaaatttaagttgcgttgacggttactacggagaccctcggcttggcatcaatttgccttgcaagccatgcccttgtccgggtgggccgggctccggcttccaacatgctgactcatgctatttgacgccatcgccgagtccgacagttacatgcaattgccggttggcgtttaactaactaactaatttccaaatggattttctctcgctgtgtattgtgtattgtttgatcacttttgtaggtctggctatgctggcgagcgttgtgatcagtgtgccgtcaattattggggaaatccgcgcgaaatcgggtaaaattatttgcgtttgattcttatcagttttcttcttatcacaatcctcagcacattataatttcaatttgcacatatttagcgcctcatgtgaaaaatgtgcctgcaatgggaacattgatttgaatgtctgtgattttgaagatgcttttgaaatcaaatatcaattttctttattttgatttttcctgaaaggtgccggagagttgtgatgcgacgactggggtctgcttgaaatgcttgtacaacacggtcggagtccaatgtcacctctgtgtgaacggattttttggtgatgcgcaagcacgcacatgcacacggtggggagcgggtcgggacgggagtaatttggcaaatgattttatcggacatttttctaatcttttttcagtttcgttttcaataatttgggcgccaattcgagtgctggctcttgcgatcgtgtgtctggccaatgcccatgttatgccaatgtggtcgggccccagtgtgaccagtgcgcccctctccactacgatttggccagcggaaaaggtggaatgcgcggtttttaattttgaggttgatggatggcctcgccgagggaggccgggggggggggaggggagggcggtgtcagtgtctttgtgcctcgacatttttgccgcccagccaaaattgaacatttgcgccgttcatccaaaaat

SEQ ID NO: 35433 - DNA, 1089 bp, Heterodera glycines
cagcacgccgccactcactggtagcaccggatgttactcgacatcgaatggttcttcgacatcttggagataggcaataaaggagaattcgagaatgccgcggaagtgtcagaaatggggaagcttcctctttcgagagattaatcctggccaggcgaaaattttcaatgaataaattttatgttatgaacaattagccaaacaaattttttccgaaagcacatgaataaaggcgaatatattatcactgactattatattattgatatgttatatgaactcttacaggtataaaatacgtgtaaataaaaaaaagagacaaatattctaacaataagtttcagttcaatcataaaaacagccaaatggtttttaatatatttgaatttaacatgaggtaaaatcaaaattatatttcattatggtaattttagccattatttattactgtatactgcattaaactattagaacctttggattactgtgcatttacgataacctcgaacaatgtccattcgactgagttgttaaactttctcaagatgtgtaaccgtcatttttttctcacttcgatcactttttggtccagcggatgtttctcatcgacggttcgcttttagcgtgggaaatgttttacgcacaaacgaagtcaacatatcgcaatcatttcacattgctattcactctcgcatctctcctcggcaaacgacaatttcatttatattgtataagttttacatattatttaaaatataccctttcatgcttttatgacgcatttttagtccaacatctaatgctatcagccttgcttcgtcaattaccaattcaattttggcattattatcttttaatattttttccattttgtccatatacctaatcctgctacgttttgcatgttcttcatattaaaaatgatttttggtgtaattaattctcaaaaaaaatcaataaaatataacgattctataagcctttgtaaatttctgtttttttttggttgcattttttaataaaaatacccaatcgtttctttttacgaagcttcattgcttatttataaattctgagataaaaaaaact

SEQ ID NO: 35434 - DNA, 911 bp, Heterodera glycines
tgcgtggaaaccggcgtcgaagcaatagcctcaagagcagacatgggtcgaccaaaatcgtcgatcttcccttttttgctgcatggcgacgtctcagtattttgagtggccaatgtgatctgtgtatctacagatgacacactgtgttgcgaagtcataattaactccgctccggcttttgagggtctgccccttcttttacttccgatggaagaagccggggtgcttaattgcaaagcaccaatattgggcgtgctggtgcccgggtgcgatgccaccccatcctcatctgcactcccgtctgggacgggtgagcgacctgggctgacagattgctccgtccgctgttggtgacgctcttgtctcttccttcttaaattactttgttttgaaggcatctgaaaacaaaaatgaatcaatgatgtgtacatgcggcaaagtatttaggaaaagcaaccattaaaccacattaaatcaaatatttatcaaaaaaattgaaaatgtgaaaaaaggatgtatattccttgaatgccaccatgatgccgctgcgaatccataagccagggctcgcatgtccaactttcgcacggtgggttgcgacgaaagaggccggctcacacatcccgtaagaatacagatgaaaattaagcattgattggcgaattcaatgcaaaccacaatccccgaaggggcaggtaatctgaccaaaatcctcaaagggcaggtcacattttggttgactccgatatcctacgttacctctcaccagtccactggtcttggtaaagtgcgggaccagcttcgcaccggattttggccggtaacgataaggaattcattgttaacctttcggaccacaatcacccaacggggcaggcccacgaaacaccatcctcaggggcaggtccgca

SEQ ID NO: 35435 - DNA, 888 bp, Heterodera glycines
  unsure (1)..(888): unsure at all n locations
tcacatcatttgtcagcagcagcgcccatattncacacatcgctacaacaacaacaaacatcaaaacaaacaccgcttaattatgtaactaattggtgtcgccatttacgggcacaaaaacagtgggggaaggaaattaattgtttcaaaataaaaaattgccgccttcccccccccattccaaaatgggatgcaaattattaatttttctacaccttccttttttcaattcattcgttgatcacactgtgtcattgggaaacacgcaagcccttttatttttgtacaaaaatgatcatgaaaattggtcaaaataagtgggccatttatttatacgcgcgtgttaattaagtgggtaatttgcttactcaaatcgcaacaaatttgccttaattgactttccctatgctttacacatttttcgccctcaccacgcattatttgtaatattaaaacacccgcagcagcaaaaaagggggacaaattgagtgcaaaatatggccaattctaaaatggggggtgacgcggaataaataagtcaattggagaaaaaacggcggaaaaaataggggggtgcgggaaaaaggcaaattatgcaatgtggaaaagatagaaaaggacaacgacaaattccccggcagccctttccgctaatttcgcccacttttgtcggcgccgccaaaaaggggaacacagaaattattcccatgggccaaaagggggggtgggataccaaagcacaacaacgtgttcttggatcattttcagcagttagtcagggcgggggcagcagcaggggggggggggaagtctcgccgtccccatcgggcggtgctggggggggggcgacgacggaacacaacatgccttgatggagggggggggggg

SEQ ID NO: 35436 - DNA, 920 bp, Heterodera glycines
tcctcctctcagatggtcggccaccacggcggcggtgccgtgccggcgttggtccgtgaccttcggctgtgcattggccgtggctgtgagctgcgtctgtaccaggtccgacaacgcgtgggcggcgatttgctgttcccattggtcggcgtggtgcacactgagcagccgttgctgaacctcaaatggtcagttaattttgcctttgtgtatttaagaaaaattaaaataaaatttagtcttccggacttttctgcttttaaaaattgagatttttttggatgagtggcgctttatccgtttgaattttcattaatgatactttcatttaattcgtctatgctatcatatattatctaaaaaaaaattgtcccattttatgctcgacaattgggcccttctgacaattgtcggcgagacgggccgggaacagctccaactcctcgaattgtaccatcaccaacaacaacagaagaaaggtggccaaaaggagttgggtaagaccagaccggaagaaaaacaaatttaacaacaaatccatccatttgaggagccgcactgactgcaagtgccgacattggccccgccattcagctgctgtataacagtgccgacttcaaagggttggccacggggcgaaatgtcagcgaggcgagtcaaacaaataatgtttttaaaaatggatgaaaaaagcaattccccccgccgtttaggccatgtcaatgctggccgactccgtgtgcctccattcggtcagtcggccaaccgccgatggcgccgctggtgaacagtcacagcatttgctatatttactgggtcgtaacggcgtgttcaccgttcagctgatggaccaagctgaacagctcgacttgctgatggccaggttggtcccatcaacgggggactatttattttgcgaa

SEQ ID NO: 35437 - DNA, 944 bp, Heterodera glycines
gaccggggacctcagagtcatcggtttgcaactagtggcgagaaatacgaccctgcgcataccgctccgttttatagagaccaaaccgtattacccgtcaattatttaaacgatgacacaatttaaattcccattttagtcatcctccgccatactcaggtcagaagtgcttcgattactacatttgcactctcgtttactttcgtcctccgtcattttctgttttcgttaggtcgtttctcctatgaccgctccgaccgttctgtccacgacgagcagcaatgggcaagctatcaacaccctccaaatgcaccttcttcacggttaattagtgcatttcagcatttcttgaaatgcgtttcaaatccaattttctaggcagccaaattcacgctgggccaagttggacgaaccatctttgggaggagaaagccaagcgaccaatgggccacccccttcacttctcaacgatttaccaccaaattcccaaggacagcagcaaaactatgcgcgtaacgcgcgcttcaatcagaatgcagttacatgggaaaatcgtaagttgggcaaatggtaactttttatggattgtataaacaataaaaatgcatttcattcgagagtttgtttttcgtcaggggcgtatctagaaaaaattttcggggggggggggggacccgacctgaagacctttttttctcttcaactgaagacctttttttgctgtttatgttggccgttttaaggcagaaaaacatgtaaaaatagtggaaaatggggtccggcggtgccgataggcgccgccgggaaaaattttggaaatttgagtgctatttgttacgaaaattgcctataaaatttttaagtgttcgtttgggggggggaattcgaaaaaattttccattatttgctggaaaattgttagaaattttcatttcggggggggg

SEQ ID NO: 35438 - DNA, 1029 bp, Heterodera glycines
tgtgtctggacctctcggggaccggatacggactagcggtcgggctgccctcgttatgccgttgagaaagggtagttggtttcggccggccgcccgtttccttagtgcgctgaacaaccgactcagaaccggagcggacaaggggaatccgaccgtttaattaaaacaaagcattgtgatggccggagacggtgttgacacaatgtgatttctgcccagtgctctgaatgtcaaagtgaagagattcaaccaagcgcgggtaaacggcgggagtaactatgactctcttaaggtagccaaatgcctcgtcatctaactagtgacgcgcatgaatggattaatgagattcccactgtccctatctactgtctagcgaacccacagccaagggaacgggcttggaaaaatcagcggggaaagaagaccctgttgagcttgactctagtctgacgttgtgaaatgacttaggaggtgtaggataagtgggaggctctgccaacagtgaaataccactacttctaatgtcgttttacttataccattatgtagcgcctggccatcctctcgggtgcccagttctagatggaagcctgtgcttttgtgcgggtgagctacgtggaagacatcgtcaggtggggagtttggctggggcggcacatctgttaaatgataacacaggtgtcctaaggtgagctcaatgagaacagaaatctcatgtagaacaaaagggtaaaagctcacttgattttgattttcagtatgaatacaaaccgtgaaagcgtggcctatcgatcctttagttctttagaattttaagctagaggtgtcagaaaagttaccacagggataactggcttgtggcagccaagcgtccatagcgacgttgctttttgattcttcgatgtcggctcttcctatcattgcgaagtagaactcgccaattgttggattgttcaccctactaatagggaacgtgagctgggtttagaccgtcgtgagacaggttagttttaccctactgatgaggac

SEQ ID NO: 35439 - DNA, 870 bp, Heterodera glycines
atagcactaaaaaacctcatttttaggggggtgtaaaatgacaaaatgtattcaaaaaggtaaaaaaattaggccaaatcagtattgagataaataattttttaaataaaaaattcttgttaagaaaacaattaaataaatttaggagacaaattttggagaaaatttttcatttcctagggatgtatttttgaaaaatttcaggtcgattcaaaaattttaggtcgattcttagaggtgtatttttggtgttacgccaattgcggaccgtacaattgcggatgacaattgcggaccggacaattgcggacgacaattgcggaccgtacaattgcggatgacaattgcggaccgtacaattgcggatgacaattgcggaccgtacaattgcggatgacaattgcggaccggacaattgcggatgacaattgcggaccggacaaatgcggacgacaattgcggactgtacaattgcggatgacaattgcggaccgtacaattgcggacgacaattgcggaccgtacaattgcggatgacaattgcggaccgtacaattgcggatgacaattgcggaccggacaaatgcggacgacaattgcggactgtacaattgcggatgacaattgcggaccgtacaattgcggacgacaattgcggactgtacaattgcggatgacaattgcggaccgtacaattgcggatgacaattgcggaccggacaattgcggacgacaattgcggaccgtacaattgcggatgacaattgcggaccggacaattgcggacgacaattgcggaccggacaattgcggaccgtacaattgcggacgacaattgcggaccgtaaaattgcggttgacaattgcgga

SEQ ID NO: 35440 - DNA, 799 bp, Heterodera glycines
accaactgttaggcgtacagcaacggcggcacttgcatccgatgcagctgttcacgggctctctaaccctatttttattttttttctatctcttctctgaaaggagttataacaatttttcacaacagttttgcatttaacagacacattctaaaatttctaattagtatagtagtccaagcctattattattttttttgactagtctctgaatggggttatcccagttttagtatcctttttgaaaaacaaaaattttaataactgatacggtagcccaacatccattgccccaatgtacccttcggtttgtcaacgggagctaacaattgatgagtttgtttggtttcttttttaagcaattttccgtcattgctcaccaactggtaggcgtacagcaacggcggcacttgcatccgatgcagctggtcacgggctctctaaccctatttttattttttttctatctcttctctgaaaggagttataacaatttttcacaacagttttgcatttaacagacacattctaaaatttctaattagtatagtagtccaagcctattattattttttttgactagtctctgaatggggttatcccagttttagtatcctttttgaaaaacaaaaattttaataactgatacggtagcccaacatccattgccccaatggacccttcgggttgtcaacgggagctaacaattgatgagtttgtttggtttcttttttaagcaattttccgtcattgctcaccaactggtaagcgtacagcaacggcggcacttgcatccgat

SEQ ID NO: 35441 - DNA, 924 bp, Heterodera glycines
  unsure (1)..(924): unsure at all n locations
cgttcacctccgccctttttgctgtggtgcactattttgtcgaaaaaggacgatcccaacgagctttttgaaaagcgaaacttttgactcaaaacacctcaaaccctagagaagtgtcgttcaaactccgccatttttgctgtggtgcactcttttgccgaaaacgtacgatcctaacgagctttttgaaaagcgaaacttctgactcaaaacacctcaaaccctagagaagtgtcgttcaaactccgccatttttgctatggtgcactcttttgccgaaaacgtacgatcctaacgagctttttgaaaagcgaaacttctgactcaaaacacctcaaaccctagagaagtgtcgttcaacctccgccctttttgctgtggtgcactattttgccgaaaaaggacgatcccaacgagctttttgaaaagcgaaacttttgactcaaaacacctcaaaccctagagaagtgtcgttcaaactccgccatttttgctgtggtgcactcttttgccgaaaacgtacgatcctaacgagctttttgaaaagcgaaacttctgactcaaaacacctcaaaccctagagaagtgtcgttcaaactccgccatttttgctgtggtgcactcttttgccgaaaacgtacgatcctaacgagctttttgaaaagcgaaacttctgactcaaaacacctcaaaccctagagaagtgtcgttcaaactacgtcctttttgctgtggtgcactattttgccgaaaaaggacgatcccaacgagctttttgaaaagcgaaacttctgactcaaaacacctcanaccctagagaagtgtcgttcaacctccaccctttttgctgtggtgcactatttttgcgaaaaaggacgatccncacgatctttttgaaaagcgaaacttctgactcaaaacacc

SEQ ID NO: 35442 - DNA, 77 bp, Heterodera glycines
taaatgcagatattgaattttaaagttgcaaattctataaatgaaaaaacccaaaaaatattcaataatataaataa

SEQ ID NO: 35443 - DNA, 724 bp, Heterodera glycines
ccccataattttggcgccttggctcggggggacttcccccaaaaccaaaaaattgatttttttcagcgttcctttggggttctccaaccatttttgggaaccaaaattccaagcaaaaaataaagtcgaggtatatggaagctattcccgaaggattcggtctcctcataaatctgggcgcatcggttcggggggactgccccgagaacaaaaaaatcgattttttcaagtgtccgtttggggtactcaaccatttatggggagcaaaactccaacgcagaattaaagtacagactatagggaagctattcccgaaggattcggtccgccccccccccccgcccttcaaaattttgaaaaaaaaataaaataataggagactcagaattttgaaaattttttataaaaactgatgacaagctaatgtgataaaacaggttaattcttttcctttcagtatccctgcaaagtttggggcgcttctgatcagtttctgaaaaaaaagttaagcctaaactttttggcctgtttaaaaaggaattaaaaatttttaaaaattttattcatctcccttttcgatagaaaaagcatcagagtgcctaaactaacatgtaaataaaatttggtgcgtttcagagcattttctgaaaaaatatttatgaaataaaaaaatcgattttttcaagtgtccgtttggggtactcaaacaattatggggagcaaa

SEQ ID NO: 35444 - DNA, 1012 bp, Heterodera glycines
ttttctataataaaatactctcgatcatgagagggagcgttgtgcgtaatggcccttttattttttaatgaatttttaaattgcatctgtatcccaaaaaaatggctttctcttttttgggtaattttctataatacaaatactctcgatcatgagagggagggcggtgcgtaatggcccttttattttttaatgaatttttaaattgcatctgtatcccaaaaaaatggctttctcttttttgggtaattttctataatacaaatactctcgatcatgaaagggagggcggtgcgtaatggcccttttattttttaatgaatttttaatttgcatctgtatcccaaaaaaatggctttctcttttttgggtaattttctataatacaaatactctcgatcatgagagggagggcggtgcgtaatggcccttttattttttaatgaatttttaaattgcatctgtatcccaaaaaaatggctatctcttttttggataattttctataatacaaatactctcgatcatgagagggagggcggtgcgtaatggcccttttattttttaatgaatttttaaattgcatctgtatcccaaaaaaatggctttctcttttttgggtaattttctataatacaaatactctcgatcatgaaagggagggcggtgcgtaatgtcccttttattttttaatgaatttttaaattgcatctgtatcccaaaaaaatggctttctcttttttgggtaattttctataatacaaatactctcgatcatgagagggagggcggtgcgtaatggcccttttattttttaatgaatttttaattgcatctgtatcccaaaaaaatgcctatctcttttttgggtaattttctataatacaaatactctcgatcatgaaagggagggcggcgcggaatgccctttttttttttaatgaatttttaatttcatcctgatccccacaaaagggttttcccttttttgggaaattttctataaaacaaa

SEQ ID NO: 35445 - DNA, 1112 bp, Heterodera glycines
  unsure (1)..(1112): unsure at all n locations
attttancgattggcaaaaagccatggttaagcaccgccacgtcgtaggaatagcgtttgttcacataatcgacgggagtcatttcttttgtgtacacataaacagagaacgactaaatgaattcaaaacaaatacaattaatataaactttttaatattatttaattttttgaccaaataattaaaaaattatttttatttatttaaatgagagtaattaaaaatgtaaatatttaaactcgaccttgaacaccattcgtcccataatcttgacaaataaaaaaattacccaaattaatcaatggcttaaatgtgcactgaaattacccccaatgggtcctgatcaacggcgatcactcgttggttcaacagaatgtcgcggtgttggggcaaaattgttctcaggtcgttggacatgatcagaggggcggaccaaatggcccagatggacatttgcactttggcctggtcaacggtcaattcggtgttgccgacgatcaactcaaaattaattggggatgctttttggatcgcacagaacaaaaagaacacattttatcccaacaaaaaaagtgcgatatccggccatggacagcctatttataataactagagcccttgacttttaggcacgaattccttaaataggcacgaaaatgtgaaaaaaggcataaaaatgaacaaaaacgtcagtaaggcacgaaaaattgaaaaaaggcagaaaaaatcaacattttggacaaaattttttttgccaaataaacaaaaaaatttccaatataacttctttttttttgctcttagggccaattttttttattataaccggagcgaaaaaggaggaatttttctagcacaaaaatgacaattatttgctattttggtgttaaaatttcaaaacccaaggttaacggggggtcccgcggtgccgttaggcgccgctgggaaacatttaaaaaactgaaaaaggcatgaaaaaaggcaccaaaattgcaaaaaaaaggacactaaaaagttcaagctagaagcttcaaaccaagttaaaaactcgtttttcgtgcgtattaggctatagctagntagcaaaaaaaaaggcatgcctcaaaatccg

SEQ ID NO: 35446 - DNA, 1059 bp, Heterodera glycines
taataattcaaataaaaaaatgtaatttattattaataaaataaaaaatattttaaatgaataaaacaatgaaaacacgaaaaaaatggtagttattaattaaaaacagcgttggaaattattaattgaatattcatttaatttgaaattaaattaatttttttacaaattcaaaaaataaataatgaaattctttaatttaaaaaaataaataaatttaaataatttataaaaaatatttgaaattaataaaacatgtaaaagcaataaaaaaaaatgcacagaaaaataatgttacaccgtccggattcgaacctgcccccccccctcagaacatgtcccagaatccccaatcacacagggattctgaggtcttgacgatgtcaaaagtaaaatctgatcacgtattcgtgatcagcggcccaaataacccctaaagacatatttttggaagatttttgatggaaaaattttcccactcaaaaatcctggtcacccccctgtggtcccgaatctcaaaatcacttttatttttataaaaattcttaaaaaagtgataaaaatgtaaaataaaatttatattatagagaaaaaaattgcggatttttgtagtattttacttttcccgaatagcttttcagaaggcagctacgaatttttttctgaaaaatcgaaaatttccagaatttctggaataacttttttcatattgatgttagaaaacccaaataaaccccataaaattctccttatttttctctatttttaaagctttattatagttaaatcgatgcaaccatcaccgagttatgaattttccaatattcacccaaaatcccgagggccaaaaaattgccaaaaaataaagaatttttaaaaaattccaaaaattatgaaactgaaaacaaacaccatattcgggctcagcatagtaatttaccccagaaaaatatttttgacccccattttcaacccaaaaaaaatttccgaaaatttctagggggcctagctcgaaaatttttgaaaattttacatcatgtagtacaccattcgatagag

SEQ ID NO: 35447 - DNA, 891 bp, Heterodera glycines
ttttgtacggaacttacaaaagaaagtgaagcaacaaggcttatggcaggtaattttctcccctttatttaaaaatttttttttcaaaatttaagcgttattgttctgatccggtgtttgctttgaatgttcggatgctcacatcagtcgcattcgttccgctttgtgatgtcaggaatgcagtgacagcacttgacatggaatttggaaatttggcggcttttcaacctctcattgattggtcagaaaataaaattttcaattttagaataattttttaggcttttggacagttatgttgggcgtcctcgtcccaatggcacatggtcgcaaccgttgttccgtccggagcagtggaacgtctaccaacggacattggatggagatgcgaggacgaacaacaacgcagaagcggaacaccaccgtttgcagggcgcgttcaattgtcgtcatccatcgttgtggaatttcattgatgttcttcgacgtgaacagaaaattgccgaccacaaatacaattctgcgatcgctgattgtcacctgataaaaagcgaggcaaatatttggcagctgatagacgaattctgaatatggttcgcaattacattccattgaatgcagtgaatgatcatgattatcttccacccattccccagcccaatcaatttcacactattttggaatttcttcgaggtatttcccaccattatcaaatgaaccccccttgaaaattgttgttttttgttaccatttatttattgttttttatatattgataaagcgttaggttttttgatttgttgattttaactaagttttgaatttcatattttttgttgattttaaccaagtatttgatttttataattttttttggcgccgaaacgggag

SEQ ID NO: 35448 - DNA, 954 bp, Heterodera glycines
attcgccgtccgattgtttttccaattctttctgcaccatataactcaaaaagtgaatcattctttcgacgatcggaaactgctccgaccatcgacatttaagcactgatcactcactgataatcttcctaaaagggtgccttttccgatcgctgcgtttgtttctctctccgtttattcgtccatcgatcggttaaccgaaggattccttaaagaatctttaagagaaacccgtgcaaaaatgatcagcagaattgcggcgttattcccaattttattgttcgattctgtgcacttttccattggaattgaaaatgtttggccgccaaaccatgcggcaataaacgaacagagaaaacacatcgacgtggacacgagttggacaggcaaagagcaaaagacgcaacaggtggagaaaacggggggaaaatggaaaaatgggtaaaaaaaaggacaaatgggtaaaaatgggacaaatggtaaaaaagggacaaaaaaaacagatcggtcttgacgccagtgacaaagaacgcgctgtggtcgatttgctgacggagcggaagcagctcgccgcatcagctcacggaaatgtggcggcagcggaaacgagcgatggaaagcgggcgcaagtgcaaagatttggggacaaaggcggaatagcgcaagtggaggggcacaggtgggacaattggggaggcaaaagcattggcaaaaaagggaaaaggaggaaaaggcaagggtaaaggcaaaggaggaaaagcattgacatgaaaaggaagggaaaagctgctgaattcacatttcgccataaaattgaaacagtgcgcaactgaaaacaaaagagaacgcggaagggcggcacgcgttgctaaaggcggacggcaaatacgaattggacacaatggcgaaagggtcgctgaacgaaacgaaagacaccgaattcgaaagcgcaca

SEQ ID NO: 35449 - DNA, 907 bp, Heterodera glycines
  unsure (1)..(907): unsure at all n locations
gatagtcgcttatggagacagctttgaacttttagtgcactattgtgaaccaatttagtacaaaaatccacaatattttatgattttaatcgttaaacttgttactgaattcttataggaaaaggaataatcctgaaatgtcacaaaaacattagctacttgaaggggaactgatccaggcgcaaaaatgcagatcataaccaagtggacaatccgctggatccacatatttgactgcgaaaaatcaagcaaaaggtatattaattttaagctagcaaagagtcaatcattaggggtgtaaaaaagtctcggtctagataagtctcaaagtcggagcccgcgcctgacttcacaacaccgcgaatgttacaaccaaaatcttttaaagagtcgtgccacagagtctcgctcaccgccgcccaatagtagaaaaatcatcttatttctagtatttgcgtataaacgttctgtctcttattcgtatattgtgccttgtatataaacattgccgcccccccccttccgtgccggtgcaccccaaaacattggnnccccccccccccccgaaatgaaaatttttaaaaattttccagcaaataatggaaatttttttcgaattcccccctcaaacgaaaattaaaaagtttaataggcaaatttcgtaacaagtagcactcaaatttccaaaaattttttccggcggcgcctatcggcaccgccggacctcccttttccactatttttacaagttttttgccttaaaacggccaaaatttggtcatttttagtgaaaaagtgcagttgttactcagcagtagaaaaaaagttattggttaaatagcaaaaaaaaaaagaaggtcttcaggtcgggccccccccccgaaaaatgtttctagatacgcccctg

SEQ ID NO: 35450 - DNA, 1183 bp, Heterodera glycines
atataaaaaaaaacaattacagattaaaataatgaaagatgggtatatcaaaatggagtgaaaatcatggcaagagcggatttgctaataacaaaatcaaaaagttaaaaatgccatgccaaaatccgttcccccaattgcacaaaaagcgggaaaaagtgtgtgtaacaaactcattagcagcagataatgaatgatataataattgatagagtaatgacttggaagagaatgccagcagcataacgggttgtaaataatgcaaaatgggccattaaaagcaaaatagcgcaattgtgtgacaagatgaagaagagaactgaattatcacgaaatttttgattacaataacaaaatacagtaataagaaaatgtgattcgttagtgtaaaaaggaaggaacagtagtaataataaagtacagtacacataatcaggcagacacagacataaaagttgcggggatggaactgtgaaaaggtggaaaaataggagcagaatgatgagcatattcattcaatcagtcatcaaattgtcaactttttgccctctaccgtacacatatgggtttgctggcgaattgccagtgaacttttggcgtagtgtctccaaggtgccgtgccggtcactttctctacattattgaaccattgtgtacagtagcgggcaggcctagacaactaattataagcaattcactaattgtaaatgtgtccaacacatataggagacaacaacaacaatcaaaaacaacaaaatggatgtttccaaatttgggagaagcgtgtgctcacaatcagcagtcgcccctactaattgtaaacagttgcggtcgctgtgggagaccgatgctgtgccggcggcgagtggtgctgttgctccattttgatttcgtcatcgttgttggcagcgacaacgggcacagtcagttgcccgtcagaatcgtcggcgactgttgcgactttggccaacgtgccgcccccatcactggttgccgtcgtcgtcgttgtgttcgcttcaatcgcagctgatgatgaagcggcggcggcacatttgtaacaacagtaagccgaaatttgctgtacaccgcgcaccgaaatgtccacacagcacgaagtgataccatgcgggcacagcctgcctctcattggatccaacgggtgaactcgtctgcgagatagggg

SEQ ID NO: 35451 - DNA, 667 bp, Heterodera glycines
ctagaggacaaaatggtggaactgatcgaagggtacccctctctcgaagaaaagcaatggcattttcactggtataaatgtggttaataagttcaaaaagattcattttggctataaatgaatagcaacttaaggatacggtataacacgaaataacccagtaaaaagcattggtagaatgctttattctagttacacaaaataaaatgggagttagtgtggcctattgatattatgtgttgttgttttgcatagtgatcactgacctattatgatttcaacaccatttgttatgactattgtttgagtgtcaacaatatgagtatgaggcggggatctgaggttcgaatccgcttggctgcggagtattttttatgacattgatgaaaaatcatagattaaatgaaggttcatgcataatctgaactcagatgcgtgatcagtgcattttttaaccccaaattcaatgtaaatttatttttaaaaaataattaaaaaaatcgaaaaaaatcaagtagttgacaaaaaatcttagataaaaatcaatgattttcaaaatctgagctcagattcgtgatcagcgcattttttaagcccagaaaaaatatacaaaaaatttttaaaattttttttcgtcgggacaccaattcttaatggttgcctgtta

SEQ ID NO: 35452 - DNA, 929 bp, Heterodera glycines
actatcctatcacattacattgccactgaccgattcgcttttagtgctttccttgcgcatctccaccgtcagcttcggctgactgtcactgctccccgtcatttcctcccgcgtctccaacttttcaacaacccttaaaccagacagtaaatgagtttgctcttttaaatgcattttatttaattaattgcttggccatattatatataaaaccagaggagccaacaagttttttttaatggaattcccaaaaaaatttggttaaccttcaaaaagcgtgccaagcaaaacaaaaactcttcgggtgccctccccgaaatttttttctggatacgggcgcctggcgctgcgagccatagtcaaaaccaaaaatattttcaaacaaataaaaaatatatataaagtcatgccatcgcacacgtacactttctctccgtttgcgtcctccccctcaacggccgtcaccaccaccacgtcgtcacccgccgccacttcctcaacgatctcctgttgctgcggtttttgctcgtcgttgttgtcagcgtcgttcccaccgttttgacctttgtcctcctccaccaccaccaccaattcattctgaggcggctgcgttggcggcgccaaatgcttcgcatcgctctttcgcgactcgacggaagtgtcactttcattctcgtcctaaaaatttcaatttttaaaatttttatgcaacccccgccacataaaccgtcgtacatcagtgtacagtccagccgccttcgttgtccaagtcgatggtgaagcgacctaaacaacaattcatgaatgctaagaaatataaatataaaccccgaaatgaaattttagtgtatgggtgttctggggtttcaagtatagatagtctgaaattccaaaatctggtaataatgcacaagaatccatgaagtccg

SEQ ID NO: 35453 - DNA, 408 bp, Heterodera glycines
ttgagataaataatttttaaagcacaaattcttgtcaagaaaataaataaataaattttgagatgaatttttgaaaatttcatttcttagggggtatttttgaaaaatttcggatcgcttcttagagtgaatttttgaaaaaaacttgggtcgattctaaggaatgtatttttcgtttttattgcatttttattaacaaattttggacaaaacgccaaaataggcaaaaataggctttttcaaaattttttaagctttttaggcgctaaaaataaaagcctagaaaataggcactaataactcgaaaagtagcttaacaacaacccaaaaaaaaacatgtttttcgtacgtttcaggccacggggagctcaggaaaagaataggcttttgcctaaaaatcccatccct

SEQ ID NO: 35454 - DNA, 987 bp, Heterodera glycines
attttacagaaaataaattatttttaattttttcattcattttttctatttttttaagttacaaaattcactcgcgttacaaaatcaacatctttaaaaaaatttcttaaaagtaattccaaatccatccctatttcgtcgtgcgatatttgtggatgaactttcaaaaaaaaagaagttacgaatggttttcaaattttgttcactgatttgttagtttgactctttcagttgcagcagcaaaaaaagcgcgactttgacttctgttttttcaactgcttttcgttttttgctgttttttgtgcttcttctttcgccattttttcctccgattccgccggattttccgctgtcatttcttccagggaaaatatttcctcaatttgttcagaattccttgaaaaaacatccggagtaaagaatgccgtttcgtctgtttgtcccgagctttttgacaattggctaaacgatgaacgtgccgttgtcatcgttttttcggagctgctcgacgccatcgtcccatggctttgtgcttcgagttgctcatcaattttttccaccatttcttcgggcgaagaatgtgccgttcccacaatcggctgcgaattgccattttcttctgcttttggtgctgtatcggcaaacggagatggcaccggacatggttcgacttcactgctgtccggaattgccttagacaacggtgaaagtggcagaaacaccgaacattccgtggacgcatttgacgcccgcacaggcgatgaagtggacggagtgccaccgataaattcaaacattgaatccaaaaatgatgacaaagtccccaacacgggatattccgagtcgtttgacaatgcctcagacgaggaaatttgaacttcctcgatttcgttgttgtatggcactgcagttggtgttgaatgaacttcctcgatttcgttgttgtatggcactgcagttggtgttgaatgaacttcctcgatttcg

SEQ ID NO: 35455 - DNA, 1191 bp, Heterodera glycines
  unsure (1)..(1191): unsure at all n locations
ggtgtttattaaatcagaaagtgatttggcttttttgcccttcctttcctttctcctccttccccaattttgcttttctccttttttgctccgtcgctttcaaatgtgaaaatgatctgcgcattgtccgcattgttcgtctccagaaagtcgattttgatcacaatttcccatgcgcggaatgcttgcgcaattaatcccctgcaaaattaagcgcaattaagttaattatgcaaaagcatgtaataaaacatgtntaatgagtgctaattcaaattggcaaattgtgccaaattttggctgacttcgtttcgccatgagtgaactgcttggggtgcgacgcgttcaggttccagaacaatgtcgaacgttcccaaagttgcgatgggtctaaagcgaaaaaaacaaatgcgaataattaagtaattaattaattatcggactaattaaaaaataataattattatttatttaaaacacagccagtgccattgcattaaacactttgtgtaatgcaagtgccattctcggttggtaactttgccaagaaattagtttgacttttgatttttagggccaaatttccggcatttttctttactccaaaataatcctggcaaatgccataattcatcgatccgcccccaccttgtgctgtgtagccctcgtcagagttggcacagcgtttccacgacattttttgaagggttgccaagtcgacattgcccgtctgccggtagcccaaaaagcgttggaaatgcctaaaatatttgtgatttttaaaatatttcattttgaaattttatttaaacgcacttaacgccatgggaaaggccattctcattgtgcttcagatgaccaaattctcgcagataagtcttaaaaagaatcatttgaatagaaaaacttggataaatttcaaaaaattattaaattttcaataaaatattttttcaaagaaatattcatttttaaattcaaatattttgttccctaaataaataagatttttcgaaaaatttcgcaagctaaaaatttttttttaaattgataaaaatactcaatagttcttcaaatccttcaaaaataaagacaatatcaaataatgttaaaaaagaaaattttaattttttaaatatttatttaattaaaagagaaatcttccatatttctctacactttccacaaatt

SEQ ID NO: 35456 - DNA, 1043 bp, Heterodera glycines
aaaagaataattatttatctttgttgtcttataactttttaaaacaacagttaagcgatgatagtgaacataggaatcgatgtagaatatttttctctatcggtatgttaaatttggtgtggatttaacgtgcaggaaaaaagttaaacgtcacgaagtaaatgttgctctttacagcttttttttcttttttaccgtccatggtgcagggactttccccaatcaaagacgcttccaattaacgatcatcctcagtttaccataattttccatactaagtcgaacatacgttcttggcataaaccaaaagattaaagtttaggaaatttgtaaatacaaagaaatgagcaaacaatgatttaattaaaagtttaacaaataaatgatttttaacgtttttcaaacaagcaaattaaaaaatggaaccttttatagtgcgtatcagttacgcagggaaattgcgcccctatgaactcgcagaatatgaaactattgcaatgttaaaagtgcgtgtcgccgttttcgaggatgtgcctccgatccagcagcgtcttttttttcaagtagtcaatttgtcatagaaaaaagtcataattttttcattttagatcaccaattggcgaacgagggagtcatgtccaccatggtgcaattctcattcgtgtggcgccgcctggtggcgaactcgtctgatgtgccaagacagttcggaatctccatgttttttttgtggttgatctccatgtttttttgttgttcatctccgttgtttgtttgttttttgtttgttaaagtaataggatcccaaattcttatttttttttgtttgtttatggcattagaccttctctaatttttatactatttcaaaaattttcactcttttaaactaaaacctaagtcgttgccgcttatcctcttgcgcaattgcatcaaatacgcaaacaacggtttgtcatccatcgaatccaaagtcgtgaagggcagtacaaactgtgcaagagagagaagcaggcggtcggtgacaaacaagtgccgtacat

SEQ ID NO: 35457 - DNA, 947 bp, Heterodera glycines
cgcagagcctcttcaaaaatttttccattacgcaaagagctgcggaaattgtgaattaattctcagaaaaatggctatctctttttaggacaattttctatctcgtaaccccgatgctaatccgttccgcagagcctcttcaaaattttttccattaccgcaagagctgcggaaattgtgaattaattctcagaaaaatggctatctctttttaggacaattttctatctcgtaaccccgatgctaatccgttccgcagagcctcttcaaaatttttccattaccgcaagagttgcggaaattgtgaattaattctcagaaaaatggctatctctttttaggacaattttctatctcgtaaccccgatgctaatccgttccgcagagcctcttcaaaattttttccattaccgcaagagctgcggaaattgtgaattaattctcagaaaaatggctatctctttttaggacaattttctatctcgtaaccccgatgctaatccgttccgcagagcctcttcaaaattttttccattaccgcaagagctgcggaaattgtgaattaattctcagaaaaatggctatctctttttaggacaattttctatctcgtaaccccgatgctaatccgttccgcagagcctcttcaaaattttttccattaccgcaagagttgcggaaattgtgaattaattctcagaaaaatggctatctctttttaggacaattttctatctcgtaaccccgatgctaatccgttccgcagagcctcttcaaaattttttccattaccgcaagagctgcggaaattgtgaattaattctcagaaaaatggctatctctttttaggacaattttctatctcgtaaccccgatgctaatccgttccgcagagcctcttcaaaattttttccattaccgcaagatttgcggaaattggaattaat

SEQ ID NO: 35458 - DNA, 1690 bp, Heterodera glycines
ggaaagataattgtatacgcttaataaaaataattcaaattaaaaaaataaataccttaaatgaattaataatttaaattaaaaaaagaattgtttgtttcttattgatttgaaatgtgaggccaaaaaaattagaagaataaaatttaaaaggtatttttttataaaagtaaaaatactactttaataaaattataatttaataaaatttaaattaattcgaaataaaaaattagagtataaaatatattttcagaatacaaaaaaataattaagaataaaagcagaaaaaagaaagagataaattcaaatttaaatattcattatccttaactgttataatttgtgttataatatattttgtttttaaaatataaaactgatttaaaaaaatttataaaattaatttttacaaaattcaattttttttattagagttttaattattagtaaatcacaacaattaagaaataataaaatttaatttatttttatcaattgcttaattaattgattatttacttattaaaatttctttaattaaaattcttaaagtaaattcttttacataaaatattattatataacaaaatgccgacaacatctacaacttattcaatgagcttctcgagaaatgaaatatattaaaatacattttcttaataaataaagtgatactaagtagaaaactaaaaatacttttttttaaatcaaaacatacaaatttttatttgtacttgaaatgatccaacatttccaataataaatattaagactcatagaaaaatataaataaaaatctcatgatttattctgttaacattaactaaaattatttgtttttatatagatttgaatcaggagctcaaaaatgtgaattaaattctacttacaaaaaataataccagaaaatgggaaaatttaaaaaaagcaatttagatgaactttatttaaataaaactattttaaatcgttctaagtatattatataattattcaaaaataaattgtaattgaataaaaaatatttaaaaaaaagaaaagtgaacaaatgtttaatttcttatacaatcttttgaaaaaaaatttggtgcaaaacttatgtaacaccctaaaaaaaagaaaaaaagttatgcgtagcgaagacatatgaagattcaattttttaaaaactaaaactatataattataaattaaaacaatattttaatgaccaccatcttgcagcaattagtgcttaggcgatcaaaacataaaagtaattttaaaaacaaattattatgcgaaatgaaaaataattggaagaccataaatcagcaaagcctaaacaatcaaatttttgtgtcaaaatcagaaaattaggttaggtattgacaatactaaatagaatatataggcataaccagaaaataaacgaatataactaaaagaaaattaattgtattatctttaaaatactagatataaaaaacaatttaaattgaaaattatatgtacaacatatttatggaatatgaaaaaatactacagattgattaattgtttcaaaaaagcaagtcgaacaattttgtcaaaaagaaaatatggcgtacaaataaacataaaattatcaattaaatataaactaaatactaatataaaatcagaagacgcgttaatttgattttaatttaaattaaacctctgttaa

SEQ ID NO: 35459 - DNA, 129 bp, Heterodera glycines
tctctcttactttctccctcttctctctctctctccccctcacccctctctctctcttactttctccctcttctctctctctctccccctcccccctctctctctcttactttcacccccttctctctc

SEQ ID NO: 35460 - DNA, 681 bp, Heterodera glycines
  unsure (1)..(681): unsure at all n locations
gatgagagtgagaaagggaaaagagaggtggggatggagcagacgagcgaccaaagagtgggcacgcaaatggtggacgggaatcaggggacgacgaaagcatcgaaaaggcaaaagggggagagaggcaattagctaagtcaattaggactaattagccaattgattaattgggcacggttggtcattaattctttccaacacctggcaaaagcaagcgcatgctcaacaccaactgaaaatggagagaaacgactgaattaaatggatgaataaagtaatgaaatgccttttagacaataaacgaggccaggacaattggaaacggacaccgcgtcaatgtcagaggaacggaggtcagaatcggacaaagcattctcaatgagaggaccaatcatagaacgatgctaacaaaaagacaaaaggtaaggcgaaaacattaaatgaatggccaaaaagggaaacaaacaaatgctaattggcaaattaagcctaattagcgactaattaattgctccccaattggctgctaattgactcactcacatgccttgcggaaacgtaaggtgaaacgccgcctaagcgaagcaaactgtcattgccgcacttcgtctgtccgcaaacactcgccgttcctcccaattgacatggcnaccggcggcgtcgtcacaactgaccaaa

SEQ ID NO: 35461 - DNA, 449 bp, Heterodera glycines
ctttggataggtttctaattccaaatctgacctatcactcatacagagaccgacaaccaaaggaaaaaacgaagccgcattttttgaccgcgcacaccagaggaccgaagcgcagaaggcacaaggacagcggagaaaagagcggcgccaccccgcccgggacggggcacaaaaagaccgaaaccaagcagaaaagaaagggagacaaaagcacaacacaaaaggaaacacagaagcacacacagagacaggaggagggacgaaagcagagggacacgaagaagaccaaggcacagcgccaacaggcagccacgaaaaccgccaaacccaaaccagaacacccacacaaaagaaaggacaaaaacaaaaaccgccgcaccaggagagagcaaacagggccagcaccccggagccaaccccaaaaaccccggacacgagacccggcaaaa

SEQ ID NO: 35462 - DNA, 852 bp, Heterodera glycines
acttcctctcttcaccatttcaagccccggccacttacaattagcattagaacccacccccatctccataaatgccattccaattttttccaattactctatatatttgcctattccaattccctcccaggtgacaatttgctgacggcgatgagcgtggcacgcgagtgtggcataattcggcccaacaaacgctcatttttgctggaagccaccaaggcgcacgatggccaaacccatttgacgctaaagcagtcggtgtcctcctccgaggaagtggtgcgttgtggaataaaacttggatacagttactagtgctgttcgagaccgaaaatttcccgagaccggttccgagacttgaccccgagactagatatcgagaccgagacccaaaaaacccgagacttttctcgagtcgagaccgagagtctcgaacagcactaacagctaccctccgtcgccccccccaaaaaaagttgttttgacaattttctctgggaagcgtttttttttgccacaaaatttaagtatgattattatatattacagcttgaattcgatgagaatgtgtccttctacgatgccgaacagggcaccggaggaggcgtcagcggaagcggtgttggcaaactgttcaacaataataatggggacggaagaattgccgagtccacgtatcatgtggcggtgtccgggccaacactgagtgcgtttggtggtggtggtggtggtggtaatgttcaaaagcaataaatattagctcccattctcaaggcatcatttgcgagcagtacccggagatgcttgagcggttggtctgcgtgtgtgatgtgtacgcgcgaatgtccaccg

SEQ ID NO: 35463 - DNA, 878 bp, Heterodera glycines
  unsure (1)..(878): unsure at all n locations
agcatnttggccannttctttttgagtaaaaatttcaaaaatcttccattgtttaataagatttgagatgcttaaaatttaaaagtgtgaattttattataatggaagcttggttaggtagttgccgagggtataggaagtcggggaagcttaaaataataccccgattaattttgtcggggacggcatttcttgcgaaggcttggaaaaactattattttaaaacaataattcattttttttcatctctagcggctcatttttttgtcttttaaaggctcgagttttggattggattttcgatggtagcctggggttactttgtatttttgtatattgaaaagtaggggtagttggtagaagaagaaaaaagtgccattgaaaatcaaaaaaaaaattggcagaatttgaaaatgaaaatatgaatgatccaaacttaatgccattttttacttcccaattgtacttttttccaaaaaaaaattagttttttttttgtttcaaaaattctgtgattcttaaaaattatttaatttttaataattttaatatatgtataatggtgaatgaatgacggctctaaatatacttctgaatccaaaatcaaaatcttctttaatttggtgcatttctctatattttagtgggttgttagcaataaaataccgtaattttctctgtttaaaaaataaatgaaataatttaaaattgtattttcctaattatggcaattattactctgtatggacacagaaagtgcagtaggagccagaatagtaatactgctcgaaacctaaaattttctgagaatctatacgagagctagagccaagcgcgtagccaggagggttggttgaggggggcattttggctatata

SEQ ID NO: 35464 - DNA, 1163 bp, Heterodera glycines
tgcccctgttgcagcgccccgttttcattgccatttctcatgaaggcgcatgctcctgctgctcgaccggaggcacattctgctcattttcccccgttggctcaatttgagcattcccgtcgttggggctttctcccccactgccgaacgcaaagttcacattttggacgtactcctcaaaagcggccatcaaagagttgctcattcgctcctatttttcccaaatttattttctgatttttttttctctccgtttattttccattattctctttcttttttttccccactatccgacctgaccgctgagccaaggctcaatttttttccacagtccgtccacagcggccgccatttccaatttaatgctgccctttagctggtcagctgtttcgcgcatctccttctccgttttgctttggagttgttcgaccaactcgcgcacttctttcgcaactttttcgtcacgcgattttgatttttttgacaaaagcgcttctttttcgagacgttccaattcatttgaaggagaatttttcccagaagacattttagtgattgaatttaattctgaaaatgcacaatcatagtcaagtgtcgaattatttaaataaagtgtgagggacaattatcatcaaattgtaaaaaaaaaaaaactgaaaatttttttccatcatttttattttattttatttatgggacgaaagggatatgtacagggtctatgcgctgcctcaattgtgacgcactggaccaactcttcttccttttatttggtccacatgcgcacttctggtcactgtactgccctcaatttgaatctcccacattctttcgcccattggctgtaaaagtatccccgcaacccattttccagtgtgttctttgtaccatattaagtctcctggttcaaaatttttctgatttctttgggggtgcgctgtttctccagttcgctgcagcggtgccaattctctatcaatgtttgcctcaggcatattctgcggcatccttatcttgtccaatgccgtccgcaattctctgcccaaaaattggtgcgctgggctttcggcacctgctgctgcgcaaggggtcaccctgtattcctgcagcagggtaaactgagcaactttggcactcatgccttctgccaacaattttgt

SEQ ID NO: 35465 - DNA, 967 bp, Heterodera glycines
  unsure (1)..(967): unsure at all n locations
aaaagagacagccattttttcggcaagaatttttttcgttagcatttcaaatatcgtgtgagtgtttggtagagccagactagagaaggcaaatgttggtaccaagtttgcggtcaaatccccaagagaaaaaagagatagccattttttcggcaagaatttttttcgttagcatttcaaatatcgtgtgagtgtttggtagagccagactagagaaggcaaatgttggtaccaagtttgcggtcaaatccccaggagaaaaaagagatagccattttttcggcaagaatttttttcgttagcatttcaaatatcgtgtgagtgtttggtagagccagactagagaaggagaatgttggtaccaagtttgcggtcaaatccccaagagaaaaaagagatagccattttttcggcaagaatttttttcgttagcatttcaaatatcgtgtgagtgtttggtagagccagactagagaaggaaaatgttggtaccaagtttgcggtcaaatccccaggagaaaaaagagatagccattttttcggcaagaatttttttcgttagcatttcaaatatcgtgtgagtgtttggtagagccagactagagaaggaaaatgttggtaccaagtttgcggtcaaatccccaagagaaaaaagagacagccattttttcggcaagaatttttttcgttagcatttcaaatatcgtgtgagtgtttggtagagccagactagagaaggcaaatgttggtaccaagtttgcggtcaaatccccaagagaaaaaagagatagccattttttcggcaagaatttttttcgttagcatttcanatatcgtgtgagtgtttggtagagccagactagagaaggcaaatgttggtaccaagtttgcggtcaaatccccaagagaaaaaagagatagccctttttttcggcaagaatttttttcgttagatttcaaatatcgg

SEQ ID NO: 35466 - DNA, 826 bp, Heterodera glycines
cagcacagcgagtcgcttaaatgcacaccctcttgacacgtaaaatattccaaaaaaagagatagtgattttttctggattaggccggagaaataaaaattaccagctatttgaaatgcagtgggcaagcacagcgagtcgcttaaatgcacaccctttgacacgtaaaatattccaaaaaaagagatagtgattttttctggattaggccggagaaataaaaattaccagctatttgaaatgcagtgggcaagcacagcgagtcgcttaaatgcacaccctttgacacgtaaaatattccaaaaaaaaagagatagtgattttttctggattaggccggagaaataaaaattaccagctatttgaaatgcagtgggcaagcacagcgagtcgcttaaatgcacaccctttgacacgtaaaatattccaaaaaaagagatagtgattttttctggattaggccggagaaataaaaattaccacctatttgaaatgcagtgggcaagcacagcgagtcgcttaaatgcacaccctttgacacgtaaaatattccaaaaaaagagatagtgattttttctggattaggccggagaaataaaaattaccagctatttgaaatgcagtgggtaagcacagcgagtcgcttaaatgcacaccctttgacacgtaaaatattccaaaaaaagagatagtgattttttctggattaggccggacaaataaaaattaccagctatttgaaatgcagtgggcaagcacagcgagtcgcttaaatgcacaccctttgacacgtaaaatattccaaaaaaaaagatagtgatttttt

SEQ ID NO: 35467 - DNA, 530 bp, Heterodera glycines
gtggccaaaatacctgggctattccgtttgtcctcctctacggacactattgtggtcgtatttgcgattggggtcgtatttgtcgttgttgtaacaggaggagaagtcgtccgttgagaaattgggattcgaatcaaaatccgcttttctattttaggtgattcagtgtcagctaaaattgtattaattgttaagtgcttttcttttgtattaataaacccagccaaacatatgcaaggggtgcgccagtgacaaattttgatacgaaattccgaattttgtcccaaaaaatgaccagttttgggataattttttaaagaaaaataagagcttttaggggccggcgatgccgataggcgtcaccggaattttttttagggttttaatgaatttctcaaaatttgtccatttttaaaattttccttcttatcctcttcgctacgacccaccgcttgtcgacccctttttttctctccccgactacgaagcccccccccccctcttccggagccatttatgacggggggggg

SEQ ID NO: 35468 - DNA, 923 bp, Heterodera glycines
tctattctacagggaatttttaaatttattctctatgcctacaaaatggctatctcttttttgcgagaaattttgtacccttaaatgttcccagcatgggcagaggggcgcggagagcaatggccattctattctacagggaatttttaaatttattctctatgccagaaaaatggctatctcttttttgcgagaaattttgtaccatacaaatgttcccagcatgggcagaggggcgcggagagcaatggccattctattctacagggaatttttaaatttattctctatgccagaaaaatggctatctcttttttgcgagaaattttgtaccatacaaatgttcccagcatgggcagaggggcgcggagagcaatggccattctattctacagggaatttttaaatttattctctatgccagaaaaatggctatctcttttttgcgagaaattttgtaccatacaaatgttcccagcatgggcagaggggcgcggagagcaatggccattctattctacagggaatttttaaatttattctctatgccagaaaaatggctatctcttttttgcgagaaattttgtaccatacaaatgttcccagcatgggcagaggggcgcggagagcaatggccattctattctacagggaatttttaaatttattctctatgccagaaaaatggctatctcttttttgcgagaaattttgtaccatacaaatgttcccagcatgggcagaggggcgcggagagcaatggccattctattctacagggaatttttaaatttattctctatgccagaaaaatggctatctcttttttgcgagaaattttgtaccatacaaatgttcccagcatgggcagaggggcgcggagagcaatgggcattctattctacagggaatttttaaattta

SEQ ID NO: 35469 - DNA, 538 bp, Heterodera glycines
agagagaaggagagacagtgtatgtctgcggagagagtctttttttcactacatagtagcatatccagcgcaaaaatttccgatagaagaaaggttgaagatgccatggcggcggggggagcggaggggagggggcggagtaatagttcgtttgtactccctctccctcccccgtcgcgtatgcatttcgcagtcaagacgggcggataactccatcccccgccgctcttccgaatctctgctgctgctgctgctgctgctgtctttgcttcatcttcttcatcctcatccaccaacaaacacgcaaaaatattcatcccatcccatccgtcgcccctcgggggcgctcctccctctccgtctctgtctcaaggcttgttgctctctctctctctctctctcccttctcctttgtgtgcgtcttggcgcggtgtcgatcgcttccccccgggtccaagcagcgaactctctcccctccgcccccttcgtcttctcccatccgctccctccccccgctccatcaaactcattccccacc

SEQ ID NO: 35470 - DNA, 1425 bp, Heterodera glycines
gctgtaaaaaaaatttggggcgatttgaaagagaatagaaagaaccaggttcgatgaagttttggtaagccaaaaaaaatgcaaacatttaaaaatctataaaaaatttaaaaatgagaattcatgcgagattttctggaaataagcttaatagggcctagttaagctgtaaaaaaaatttggggcgatttgaaagagaatagaaagaaccaggttcgatgaagttttggtaagccaaaaaaatccaaacatttaaaaatctataaaaaatttaaaaatgagaattcatgcgagattttctggaaataagcttaatagggcctagttaagctgtaaaaaaaatttggggcgatttgaaagagaatagaaagaaccaggttcgatgaagttttgttaagccaaaaaaaatccaaacatttaaaaatctataaaaaatttaaaatgagaattcatgcgagattttctggaaataagcttaattgggcctagttaagctgtaaaaaaaatttggggcgatttgaaagagaatagaaagaaccaggttcgatgaagttttggtaagccaaaaaaaatccaaacatttaaaaatctataaaaaatttaaaaatgagaattcatgcgagattttctggaaataagcttaatagggcctagttaagctgtaaaaaaaatttggggcgatttgaaagagaatagaaagaaccaggttcgatgaagttttggtaagccaaaaaaaatgcaaacatttaaaaatctataaaaaatttaaaaatgagaattcatgcgagattttctggttatacgattaatattgtctaattgatttggaaaatcaaattgatgagaaaagttattaatatgatcgaatgaggaaccattgttgtaaatcattgcttttgcaaatctgatatcattttgtgatcagaagtcccaaaaacctcgttgtagtcttgataacacaaaaaattttggctggaatccagattctccagaattacgtatcttatatttcatttaaattgattattcaacttatattttcatgcgttttttccccagggcttcgtcgacagaaaaattgaaatccggtgaatttacgttcacgaaatagtgaaaaaggtggatgatcagtgcaattccgaggacatgttgtacaggctcaagcaaatctaataccccgagaacaactttctacagacatgaaactgaagacggaaaagtaaaatgagaagctatgggccatccaaatttttaatattacatcgctttttcattttctctctcgttttggttcgggttgagctaaattattttaaaaaaggtaggagaaggaaccaattctttttaattaaatggaatttttaattgaacaataaaaaaatggcgggaaaagcgccagtgaattgtggaaaaaaggaaaatttt

SEQ ID NO: 35471 - DNA, 1238 bp, Heterodera glycines
  unsure (1)..(1238): unsure at all n locations
cgcaaatttttgctctattatataaattttattntacatttttatccctttttaaaaaaaagttataaaaataaaggtgattttgggattcgggaccaaaggggggtgaccaggatttttgagtggaaaaatttttccacccaaaatcttccaaaaacatgtcattaggggttatttgggccgctgatcacgagtacgtgatcagattttacttttgacatagtcaagacctcagaatccctgtgtgattggggattctgaggcatcatttttttgggggggcaggttcggatccggacggtgtaaattattttcgttatatttatggttatttttaatgtttttaattcatttaaaagagtgtttgttttataataaaaaataaattttttaatttaaattaaattattttttttatgaaaaattttattaaaattaattatttttttaattaaataatttcatatatttttttttcagaaattaatttcatttcaatctaaataaatttcaattattataaacttcaaagttttttttaataataaaaagaggcatttattttacaatttttaaaaattattaatgcatttttgtacctcttctgccatttgttgtacctctctcttttaatcacagttgtacctcttctaatcgctgttgtacctcttctaatcactcttctaatcgctgttgtacctcttctaatcactgttgtacacttctgaccaatgttgtacctcttctaatcattgttttaccacttctaatcgctgttgtacctcttctaatctctgttgtacctcttctaatctctgttgtaccacttctgaccaatgttgaacctcttctaatcactgttttaccacttctaatcgctgttgtacctcttctaatctctgttgtacctcttctaatctctgttgtacctcttctaatctctgttgtacctcttctaatcgctgttgtaccacttctgaccaatgttgaacctcttctaatcactgttttacctcttctaatcactgttttaccacttctgaccaatgttgtacctcttctaatcactgttttacctcttctaatcgctgttgtacctcttctaatcacagtttttacctcttctaataactgttgtacctcttctaatcactattgtacctcttctaataactgttgtacctcttctaatcactattgtacctcttctattaactgttgtacctcttctaatcact

SEQ ID NO: 35472 - DNA, 993 bp, Heterodera glycines
tcggtggatcactcggctcgtggatcgatgaagaacgcagccaactgcgataattagtgcgaactgcagaaaccttgaacacaaaacattcgaatgcacattgcgccattggagttacatccattggcacgcctggttcagggtcgttaccataaaatgcactgcttgtgcgttgcttcgtgggatcatgtacttgtacgtgttcttacgttacttgctcagctcggctgtggggttttggtgtgctggcgcgaacttgtggttctaattcgcgttttacggaccgtaactcgggcgcaccaatgctttgcatgctgtggcggagtgcctggattactggcattcctgctttgatttttcgacctgaactcagacgtgaacacccgctgaacttaagcatatcagtaagcggaggaaaagaaactaacgaggattcccgtagtaacggcgagtgaactgggaagagtccagcgttgaatcgcagctcctctggggttgcgaggtgtagcgtatagaccgtgagcttgggttggcccgcttgttcaagtttcccttgaccggggctccagagaaggtgcaagacctgtccaactggcggtgcctacccatctttacgtgtcttggagtcgggttgtttgggatcgcagcccaaatcaggtggtaaacttcatctaagactaaatacggccacgagtccgatagcgaacaagtaccgtgagggaaagttgcaaagcactttgaagagagagttaaagaggacgtgaaaccgatgaggtggaaacggacagagctggcgtatctggtctgcattcacccgtttgttgctgtacgttgggctgctagcctccagtatggggtttgctgtccttctgttcagtggcgaatggggcatcagcacgcggagtgcattgacaagctcggagtagtagccagagttcggtcatgaggccaccctttcggggtctggtacccggatcgggggagtactgttta

SEQ ID NO: 35473 - DNA, 662 bp, Heterodera glycines
ttattcatttttcattcgctactccaaaagcaaattcatttaatatttatttcaaacccttgcccacagtatccccaaaactctcccctacagtaccccttagtcccttcgaatggaataccgtacacttttggacagtttgttgctgagtttgctgctcattttggacacttttcaattggtcagtttgaatttaaagagagaaaattgggtaaataaaataaagcgaaaaattcaaaaaatccgaagaaaaaagaaaggcaaagaatgcgagagaaaaggccgagggaatgccaattaaaaggaaaataaatgccatcgtttgtccctcccttttctttttttccggcaaatgtgtgccatttgttctcatcagactatggcaccgtttggcaaaatgactttaattgtcctccctgaaatttaacagcattttgtgtgcaccgaacgcgtcattttggacgaggcgatgccaaaagtcagtgcccaatacgactatttcgggagccgattgtccgcccaacaaccggtgaatttaaaaaagaaaattgtgacagagaaccgttgaaaagtaaaaaaaaaatttagcaaccgtacggaagtgccatgggatacggaggaattgccggacgggacagtgagtgggggggggggaatggggc

SEQ ID NO: 35474 - DNA, 348 bp, Heterodera glycines
  unsure (1)..(348): unsure at all n locations
tgaaaattgcgaaaaggtcgaaattatgaagttttttccaaagaaaattttttccagactagaaaatcatttcgttttttgtaaggctaatagagcatatgaagagctttcgaatgataccaacaatcttggatttggatgccaaagaaaagttatagcgaaaaacataaaaattttggaaaatctgcccacagataacacacacaagtaccgaaatttcatgccttttaattaaaattccaaattaaaaaaagatgaccagaaaacttaaaaaattcatttttgaacgttttcgactataattttntgaattttggatgaattntttcaaccttcgtagactaatcg

SEQ ID NO: 35475 - DNA, 1127 bp, Heterodera glycines
atgcgaataaaatacacaagtaaaaagaaattgaaaatagtaaattgaaaatataaatattttttaacttgtataaaaaatgcatatgcaattatctaaaatacaataaaaatacacacaattaatcatttatcggccagggcatagtggaaaaactttaaaatcacaatattatagaatttccaaatgaataaagtcagaataaaataatttgcttaaataaatatagacccactgaatcaaccaaataaattattataaaatttaaaaaattaagaaatattaaatttaattggataaacgtctatacttgacacatataatcaacaattatttagattttacaattatccctcgtacggcaaaaaaaaaagattttcgacacaaattccattacaaccgagtcaattttgagcctccaattcagaaaagatttgaatgtatggcaaagttgtttttgtaagatagtaaaaaaaacaaagggcgaaggttcgagtccgctcctcaacattaatatttttatttatttgtccaaaaaattttaaaaaatgacaattgtaaaaaaacgattgaaggtttttcccaaccaacttgggcaaactttgtatcaatcaaaatctcttgacgaggtgaagcttttaagcaaatgctatgcaatctactaagtttagggatgggacaattatcaataggctataattttcagaaaaaaatcatattttctgcataaacatttcgaaatctttataatttcagagttgcctatgtatggctaaaacttcagctcttcttttaattttgcttttgtgttagtgttttatgtatttttattgttagaattaaagtaaaataaaagaaaattattagaaaagaatagaaataatttaactcaaaaaaagataaataaaatttaaataaataaaaataaatttaagatgaaagaaattgcttgagaagaagtttttaaatttaaataaaaaattattaaattttctgatgtaattaagattttttatgaagttttcaataattatacagcgacaaaagtttaatattctcttggatacagctaaaatttatactcgtgaggcgcaagcctaagtatgcacaaatgtgcccaagcgatc

SEQ ID NO: 35476 - DNA, 358 bp, Heterodera glycines
catttcctttcacctttccctttgggggttgtaagttgcatgcgatgaaaaggccgaaggtaaaaaaaggaagaataagtggggagggaagcgaaatgaatgcatcggcaggaggagaaaaaagggggaggggagaggcagtgggagagaaggggctggtaggcgcctcacagagccaataaatgccccccccccctctccccccgccccattttccctccgtccgccgttcgttcgtccgccttctttccgtcccttttcttttcccttttttttcttttgctcttctctcttctgtctcacagtttttgtgtgtgtttgttgttgtttatttcgaagagacggaaaatcgagaaaa

SEQ ID NO: 35477 - DNA, 1074 bp, Heterodera glycines
  unsure (1)..(1074): unsure at all n locations
cctatgaatttatattttctatgaatttttaaagtttttctcccaggttttaagtgnaaaagtggtggtgtctggaaaaccttttcaccagggtttaaaaaatctaggaaaattagtaagnatttgtagtgttncgatacgtatccctgcaaaatttggtgagcccctgatcaattacaaattatttatggacgatcaaatttttagaaatttttatttatttttgcataattaattcataaatatttttttcagaaaatgctctgaaacgcaccaaattttatttacatgctagtttaggcactctgatgctttttctatcaaaaagggagatgaataaatttttaaaaatttttaattcctttttaaacaggccaaaaagtttaggcttaacttttaatgaaattcaatcactcatttttcgagtagtgatcagaagcgcaccagattttgcaggggcctaaaaaggtcaaggaaaggcgtctctgcgttgatttagcagtagtacctatgaatttaaattttctatgaatttttaaagttttttgaaatttttttaagtgcaaaagtggtggtgtctgcaaaaaattttcaccgggtttaaaaaatctaggaaaattagtaagcatttgtagtgttccgatacgtatccctgcaaaatttggtgagcccctgatcaattacaaattatttatggacgatcaaattnttagaaatttttatttatttttgcataattaattcataaatatttttttcagaaaatgctctgaaacgcaccaaattttatttacatgctagtttcgcactctgatgctttttctatcaaaaagggagatgaataaatttttaaaaatttttaattcctttttaaacaggccaaaaagtttaggcttaacttttttttcagaaacttatcagaagcgccccaaactttgcagggatactgaaaggaaaagaattaacctgttttatcacattagcttgtcatcagtttttataaaaaattttcaaaattctgagtctcctattattttatttttttttcaaaattttgaagggcggggggggggg

SEQ ID NO: 35478 - DNA, 1313 bp, Heterodera glycines
  unsure (1)..(1313): unsure at all n locations
attctatttactcaatcgaaaggaccacaaattntggctcattgatctcgcattggatgccaccacacacttgttatggtgggtaaaaggggagcagcaggaggaaaagccacttcaaatgaacttggttccgcttttcgagcttaattaatgagttgggtgggccaaatttgggacaaagtgcagcagagccatttttgaattggtgcagcaatttgtgaatttgttctccgagaatttgaggaagttttgagcagccgaccaatccctggagatggcatttaaggggggagggaaggcggaagatgaagccgactttaaaggtcaacaggacataaaagaggaagatcaattgaggatgagcagaaatgccattgtgagagagaacggggccagataaagcagctgaaagaacgaacaaatcagtgccagaagaatgatataagtagagaggcaaacagggcacaatgccaaagaggaggggcaggaacagataaatcagcataaaccattagatcaagccggagggggtgggggggaacttgcacataataaggggatgggaaaacggaaggaaagggattcaaaaaattagcaaataatcgccgaaaggcaggccatgccgtaccccctatcttcaattgcgattgaatgccaaaattttgaaccaatggaggatcggtcctttctgtttttcattaaaattcttttaggggttcggggtggaggagtgcgtgccaaaataaggtcctttccccgagggcaaagagattaagcggacaaacatcgctccggcgtcttcatcatcaccatcatcagctcatcgccatgagtaagagggcacattaggaggatgccacctttaacctccccccttttttctgtttgccgtcctcgtcatttccatcttttaacattcggcgccgcctctgctgagaaaattgtctccgatgagtggcgagagaagtaagacaaaggtcattcaaccgagaaaaatggcataacataatgtaattctttggcactcggacaaaaagccgacttagccgaggacggacggggcagggcaccacagcgaaagttgggtggcccctcaagccccgcgggaatgccctcccccgtctcgctactcgtctttgtcgtttccgggaataaagagggcgacaaaatgaatgcgaatgattggcacatgtttgaagtgccggcggaaattgccacagctgagctgcgcggcgtgcaaattggccaaagttcagacggacgtactttgacttttttatttggcaaataaaagcgtgccaccattgtcccat

SEQ ID NO: 35479 - DNA, 883 bp, Heterodera glycines
tttttgctttttggtagggtttgctccagattttgaaaattttttcaaaattttttcggcgccgaaaaagtcattttatatagggcgccgaagtggccgcgccgaactggccgcgccgaaaaagcccgcgccgaaaaagctcgcgccgaaaaaaccccaagccgaaaaacccgcgccgaactgctgccccgaaccgtaaaagtaatgcctagtgaattctttaatttagtgcaaatatataactggaaatggttttctaacacttctctctttctatatccctcttttctctctctctcttcctcactccttttctttctttctctctttcgttttctccctcctctctctcgctctcactctatcttctttttctctaagcactaatttttctctcattctctgactccgctgttctttatatgttctgtggcgtcgctttggaaagtgacgccaattaaccagtgagaaatgccgaacaccaatttagttggttgtactatattggtgagcatcgctgacatgagcagtcattttcatttcactccatttcttccaacaatcaattttcatattcgaacacagaaagtttataattgaattattttaatatatatgtttatttgtcgagaagttaatgttttttgcaaagagtaaaaatttaattgttttagaaattttggcactattttgggaaattttgttgttatccacatttttatccatatattagacttttaatcccttttttttttattttacccattataaacacgctaatttatttcatatatgaaggtactaaaaaaaaaaccccaaattctttcttgatttcttctggtgaaaaatgagcatgggtacttttgcgccccaactttaaaaa

SEQ ID NO: 35480 - DNA, 862 bp, Heterodera glycines
ataaatcataaaatgtgatttaatttggtgttttttcataatttttcaatctctcctccgcttattcgtcagcccaaaaacggcttgtcgccttcttctcgggaatttttgctcaatttgctgtattttgtctttgcaattgcccaaaaatcgtttttcggcttttcttttgatttaagtgaaaacattcgtttgaatttgctctttgattcattttcttcttcattttgccccgattcgttttctgcgctttttgcaaattcatcattttcctaaaatgcatatttttaataattattttaaaaatccaaccgaaaattcatttgcttcttcgcccaacaaaatgtttttggtttcacatgtaatgccccgcattctgagctcatccattgcttttctctgcttctcctcaacaatgccaagcaaacccaacattttttgatcttttctctcttaattaaatttcaatttaaattgtttttaaattcctttcactttcaaatgttctcctcagaattccaacggtgactttgtgaaagaatggaagcgacggaacattgtcaatttgttttgaggtcccgggaatgcattttttgttcaaataatccacaattccacgagcagtcatccgtttttccggctcaatgttcagagtgttctaaaaaatttgaatttaataagagtttgaaaaaaataaaaacaaagttttttgtcatttgagactattttacgtttttctaagaattattgaatgtcaaggcaattcatcaactttttttttgaattaataaccgacggaatcccgactatataaacggaaatgacttgagacccgacatttaaaaaaaattataattatatt

SEQ ID NO: 35481 - DNA, 405 bp, Heterodera glycines
aaataataatgatgtgtgccacgttttgcaatttgattaatatttacaaaaaaaaaaatgtgtaatataatttaaatgtatatttgaacatatttttatgtataattacaattaatactaataacattcatttatgtttaaaaaaaaattactccatttattttaatgcttctttgaagtgtcgacttttataagcctcaaaaatgatttattttatagactttgaactgcaatgaatattattgtacttcttttcattttatcggcttatatggccaaatttggccatggaatggaccggcgaccggcaaatgccgacggaaaagagacgaaaagcaaaatcagcagtcgggcaccattccaatcaacacaagcaaatcagcaacaaccgcagcaacagcagca

SEQ ID NO: 35482 - DNA, 951 bp, Heterodera glycines
cactcactgaacggcggtgacctttttccggccatgtttagttgcataatcaaatgcaaatttggccaccctttcgcactttactcgcgtcataattttcaagcactcaattacaccttaaatttccacaatttcaataaaaaggctctgctctctatggtttgttggtggtgctcacctggcaccaattcgtgctccatgcgcgaatattcgccctccgtttgctcgcgaatgatgacaaagtccaacattttgttgtgccgtgttcggatgccttccagggctttgatgtgcacaacattggcgaacaggtccagccgtttgcgcagctgcgtgttcaacccatccgttttgtcgtcaaggctggactggatggcccccttcaatgcgacacaattgttccgggcaatcgagtcgaccacatcttcctttatcaattaatattttcttaattaatgatctgccaaaaacaatcactgacaatgctggccgatctcgagtagtacacttcgctgagaaagacttcctcaaactcaattggtattccggtcgccttgacaatgtcttggacggcataaactagctcaggtccaacaccatcgcctaaaattgtgcgggaataaagatggaagttggtgaattttgtttatttgcctggaattaatgtgcatttcaattttttagcaatttcaggcacagcaattgcctgaagagaaaacattcaaattttagcatcgaattttcttacaggtgaaatggttgtaaatgatcgttttatgagtgggcaaaaaatacgacgagagaaagccgccaccaccgacatcgttttggggatggaaactcaaatttttttgattttgttcattcgttttccttaaacgaatttgaaaaattttttgcatattatgccaagttttttttgaatttcctttcacctgttaaacaaaaact

SEQ ID NO: 35483 - DNA, 1448 bp, Heterodera glycines
cggggggcggcgacggtcggcgcgccccgcggggggccccaacagattggaattggcacaccgcccccggcccccgcccattagggccccgggacaacaccgacgaccacaaatgctgggggcaaaaaaaggggggaggccggaggaggcgggtgcccctgcgcaaattaatccaattagcagccaatcgattcattcattcattccattcattcactcactcactctcccctcactcactcatttactcacacactcatcaacgcgaacagaagcatcagcagcagcacaggacgaggaggaggagcaggagcggaagctgtccattttgggggacggggaacccccgcgggggcaatcgcaacaaattgcgcatcaattcttgttttttttaaaaccacggctgctcctgctggccctagtgtgccggtggaagcatcaaacattgtgccaatgccaatgtgtctgtctgtccccataatcagttttctctggccataatcaaatgtactgcttcaaaaatttcaaatccatattacgccgtcaaatgcacccagtaaattttgaattatggcattgtgccaatgccaatgtgtccgtcatcattttttatcctggccataatccgtgtactgcttgaaaaccaagatgaatttgcatttaaaaatacattaatgccagaaaacttttttgtttctaaactattaattttttaattttgaatcgtggcgttgtgccatagtctcgtttcgcattgcttcgcagctgatcactcccctgtccctccctgataggaattgatgaaatcttgaattttgcttcttggatcactcccctgctcgaccatcattaggagttgagcaaaactttgaattttgcttttttgccgtgttcgaatgccaaattttgccgatatttttctcgacttccacccacggcatttttaaatttgccacaaccaaacagcattgccaatttaaattataatacctttataaatatttttgtgttatgggcaacagctacaaaaaaaacccatgcatttataatttaatacatttggctgatcaaattttaattcgttgcccggcaattacaaattttaaaaaatccccccccccctcccctccaccgacgccctccgtgccagaaattgaaattccttaatttcttgacttattggagcagtttagcaaatcactctgctaattaaattttctaaaaatttattctgtgcaatatttacccgttctcagtcacaaatctcagaatcccgactaattaggcatttttcatggcgtaagtcattttttgataatttaaaattaattttcttagaaaaatcagcagttaatcttggtttacattttctttttttggccccgtttttgggataacctttatttagcctcaacaattcagtgatctgggctcaaattattgctttt

SEQ ID NO: 35484 - DNA, 660 bp, Heterodera glycines
aaaaaaaataaaaaagcaaaaaacaaaggaatcttcctaccaaataacgacagggacaagcgcccaaagtacgatttcgagaacagagaaacgagaaagccacaaaagtagaatttctagaattgagagaccagcagaaccgtgctccgttttctttgcttcaatttcaatttggtttgtagaatgagaagatacattctgagaatcgtttgagcagaagcagtgttggaaaaaaacaatagcaccacaattacaccggcaatattgaacagcggcgaaaaggtttggcgattcggtgacccacgaggaaaatctgaattttggattgaagtaaaaagcgcatctcaaaaaggcgggttctagtcggttttacgcgtcccatggcattttacgcgtcccatgacattttacgcgtcccatgacattttacgcgtcccatcacattttacgagtcccaacaacactttacgcgtcccatcacattttacgcgtcccaacaacactttacgcgtcccatgacattttgtgtccatggcggggatggcattccgaggccccaaaaatttttggaaatcggaattccgtgccatccctggtctcatggtataatagttgtcctaataactaagagaaaaacttttttttttgtcgggcattcag

SEQ ID NO: 35485 - DNA, 1321 bp, Heterodera glycines
  unsure (1)..(1321): unsure at all n locations
ttcccgctcaagagacagaagggagaataggtttaatcctttttgagttcagggcagctcgcgcggcgatggcggngaccatcggcggncaaatcggcgatgaacgatggaggaaatttgctgacacggatggatgctccgtggcgctgacatttgctttcccttctgtccctttccctcaattgtacatttcatttccatttccttttgtttcttttcgtttattcatttctaaaaatgtttcctctcaatttctttttgtactggaattccggctgccttttctctattccattctcaaatttggggcaccactcctatgcagctctctcaaattgaattttgatccgctggtgcgcaagtggttggattgggaaccgaagggcaaagccgttctcggactggcgcaaaattcttcaatgttcatcgaggatcgcggacgatcctatggaaggggggagctgtaagggattggcccagcctcaaaacaattttcatttccctcatcagccggactttccactttccattatcgcttttcttatctctttcatccccaccccttttccgttcccttcacacttttcctttccccagcgatcagttagtcgtcggagtcatcggattttaccatcgatcaattaattcacttttctcatatcgtccgtccatggaatatttcgatcacatattttatccggagaataaattagtctttaacatcgaggcaatttgggggatttaacatcgatcccagggcccgggatccatcctcccaaatcgtcctccctaattattcggaagcggtgagtcgtctgggggacccacgcgcctccctcactctcggctgagttgtctttagctgacttgtccagaagccttttcaataaccattcttaagcgttttttggtgaaactaggtatttactgatgtattgttagttcaaaaatgggccattcagacgccgccgggtaaatttaaaatattttttttatatatgtgaaacgaatttttggcttaaaaaacgtttttttttgtgtattactcatcaaaacgaatatacagaaaaatattaaatatttaatcctcgtcgtcacattttatttcactttaggcgttcaattgatttttaggcgtcccattaatgaccatcctcagtcttagggcattactttttacttggtcaatgctaaaaaatgacttgaaaatcaccaacctttacatttttagataacttctctgaatttcttctctaaaatatgaaaaaatcggaaaacaattcagacgacgacgaaatgtcattagacaaatgcaagcaaa

SEQ ID NO: 35486 - DNA, 930 bp, Heterodera glycines
atttcatactttaattttcctcaatcttattttacgatttttattgaaaaaaatgaccgtcacatccaacaccgaattccgactcatcgaatgtgtgccaatccttgaggaagttgctcgtgaatttggctgtattacgccactaccaaaccttgggtatgtttctttcgttttacaacactaactccagcatacagtagccatcgtgactatcgtgtaagcggatgtatgatgattcgcacgctgacatcgttgaatcgactctacattttcgatgctgaagactgtattgaggttaatgtaaaatatgtttcatattttattgctattttaggtgaagggtttcttaaggcaagaggacggtacgagccaaaaagtggtcaacgaatattatgaaaaatatgatggactaaatggatttgctgaatttattcggaattgggcctttacctttttctgtttccatgcctttgatgatgatgacacacctgatgaagactaatttcgttaatatttattctatgctctttgttacaaaccgataaacaaatccatcagggttatttgaacgattcaaaatttgcataatattttcgaaacccaatccgacggacataaaataaacgaaagtaattacatagtgaccacaaacattggacaacaccgattgaaaccgcctcttattatagtaaatctttttaaaattatcggataaatattttttgatcaagctgataggcatctctccataagagtcaaagaagtaggcaacagcaggagactgtgcccatatcgcacaccaatgagttcccggcatacctgcagggtcctgaatggaaatacgatgagcgaatgaagcaaaaataagcgtaccagggtaacaatcagactgcacggaaatcttgaacaccttggcaacccatctgcggg

SEQ ID NO: 35487 - DNA, 1097 bp, Heterodera glycines
  unsure (1)..(1097): unsure at all n locations
atagattatattctgcatgaatccttcgctaaatttcccatttatcttataaagtcagattaaattaattactccgatttgttntagaattggtccaaatacgcttgctaatagcttttcttttcgaaaagagaggcgaggaaaaataaaggttgcatccaaatgtaatttttttttacattgaagcatttggatggcttgctgtttacagttggctaagtcttatttgcaagaagcagcacaacttttgtttgggccaacgaccccaaaccattcgaatagcaatcgattgggctgactagactccatatttgcaggaatagcaatggcaggtctatcttaaaggcctgacgagttatgtttcgacaaacatcctgtacaccataaatcgattagcaaatttagtcgaactatataaatttttcaaaaaatgattcatcttttttatggttagcgcatatgtctctagctttatagaaacggttcccgaatctgcgaggaactactttttagagaatttctatagattattattttgcatgaatccttcgcttaaattcccatttatattataaagtcagattaaattaattaccccgatttgttttagaattggtccaaacacgcttgctaatagcttttcttttcgaaaagagagacgaggaaaaataaaggttgcatccaaatgtaaattttttttacattgaagcatttggatggcttgctgtttacagttggctaagtcttatttgcaagaagcagcacaacttttgtttgggccaacgaccccaaaccattcgaatagcaatcgattgggctgactagactccatatttgcaggaatagcaatggcaggtctatcttaaaggcctgacgagttatgtttcgacaaacatcctgtacaccataaatcgattagcaaatttagtcgaactatataaatttttcanaaaatgattcatcttttttatggntagcgcatatgtctctagctttatagaaacggttcccgaatctgcgaggaactacttttttgagaattctatnagatattattttgcatgaatccttcgcttaaattcccattatattataaa

SEQ ID NO: 35488 - DNA, 753 bp, Heterodera glycines
ataacctataaatataaaaatcgtctgtgaaataatatggcgattgcgcacagccctccgtctcatacacaagcgctgttgtgaggtataaaatttctcaaaaatagagatagccatatttctgggatagagtataaatctaaaaattccctcaaagtataaacggtatattgcgcaccgccctccctatcatgctcgagatcatttgtatgtgtataaaatttatcaaaaaaagagatagccatttttctgggataacctttaaatataaaaatcctctgtgaaataaaatggcgattgcgcacagccctccgtctcatacgcaagcgcttttgtgaggtataaaatttctcaaaaaaagagatagacatttttctgggatagagtataaatttaaaaattccctcaaaaataaaaggtctattgcgcaccgccctccctatcatgctcgagagcatttgtatgtgtataaaatttatcaaaaaaagagatagccatttttctgggatagagtataaagataaaaattccctccaaaataaaaggtctattgcgcccccccagcccaaccaatctaaaaaccggcgcgaagcgcccgtcttgagcctcgatgtggactaaaaacccctaataattttttaaaaattcaaaaaaatctctccaaccaattcgatcaaatctaggtagcgaagctcccaaagcgcgaagcgctttttcccagctaaatagccgacggttcacgcacccgctagt

SEQ ID NO: 35489 - DNA, 929 bp, Heterodera glycines
tttgatagaaaaagcatcagagagccttatttaactttaattaaaattggtgcgtttcagagcacgttctaaaaaatatttatgaattaattttgcaaaataataaataagtaatgaaaaagtcagaatttcgaaaaattttaaaaacaacaagcgttggcattttttcaggttaagttagtcctttacaatggagaaggcctgcaaaatttggagagattatatcgattttagtgcgctaggttcgatgaaactttttaaaatataagcctaaactttttggcctgtttaaaaaggaattaaaaatttttaaaatatttattcatctcccttttgatagaaaaagcatcagagagccttatttaacttttaattaacatttggtgcgtttcagagcactttctgaaaaaatacttatgaattaattttgcaaaaaataaataagtaatgaaaaagtcagaatttcgaaaaattttaaaaacaacaagcgttggcattttttcaggttaagttagtcctttacaatggagaaggcctgcaaaatttggagagattatatcgattttagtgcgctaggttcgatgaaactttttaaaatataagcctaaactttttggcctgtttaaaaaggaattaaaaatttttaaaaattttattcatctcccttttgatagaaaaagcatcagagagccttatttaacttttaattaacatttggtgcgtttcagagcagtttctgaaaaaatatttatgaattgattttgctaaaaaaataaaatagtgaagctttagaaattaataaaaaattttacattcagaattactggagttagcatcatagcagtgcttttccttgtctttttgatgccctcgcaaaatctgggtcgcttctgatcagtttataaaaaaaaaagttaagctaaaatttt

SEQ ID NO: 35490 - DNA, 931 bp, Heterodera glycines
cattggaaggaggagagacggaagagaaagagagtaacatggaggagaaaaaggagcagcaactgaagaagaggaaaaagaaaattgcagctgaacaccatcagaaacaacaacatcagcagaagcaagaacattggaaggaggagagacggaagagaaagagaggaaaatggaggagaaaaaggagcagcaacggaacaagtattgctaatggatgtcggaaatcccccgccaaaatcccgaaaaataggggccacagttttcaaaagaaaattcattcattcgatagatagcaaaccattttatatatccgatttatttatatatatttgagaggtttttcttcataaaatgcatttgatcacggatgaattatgatcggtcgatcgatcattcttaattaattcatttcttctgcggctgatcactgtttttgttcgtttgtccgtcactcatttgtcagcagacgacgcccctttttcgctgctttgtcccgcttcttgttcttcttctgctgatggcggagacaatggccttaattaagcgcaaatctcaaatttggatatgtataaaaacaaatcccctttttattgctcacccaatgcaattagtggtactgaaaggccaaaagaacacattgttagaattgttgtcccaatttccgtcttcccaattgaccgctgccgtctccccaattttgcatcgtttcattatccatcggttgtccaattcattttcgttttctttggtcaatgtcagcttttcctttgtccattcgttcaccaattcaaacggcaccatttgcattgacggcacgcgaacagaaaaatgaatttcgtaactgacggaagaaatggcattggcacggcgaaaatgctaaacaatttgataggaaaaaaacaatcaatcatttgtcgaattatgccacacc

SEQ ID NO: 35491 - DNA, 939 bp, Heterodera glycines
gaaggacgagagaggagcaccaggcttgaaatatgctctcttttaaaaattctttatctctttatccttccgccgacttttctgggccccgctattcattctcactctctctctctcctttcttttctctctccccctcctccgttctctattctctcttctctctccctctcttgctctgatcgcgcgccaattcattcattcatttatcccatatttaattcattttgtacaaaaatttgatcaaatttctgtcttttgtttttgtaaaattttgtaggatcgagcaaaaatctaaattaaatttataaaattttcaacattcaaactaaagaattaaattttttacctatgtataaatctgaaaatataaactgttatggtgtaaactctattttgacctttttcattttttgattgtgttttaatttctgttttttcgtcaaatatcatatgcacattcataagactttgacggtgagatggatgattaaatgcttaaaaacaaaattcctgttttctgtcccccgttcattgattccgccatttcctaaggattattcaaaggttttttttctttgatattatcaaggtttaattttcgttttaaaactagctttaatcgcctgattcgataatataatgcttaattaatttttttggcgacatgtatttaggtaccggaattggtgcaaaaggcgattttttaaaattttacattttgaaatagcactaactccctgctggtggacaaatttaaggcttacggctaggtttacttcctcttgctgctttttcgacatgaaatttcatattcttttttcatggctcacccaaaagcacaatagtacattttctttttttactaatcattggcatttgcgcttatttgtgctgctcgccatttgctccttctcctcctcctcctcctcctcctcc

SEQ ID NO: 35492 - DNA, 1172 bp, Heterodera glycines
taacgatttttggtgggcgacattggaggtgtacgattctatattccgtctattacggttttgccgtttgagtacgtccgtgtatattgtatacgtaccgtattgtattttgtatccgtagggcatattcaattccaattttaacgcctaattttgtatacccacgttgtgttgcgtttgttcataaactttgttaaattatgtgtacctattaaattttattagtagggctataaaatattttttaggcgtttttgtgatttttgttatttttcatgacttttttggtacttaccgtatatgctctaattatagcccagtctctattaatcccacagtctccaattatcccccagtctacgaggtgttttgaaaaataatccctctatcataagcccccagtctctaattatccccccttttctgaggaggttgaaaaataatcccccatgggctataattagagcatatacggtatgtatattatctgtgtacagatttcaaaaatcttttttgaaaataaacttgttttataggttttcggggtcgggaaaaccgattctggcatctgttttgacccaattcgaaccccgaacccggattcgaacaaaaaaattaaaatccattttttaacaaaattcacacattttatacacaaaatcgcttcacattaaaaaaaataatgactatggcacgataaaataaattattcatcctctgaccaggagtagatgaaacgtaacattttaattagagaccggcgggaacgggttaagttaacacactttgatttatatttgaatttattgacattgtatttattacgccaatgatttattgacacttttctcttgttccgccatttgtgagtttgggctctctgtctagctcatcataaatttagtttatgacatccaatttttcatcattttctacgcggattggatacgaatttgtggtcaaaggcattaatcgagagtggttcccacataaattgccaactgtattcatgcttttttcatttcgatggtcatcttttgcttatggacgacattcccatcccacccaaatagatcccggaccaagactcggaactcaactatgtaggtggaggaagactaaagccgatggcaggaccatagaccgcccaatttctgtttcgaactccgaca

SEQ ID NO: 35493 - DNA, 882 bp, Heterodera glycines
agaaaacatttgagaggaaaaattaatttatgccataaatgttaatatcaaaaataattcacacaaatattttggaaattttttccctctgtcatgccaaatcttttgttgaattaattatcgcttttacaaaaaaaaaaatatttttcatttcttaatgcgctgctctgttgctgaattaatttaacatttcatagtctatctgtctcattttaaagcatcactttggcgagactctggtctataaaaagttgtaagtaggacaaaaatgtaattaaaatttcataaaaatttttgggtcacatggaacattatgaattccttgggcaaatttataaacaggaaaatttttattttttaatatttaaattatggatttcagcaaataaaatagctaaccttttattttggcagctaaaaagaaatttttaataattttttaagaatgactcaatccagtaataaactttttttctttttggctgccctcgtcactgtcacccaagcggtgaaaaatgccacaacggaaacaaattctgtggaacaggtggagctggacaaatattttttgggctttgactttttggcttatataatcaaaaaaaaatttccaaaaaattgaagtcgtttatgaataattgaggaaaatttttgaaaataatgatcaacaacaaaaaaatgaatatcccatgcgggaatttttccatcacagacataattccagtcacagttgaacaaatatcacaaaaaaataaaaattattttagcttgcgataaagacgaaaaaattgaccaacgcaagaagttttggaacgcaataaacgaagcacaaaattactggaccgtgcgtggacaaatcatatttaaaatagcatttgttaa

SEQ ID NO: 35494 - DNA, 866 bp, Heterodera glycines
tccgcccccaccccaaccacctcctttttggtgggctcctagagggcgtattccgtgcgaatttgtgcctcctcccttctgtcgatgcgctgactctccgccgcattgccccgttcttcggcgaccaccaaacgctgcagagaatggctgtactctgaaccggagagaaagagacgacgagttaatgacacacacaaaccgtagtaattaatgactgattgtataaacggaaaaagacggaacgagtcgtttttggatgcaattcattcccctcgcccaaatttttttaaatttttcaaataaaaattttttcttcgtataaaagtttcaaggaaacttttcagcgattcaaaaaaaatcggggggaaacgacctctcaggtcattttcactcttggagattcaaaatttaaattcaaaagaaaaacggtattgagtctgtagcaagtagggtgcaagttagctatgtactttaaccaaatcattggcattggtactcgaataaaagtataaaatttcattgatttccaattaaaaactccccgccccttttgttacgttttattgcgtttgggtccctctgctgctgctgttgtcctccttttccgtgccattgtcgtgtctccaaatgggccaattttgcttcgtaaatgcgtcgattgcccgcattcattggccccgcaatgcaattgcgacggcgcaaccgttcgcgcagttcgtccagccgaagcatggcgaattggtgccgaagtgcgtccaacacggcctcgtcagagtggcgttgtacagcttcatcgtcatcaccatcggttggctcaccatcactctataaactcaaaaaattgttaaattcttgaagccgcgttt

SEQ ID NO: 35495 - DNA, 1021 bp, Heterodera glycines
ttaaaaattcattaaaaaataaaagggccattacgcaccgttctccctctcatgatcgagagtatttgtattatagaaaattatccaaaaaagagatagccatttttttgggatacagatgcaatttaaaaattcattaaaaaataaaagggccattacgcaccgccctccctctcatgatcgagagtatttgtattatagaaaattacccaaaaaagagaaagccatttttttgggatacagatgcaatttaaaaattcattaaaaaataaaagggccattacgcaccgccctccctctcatgatcgagagtatttgtattatagaaaattacccaaaaaagagaaagccattttttgggatacagatgcaatttaaaaattcattaaaaaataaaagggccattacgcaccgtcttccctctcatgatcgagagggccattacgcaccgccctccctctcatgatcgagagtatttgtattatagaaaattacccaaaaaagagaaagccatttttttgggatacagatgcaatttaaaaattcattaaaaaataaaagggccattacgcaccgccctccctctcatgatcgagagtatttgtattatagaaaattacccaaaaaagaaaaagccatttttttgggatacagatgcaatttaaaaattcattaaaaaataaaagggccattacgcacagtcctccctctcatgatcgagagtatttgtattatagaaaattatccaaaaaagagatagccatttttttgggatacagatgcaatttaaaaattcattaaaaaataaaagggccattacgcaccgccctccctctcatgatcgagagtatttgtattatagaaaattacccaaaaaagagaaagccatttttttgggatacagatgcaatttaaaaaattcataaaaaataaaaagggcattacgcaccgcctccctctcatgatcgagaggatttgtattatagaaaattacccaaaaaagaaaaaaccatttttttgg

SEQ ID NO: 35496 - DNA, 1068 bp, Heterodera glycines
  unsure (1)..(1068): unsure at all n locations
tcgccatcggcgcctcatcattgccgggacaatggtgngcgtcgtnaagcaaaggaaaagacagcagggggaggaaacaaacaaataaaaaatggcccaaaggaacgaaaataatccaaaaaagaattttaattgtgagtaccctccgaagcaaagaaattaaccacaaattgcagttactgtggtgactgtgctggtgcatgaggtgccccacgagatcggcgactttgccattttggtccaagcgggcttttccaagtggaaagtgagtgccaaagccgaactatcgcttttccttccccaagcccatttgcttccctcttcccaggccatgctcatccaacttttaacagctttgggtgcccttgccggctgcgttctttctctttggcacgttgacgcggcagcgcttgcggaagcggccgaacaaagttgggcaattccattcactgccggcggtttcatatatattggaactgtacgtttatattaatccgcttaatatgctaattggctctttcctttgaggtgtcaatgatccccgatttgttggaaaaatcaactgtctgtcagagtgtgaaggaaatttgcgcacttcttctgggactagcaatgatgtacgccattgccttctttgaatgattgcttttccgtgggttgggtgtttttcacttttcatgttgtattcacgggaatgtttttttacttaaaaagcagtcaaaaaattatttggggttggggattcattaatgtattccatttgttaacaaattttgactgcctatgtaaaatttgttgccaattctttaatcattcattaatttatttttaaatgaaaattttataaattaatgcgtacaggtaataaacagtgaaccggattattgtattaaatttattgttaatatacacaaaattgattgggctaacataaaaattaagacaatagtccaaacttaattaagtaaatacgagattcttataatgtgttgattgttctatgaattgttagtaagtgccgttccagaaagtcgtcagacaagattctccggccattccggcacataa

SEQ ID NO: 35497 - DNA, 845 bp, Heterodera glycines
attggaaactctgctgaattccgagtccaaaataactttttgatgagttgtccaatagtttagtattgtaatagcttaaacatggattagcagtacaaatcagtcatcgagagtttgagttcaattgaatggccgctttaaccatttggctgccctaaattaagtcttcgacagccaaacttcgagtttacaaaaaaaaaccatcttttaacaaattttaaagcaaaagatttcttgaaatttcaaattcaaaaattagactaaaattttgaaaatggattgatttccgtacagttttgcccaaaagtcggtcaccggctgcttcctgctgctgcttctgctttgggtgggtcgagagccgggcttcatgcccggcttcggcgcactgttccccgccgacttctacaccgactccacctcggccatggcggtggccattctgctgtttttgttgccagctgaaaatcccctcggggcatccgccggaagcaaaagcaacagcaaagagcaggacaacaccacaaattcgagcagttcacgggagggcgacaacaacagcaacaacaatgacgacaatagcatggctggaaaacggcttatggactggccaacaatgcagaaacaattcccggtgtgtttttaagtgctgctgatctcacttttctctgggttacaccgtatttcttaaaatagggcctccgtggctttatttttcaacccccccccccccccggggggggagggctttatctcagtgagggccataatttagtggggcggggcgggaggacttcattagggctttattccagagcggctctaattagggagggggctctatctca

SEQ ID NO: 35498 - DNA, 1001 bp, Heterodera glycines
  unsure (1)..(1001): unsure at all n locations
aaagttccacccgtaagaaagaagatttctggaaattcctacaaagaaacgaatgnttcaatggtgtaaaatggnagtacttgagaaggacccccccattactaaaagggccgggtccgtctgatagatgtttggacccaaatttttttaattccttagaaatttagaaaaagattaaaattcgcttacttcacaggctacaatatagttattcgaaaacaaaaaaagaaatgaataacttaatattataatattaatattctgctcgagattcttggtcttggttctcgtgtcgagaaatttgtcggggtttttttttggcgtctcggtctcgattctcggggggggtgggtcaattcccaatttttgggggtttagaaccgaaaaccagtactttgcagcttacgccccacaaaaaattttttatatataaatttttaaaaccaatttttatactttcggggtcactgatcactagggctggtatgtctatcttggcagattttatcatttaaaaatattagccctattaattatatctcaacttctattcacattcggaaatttaaaaaatttgggtccaaaaatatttgagacggaaccggcccttttagtaataagacggaactgggccaagacggagtaaaataggccccttctgacgggtccacctggtttgggcgagagagaatcagcagggaatgacggggctgaagttgacgaggaagggaatagggagcaaaacaacaaacactccttgaactcattcaactcgaggtcggtcatttctatgatttttaagatgatcaatatatttcaaaaggtccaatgttcgaaatgcaatttctcaaaagatttttccaaattttgtcggtgcgtttgccccgaatctcggcttttccgtccgaaaggtcgaacttccgacggagaatgtctctgtggaccaacatttgtttaccattttgctgcctcccgaatccgcgcaacatgtaatttttgaa

SEQ ID NO: 35499 - DNA, 1371 bp, Heterodera glycines
tcatttcgacgcgcaaaactatgacaagaaaatatttaaaaaatacaattgatttattcttaaaaagaatttttgaataatttattaaaagcaaattaattttttatagcacacgaatgaacatatttaaaaaattattaaaaactcaaatatttaaacgtaaggaatttaaattaaattcaaaaacaacagtattaattatcaaaacaaaatcaaaaaattaaaattatattaaattatctttttgaataaaaactaaattctagtcaaaagaaaaataaaaccctccttttaaaatttttcaaaaaaaattttcaataaccaattaaaatttttaaacacatcacaagactcccaattcatcaagtttagaaaaaatataatatttttaaagtacacattgagaaaggcaactcaattttatttttaaattgtgcaaaaaaatacattacattaaaataaaataaaaatatatataataaataatagaaaacttaatgtagattatcaaaattaatttattgattattttttgtaagtaaaaaatatatattttagcaaatatcaatttattagaaatgcattaatatgctatatcaaaaaataaataatcttttaattttattaaaaaaaaaatttaatcttttaaattgaaaaatgtaatatttattctttagagtgacggaccaataaagtccaaaaaataaatttacaatttcattattttttatcggataacttgtttattttaaagttagttgtattgaacacaaaattttggacatttttattattgctcaaaatttttcaagtgttttttttataaaatttgcgcaaattatttttaataaaatatcactggaaaatatttttagagttttaatttaattaattgatctatatcgtaatttaaatttaatttagctttattaattagaaaaatcaaaaaaatattataaagacataaactttcaattatataattttaaaaatatttattttttttattaaaatattcatattttaatgttgttaatttttaaatcggatttgttattttatttttatttaatcacgtagcattgttgtaggttcatctaatttttccgctgcgttaattggttatttcaaatataaattaattttaatttttttaaatatttttcattaaaatgtaagatattagcagaaatatttcacaaatcttttttagaaaattcagttgttaatggttcactgactcaatcagcacaaaataagactaaactttcggatattgaattaaatgctggcataatttgcaatatattaagagagctcccccagggaaattccacttccccggataatgttacttacattttataaaaa

SEQ ID NO: 35500 - DNA, 1159 bp, Heterodera glycines
ctacgaaaggctgttggaatcaccggcggggggaaggcacgactcgtcaaaaatcaggaacaacgcaacgccaaaaataattttgaatgactgacaaacggcggatggatcagctcactcattgtttaaacaattcaactgctgttttgtatattgtaattgaccaattgtttttgtgataaattagttttttttgataaaaataaactcaccgacaaatccaatgcgtgcgtcgcctgtcttcgccacgtcgaacccttcgccgccgccgcctcccccgccacctaaacggaggaataaaaattaaacaatttactgggaattgaattttaaacctttggggctgattaattctcgtcgtaatttggctaatcgtgctttcagtaagccaaggtgacccttaaaacaaattcgcatgagaatcagtattttgtcagtaaatattaatattcttttaattttgtccagttaatccaagtatagtaatattagattgtaatattaggtcttatcataaaaaatgatcgttttttgttttttctttttaaaagctgctaatggaaacaaaattatgtaatatctgatgataagctttaaaatgagacattaaatttgttcttaaatcgtttaaaaaatatgaatttaaatagagtttggtcaaaaaaattagcatactttttacatcaaaaaagcaaaatttttggtcgttgtagatgacatgtaacttggtcaatttatcaaattcttagtgcttaacaagataaaatttaaatttaaaaaccttgaaaagaaaactaaaactttttagtttggccaaaatttggagtttgttagcatcaactcctattaatggtaattaattgagacgaaataaagttcatttgattcgtttttttgtgtaaaaagcgatcattttttttatatgaacaagacttaattttgtaaaattctatgcctaccatcgtcgccttattcctttgcgtcctcgccatctgaattcacataataacaaaaagaagcatcttgattaattaccctcattttcgatctcttgaattttttcgagtattgacattttgaagggcaaagggaatttaataaacttattctaagataaataaaagaaaatgcagtattttatattcccttactatatatt

SEQ ID NO: 35501 - DNA, 340 bp, Heterodera glycines
gcgacttttagtgacgaaaaatcccaaaatagttaactaaaatagtgagtaaaaatgccaaaatagtgacaaaaagtccgaattagtgacataattttcagccaaaaattgagcaaaaataatttattcactgattgcagttgcaaatgagtaggacagggatttttaagagcaaaaaacccaaaatagttacctaaaaaaattttaaaaattaaaaatttttgccaagaaagtaaatttttgtgaattttttttttcatttcataggagtatattttgaaaaattttagctcgattcttaggggtgtattttttttttatttttttaggtcgattctta

SEQ ID NO: 35502 - DNA, 925 bp, Heterodera glycines
agtccccctgaaccgatgcgcccagatttatgggggagaccgaatccttccggaatagcttccctatagcctgtactttaattctgcgttggatttttgctccccataattgtttgagtaccccaaacggacacttgaaaaaatcgatttttttgttttcggggcagtccccccgaaccgatgcgcccagatttatggggagaccgaatccttccggaatagcttccctatagcctgtactttaattctgcgttggatttttgctccccataattgtttgagtaccccaaacggacacttgaaaaaatcgatttttttgttttcggggcagtccccccgaaccgatgcgcccagatttatggggagaccgaatccttcgggaatagcttccctatagcctgtactttaattctgcgttggatttttgctccccataaatgtttgagtaccccaaacggacacttgaaaaaatcgatttttttgtttcataaatatttttttcagaaagtgctctaaagcgcaccaaattttatttacaacttaattttagcactctgatgctttagtatcaaaaaggaagatggagaaaaaattttttaaaaaatttttccttatattttggttatatcgttttgcttttggtggggtgcttggaacagtggaatcatgcgcacccgtccgatctggcaagttaagcaacgattgctgactagccaaaaggttcggtgccgtgatgaaacgaaccagcactgcttaccccgcggcacccggcacggtcccccgaaggaatggatttaattaaattctctccttcggggatttttttccattaggtcgtccgttagcgttcgattgctctagtcaatttttcaaatttttgttgaatatttgtcgtgctctgaaggggtggagggggggggggggg

SEQ ID NO: 35503 - DNA, 1098 bp, Heterodera glycines
tggagagtcggctgagaaaaagtggcggaatgaaccctccttgggtgacagaggcgattaattttatgaatgaacacattccggcatttaaagatatgtttgacaaggtgatgttgtaccttgcaagcctttctataccgaacctgttttatttgaaaaatagggccgaattttgcttttatgttacaaaagaatgcctaaattaaactattgattcaaaaaaaatccctcgcaggacacattctacaaattcgtgttgtttgtgctcattgtctccgttctgttcgtctttctcatggtcagagtgttcaaagtgcgcgtctgcgaccattgcacgcgcgatgtgttgcgcgaacggcagtcgcgcgactggcgacctgccaatccgttccgtttcccatggcaaattgatgccaacgggcgcacggcggccaaacagtgccacacgaaaggggagtgagcggaagagaaagacgcaacggagagggacagacaaaggattggggggggggggagagaccgggttatggtccgagaaatgatcaaagtttcataatgacagaaatgtgagaatttggctgtttcgaatgaggcattttgaaaacatttcgtttgtaagcattggacggaccattatccgctgttgttttgaatatatttcacaatttatgcaattgactctcttcaatcttcgcaaattcctcttaattccaatgctttgacgcagaaatgctttaatatgtagccgatttttcaaacttttctcacctttccattcgttttcactgtcctttttcccattattttttccgtttttaataaatttgttctcactttactttttttccaaatttaaagcagcagaagcaccgtaaaaatattcgtaaataaaattacccaataaattgttaagttttatctttttaggcatgtactctccgccacatgttggccaacttcgattgcgtcgtgcagtcgcccaccggcacaggcaaaactttagcttttatgcttccaacgcagcaaattttggtgcaaaagaaactgaccggcgcaggagaaggggaaatgggcagaaaattttctttgatgaaaata

SEQ ID NO: 35504 - DNA, 1292 bp, Heterodera glycines
ccccacgaggccgcgaagcggccgagtgagtaccttgggcgcagaaaaattattaaggaggagggttcattatttatttatttttttacaaaattaattcataagtatttttacagaaactgctctgaaacgcaccaaaatttatttacaagttgaataaggcactctgactcttatattatcaaaaagggagatgaataaatatttaaaaaatttttaattcctttttaaacatgccaaaaagtttaggcttaactttttttatataaactgatcagaagcgcaccagattttgcaagggcatcaaaaagacaaggaaaagcaccgctatgatgctaacgccagtaactctttatttaaaaatttttattaatttttaaaacttcactattttatttttttaatagatttttaaatgtttggatttttttttggcttaccaaaacttcatcgaacctggttctttctattctctttcaaatcgccccaaattttttttacagcttaactaggccctattaagcttatttccagaaaatctcgcatgaattctcatttttaaattttttatagatttttaaatgtttggattttttttggcttaccaaaacttcatcgaacctggttctttctattctctttcaaatcgccccaaattttttttacagcttaactaggccctattaagcttatttccagaaaatctcgcatgaattctcatttttaaattttttatagatttttaaatgtttgcattttttttggcttaccaaaacttcatcgaacctggttctttctattctctttcaaatcgccccaaattttttttacagcttaactaggccctattaagcttatttccagaaaatctcgcatgaattctcatttttaaattttttatagatttttaaatgtttggattttttttggcttaccaaaacttcatcgaacctggttctttctattctctttcaaatcgccccaaattttttttacagcttaactaggccctattaagcttatttccagaaaatctcgcatgaattctcatttttaaattttttatagatttttaaatgtttgcattttttttggcttaccaaaacttcatcgaacctggttctttctattctctttcaaatcgccccaaattttttttacagcttaactaggccctattaagcttatttccagaaaatctcgcatgaattctcatttttaaattttttatagatttttaaatgtttggatatttttggcttaccaaaacttcatcgaacctggttctttct

SEQ ID NO: 35505 - DNA, 1770 bp, Heterodera glycines
  unsure (1)..(1770): unsure at all n locations
ggaaaataaattgttgatctaagcgctgaataaatttatttataagggcttgatcagatgatcatttatgaatacctatccttaaaatgtttctaaatttggctgaattttacaggtcttttcatcgggagcagcttgtcccccccccggaaaattttatataacaatttttttccaaacctagacactttttgcaagaaaaaaagtttttgaaaattttttttagcgattgtcttgaaaaaacttagtaattcactataaattttttttgtgattttcttattaaaatctttctaagcttttttcttaaaatttcaaagatggtattctcggccggcggccgaaggcccaccacgaggccgcgaagaggccgagtgagtaccttcggtgcaggaaaattattaaattttaaaaattttttaattgctttttaaatatgccaaaaaatgtaggcttaacttttttagtgaaaattcgatcactcatattttttgctaattgagcagaagcgtaccaaactttgcagggatactccccggtaaaggactaacttacactgaaatgagcgccgagctagctggctcaaaaaaattttcgaaaatctgagtctttcgtttttatttattttttgcaaaattaattcttaaatattttttcagaaagggttctgaaacgcaccagattttatttacatgttagtttaggcactctgatgctttttctatcaaaaagggagatgaataaaatttttaaaaatttttaattcctttttaaacaggccaaaaagtttaggcttaacttttttttcagaaactgatcagaaaagggaccaaactttgcagggatactgaaaggaagagatttaagatattttaaatattatatagtaagttgatttaaataatttttatngaaaaaatttttttttgggttttnggggnagttatgttgaaatgatgggtntagatttatggggaganngaatnttttgggaatagtttttttatagtntgtantttaattatgggttggatttttgtttattataaatgtttgagtatttnaaagggatatttgaaaaaattgatttttttgttttnggggaagtgtttnagaaaagatgggtaaagatttatggggagattgaattgttaaggaatagattgattatanggtgtaatttaattatgtgttggatttttgattttcataattgtttgagtaccccaaacggacacttgaaaaaatcgatttatttttgttttcggggcagtccccccgaaccgatgcgcccagatttatggggagaccgaatctttcgggaatagcttccctatagcctgtactttaattctgcgttggatttttgctccccataattgtttgagtaccccaaacggacacttgaaaaaatcgatttttttgttttcggggcagtccccccgaaccgatgcgcccagatttatggggagaccgaatccttcgggaatagcttccctatagtctgtactttaattctgcgttggatttttgctccccataaatgtttgagtaccccaaacggacacttgaaaaaatcgatttttttgttttcggggcagtccccccgaaccgatgcgcccagatttatggcgagaccgaatccttcggggatagcttccctatagcctgtactttaattctgcggtggatttttgctccccataactgtttgagtaccccaacggacacttgaaaaatcgatttttttgttttcggggcagtcccccc

SEQ ID NO: 35506 - DNA, 1167 bp, Heterodera glycines
ctgtcgtgaattcggcccaatcttttcgagggccctcttcaatgagacggacgataacgtgagacaccacagatatttgacctgtgcgcctcttaaagagtcgaaatgagcaatttggaaaattggttaagtttagataaaaacacgaggattttaaaatggcattgaaaacccatttcattagtatcaaaacagaatgcacccttttctatattttattgagaaatgtttaattcgggtaccaaccaattcgtcaacctccgggtagtttttgccataaattctcccagcaatttggccaaaatttggcgttgggtatcgcacctcaatgtccgaaatgtacatttggtagcactcctcaaaatacctcgatttttgagtcggaaaagtcgtcacgtattattcctgctatttgtaacttcaaaagccatttaagcattgaaaaaccatagctctgcaaaattaaaaaaatgatttttgaaaaacagcatgaaagaacctgaaccaatagtttggagtaagagtgcagaacaaccggtttcaaaccctttgcgtacattgactgaatagcgatcatacggagaattgacactttgtcccttctctcaatgatagcattttcaatgaagggaatcactttgtcgggctgggcattctttaaaatgtctataaaattgtttttttattgattttactggtcagggatttagaaattataattaaaatggaacaattagggggtaagcaatcggctattcccaaaataattaagaaagaatgacaaaataaattcctggtatcataccctgttcgcaccgaagaatgccagtaaaaaatttgtcaatcagccgtcgttgaagcagaccgaccaaacgtgtgaaatttcccactgatttacgcttttcgccaatgctcggcaattttgagacaaattttttatattccgccatcgacgccagtttatcactgttgataagagacaatattcaattgcactccataatctctttttggcacggttatcgtgtcacctgttcctcttccttcggatcattgacatcgactcgtattttgttggcaactaaaaaatcattcgcttcattttgctataaaaatacacaaatgaaaggtgaactggtcagcgtgtaaatcctgctagctgttcat

SEQ ID NO: 35507 - DNA, 1659 bp, Heterodera glycines
tatacaaacctaaaggaaattccggaagtggcatcggcagatgatttgagcggcatttgactcagctaaacgatggcccgactcaccaaaacacaaagaaattggtggcggatgaacggactgacggacggacacaacgtcttcccgtggaagaagaactcaacataacaaaactcattatcagttttcttaaaggatttttctttattttatttttccccaatttgtttatttaccatttaattactctatcccatttattattgttaaccaatttgacttctgttaagtcgcaattcactggttttctttgttatcattcatacatattaacctaaacacttatttaatcactgtagcaattaaaaattttttgtttggagaacaaattttcctttccagcaatttggattactaaacaccacactgagtatagtctgtttttcccaagataattcgtttgttggttttttccctcatttcttggtgcaaagtttcgttgttttgatgacgctttctgcccttgctttttttatgttttagctgctgcgcagcttaagtagtgattatatttatttatttgttctattttgagtttcttctatgcttttgcatgaccataactcaacaaaagggaaaaatggcggaggttcaaatccgcctcacgccaacatttttggatcaaaaaatttaaaaaatgacgcttattgaactttttgctagtagatgacatgaatttcggttttaataaaaaaaaataatacgccaaaatgagaggtgtatttttctctgcactctcttctttacgacatgcatttattaatcatgataaaatgttattacccataattctttaatcaatttaaatggttgagtcattattaggcatttgattaatttttctatcttttgcaaatctacattttttctaacttgttaaatcattttaaaaagaaaaacccgacagaaatgttgccccacggctgtttcccattccgtgcctgtctcgactgtatccaagggccaagtctgacggccacacaaagttatgctcagctgagagaagaaatgcgcactgtgcgacttgatcgcaaccacatgggtgtgttgtgcaagggaccgggaattttaggcaaaatcggtaccagaaaagccgggatcggtgcatgaattttcaatcgggaatttttccgtaaaaaggggtgggtaccatattaaaagtattaacattttttcaagtttaaaaaattaaaaatgaccatttttattgttttcacttctttaaagctaaagcgaacaattaaatcataaatagacaatttaataaaaaaaaataataataataattaaaaaatttctattcattaaaaaattttgcttgtaaattagctaaaaagtaaaaattaattcttggtatcatattcgatcgcccagtgttctccattagtctgatacatcacagtttggaaaggctgtcggttcaaatcccaccccgggggccagttgtctttttacacaaagatcagcagaaaaatttctgaatttaaatgggaataaaattcctcgatttttttactaattggtccttctctttttcagggtgatgatgttgggttgttgaaggaaggcaacaaaagttgtgggctctggtggaatttt

SEQ ID NO: 35508 - DNA, 1263 bp, Heterodera glycines
  unsure (1)..(1263): unsure at all n locations
atatatttacttaatagttttttgtaaatcaatatnnttcatttaatattttaaatgattaaataattaaattttaaaaattttttttcacagaactcatcgatttatttgttgtaaattttcggatttttntaaagataaaatttatttaacaccaaaatcannaatttattaactattttatttaaaaattttgctcgcgccgatttcgaaatttttttgccgatcaaataaacattttcggattatttcgatttcaatttcatcaacgcatcaccgctcacaaaatttatgcaaattcattaaatatgtgtggatgatcgaaaattttttacacaatctttaaatttatcatcgtaaaaacatggatttgcatattatttaatggataatgaataatgataaatacacatttatttttgcgtataataacaacaccaacaacaaattggcgtcaaagttgaatcaacagcaaggctaaattcatatattaaaaggcaaaattttttggtgtcatttcgcattattttttcaaaatttggaaaaatatatcttattttcggactatataattatttgcaagtttttgggattattcacgctggtcccgccatcaaaattttgattctcaattccgcagcgagatcagaaaatttaaaatttccagtctctaattaataccactaccatgctttttctttttgttattgtcggacaacttctgctggccagtgaaatggttgtgcatggtatgtcattatttaattcaaatttcattacaaaatacaggaggccattacggtggttacagtttcgagcaaccaagcattgagcgtgccgaaactgatcaaattgacagcgacaaagacaccatcagcgacgaagcacttatcaatggctccaccacttccacctttggctcatcatcatcaccggcactcattcgtcgtgttgatcgatcggctgatactgatgactcatcagaacatttgcgatcaggtataaatcagggatgggccaaattgaaaaataaaaagcgaaatgcgaaaagccaaaatgtgcgaaaaggcgaaatgcgaaattttcaaaaattttaccaatagtcaaaatcatagattttgaggttgttatgcaaaaacaacaaaatttctgcattttctggttcaatctttttctcagaccaaaaaaataacaaattctacccattttggattaagtttcaaaaatcaagggtaaatgagtgtccggcggtgccgacaggcg

SEQ ID NO: 35509 - DNA, 916 bp, Heterodera glycines
ccactaagtctctcatcgcattacaccgggcctctatcttccaacgcggacgacgagcggaacatcgatcattgctcttaagcagatcgtgttctcactcgcagaaaaaccgcagcacacgcggctcgatcggatagagaaaacgccggtaaaaattcaatatttcctctatatatatatttaaatttattctaaaacaatataattttcttttttcgggatttttccgaaaaattcttaacataaacgcaataaaaaccaaaaaacactaactcttaaacggcagagctcggtatttaaaaaaaagactatacccgtacccgtatttcccaattggcccgtacctggtatttttaggaacttgttttaaaaagcaaagaaaggtttgaaaaaatcaattaattgcttaggggcatcttaaaatatctaatttacaataataatgtctctttaaattatttgatcatttttcgaaaaattgaaaaaatatcggtcacttgaaataataaattctaaaattttgtacaggaaaatccagggtttttcgtgttttgcctggacctgtacctgtattccaaaaatggcctgtacctgtatttcctgtacaaaaatacaggaaaatacaggtacaggaaaaatacaggttgccaaaaatttgcctgtacctgtacctggatccaggaaaaatacaggcctggacccgggtacaggccgagctctaattaaatgacccaaacaaaatttcagaaaatacacccctaagaataaaaaattttaggtttaaaaatttttcttattcgaaataaatttataaattatttattaatcatttaaataaccaaaattaaattttttgattaagttttacgtattttgctccctaaaccccttaattaaaaaaattaaatgccttttt

SEQ ID NO: 35510 - DNA, 703 bp, Heterodera glycines
cattgactttgcaattggcactttgtcctccaaatttttgccggtgctattcgccgaacaaaaattgacacccgcgcaaaagtccgtcacgcatttgctacccgcgacggcgcccttcggagaaatgtctttgaagccgcggaggcattcgcaacggtacaaatactccttgaaaagggacatgagaatgatgagtgggcatcatctcaatttaattaccaaatcaaagcattgcgcgtgctcagagcattcgttgagtgttgtgttttcgcattcgttgatgccgtacaacggcacacagtcgtggcccgggttggccaccgacatgtcgcggtacccatgcgcacattcgcagcggtacgaattgggccccgtcgcaatgcaaatgcctttggggtggcaatcgttctaaaaagggaaactgttgcaaaaaagagaagacagactcatcctcttaccataaagcacgggccgaacggacttggcattgggttgatgaaaaggccactttggcccacttggaagttgttacggtcgatgatccaccgtaccaaagtgttgtacgccgtctccgccgttggggcttggccaacgcggaaagacattgtggcattgtacagaacgccttaatttaaatttgaaaaactcgtaatgactaaagtgtttaattgggctacccgacttttggggattgcaaacttgg

SEQ ID NO: 35511 - DNA, 1129 bp, Heterodera glycines
  unsure (1)..(1129): unsure at all n locations
taattcactaattacccccccccccccttatgacgacccttcctgttcgcgtgttgtccatcaaacgggccgagtacagtccgctcaatgcccacttggactctcaacgcatcggcagcttcgaaatgctcgccgttgtcgctgtaagtttcggagccaccgttacggtaaggaaacgatattaatgtattttaagaattttttttttttgaaaggtgacttcaatcattataacaatttgtctacagcgaagtcgaattcgaaaattaatggccgagaaaaatggaaaaatgacaatttacggagaataaaagagcaaagatgcgatttaattcataatatttgcatagataaaaattaaaccaaaaattaatccattttaattactcaaaatttttgtttactcccgaccgaaattcgattcccgacgaaggcgttcattacccagcatctcggggagggggggggggatcctttaaaatggtatattttgtccgttcaaaaggggcgaagcaaattcgaattacatttttaaatgaattcaaatctgcacacagtgccaaataatattaattgttttttaatttgaattcaatttttcattcattcgctttccttcccttttcctccgccaacagcggcaactgtcaccgccacttttgttctcaatgctaaaaaggacaatgacaaagatgagtgagtgaatgtgaacagtggtcacacatttggcgcctccgtccacttttcccctttttcttttcccttttctctctctctctccgtcacattccttctccattgattggtcaattggcgcagtgcaaaatgaaaatggaaaagttgtcgtgtcgatcaaaattagaatcatctgttgctgctgctgatggaaagaagggttttatgtatgatgagaatccctcccccctcgtccgatcgatggagggggggggggggggggggggaaaggatggaaatgaaccgaacgaaatgcgaacgaatgaatgagtggtaacggacggacggatggacgaccaaaatgaccaatgaacgtcccattttnccagttcatttgcatttcgctactctttatggaccagcctttcttcgcaattccctccttttctttcct

SEQ ID NO: 35512 - DNA, 798 bp, Heterodera glycines
gcataaaacagcaacaaaaaacaacaatttacgtttccattgaataaattaataaaaaggcatttgaaaatatctcaaattatggcatttatttctccgcaataattttggtgtgcacttcttgcactaacaatatgctccatttgttgttgttttttaaatttcaaatccgggccacaaaaccgaaaagtaccaaaaaatattcatttctatcgtccgtacaacttataaaacggtcaaaaagcttgtttttttgagaatttttaaacctttttctaccgaaaaacacattttttgaaaatttttaaaataattcagtgagaaacgaaccgccaacgaaattgcgtccattgcgttgccgtcaaattggaggacgacaacgtcgacgtacaagcaccacagctgggtgggtgccagcatcagcttggccatgtcgggcattgctgacggggcggtgttggcgaacgcacccgcaagcgacttggcccattcctcagcctggccagagaaaaaatgcaattcaaattaaaatttaaaaatggcaaaaagtgttaaaatttggaaatgcgcatttaagaattgtttttgatcaaaattttcgcttttcctcattggtaccctctccaaggcctccttcacccaaatgtcccgaaaaatatgctattttttaaaaaaatctacaaaattatcattttagtgcaaattgtggccaaaattctaaaaaaaaaattcccccgacgacacttgttggcaccgacggggccctctcattccctggaaaacgtcgcaacaaaatgg

SEQ ID NO: 35513 - DNA, 998 bp, Heterodera glycines
  unsure (1)..(998): unsure at all n locations
cgttgatatatatcaaaattaagaaatgtgcccgtaatctccttcaatgttttgttattttttgttggaaatacattgataaatatgttgtaatattaaattgaacatttttccaaaaaaaaggattagaattcatgtgggcaacagcttgccagactaaaccgaccccgaccgcaatttttggcaacttttaagatcttaataagaaaatggaatcaagacggatcccgaaaaagaccagcgggaccccgtcaggtctctaatagcgataaatgaattgggcagatatccaactagcgaaattgagataaatatgatttttactatggtttccatcacttatcgggaccatgccatttttatgggagaagcattacggagaagtacctattacttaaatgcattagatttaagctaaattgcgaaaattgctaatgtaatagttttattaatattcttgagaaaatttcattaatgaataccaaggatgttgcaaagagaaaaataaaagcgaaaaaagcgaaaccaaaataaaaagcgaaaaggcgaaagcgaaatgcccaaaaaagcgaaaaggcgaaattttttccaaaaattagatgaattataagactcaaaaaattcaccttttaatgcttaactgttctgctgactgttcttttgtttttcataaattctttatgcaattcctctggtgattgtgagacaaatgtgagggtcggggtttttaaatatttttcttatgccatatagtcaaaaagctttctatgtagcattttcttaaaaatatttattaatttcacaataaagtgcgcatccgcatgtttagccgtgcccaacaaatgcttcatccgatccgccaaatttcccgattttgacgaaatcatgtaaaaattgaaaaaaagaaaaatttgttttggaattttgctanaacatagaaattttaaatgagactagttgacaaaacaagagatcggaattttaacatacgcgggcat

SEQ ID NO: 35514 - DNA, 916 bp, Heterodera glycines
tctatgatgggagaacaagcactatacatgcgcgacctttccggcggcgttatacaattgcatgtgtacgctcctaaactggatgatgaatccataacttgattataacatggatccattgctgaggggtgttaatgtatctgcaacatcaggagggacggacgtgcccgagggtatatataccaatgaaattttccattctcttcaaaacaaacgagttgctgaaatccaaattgaaattcagaacgcatttggacgatacgtaaagtttaactggggtacttgcatcatcacgctacatttcaggcgtaaacttttttgatcaacaccgaaaaaaatgacgcacataccttttaatcccgactctgtagattgggcgccttttttggcactacagcaagaggggaagggcgaaatgcaatattttgttggcacccgctatcaacgaggtgccggtcttctgaagaatgtggcccgtttcctgatgccggttgcgtcaaatttgctaaagacggtgtcacgtgaaggacttacggccggcaatcgagtgcttgaagacatttcccagggcaaagcgctccgagagtcaattcaggcacatgcaaaacatggtatggagaacttggctgaaaaactgagacagtgtggaaagggtgccgccaagacaacaacaacactgacaaaaaacaaatcaagcgttaataataagaagaagaaatacccaagttcagtgatgacaaagggaaagagacatgtaattgaccaacttacatttgcaccttgagttgctctgacgaccaaaaaaaaaaatgtataaaagggataccaaaaggcgtgtgacgtgcatacacaggaaaattaaaaacagttttgtttcttaacaaaaaaaatgagtgtaattaaaaaaatagacaaa

SEQ ID NO: 35515 - DNA, 1075 bp, Heterodera glycines
aataatataaaaatattcttataaatttttaagtatgaaaaattcacaagtaattaaatttttcttcaataaaaccaaaaatttgccttgccccctttttgagctttttgggttaaatttttaaattttgttctgcttttggccgacggtgcgggagcatgacaaaatatcggcggccgaaacgtcgctggaggattttttggagcttaacttgaaatatttagagaataataagcacatagaattagtgaacaataccaagaatgcttaatttgttaacaatgaacaaagttatggtcccaaaatggtccggccacctttcggtcggtgacgttttggagtgcaccccgccggtggtacccgtaggtgccgctagtggaaaattggaaattttgacttttgtcgattttttgctctaattttttgaaattttcttttattccaatggggattaagataaggttgaacaaagactggaagcatagcaactaggaaatttcacatcatttatttttcaacatacacttccatcttataatgcctatctttttcccggttcgtcctaaaatttgaaaaattctcaatttcaaaaaagttgtttaggaaaaaaattcaaaagtttttttagtgctataacatttatttttaaataaatattttaaaatttactaggctaatatagaaaccatactttgtcagggtttacgaatgaccccaaggatgtttaatttggtgaccactatgaaattataccgacatttttgctacccactgtgccgtaatttttgtcacggaccagcagcataaaaaagattcgatttcggattttttgaagaaatacggaaaacatctgcgaaaatttggttccagcggtgctgatatgtataaattttgacaaaatttcttaattttttaaaattttctcgcagcctctcatttcgagaaatttcggaaataactgtttttttatgaaaaatatttataaaaaatcaatctactgcacttcatgacgttacattttcatgacatacgccaacaaattcactgctggaaaatactacttcacattacttcc

SEQ ID NO: 35516 - DNA, 877 bp, Heterodera glycines
  unsure (1)..(877): unsure at all n locations
ttcaatttcaccggtttcctttcgtctcagcttcatcccgtagttcttacaccctgcgctgatgaactccaaaatgtcatggtccggcttttcgtctgtcagctcaccgaggtgtccctttcctgtagggagtgggtcattgtcctcaggatgcacgtagatgatgctgtcctaaaataaaaattcataaaatttaaatattttttaaattgtcaaattaccgtatcaaaatatagaacttcgcatttaggtgtatccgcaactttctttaaaattccatagagatgtagtcgtgctgcagatgttgtaaaaagtgaaatgacgacattggagtatggattttcctcgacaaattcctccttctctttgtagctgatcaaatacgtttcattttcttcatccatttcctcgacgcccgaaacttcgatttttttgttgtcattcaattgtagtagtttgtcacagtcatctgttatcagcgccttcgaaagtagattcctcatggagaagcggccccaaagtgagttgaggcaaagtttggcaatgtaccgcttccccggctcagctttcatcttttgcttgtcgagttttattccaaatagttgtcggcattcctcgatatattcgtctttttccccttcgctgccgcaccacgacgggaagccagtggcatggatcttcaaagccatcatttcgctcacgtacgacttgaagatgttgtcgctccattggtcgtattgtaggacataaaaaagntttctgacggtatagccggctttcaacgctgcattaagttccaaagtgggtgcaggtggaaacgaaggcacggtcattaagggttgaagtgtgggcagctgtagtcatcgtctttgtggcc

SEQ ID NO: 35517 - DNA, 1386 bp, Heterodera glycines
ctgggcttggcgaagaatgtgaaaaaatgtctgaatcacttctacttggcaatgttctgttgacattttgaaaaaaagttcttaattcgctctttgcctgcgactcagtcatgttttcttcgatttcggccaaaaattcgtctccaattccgtcctaaaacaatgtattttttgtgataattcactaacacaattgctttaacctgaaggttttgtaaattttcagcttcaaaagttagccaaagtttgtactggctatgtttttctaggtcgggtcgaaaaaagagagcttaaaccttgggtccagcatagtggaaaggactagctatttatttccatcccatccaactctttatgtttccatttgcatcaattttttcatccatccgtttttgaaggccttccataattgcttgctttttaaatttgtgactgaattattaacaaaaacatactgatttcttaaataccgtatttgctctaattaaggccccggggggattatttttcaacctcctcagaaagggggacataattggagacagggcctttaatggagacggggggattatttttcgacagatttttaatgactagggccgcgacttttagtaatgaaaaatctcggaataggtaggtaggttaataaaatactgaaaaaatagtgacattacgccaaaattttaattattttggcgaggagccttaaagtctgatttttgtggcctcaaaatcgaaaattcaatgctgacatgcttttttgagctcctttatcaaaataaaagcaaaaaagtttttcactaaaatcacggctctattactgattcattttagcaatggaatctttttgctgtgtttgtaaagcaatttatggaggaagccacagctgttctgtctgtaaattgccgtgtcacacattctgtggcgattctggtggagttgagaatgaaggcttcggcggaatggtcttatgccacaactgcgtaaacgaaggaaatgcaccgatagcagaaggctcagaaaatgatgactacgaaccgcaaaacgaagagaatgaaggcacgcaggcaaaagacaagaagcggcacaggaataacgatgcgacgaaaaaactggatgcagtcgagtgggcgcaaaagaactccatacattcagcagcaagaaagttcaaagtggacaggaaacagatcaagaactggatggcacatgaaaacaaactgagaaatcaaatgtacgtgacattttaatattttttgtgaccaaaaattttagcatgacaccgaatggggggaagcgcatgagacttggtggagccggtcgcccagttcaacgcccggacatccacatttcaatggccgaatggatcactggaaaaacgaaaaaata

SEQ ID NO: 35518 - DNA, 727 bp, Heterodera glycines
acagaaaactgtgattattattatcacttatcatccactcccccgagattgggagacatatcaacgcaaaacattaattaactattgataatttattgattggtaaatgattttcgagcgtttcttaatgaatttgaacctgcggttttttcaaaacacaaaaaaattttgatgtaatttcgctcattaattattatattttttttcgacagtgcagaaaatgaaacatttaacgacctcggcggaatggaaaagtgacaacgaaaaaatggacaaaaaagagaagacggagggcaaagcgacaaagaaaggacggctgcagaagaggcggacgacaccttatgacatttgggaggacgaaggtgcaaaaaaagggtggaatttggggattggcattattgacacttggacatttaacccaacgttaaagcatcctgataaatttagttcgttcgtttaggcgaacaaatcactgccaccactaaatgcaaacgcgtgaaatacgtgccgaatttgctcccggctgtggtgccacctcccgagggaatgtcttacaatccgccgattgacagttatttggtgaggaaataactgaataaatgtttaaattaataattatagagaatggccgtgataattgcgaacgaagaaaggcaaattgaaaagaaacggcggcggacagagcgaaggattggcattggcactgacgaagtggcgactttgccgg

SEQ ID NO: 35519 - DNA, 938 bp, Heterodera glycines
tttcgcttatcggcgccggccggcgccaacagcagagccttatttatcttttgcgatgtgattaattaattggttaggcaatcaaaaaggcgcgacagggaaatgaatggggtaaaaaaatggatgaattaatggatgtgtgtacaaggaaggctttgatcattttttaaacaaaaatgaacagcgaatcataaataaatagaaagtaactgctgatcagaggtgattctttgaatattgttgaataaaatgaatggaaacaaaaattggttagaccattttaaattttgattaaaaagccaaatgatttggatgaacgggagaaaaaaaaatttatcaggactcgatgattaatcaattttaaataggattaattaatgaatgagtgagtgcttggaattagagaaactgagttcggtcatttcatcaatcattgtgactaaaacaaggaatgaatacctaaatgacagaagagaaacatattgaaaaatgagtgttgacagatatttttgtcactgataagaacaccttttatgattcataggtgcgcattttgatcaatctttttccttttttttttaccaatttgtgtcgaaatggacacaaatattttgcagatgcagaaaatgaatgacaaacaacacataaataacacatgcacacacttgttgaaaaaacagcagtgattttcaagtgcatttttactaacgcgaagaaaaaaggaggagagagagagagaggaaaggaagggtaacgcattttcaagaaaaattcgactgttgaaaaaacggggaatgatcgaatgggtatatcataaatttaaatgccgttaattgttttttttttcaaaaaatgacccacccgatcgttggtggaaatgtgtgagacgttgatgccctgaatttggcgctcgttgcccggcgattggaacagccaaa

SEQ ID NO: 35520 - DNA, 925 bp, Heterodera glycines
  unsure (1)..(925): unsure at all n locations
catttattcaaaatagatcaaaaattaggtacccgtataagataaataaatcatcaaaaattttgagagtaaaattttgattagttattttttaaaattgattttgaattttgatgaaaagggcccaaaattggggaaaaaatttgcagctttattttttcgaaaaccataaaataaaaatatttaagaaataagaattcttggcaactcagttaaaaagagaaatttaaaaaaagccgaggaaaaaattccaaatttataaaatttttaaacatgaaaaataagttggccttggtcaaaattatctgggtcacgattagttcatgacaaggtccattcttgtttcggactttaatattaacaattaaaaaataaaattatgcaaaatatttttaatagaaattattaatttttcttttatttatgtaattttttattaataaaaaaatggtgattttttgcagaattcttcgctggtgcaattctaaaacgaaaggacgacaaattgaacaaaagatggtaatatcaaatccattcatttttcttcattcttttcactcttggctcattcattaattttaatttatagcttttactctttgaaattcaaatttcaatttgaaataaaattacatataagcgaatgacttgagtaatttattcattaacagagagaaacagactaactaactcctgactaataaagcaccatcagaggattttttaaaaatattttggtaacaaaaatgcgcacttccacttatttagaggatgatgacaaactattttttttgaacagtgatttaatctttaaagctaaaatggttgaaaagtgaaatttggccataaattanatttttaaaattttaangcaatanattcgatggaaaaaagcgttgattcgcttttgggccaacaaattact

SEQ ID NO: 35521 - DNA, 719 bp, Heterodera glycines
cgcttcgcgcccgttttttaattttgttgaggacattgggccgcttcgcggcctcaggacgggcgcttcgcgcccagcttttaattttgttgagaacaatcggccgcttcgcgcccatttttagaagaggtacaacagtgattggatgagtgattaaagaagtaaaacatgaaaaataaataattaattttaaattataaaatttatttaccaaaaagtaattaaatttaaatttaaaaaataataaaataataaatatttaaagcaggcctcaggacgggcgcttcgcgcggcctcaaagggcgctccgatgatagaagaggtacaacagtgattaaaagaggtacaacagtgattagaagaggtacaacggtgattagaagaggtacaactgtgattagaagaggtacaacaggaaatagaagaggtacaacagtgatcagaagaggtccgtttttcaaattttgttgggcttgggcgggcgcttcgcgaccgttttttaaatttgtttgggccagacgggcgcttcgcgcccgtttttcaaatttaattggggccagacgggcgcttcacgcccgttttttaaatttagttggggccagacgggcgcttcacgcccgtttttcaaatttagttggggccagacgggcgcttcgcgcccgtttgatcgttttttaaatttgtttgggccagaacgggcgcttcgcgcccgtttttta

SEQ ID NO: 35522 - DNA, 958 bp, Heterodera glycines
  unsure (1)..(958): unsure at all n locations
ttgacaaaactttttttttttttttttaaaaaattttaactaaaaataaaactggaaagtgggaaaaaaattaagttaatttaaaaataaaaatccagtccaaggattttattcccaagaaaaattttttacttgtttccccttccacgctttagttaaccgagagcttaattttttccgngcatgtcaaaccaattaaattaacaaacaaaaactaaaatagtttatcttttctcaaaaattgtccgtaatttgctgttattaaaactatgggtccaaaattaaaaatgagcaactacatactatatttatctatggaaactaaacttctttaaaaaatgggttctttcgatgttgattgcaaaaagttgatcgattactcttgaagggcgatgttcaacttggtaaaaatcacaaataaaactacttagtcactcaatttttaaaaaattattttttttttgtttttttttgacagttcaacccagaaatagtggtccgcaaaagtcggtccgcaaatgtcggtccgcaaaagtcggtccgcaaaagtcggtccgcaaatgtcggtccgcaaatgtcggtccgcaaatgtcggtccgcaaaagtcggtccgcaaatgtcggtccgcaaaagtcggtccgcaaatgtcggtccgcaaatgtcggtccgcaaaagtcggtccgcaaatgtcggtccgcaaaagtcggtccgcaaatgtcggtccgcaaaagtcggtccgcaaatgttggtccgcaaatgtcgcactacgattttatgggattttattcaggggttgcgccgtaaggggggcggctgtataaaaggtgggacggggaagggtcgttggtgaagaggaaaagagggaaatgcctgaaaatcttgactttttctctacaaatttcataaaattttaaagtttttatcggcggcctctgccggcaccgccgtccctcccgcc

SEQ ID NO: 35523 - DNA, 1297 bp, Heterodera glycines
  unsure (1)..(1297): unsure at all n locations
acatcaattgcaacgatgatctttgcaagtcacttaaatacgccatttttacgttattcacattttatgcgctgaatcatttcgccgattgactaacgcatcgacggaaaaaaagcctcgggggggaaaggccacaaatagcaaaaaaggcattcatcagcagacgaaacaaatgaaaaacaatccgaaganaagagaaatggcaatcaaacaaaaaaaatagannaatattatttcatntaataaataggattggacaaaatgaaatgaaagtggcctatagaatgtgtgactgttctcggtttgcttttaaagtgccattcttctgtgatcgtcgcttttcctcctcctcctcttcttcttcgttgcttgtccctctcatgagtgaaacctttcggacaatcccatcgcttgtccctccggcgtttcgagcgcattctccaacaatctgcccttcgaaaatgagaactgtttgtacatggtcctgaaaggggattaaattttagtgttttgttcggtacagtaagcccgtgcctttgttggccatgccatttcctacggtaacttgtcattttcactcactcatccgcaatgtccaagccaccggcaccctttgtctgcacataattggcaaatgagctgctgaagaaccaccgtatgtcaaagcgcacgtcaggcggaggagtggcgaattcactgacagaagtcaaattaacggagaaaagtggaaattggggcaccaaaactggccccaggggtaccacaaaaaggcagcaaaattggaattgcataattctgtcacaattaagtggcgaatcggcttcatagggaatccgcccaaaaaacattcaccggcacttactacatataccacatggaaagcaccaacgcgccgtacagcttcagccggagctttgcatatgcgactcgctccttgtggagcatcgatttgtcccaaaatgcgtttgtccgtttatagaaatatttgagcacttgacgaggagcggagaaacgcatttcaaccaagaaatgagacaaattggcaattaaaatgaattagcaaataaaaagtgcgacggaacggaggaaaagcattattaaaaagcaaaatcaaaaacatatttttgaaaatggatgtgatctgatcaataatgaattgtaaacaatgggaaaagtgtgcncaaatgatcggactttttccccctctaatcacatggcattctccgccgacgagtgcctgtccaaatgcgcgaccaatttcggcggcgtcggcgccttcccttccggcgagtccaat

SEQ ID NO: 35524 - DNA, 1282 bp, Heterodera glycines
  unsure (1)..(1282): unsure at all n locations
gtcgtttgtgttgaacggtgttgtaagncgggcagctacataacggccttaaattgcttgttttttagtgaaatatttaaagagtatatgcgataattaattaataccccaagtgccgataaacaccgataccaaacagaaggcgatgagtgcaatcacgagaagggcaatgacaaatagcatggctaaaaaacaaaaaaaatgagttcgaataatattaggaattattaatgattaaagtgagctccgataaaaaaagcgccatgtaaagaattcccccccccccccttccgcattatctcatcttcgatcttgcccggaacataaaaaacattttttcacctttggactttaaaacaatattaaatgtttacaaaaaaatatgatcggatttctcatcttttaagtgtgaaaaatcttgaaaaatttaaaatggaagcaaatttatggagaaatttcacagcatttcatacattttgcagcacaatttctgactgaccgaacgtgtgccaagcgaatggtagaaaaggaccaaagtaacggaggaagctgacaaacggcggaagaaagtgttggatttgcctcggttttccaaatctatgcaaaaaaggagtggaaatgtgacaaaatagaaaggggcgacccaattattcacccaatcgaccactttttgcgattccgtgctgttcggctgaatgtccgtcgacgcatttgtcacatgaacggcctattcccgtaaaagatgtacatgtgaatttgtttgtcatttttgaagcccatttggcctagtgttaatgagctgttgagaacgattgcaaggtcacagacgagcgaaagttaaccaattaaaagttgagttgagaaaaacgtggtaagaacgatgcaaagggagccctaagaagcaaaaaattacattgaaactgatgaatgagctgggtaaagggaataactcacaccgaataaatggttatatcttatggagatacgcacctgaaaactctgtcttccgataaaatttggttgtataaaatcggatggccattttggtaaggaaaaaggtgcaaaatgacgtggaacgagtgcactttgtacatccgtttgcattgtccgcgataataatggcaatttacagcaacaaatttgacctaaacaacttaattttgggttttcggtattaatttggcgaaattttttcttaaaattagtgctgtttctctgttccttttctgcacaattacgacttgattgtcttacggtagagtcaattaattcttgcacaatt

SEQ ID NO: 35525 - DNA, 1056 bp, Heterodera glycines
tcttctctgtgtttgcttttttgtgccatcatttctgctattttgttctcaatctccgccattgttctgttttttgtttcgggcagtgcgccgtacaaataaattccaatcgctgccaatggcggcacaaaaaacagtgcgtaagccttcggagcaatggatttaattaattacttttttattttcaaataaataaattcaatgcttaccggcccatcgccgattttgttacgcactgggagataagcagacaaaacaattgaccgactgaaaagtaaatccattaataatttgagactttgaatttttttttaaatttatttatgggcgggatggctctcacgttggtttttcaataagttttggtgagagccaaaatttcgtggtgtgccgaagtgacaaaaatattatgttcgtaataattaaattaattattattttaattttatttgctaaataataaatcatacttagcttaaacttagtcaaattaattaagcttgtattaaaaggtagctctacatatcatctactattgtatattattaattgacaaaagttgtaaccaaaaacttccgaaaatttagactgaaaaattatgaccctaactttttttaaaactgaattaaattttttgaaatttatctgaataatagaaaaatctttgggctatcttttcatatcaagtgcggtgtgaattaaatgatgtttgaacagttcagaaacaaccaattttaattttctttatataatgagatagcccaaagatttctctgtttttcggtttaatttcaaaaaattttattcagtttcaaaaagttagggtcaaaattgttgagtctaaatttttcgagcttttttagttacaactgtaaatttttgctaaatttttaaaaattataatattgtagaggatacttgaagttgtttctcaatacaaaatttcattaatttgactaagtttaagctaagttatgttttattatttatcaaataaaaataaaataataattaaatttaattattatgaacataatacttttgtcacttcgccca

SEQ ID NO: 35526 - DNA, 989 bp, Heterodera glycines
  unsure (1)..(989): unsure at all n locations
cagtccccccgaaccgatgcgcccagatttatggggagactgaatccttcgggaatagtttccctatagcctgtactttaattctgcgttggatttttgctccccataattgtttgagtaccccaaacggacacttgaaaaaatcgatttttttgttttcggggcagtccccccgaaccgatgcgcccagatttatggggagaccgacggtacaggactaacttaacctgaaaaaatgacaattgtaattggttttaaatttttttagaaattctgagtttttaactgtttatttattttttgaaaaattaattcataaatattttttcagaaagtgctctgaaacgcaccaaattttatgtactagttaaataaggctctctgatgcttttactatcaaaaagggagatgaataaaatttttaattgctttttaaacatgtcaaaaagtttaggcttaaattaaaaaaattttcttcggctctagctctttcaataagcaataaaatcgtaccaaattttataggcatactccccggtacaggactaacttaacctgaaaaaatgacaattgtaattggttttaaatttttttagaaattctgagtttttcactgtttattattttttgcaaaattaattcataaatattttttcagaaagtgctcttaaacgcatcaaattttatttacaagataaataaggctctctgatgcttttactatcaaaaaaggagatgaataaaatttttaatttgcttttttaaacatgccaaaaagattagggttaaattaaaaaaattttcttcnnttctanctctttcaataancaataaaatcntaccnnnttttntnnncntnctcccccctcccnnnctnncttnncctnnnnnnntnncnnttntcntttttaagaaattttcttacaaattctcactttttanctgtctcagtaagtttgcaaaattaattcataaatattttcagaaag

SEQ ID NO: 35527 - DNA, 1000 bp, Heterodera glycines
ttaacaattcttccaatgtttcttcaatttttgtttcattattttttgtatcaaatttttccttttcaccaaatatttgtcgcaaaaattcgtttcggtcttcgattagtaaaaggtccaaaatgttttctcggctattatttttattttctcgcaaatctgtaaatttacaatgataagcccaaacggacgcgaattttgcagaagatttcttcaaaaaaattaaattttaaaataaagaaaataaattcaattcattcaaataaattgacaaaaaatataaaatatttgtacaaaattttgaaaaattaattaacttaaaaaatgttagttattgagaatattcaattaacgagaaacacctacaaccttaaatgaaatattaaaaatttatcccattattacataaattcatttattcaaacgtgcattatctgagattctaaataggtaaggtaaatttatggaggggtggggtgctttttcttttatccaattttaataaaagaattttaaatttatgaaaacgattagcaaggatttgctccttctattaatagttgactaaaaccttgcatcaatttgccaattatctcatccaattccgtgtcatttccctgttgttttatgcttttcatcgcttcaaaatgcattttctgtatcgtttcgtttggtttcgctattttttcgcccccttcgcttttccattgttttcccccattttctgtgccaattttgaccattttttgccaattttttgaaaatgcttccgcatttaaatttttccctttctttattccctcacacaattcaatcaaacctgaaaaatattttcagtgatccaaaaaaaggtaaatacaaagtaagaattgacataaaagcataacattccccaatcagatcgcatttataatttttgctttttttctaagtaaattcaattttttagtaaagaataaataggagccctcgaattatcgaaattctgatgactctagag

SEQ ID NO: 35528 - DNA, 354 bp, Heterodera glycines
ccaaatcattttatctcaatttgttttatttatgtggaagaacagtgcaaagtcagtcaattgacacatatataacacgtaaaccaaaaatgtcctttcctagataaaataatttttgagattatcctaacaatttattccgtctaaataacatatacacttccgaaaataagacattcccatcgttttgtccaatcagcgaagacagcggcgaatgtatgcaccgaacagaacggtggtcaccccagcaaaagtccaaaagtagcgggtgccgagtttcgggtcatttataaggtatttgctgtaccagatgggcttgtcctcctccttacgtttacgaatgacgtgcctaaa

SEQ ID NO: 35529 - DNA, 848 bp, Heterodera glycines
gacattttggtcgatgaaactgaaaatgatgggaagtgttgtctaaatttttcataatcgaaattactagatgctgatccgtttgaatccgatgattttctttggcaattgaatttgcggaattgacaatgattcacaattagaattgacaatttccattcccttggtgccattttcttcgattttgtatcgaattcgaataaatgccaatgccctttttcgcgtcttgaaatgttcgtccacgtaatagtcaaatcggtggctgatcatcgcaattccaaggccaagttgtgaaggtggcagcaaatcgaacactccgagccaacaatcggcagaaatgaaactgaaaaaaaggaaaacaaaatttaaaattgaaattgaaatttaaaaatggcattttaattttaatttacattgctttttccattttttcctcggcttcttttcggcggtctgacattttgttgttggcaaattattaagacagttttcggcacttaaatgggctttattttcttcaaaattcatataaaaatgaataggtattttcataaaatatcataaaagaattatagtctcattgctatttttcactgtcatttttcgatttaagttttcatttggaaactaaatgttatgcccgaaggaatttaaatttaaaagaattaaaatgaataaagtgaggtcatttaagcgatgcgtcatcatcatcagcagaaacggcgacatttgcggacgaattttttgaatctttttttttaacacacaatgtcttaagcatgtcggaccgcaaatgtagcgacacgagtgagaaagaaataaaaaagtcagacacgaatttttggtac

SEQ ID NO: 35530 - DNA, 842 bp, Heterodera glycines
tttttcaagaaaatttcgttccaacacattatactcaggctaaggaagaagaagaaaaaattttttttctccgttaatttttaaagcttttttgttggttttttgatataaaaaaaataaatagaaaaatgacatttttaggaaaattaagatgtttcataagaattccggtagtgatcgaaactttggtgtctcggttttaattatgaccgaattgcggtttcggattaagagttttttgggtcatagtccagattccggattttttcgttccggaggtttttgggttctattagtccggatatatggggtcatagtccagattatggacattttcacaaagaccgggttacggagagtttttcccacctccggagtcgggccccttctagtcggaatcaagaaatttatgaaaattttgcatatctatgaaaatcgtttatgttcgatttccctctaacatggatttttgtgaacctgcgtttccctttgtttattcaacaaaatttagtacaaagccatgatacataggcccaggccgataggcgccgccgggaaaaattttggaaatttgagtgctatttgttacgaaaattgcctataatatttttaaatgttcgtttggggggggagacttagaaaaaattttccattatttgctttttacataaaacaaatgtttctagaaattttttatttttaaaaaattctaattcctaaaaatctaaagttctttttctatattatctttgaaaaattcaactttttctaattttttacattttttctattttattaccgaaaccaaattgaccatactcaacctttactaacttaaaaaa

SEQ ID NO: 35531 - DNA, 1306 bp, Heterodera glycines
  unsure (1)..(1306): unsure at all n locations
atctatgtattaacatgagtgctgctgttcctggtccctctcacttgttcagtcccctcgcattacgtcgtccaccagtccggcacaaaaccgtgccattgttcggctgctcatcggacacagctcccggccattgtctgtgcctaacgaacatggccatacacaccaatggacggtgaatttaaagaacccaaaaatgaattaaatgcttattttttggtcctaaaattgacttttgaccaaccattgcctgttttctaaactgaattcattttttatgtatgtgaaatgaattgcaagaatttcggtgttttttttttctctaatattttttcaaaaatttgacaattttccctataatttagcctcttgtctctgattgttttagatttgaatcaaatcttttagcacaaaaaaaacaagacaattttaaaggtttttgtgcgcgccactggtcccgatcagttcaccgatcgtaactttgtgcgaaaagtcgtctttcatcttcacgaaagttttcagaaccatatgcgagaaattaaaaaggttttttcaattcacaagcataagattcatatggaattcttaaaaattccattttcaagtgataaattgcgattatttcattgcgttttttcccaaatttcagccgcctttcgaagtgtccgagacagggtacggctcctttctgatgcacattttcatccattttgcgggccaatcgaaaagtttcaagattaattacgacctgacactgccccaatacgagccctttgaaaaatgtattgagcacaaaattgagctggccaatccgagcaccgaactgaaggctttgatcagcaggtggtgggcaattggacaattaatggacgagggggggaacaatttgttgggcaaattaaacacttagtattcttagaaatccctaaaaataagggtactcgattatctgatacattcaaaaacaagttacattcaaatctgatttctctaactttttgctttttccaatttatcaaatgctttttggctctactgctctttagacgcctattcgatggccatcttcaatttcttaggccactgctcttttcttaattgtttcttgcctatgtttttggtatcaaaagaacgcttanaatctcagaaatttttaaatataagaatagcaaataatggcattaagaaaattaacacaatgagaaaatatcaaaattcagcttttagaatatattcatgagattgaatttttgtctatttcatactttaagcttccgtttgatccacctcatggggaaaggatgat

SEQ ID NO: 35532 - DNA, 689 bp, Heterodera glycines
ttgtatccacatttttggtcaacattttttcaattctttttttggtttaaaaagttcagaaaacaagtatccgccgggggtttccgaggtcgctgatcaatgatcacgaatatggaatcaaattgattttctacttctttcccttggttcaatcactctgcagaaattcaaatattttgattttctttttgttcatgggttcctacatatcgacaagctatgcttcctcatacttttttttaattgcgcatattttataatttttttaaagaaaatccatacaaattgagcccagtagtccaaaaaaccagcctttttgttgaaattcgtaaacaaatctcactcaaattttcaaaatttttccccggcggcgcctaacggcaccgccggacccctttcttcccaaaaagttttttggaaaaacgtgccgaaaaattatgtgaaaagcaattctggatttctaagattattcgagcatttagtccaaaatgattaattgtttgaaataactgaagtaaattcgtttaaaaatttcattaatttaatttagctttaacttttagattttataaaataaatagcaaaataaaaattaattttgtgttattttcacctgaaataaattaaaatttgaattttttttgaatttaaaaattcccgcaagatcaaggtcccgtcccggtttctca

SEQ ID NO: 35533 - DNA, 1034 bp, Heterodera glycines
  unsure (1)..(1034): unsure at all n locations
aattttggctcccggacatttcgacaatgaccgtttcgccaatgaccgtttcgacaataaaattaaatatatttttttaaataaaattcaaatttctgcaaaattatatggacggtgcggatttgggatcaatataaaaaagtttttttttcgtttttttcaaaatagcattatgagaatggctttagtttgtcaattttcggcgcaaattgcttatttttttttaattaaaaattgaaacattgttttacacctaaatagttgataatgaattagaagcttttaccctgaaaaaactattcttgattaaaaaaacaattttttttttgttcgaattcgggtctggagttcggaattgggcaaacccgagttaagatccgttatcagcaccctcaaaaacgcctaaaaactggttttgagcacaaaattaaaaaaaatgaaaattagggacaaccattcttcaggattgccgcctgggtaaaaagaggacactacattaagttaaataaatggtttcattttgaatttatattataggtccgtctcattttgtcttctttcttcactattaatagggctcagatttttaggtgctaaaaatccctaaataggtactaaaataggtgctaaaaaagtgcaaaataggtgctaaaataggtgttaaaaattgaaaaaatctagaaatagtccgactcctataatgcattcattaaatttaaaaaatataactacctaattaaatttttctctttaaatttcatcaatatttttttaaattaatttattattttttatattcattttattatatttaatttgatattttaaattttggcgatatgatatagtcgtaaatggtcattgtcgaaacggcattgtcgaaaaggtattgtcgaaacggtcattgtcgaaatgtccagccaccttaattttaaatgtatccttttaaaatattttttgtttttgctgatcattttcctcatttcgctgcatgtgacttttttttgctgtgcgcttttttcaaaaaaancttt

SEQ ID NO: 35534 - DNA, 720 bp, Heterodera glycines
tccttacggagttggccaattgccttcattacaattttcctttggtatggcatccgaatttctttgtcctttgaccattttctcgccaaaaatcaaaataaaattcgtcacaataaaattaaggtaatgagttggtcctctgcattaaataattggaaatgagaacaaggaaagcccattacagagctaattagacattgggtactattttttaacttaagcattttctcttgggtcctttttcaaatccgtttgttttttccaatgcctttattaattaattacaattatactcccaattaattgctcttgcagaaagctgatgaagaaattcgagttcttgaaaaatttattgccgatgcgcaaaaagctattgccgatgcgcaaaaagctatcgccgattggcaaaaagctattgccgatgcgattgctcgtatcgaatattggaaggagcaccgttctaccatggtctcctttttttacatttttcatttctatccaagtgactaatttattccaaacacagcatacgatgactatgccggtcttgccgcagcaaagcgaaagtacgagtcaacagcccgtcagttcggtactgtaacttcaaaaattgtaaaatttaatgttttttttttgaaaaattttcaaagttgcaaaaaaattttttttttgcttggcggggaaaccatgcggggaactgagcccggggggggggggaat

SEQ ID NO: 35535 - DNA, 1151 bp, Heterodera glycines
  unsure (1)..(1151): unsure at all n locations
cccccccccccccccccccccccccttcagacccgacaaatttttcaacaaaaattttgaaaaattgactagagcaatcgacccctaacggacgacctatggaaaaaaatccccgaaggagagaatttaataaatccattcctcgggggaccgtgccgggtgccgcggggtaagcagtgctggttcgtttcatcacggcaccgaaccttttggctagtcagcaatcgttgcttaactgtccagatcggacgggtgcgcatgactttctgaaaaaaatatttatgaaacaaaaaaatcgattttttcaagtgtccgtttggggtactcaaacatttatggggagcaaaaatccaacgcagaattaaagtacaggctatagggaagctattcccgaaggattcggtctccccataaatctgggcgcatcggttcggggggactgccccgaaaacaaaaaaatcgattttttcaagtgtccgtttggggtactcaaacaattatggggagcaaaaatccaacgcagaattaaagtacaggctatagggaagctattccggaaggattcggtctccccataaatctgggcgcatcggttcggggggactgccccgaaaacaaaaaaatcgattttttcaagtgtccgtttggggtactcaaacaattatggggagcaaaaatccaacgcagaattaaagtacaggctatagggaagctattccggaaggattcggtctccccataaatctgggcgcatcggctcggggggactgccccgaaaacaaaaaaatcgattttttcaagtgtccgtttggggtactcaaacaattatggggagcaaaaatccaacgcagaattaaagtacaggctatagggaagctattcccgaaggattcggtctccccataaatctgggcgcatcggttcggggggactgccccgaaaacaaaaaaatcgattttttcaagtgtccgtttggggtactcaaacaattatggggagcaaaaatccaacgcagaattaaagtacaggctatagggaagctattcccgaaggattcggtctccccataaatctgggcgcatcggttcggggggactgacgcgaaaacaaaaataaatcgattttttcaagtgtccgnnttgactctagag

SEQ ID NO: 35536 - DNA, 988 bp, Heterodera glycines
  unsure (1)..(988): unsure at all n locations
gttattttttaaaaagagtcctttaaaatcttccttggcttggtaaaaattccattaaatgggaattgccacatactcagtacaacttacaagaggaatttctctaggccttttgctatgttcttgctttttcctgttattttttaaaaagagtcctttaaaatatcattggcttggtaaaaattccattaaatgggaattgccacaaactcagtacaacttacaagtggaatttctctaggccttttgctattttcttgctttttcctgttattttttaaaaagagtcctttaaaatatcattggcttggtaaaaattccattaaatgggaattgccacaaactcagtacaacttacaagaggaatttctctaggccttttgctattttcttgctttttcctgttattttttaaaaagagtcctttaaaatatcattggcttggtaaaaattccattaaatgggaattgccacaaactcagtacaacttacaagaggaatttctctaggccttttgctatgttcttgctttttcctgttattttttaaaaagagtcctttaaaatatcattggcttggtaaaaattccgttaaatgggaattgccacaaactcagtacaacttacaagtggaatttctttagtccttttgctattttcttgctttttcctgttattttttaaaaagagtcctttaaaatatcattggcttggtaaaaattccataaaatgggaattgccacaaactcagtacaacttacaagaggaatttctctaggcctttggctattttctcgctttttcctgttattttttaaaaagagtcctttaaaatatcattggcttggtaaaaattccataaaatgagaattgccacaaactcagtacaacttacaagaggaatttctctaggcctttggctattntctcgctttttcctgttattttttaaaaagagtcctttaaatatcattggcttggtaaaattc

SEQ ID NO: 35537 - DNA, 1421 bp, Heterodera glycines
  unsure (1)..(1421): unsure at all n locations
tttgaaaaaccatacaatttctaactgctatgctttcatataaccattagggttccgattatttttggcttagacgtatttccgattttcggaaacttttttgactatttttcattgaaccgtgttatcaacccttttctgatcaaatgatcaatcttactanattattcctcccccnnnccactcactttcatcaattcaagcatttcttcaaaaatttgttttctgcccaatttggtagcaagtgtaagcggcgtttggccagcaaagttctcgagactgtgtgccggtttgtgccaatgcttggccgaatagctgtacaatgacttaaacaacctttttttagcaaaaattgtgcaattaaatattttttatttttttgtaatttttaatttacatacaacaatttcgaacatacaacttaaattacaaaaggcttacatttctgttgtgaatcacgcactatgtggagctgaaaagttacgatttcattgaaatatattgtagcgctcactattgtattgccgaaagtgtcctgtttgtccgggtccgcaccatactgtatcagcaggtcataaatgtctttgttttcgaaacaagctgcaaacgccaacggatattctccataataggcatagcctaagtaaaaaaaagtaatttataaatggctattaattaatttaaaaatttttattaccttcataatccatgtttcgattgctgtgaccgggctcatagccatccggcataaagaaatcgccgttggcacgcgcatttacagaagcaccgtattccagcagaattttggcctgtgaaggatgaaaaaaaattatcatttcaaattgttattaccgtgtcataatcatcgttgacaattgccaaatgaagacaaccttggccttaatttttaggttcgacaaaaatgacatttgaaatgacaataaatcggattttaaatttgaaaaaatgaaatcctcaagaaaatttccgtaattatgccaaaatatcaattttgcagattttcccataaaattttatgataattcttggccaggaccaggcggcaattaaattgagagtttataacgcaatttgggaattcttgatttgaacgttacaaaaatcacatttgggcatttctagaaccaaataaacagattgaaattcttaaattgactttaactggttcaaaatttcaccaaacagctcttcgcccaaatagatgtccctggccatgcccgggtaacggttgatcaaaatacgtgccacttcatggcacaccaactccttcctgttcaacaacaggtggatgagcgtttcgccgtccatgccacgcttgttcatccgccattgggcctcgtgctcggagaagcgcgagtcggccggttcagttcgcatctcatccgtgataccaagcgcaa

SEQ ID NO: 35538 - DNA, 1531 bp, Heterodera glycines
  unsure (1)..(1531): unsure at all n locations
aaaattttgaaaattttcgaaattttaaattttgaaaaatcgagctcatnnaactctacaataagttcgctggcaccncctcgctcagaccaaaccctgacgtggtattcacctggtactgaagtggaaaaaaanaattaactgagtctccgtgtctgtacaggtccgggatttggtcaaatcaaaaaataaaaaataccagcatatagaggacacttctgcggagtgccctcacagcgggaattttttgatccgagtttcagaaaaaaagttatgggccgtcaaacgcaagaaaaaatgagaaatccgtccctgggactcagtcgtccgcgctgaatttttctctatagttttcccggatgctcctcaaaaagttgtaagacccttccaccactttcagggcgctcccggccttcggccgggagaaaatggttttagcaacgaaactccttgtcaatataacgtatatattaactagcgggtgcgtgaaccgtcgaatctggacctgggaaaaagcgcttcgcgctttgggagcttcgctacctagattagctatgggttgtggagtaattgttggtccagaagagagttacaacaaatgttagaagaagtacaaaattggtagaagaggtacactgggatttttaggctgctttgtggagaatagaagaggtacaacagcgattagaagaggtacaactgtgatcagaagaggtacaaaattgttagaagaggtacaaaagtgattagaagaggtacaactgtgattgaagaggtacaactgtgatcagaagaggtacaaaattgttagaagaggtacaaaagtgattagaagaggtacaactgtgatcagaagaggtacaaaattgttagaagaggtacaacagcgattagaagaggtacaactgtgatcagaagaggtacaaaattgttagaagaggtacaaaagtgattagaagaggtacaactgtgattgaagaggtacaactgtgatcagaagaggtacaaaattgttagaagaggtacaaaagtgattagaagaggtacaactgtgattgattagaagaggtacaaaaattgaatgcaatttattataaattttaaaaaataaattaattattccttttattaattaaaaagaaaattttgaaatgtacaataattgaatatttaaattaatatgaaattaatttttataaattcaattaaaaaaaatatgaaattctttattaaaagataattattattttttacataaattcttttattattaatttacaacaaatctttaaatataaattgatacaacagtgattagtaaattcattaaataaaaatgaaaaattttttaacaaatttaattaaaaaaataatgaaattctatcaattaaaaaaataattaatttaaacttataaaatttattcatcaaaaaaaaattaatttaaatataattttttatttattaactcaacanaaatattttaaataaaggaaaatcattgaaaataacgtaaaaatgcacagaaaaat

SEQ ID NO: 35539 - DNA, 742 bp, Heterodera glycines
cccggttttgcccagttttgaccgggaccgggaaattcccggtttttcaaccaaaaaagtcccgatcccggttttgcccaaaatttccggtcccgaccaaccctacttagaatcacatttttgtatatttaaatataaacaatttttaggggtacatattcaaaaaattttatttttttcacaagaaatttttataaattttcaaaatttctcaaaaaaatttagaaaaaaatgctaaaaagtccaaaatatgtaaaaagcccgaaatatgtaaatagaaatatgtaaaaatatgtaattaaaagtcccaactaaaaaaccaaaaaataaaaaagtaacttttgttcgcaaacacaaaaaagaaagtgtttttcctactatttagagcatggagaatccaggaaatatgtatttacataaaattagcagccctaataatgaggacttgaacctggtacaactgtataaaatggctttccgtttcttggggcgcaatacttttgaccttgactattatatgtattaaaaatgatttttttagaatttagcctaataaaaaaccggtcgctttatttatgcctagtcataatctgaactcacgcgagggacagagcgcagcttttgtggggaaatcgaccacagccgaagaacgcgaaacccttcgcaaatcgctggaggaaagcattcgcaaattggtgcgatctccgagcgaaaaggcagcgaagagaatattgtctttgag

SEQ ID NO: 35540 - DNA, 1078 bp, Heterodera glycines
tttgtccaccaataaatttgtaaaaatgcgaagactgacgcgcgcaacctgtgcaatcttttgctcattattttgtttttccacctcccactccaaaagaaattttttgattgtctgaaaacaaagactttcactacttttttaagggtttagatttattgttaatattgttgtaaatattccctttttgggaattaataaaaataaataaataattcaaaatgtccgctagcaacagtcgaaaagcattcgtgcccttttcaaatgcactccgacgacgaaagctgctctttggctttggggttggcactgtcatcggcgccggcttttactacatggacaaaaacaacgaaaggcgcttcaaacgggacaaagtcagtccatttgaagattttatgtcgagtgtgaagtccatcaaaatcgagacggaagtttgcaattcatttcaatttgaggacgtttatttcgtgtccaatgcgcatgcggccaccgttgacaccaaagcggcgctgaacaaacgcccgtccggctcacttccgacccgcgcggagctgttgaaaggaatgcgtgacgaggaattcgacatccttgtgattggtggcggagcgacgggcgcgggggtggcattggacgcgcaaacgcgaggtcatccattttttgtccacttgtgccgtggcactttcagtgcacttggcaatttaaggtctgaaaaccgcgctggtcgagttggacgacttctcttcgggcacaagtgtaatttgtcttccccgtcttgtctttccctccgttttgatgccttttcccgcttcagtcgcgctccaccaaactcatccacggcggagtgcgctatttacaggcggccattatgaagtttgaccgtgagcagtacaaaatggtcaaagaggcgctgttcgaaagggccaatttggtgggcaaaaaaattcgatttggttgaaaattgacaatttttacatttaaaaatgtttcagttggaaattgcgccccatctgagctatccgctgccgattatgctccctatttacaagtgacacacacgtttttgttttatttatttttt

SEQ ID NO: 35541 - DNA, 224 bp, Heterodera glycines
atgtgttaaaaatataatttaaactgcaaaagtaccaaatttacaaatgaatttcattttcagaaaatttccacgccaacgattttatttattttttcgaccgaaagtaaattgctaaaaaataaaaataaaatgtgtgaattaataatactttaattctttagagtgtatcgtccaaagcctatatcaattaattacaattatactccctattaattgatctt

SEQ ID NO: 35542 - DNA, 1432 bp, Heterodera glycines
  unsure (1)..(1432): unsure at all n locations
ttttgccattttccccattatttgtttgttttccacttnttcctttgcaattccaattcctttaatatatttaattaattattaataatttgtttacgaacgcaatccttaacagaattcgccatttaatattaattaattttcgttcctttcattcctgaggaaatgcacttttccttttcaaacaattttccgttattcaaaaggtttttccatttttatgtaattatattttgatagttttttataatattatttttccaaaataaatgtaaaaatattttttattatttatgttttatttttcccattttattttctattgttttttatttttccccttttttattttgggttttatcttaggatttcgcgttgtcgcgacactgacagaagcaacagcacgctgacggtaaaaccatatgtttagcacagagtaatcagcagtgtttgtagaaaacaaaatagtcattagaagagccgaaagtgtttattattaaattaagcccatcattaaatggtcaaaaggcccattcaaataaaataaatcaaattctcaacaagtaaacaatgacaaataaaaaatccatgttaaatttgaattaacaagcctagaatgaaaaatgctttaagtaaatatataaaacaaagccccgtcccttttatggacagaaaatgtcctcggggcattacgcagtgattaataaaataatgcgcaatttttgtcgcttttccctcggggcataacgccgtcggcaaacggagcaaagagagcacaacaaattggattaatccaatgctttcattggctttcgatgtgtgcggattgagcaaaaatgacgacggatggtcaaagagagagagagcccaaaaaaacattcatcattttccttataaaattgaaatttatgacggatttaaagaatatttttcaaaattttaaattgcattttacttttaaatgtttattttaaattattttaaaataaaaatgatgcagaaagaatgaaaatattaatcaaatcgctcagagccaaaatattaaaaaatttcaatctgattagagatatttgagattaaagtgtctgtgtctgatttgttttcggtccgcctaaaacagtcatttattgttgttattgttggccccttagaaaagcaattaagtgcttaattagtcaatttccctaattgcctttttaaattttccttcttctgtcctccaacggatgcttttgtctgtcccccccaaattcgtagccaaatgttttgtgcttcaaaaatggggctcaaatgaccaaagggagcagcgactgactctcaacatttgtgagaagaattcaaaagaattgggcaattagcattttggaaggaatttatacgatcaaatgtgggtcggaaaggccaaacaaacgaaaaaatattcaaaaaatga

SEQ ID NO: 35543 - DNA, 438 bp, Heterodera glycines
atccgcaaatctgttttgggcgggatctacctggtaatcattgcattttttgaatctctgaaacacatatggagcgatggaaatcttgtatttctttttctttcattttggcatactattttcatgtctttaacacacgaaaaataacaaattcgcaaattttaatattttggttgtaagggaacaaaatcactttggacatttagaatcaatagaaaaataattagtctagcattttggctgagatcagctgcttagaacttgagttacaacgtaatgaaaatttgaaacactcacaaaaatcatgaaattcgcaaattctattaatttttgttgatacggtacaaaatctgttggacatttagaatcaatagaaaaatgattactttccgcattttggttgaaatcagcagtttaagacttgagttacaacgtaat

SEQ ID NO: 35544 - DNA, 923 bp, Heterodera glycines
aaagtgggaagagaaagtggaagaggaacagaaagtggaccatgagaagaaagcggaagagaaagtggaagagaaacagaaactggaagagaaagtggaagagaaagtggaagagaagaagaggaacagaaagtggaagagaaagtggaagaggaacagaaagtggaagagaaagtggaagagaaagtggaagaggaacagaaagtggaagaggaacagaaagcgaaagagaaagtggaagagaagaagaggaacagaaagtggaagaggaacagaaagtggaagagaagaagaggaacagaaagtggaagagaaagtggaagaggaacagaaagcggaagaaaaagtggaagaggaacagaaagtggaagagaaagtggaagaggaacagaaagcggaagagaaagtggaagaggaacagaaagcggaagagaaagtgtaagaagaacagaaagcggaagagaaagtggaagaggaacagaaaatggaagagaaagtggaataggaacagaaagtggaagaggaacagaaagcggaagagaaagtggaagaggaagagaaagtggaagagaaagtggaagaggaacagaaagtggaagagaaagtggaagaggaacagaaagtggaagaggaacagaaagcggaagagaaagtggaagagaagaagaggaacagaaagcggaagagaaagtggaagaagaacagaaagcggaagagaagaagaggaacagaaagtggaagagaaagtggaagaggaacagaaagcggaagagaaagtggaagaggaacagaaagcggaagagaaagtgtaagaagaacagaaagcggaagagaaagtggaagagtaacagaaagtggaaagagaagtggaagaggaacagaaagtggaagagaaagtggaagaggaacagaaagtggaagag

SEQ ID NO: 35545 - DNA, 616 bp, Heterodera glycines
cccatgccccagttaccttgaggtacaattgcactttttaaaaaggcaggggtccgggacccctgcccccgtggcctaaaaaaactcttttttttacattaaccaagcaaaaaccaaagacccttgccccggtgaattatagttcgtcaaaattgattctccgccgcgatgattgatccaaggattcccctcttccccgggcgagttgttatttgaagtgaggctaattacagttgaaaaagagagatggatgagtaataaggaattataaaaagaaaatattttaacattaaaacaaaatttcatcaaaactaatttaatgtttatagtaaaaaagaattaaaaaacagttattatattaaaatcagacgggggaaaatgagtgtcgggatgaagggaataaatgttacacccagagggtgaatgggaaagaatggaaaacaaaagaaaacggaaaacgtaaaatgtcaaatacaataataatttaaagaaaaaacttattaaatacgtttttttttgttttagagggtttaacgcgacccttttttaaaaaggagtttgtttgaagtgatggagaagtggtaattactctcttttattgacggccgggaaggga

SEQ ID NO: 35546 - DNA, 883 bp, Heterodera glycines
atggggcaaaaaggcactcaagatattttttacaattttaaattctcagttttatttgggcactaccgtcgctgcctcaatgtacatcatcggtgctgtggaaatatttctcatctacattatgccacaggcgaaattgttcgaggacatggtgagcaaatcaaaaatgtgcaaaaaattaaataaaaattcgagactctctcgagagcaaatgtaatctgatcaatttgatcagagtgatttccgatcagcaaaagggggtggcactcttttggcattttccccacttgtccaactttcccatctcatctgatcaattgatcagaataagagttatttccgatcagcaaataggggtgggactcttttggcttttcccccttttttgcccaacttccccccccccccacttcccatttcagtaccacaattttcgtctgttcggctcacttttgctcattttggtcggtcttattgtgctggcgggcgtcaaaattgtgaacaaatttgcgctcccggccgtgctgattgtgatcgcgtgcattgtgttcacttttgtcggcattttcctcaaatttgacgggtccgactcgctacagtaagtgcggcccctgtcccgccataaaagcacaaaacatttctcattactagagaccggacaactgaggcacgatgagggaccccgagtcggggtcccaactttaatcccgcgatcccgagaaaatcccgcaggatcccgaacttaatcccgcggaatttgaacggggccattgaataaacattatttaaccagtaaagtgtcatatgattggtccccaataatccttggcaatgtgttcaatggcacaaaatttaaaaatgccgattacccaatggtattttt

SEQ ID NO: 35547 - DNA, 944 bp, Heterodera glycines
ggtgtacggacatttggcctactcgacatctcgcctactgacatttcgcctactaacccaaaaacattcattttgcctactaattagtaggcgaaatgaatgtttttggcttggtaggcgaaatgaaaagtaggcgaaatgtcatgtagcctattgtgacatttaattaacgtattataaacttgttttttcgaataaattatgcacttagaataattgtgattttgttatgagagcgattgactaatccgcgttttcaaattgaagttgctaaattaatgtcgcaattttttgattttcattataggatggtttcaaactttgagttatgttaattcttctaaattgggttccaccgtaaatatatttaatgaatctgttaaaattgttaaccaaactctcaaattgttgttctgtcgaacacgttttgatttgctcttttaatgttgccaccttattccgtcagctgctgtgctgcgcgaaaaagcagctactcgtcttttctactaaaaaaaggcacaagtagcctccatacttgatcggctgacgccaaacgattgggaaccgcccacttcggcgccggccttttcggcgccgttgctaacaacttttttcctgatcaaccaaattaaaaatttttgttatcattcgatagctcttcagattctctattagcctgtaaaatttcaaaaaatttcgtcagtttacaaaaaagttatggccaaaaaacctcaaaaattaactttttcttggctttttcggcgccgcgtagcataacttttttatttttgaatcattcatttctatttttacatgtaaatatagagcacacatagagctttcaaattatgccagattggctaaagctaactgacaaataaaaaagttatagcatttcaaaatttgcggcgccgaaatggtccgcgccgaagtgaccccgaccc

SEQ ID NO: 35548 - DNA, 553 bp, Heterodera glycines
acggatcaaaaagaaagttttttcaagagcgtaatttattttcaaaatctcagtgtccattgtgttcatcggtgctcgagaattgtccaattcgtcaaaaattctgtgtaattaataattatttattttttaatttttaaaataaataaaacttatttttgctataaaaaaatttttaaggaaatttaattcgtcgctgcattaatattgttgttagtcacgcagagtgcgcgagataagttaatacaagttgaacacaaattttcggcattggagaacatcgaactgaaatggtaaacattcttgtttggacccttttgctgctgccgccgatcgtcttttctgtggtcgatttgcgctgaatattgcacgacgaggcgatctgatataattatcagtgttaatgcaagagtcaaaggcatacaacgtatctacagatgcaatacatttgaatcccttaccaaagcatcgtttgtctttcactgccacagatccggcaatgttttcgtccccgtgcaaaccgaattgactatgcggaattggacagaggacc

SEQ ID NO: 35549 - DNA, 978 bp, Heterodera glycines
aattagtgcattatttaatggcaaaactcgccaacaacttctattcaaatttttttaatttttaaaattattttctaatcattaatatttaattcctaattatgttttatcaaacggtgtgccttcttttgctgttgagcgcatcgaatgatgttgcggtttttggacaggaagaaacaaccacaacatcgactagtagtacaagtacgagcacaactagttcaaccagtacatcgaccacaccaactacaacatcttcaaccagtacatcaactacaccgagcacaacaacttcttcaaccagcacatctacatcaactacgccaactacaacttcgtcgactagtacatcaactaccccgacaacaacttcttcaaccagtacatcgacgactcccactacaacatcttcaaccagtacatcaactacaccgagcacaacaacttcttcaaccagcacatctacatcaactacgccaactacaacttcgtcgactagtacatcaactaccccgacaacaacttcttcaaccagtacatcgaccactcccactacaacttcttcaaccagtacttcaaccacacccactacaacttcttcaactagtacatcgaccacgcccactactacttcttcaaccagtacatcgaccactcccactactacttcatcaaccagtacatcgaccactcccactactacttcttcaaccagtacatcaaccacacccactacaacttcgtcgactagtacttcaactacatcgagtacgacttcgtcaaccagtacatcgtctacatccagtacaacttcatctaccagtacatcaactactccgagtacaacttcttcagcaagtacatcaaccagcagttcatcatcaaccacgaccaaaacatcgtctggcgatagtggttctggagcggtcaccagctgtaccaacgcggctggggacagagcttgcaatgcttacaaaa

SEQ ID NO: 35550 - DNA, 858 bp, Heterodera glycines
ctcgccagcgtggacgggggcgggggtttgatttttaatagatccaaaaaatctcacaaaaaaattaatttttatgaatgatgtttttggctccacatttcttgagtcgatgtatcgcctcgattcaattccttttggcctaaattggccaccgggcgaattttgaaatttaatctctcttttctaacagatattcatcaaaaaatctaagattattcacaaaaaaactctgtttggcaatcggtattttgaaaaaactcagtgctgaggcgatccacaaaaaaactcagtgtgggcgatccacaaaaaaactcagtgtgggcgttccacaaaaaactcagtgtgggcgatccacaaaaaagctcagtgattgattggtcattttccggaagcctatcgcaccactttcgggcaccaaaagtgcctgatccggaacccggaccggcccggttaagaacaattttttgttcagttttttaagggctatctcccaggccgggtccggttcttaatccattcacttggagcccgtcatgggtcgggcacatctgccggaggaccctcagcctcgcccccgaccctgtcgatggccaacccaagctaagcttgccggtaccagcggcttttttgtacatctcgatgagctctacaaaatggtatcaatggcgtcaggctatgtctactacaaatggagaaaattggcgagaagtgatgtcaaaaattgaaaaattttaaaaatttgaaaatgacttgcgtcccgccgtacattagtattaaccggacggccaccgtgttttgtgaattgaataattaaattatttatttaattttatcgatcactgaggtttttgttggacg

SEQ ID NO: 35551 - DNA, 1021 bp, Heterodera glycines
ttttggcctgagcgggacatttgagtcccgggccccataactcgtcaggggtcggttttagacaaaaaatgccctagagcaaaattgtagagttttttaagctctatcgaatggtgtgccatatggccggaaattttcaaaaattttcgagctaggccccctagaaattttcgaaaattttttttgggttgaaaatgggggtcaaaaatatttttctggggtattttgatgtgctgagcacgaatatgatatttgtttttcgtttcataatttttagaattttttaaaaattcgaaatttttttcaatttttttgaccctcgggattttggggtaaattttgaaaattcataactcaatggaggaccggtcaatttaagtgaattaaagctttaaaaatagagaaaaatcaggagaattttatgggatttatttatgttttctaacatcaatatgaaaaaagttattccagaaattctggaaattttagatttttcagaaaaaaattcagaactcccttctgaaaagtcattctgtaaaagtaaaatactacaaaaatccgcaatttttttctctataatataaattttattttacatttttatctcttttttgcgaattgttataaaaataaaagtgatttttggtttcgggaccataggggggtgaccaggatttttgggtggaaaaattttttcaccgaaaatattccaaaaacatgtctttaggggtattttatgacgctgatcacgaatacgtgatcagattttacttttgacatcgttcagacctcagaatccctgtgtgattggggattctgaggcatcattttgaggggggggaagttcgaatccgggcggtgtacattatttttgctatgcatttttggttatttttaatgtttttaattcatttaaaagagtgtttgtttttttacttaagtttttaatttaaattaaattattttttgtgaaaaatttaaaggaattaattatttgtttgattaaagaatttcatatagg

SEQ ID NO: 35552 - DNA, 933 bp, Heterodera glycines
tctgtttcttcaaaatttaagaaatttgtgcaaaccctttaattttttttaaatctttttttttttgctcgaatttactattcttcaacattttgtatgccgatttccttttttttacagatacaaatggctgaaggacaatgcgacgttgccgttggaggtgtacgcgtcgcgcattctgaccaatccggacaacggttcgctgacatttgtccactttgaggacattgacgagggcgactaccaatgcttggcattcaacggaaatggcacggcatattcggagaaaatgcgcctgcaacaagcatgtgagttgtgggggactggtgaaatttcgccgccgaattttttttcaaataagaaattttcaattaaaaaaaatctagaaaaattttattgtaagagttgcctgtgtacgacgagttgccattaacccaaaaaaggcactgaaaaattttcaaattttttttcttggaattttcttataaaaaaaaattctaacaataaactatgaccaaaaaactaattcccgaacatacttatcgaaattttttggaattttataggctaatagagaacacatagagctattggatttataatacacagattggtttaatttggacaattatgaaagaagttatactcaaaaaccgggctatcgatttttttttttgaattttctcataaaaaatttttgtattttttttttcgaaaaatgtctaagcttgaaaagttaaaaaaaatttcggcgaaaacgagctgctccgccatttggaggtctctgtagttgttactgttttttcattgcaaactttcatcattttcaagggatccgcgccttcccggtgggcaaagggcctgaaattgttaccataccaatgggtcgaccgtacacgccgcgactgtgtgccgccccgagtcgagcccatc

SEQ ID NO: 35553 - DNA, 1012 bp, Heterodera glycines
tttttaaaatagaaaagaaaaactacctaaaaatgaaaggaataaatgaatcactaatgagtaatgccccggttaagttcatataacgccgaattgcatcaaacttttattcccccttttgtacttacgtatgtacatatttggtcaattttccaccattaacaattggcacaaatttgccccaatttataaaaacatttccgcgtgccatttgatgaggtaatcagtgacaactacggacggctgagactgcggcacgacaaatggccgtcagtcggcaaatgcgacacaagcgcaaaaatgacggcgaaacagtggtgacgggggaagccaataaaaattaatcagttttaattattatttaaaaaattgtttaaaaagccgagaaaaatgtatttgatcaagaaaacgatgtgccagttggatgcgtaattagggaaaactaaattggccacttttactaactttcgtcatgtaaaacaatttaatcatggtacggcctattgacttttataaaaaacaataagcgagttttagggtcgtgtaatttgtttctaaagtggttttttaatttctaaataagaaaagtttaaaatagttaaaaaaactataaatttattaaatatattacaatccaccaaaagttaccattttccaactgagaatgggatcaattcattcactcgctttagctttccattctcgtccaggaatcgttctcgacaaaattgctgtcgggttctcgaatacctgaattgattataaagaatcatttttaattatttggcacttttttatccatttgaaccgcagaaatttattggcacaccatcgtccccgccttgagcaggtgcccgtcaatggtcacaagccggcgcattactgttccaatttaaaaacatttactcaaatgcgtaattatgtcaaacaaagacgtccgtggtttgccgattacgtattacatcaaatcatccaatgttttatacacattacttacacaaatcactgcgtt

SEQ ID NO: 35554 - DNA, 711 bp, Heterodera glycines
ttaacaaaaatgcaataaaacgaaaagtgtacccctaggaatcgactcaaaaaatttcagaaaaatataccccactaagaaatgaaaaattttctaaaaaatcatctccaaaatttatttatttattttcttgaaaagaatttttaattgctttttgaataaaatttacgattttacaccccctaaatttgaaactgtttggcacctattttcccatcatttttagcacctaaaaatgggagccctagtactgatttccgccttctcttcgggaaccgtttgtacttgaaaagaagatcagatcctctaaaaacagatttccttgggcgaaggatcttggcttatgaacgacttgagcttgctgatacccgtgttgatgtaatacggatcgtcttctttcttgtagcgccacattctgaatttttgtccaaggttaaggtgttcggcccactgacagaagtgcagtttggccttgattttgttgtccatgttgtacagtaccttttgaggatatggtgattagagatcggtattttggaaaaacctggacctggatttagtggacaaaaatccaggaaaatccaggtccatgaaaaatccaggctcctcgagacttggatccaggcctggacctggattttttaaaatttgttttaaaatcaatgtttgaaaaaatcaatcaattgcttaggaacgtctaaaaatatctaa

SEQ ID NO: 35555 - DNA, 1235 bp, Heterodera glycines
  unsure (1)..(1235): unsure at all n locations
ctacgatgacttttataatgcctaactttgcctatttcctttaagggttgtgnctaatgtgnctatttnaagattttcgacttaatatttaanaaaaatggaataaaaangaaaaananannnnntaagaaatgananaaaaaattttnagaaaatatannantaagaattgaagatttttttngaaaattgatnanaaagttaatatttttttntttataaaaataataaattaaaaaaaacttcttatttgttgcttttgaataaaatttgaccatttacacactaaaattgaaatttttggcacttttttcacatttctagcaaacctattttggggattttttagaacctaaaaatataagccctaataataacagatattttgtcaagtctcgtcatttaattttctttagcgttttaatttattcttaagcattccttcaggttaattaaggcgctgccgagtaaattttaaattaatattaatttcaaaatggaaaaagtcagctaaaattaaccaaaaaaagcaaacaagataagctaagaagattttcttttcttcaggtccaccatgcaaggaaaaatattccgaactgtctccgcttaatcattttgaaacctgtttttattgtgtatagatggtcgatctattattgtacagttttaatgcatattttgtaaaatttgcaaaatttaaaaatggcaatttgcgtggggcctaattgaaattaagctcacctaataacgcgccaaatcgccttgcagaatggctccatgaatgtatttttcttctctaaataaaaaagcattgaagattctgtataaaaataaaaagatgaaaatttttttttcaggatgaaacagaatgccaaaataatcagaaatgaaaatatacataaacctaaagaaaaactgaaaaatccgttaaaattatacagcaaattatgatttctacaaacgatgacactgattcaagttggatagccattgacaacggtatgtacctgagtattttccttctgaaattgttttctctgcaccttcacattggccttgcgttctataagccttacaaaatttttgccaatctttgcttgtaactaaaatttaaaattgaaaagaacaaaaaaaattgaatgttaaaaatatatttaaaaagtaaaaaaatcgagttgggtaatatttttgaggggggtttaatatccatttctagatcttcaattttttacagt

SEQ ID NO: 35556 - DNA, 1200 bp, Heterodera glycines
attcagtcccaaaaagtgccaccatttccactgcaccagcgcaggggttcatcaaaaaatgaatattgcttattttttcccttaattacaaatttctccgcacagttccgccgccgcttccacctcatcgctcatcactcttatgacaaccaatttgtcatcattacctttgccattgccattatcccccgaggtgtcgtttgtggtgcgcagcagcagcagcggcacaatcagtgggcacaacggcaaaacaaacgatggcacggcaaaagcagaacaaaagcagaagcatcagatggaaggtagaagcagaaacacaacaagagaagaagggcgaaaatcaacagaaaaggcaatggaaaaaacggagaaagggaaaacgaagacgacgaccaaattgataataacaattagtgcaaatgacaacggcactttggaaaatggggacaaaggaaatggcacattgataaacggtgctaaagacaacggcactttgataaatggtgccagcaacgcaactttggaaaatgggaccaaaggcaatgacacttctggaaattgtgccaatggcaacgacactttgataaactgtgccagcaacgcaactttggaaaatgggaccaaaggcaatggcacttctggaaattgtgccaaaggcaacggcactttgataaacggtgccaaaggcaacggcactttgataaacggtgctaaagacaacggcattttgataaacgatgccagcaacgcaactttggaaaatgggaccaaacgcaatggcagttctgtaaattgtgtcaatggcaacggcacttttgggaattgtgccaatctcagcgctaacacggaaagaggaatttgtgcgggcagttatattttggcgaatactactaaggagaatgatattttgaggaatggtaccaaggacaaggacaatggcacttatacggacaatgcaatttttatgaatggaaccattgccaacggcactttggaaaattattctgccaaaggcaatgacacccttataaatggaggcacaacaacaacagttttacccagcaaaataatgggaaaaagtgccgtttcgactccgacaaatggcacaacaaaaacaacaccaaatgaagcaattagcaaaggcaacaacagcaggtactaaagaagagacaaccaactcaatttcaaatttgtcgcaat

SEQ ID NO: 35557 - DNA, 879 bp, Heterodera glycines
tttgtacagactttgctttgctgctttctgtcaattgcttcctttgatcccgtttgtactggccttgcttcgcttctttcaatcaatctcgcatttggtcccacttgaacggactttattttatttttttctatcaattggtgatttgtctccatttgtacagactttgctttgcctctatttgacatttcggtatttagttccacctgtagcggctttgcttcatttctttctgacaattcgggatgtatatcagttagggcaacttgtttacttgaattggcgcttgaattagtgaccttaaaatatgtgaattaatgtcgcaccacataaagtccattttttaaatcgtttcttccaccattttataggttcatttataaaagggtttctcaccgattctttctccaattgcgtcctttttggattaactggcaattgcttttctcggcttatcaacggctcgccaattattgacaacttgtttaattcttgtgttattggtacatctttatttgacatatttttttcttgatcagcttttgttagcgatgcttttttgtccgaaatttccttatccttaggctctaaggcttctttcacattttcatattcttcatttatttccggtaagggaatgttcaaatcgaactgtaaagggtttttctcctttatattatctggtcgaacattggtgttttccatattttctttagtactaaaaataagtattgaaatttatttaaggaaaagaaaaatgggaaaccataaaatgaaaatataaatagatccaaagttaaaatgatatttaaaggttaaaattggtgttagtcggaaccgggaattttggaaaaacgaggtctaaccggagctaaattt

SEQ ID NO: 35558 - DNA, 1056 bp, Heterodera glycines
  unsure (1)..(1056): unsure at all n locations
tcgcatgtgtctaagcctagaaaaatgtctaagtaaaatcgtattacgctaaaaagcttctcaaacaattttagcgttccaattccttctacaatcgcctttatacatcncattatgagcgctaaaattatcagagtgccgaaaatcgcatgtgatctaagcctagaaaaaaatgtctaagtaaaaatcgtaattacgctcaaaaagcttctcaaacaattttagcgcttccaattccttctacaatcgcctttatacatcccattatgagcgctaaaattatcagagtgccgaaaatcgcatgtgatctaagcctagaaaaaaatggtctaagtaaaaatcgtaattacgctcaaaaagcttctcaaacaattttagcgcttccaattccttctacaatcgcctttatacatcccattatgagcgctaaaattatcagagtgccgaaaatcgcatgtgatctaagcctagaaaaaaatggtcaagtaaaaatcgtaattacgctcaaaaagcttctcaaacaattttaacgcttccaattccttctacaatcgcctttatacatcccattatgagcgctaaaattatcagagtgccgaaaatcgcatgtgatctaagcctagcaaaaaatggtgtaagtaaaaatcgtaattacgctcaaaaagcttctcaaacaattttagcgcttccaattccttctacaatcgcctttatacatcccattatgagcgctaaaattatcagagtgccgaaaatcgcatgtgatctaagcctagaaaaaaatggtctaagtaaaaatcgtaattacgctcaaaaagcttctcaaacaattttagcgcttccaattccttctacaatcgcctttatacatcccattatgagcgctaaaattatcagagtgccgaaaatcgcatgtgatctaagcctagcaaaaaatggtctaagtaaaaatcgtaattacgctcaaaaagcttctcaacaatttttagcgcttccaatttccttcctacaatccgcctttattacatccccattatgaagcgctaaaaattatca

SEQ ID NO: 35559 - DNA, 1665 bp, Heterodera glycines
atttgttccaaagccaaaggccaacggcggtcaaatcaagaccttgaatgttcaaatgtaacgtcattcaggaatcaagggaatttttggcgatcctgttttcattcaactcaaccattcacaatggaaagtgggagttagagcttgccagcggtgctgatgttacagtgatggacgagatcgactggaaaaacattggaaaccaaaaattggaaccatcccgaggattggttgcctatggcggaaaatccatttgtggcattttgggaaaggcaaaggtgaaagtgacgcacgaaggcagaacaattgagtccaatattcatgtcataagtggtaagcacaaaaatttgtgcggtcgcgatttgatcatgggactgaaaattgatttgaaccgagctttcggaatttcgacaattcgtgccgtggagatcaaacaggaattggacgcatgtttgggtcaatatccggaagtgttccaggacggtgtcggacgatgcaaaaagatggcgtcactgaagtttaaagagggatgccaaccgaagcgatgcaagccgagacctgtgccattttcacttcgcaatgaagttgaaaaggttttggaccaatggcagtcggagaaaatcatcgagccagtggcaaccagtgaatgggccactccgctggtcattgtgccaaaggcaaatggcaagcttcgactgtgctttgactacaaagtcactgtaaatccatgcttggatgtgcatcaataccctcttccacgccccgaggagctgtttagcatcttgaatggaggcgaaaaattcacgaaaatcgatttgaaggacgcatatttacaacttttgcttgacgaaaaggccaaaagttgtctcacaatttgcacgcacaaaggacttttccacttcgctcgattgccattcggagttgcttcggcacccgcaatttttcagcaagtaatggaagaagttctgcagggcattgatggcgtggcggtttatctggatgatattctgatcacagcagccactgatcagcaacacatcaaaagaatcgatcaggttcttaaacggttgtctgagaatggtcttcaagtaaagcatgaaaaatgtgagttcctcaaaccggaaatcgaatatttgggacacattgtggacaaaaaaggtttacatgcgtcacctggcaaaattgaggcaattttgaaaatgccggagccgaaaaatctgaaagaattgcagtcatttctgggaatggtgaactactatggaaaatttgtggcatccctggcaacgctttcagaaccgctcaatgaattgaggcgaaatgatgccaaatggacatggacaaagagccaacaaaaggcattcgatgtgatcaaaaaggttttgacatcaaccaaagttttggtccattatgacccgaaaaaaccactttttctggccgcggacgcatccgactatggagttggggcggtcatttttcataaagatgaaaaaggaagagttggtgtgattgcgtatgccttccgaacgctaaattcttcggagcgcaattactcgcagattgaaaaagaagcgagggcaatcattttcggagtcgacaaattcaagcagtacttgtacggtcgaaagttcgtacttcaaaccgaccacgagccactaaaaaagattt

SEQ ID NO: 35560 - DNA, 925 bp, Heterodera glycines
ttttcattttaattttttataaaatttttcttggaacttttgtgctaattacattattttatttatttgcccttgcaaaaatccctaagaaaatatatatttttaaattttttacaaaaattaagatttaaaattttcagggtaattttaatttatttttttcggaagaaataatctaaaaatctttacgatggcttttcaattcgattttttttaattaagatttaactgcgttttttattttatggaaacaattattttttatttgtctaaagatagaatttcaaatacctattttttgtgcaaatatttacaaatgttttaaccccccccccctatttgtactcccctcaaaaactcatagaattcctgtaatagcgttggttggatttccctttttcccattgattgaaattttgaattgattaaaattaaatgagtcattcatcccgtcgttcaccgccccttccccccaatttctaaaacccacaaatgcaattccttgaagtaaatgttagattacttggaattttttgggctaattaaataaatttatttatttgccctcacaaaaacccttaagaaaaataattattttttaaattttgtgttcttggaattattccaaaattaagattttagagtttcagggcaaatttttaatttatttttgaattaaaaaaattttaaaagggctttacattttatttttttttaattttaatttttttttaaatttattttatggaaacaaatatttaaattaaggagagaatttcaaaattgattttttgtattttttggaattattccaaaaattaagattttaaagggctaatttttctttatttttgaattaaaaaaattataaaagggctttacattttttttaattttaattttttttcttttatttattttatgg

SEQ ID NO: 35561 - DNA, 825 bp, Heterodera glycines
  unsure (1)..(825): unsure at all n locations
ctcgttgtgaaagtgtaccctaaacaatggaggagaccaattcaaattcttgaaaatcaacgaatgattcattaattaaacgaagtattattacaaaaaaaagttggattcgctggttgaattcaaagagcttttgcctacttaatttatttactattttttaattttggatttgtaaaaaagtcatttaaatttggcgaaacgtattttattgataaatttgaacggaaatcaaacacccgcagcgttttaagagatttttagacaaaagtcagatcaggtttgaaaccgaaactttataaatattaaaaataaagaaatcaatgatatatttccatttaagcggatggtaacagttaattggccaataccaaagcagagatcacaattccagaactaaaagatatgatcactcagtcaaagctcatccaattgtttcgtccaatccaacttttgcccctccgcacggcgtcacttgtgccaacgaatttcaagggtcataatttcactagagcccggaattttataaaatacaagagaaaaagctgggtcaatgatagtgcggggatggggggaaacaagcgaaaaatctccgttttcggggataactgttccaatcggtgccgatacgccttgcctccctggtgcgttgtcggcaacataagttttaccaattgccgtgcttctttgcgtccgcttctgttccaacttcgcacggcaagtgaaacgtggcccagaaaatgcaaaagcatcgattgatggacgaggagcacaaagaatggaccagcgaagaatgtgtgcccggcgggggggngggggggggga

SEQ ID NO: 35562 - DNA, 972 bp, Heterodera glycines
ttttgggcaatttaatttaaaaaagctaagaaaatccgggaaccaattttataacgtggggacttaaaagcattgctaagcaaaatttaaatcgagaataattttcgtgtatattttcatttcaatttcaaaaacaaacaattgatacaattttggtaagaaatagtgcataaagaagggggggggggggtagacgaaaagagaaattttataaaataacgcaccccatctgatattcccctttttctgttccacaactcgccaaacgcgactgttctcgttgacaagaatttgtccaattaaggtacttggactttccacagaaatgtggtaaaaaattttggaactgtccggcctcacggttggacttaaaagaatcgtgaagcgaaattaaaaatcttcagagaagatttctttgttttgaatttttggcaatttaatttaaaaaagctaagaaaatccggaaccaattttataacggtgggacttaaaagcattgttaagcaaaatttaaatcgagaataattttcgtgtaattttcatttcaatttcaaaaacaaacaattgatacaattttggtaagaaatagtgcataaagaagggggggggggtagacgaaaagagaaattttataaaataacgcaccccatctgatattcccctttttctgttccacaactcgccaaacgcgactgttctcgttgacaagaatttgtccaattaaggtacttggactttccacagaaatgtggtacaaaattttggaactgtccgacctcacggttggacttaaaagaatcgtgaagcgaaattaaaaatcttcagagaagatttctttgttttgaatttttggcaatttaatttaaaaaagctaagaaaatccggaaccaattttataacggtgggacttaaaagcattgttaagcaaaatataaatcgagaataattttcgtgtatattttcatttcaatt

SEQ ID NO: 35563 - DNA, 1176 bp, Heterodera glycines
  unsure (1)..(1176): unsure at all n locations
aaattgcatttaattatttcatttacaatttgccgtttctgtttcattggattcaattaatgggttcttttcttcaaaatttaacggtgtttgatttggttgctcatcagcagatggagaaccctaaaattgtcttcaaatgttttacaattttgtgcaatacctcattaaaattgtcatttggcactgattgtgcataaaacaaaatgaaacaataagaaaaaataaataatttgaatttcattcttaaacaaaaatttaattttttgttgcagaatttctttaataaaaaaaataaatatattttttaataaaataaaatttaatttaataaaatttttttagtttttcctgaattcattgcaaaaaataaaatatatataataaaaatgtacaattagataatatatttattcgaaaaaataacaaaaaaatatattaaagctaatccaattttgtccaataaatcgacaacgtcaatattttgtttgtatagggagtccaatttttccatttttcattagcgattcgatttttatttaaaaaaatctgcaatagaagtgacaaatgtatgtaaattaactttaaaaatatttttaaaaaggccaaatttcgtcggcaaatttttacattttccatttttcacaacaaggtaaaaattattccaattttttctcaaaatatttcattttgcataattaatttaaatataaatattttttaaacaatttctaattaataatttattaattttggttttatttaatttttattttcacataaaagtttaatttaaatttttaatttgcctataaatttttatgagacttcatttcttttattagtcgaatttcttctttatgattatggattatgaattttttctttaaaaattatattactaaatcctttattttatttgtttaatttttcacaaaaaaaaaatttcgtgaccaattaaatatgaatttcaaaaaacgtaaatatgtttaaatattttgcaataacaatcaaattgtttatttccacaagcgaacacataacacaaatgtgaaaaaagcgggcggaaagcgagggcgacaacgacgacgacatcaaaaaattggggaaaaattttaataaattnttgaaatttttttttcatttttttggcggcatcaaattcatcatggtcag

SEQ ID NO: 35564 - DNA, 731 bp, Heterodera glycines
atttttaaaggaaacaaataaatcttatttctatcttcttattatttatttagcacttaaaaagtctgtaattaaactaataggttatttttaatatgaaataatatcaaatattttattttttgtattattgtgttaatactatttgttagatagagaatagaattttattttcaaaatattaattattgaaatttaaattaatttaaaattgaattttttgaatatcttaaaaattgtataatctaactgttttgataaatcatacattaaaattctaaataaattattaaatttactttcaatactcaaaattcatttagataatcatcttgttagtttttaatttgttcaatttgcctgttttttgtgacacttgtaaacatatggctaaattacttttttgtgatataattattttattatttaaagtttttgaagaataaattacaatcttgcgatcatcagagttttcgaatcgatgtgaaatttcttgaagtaataattaaaaaaaaattagcttgcttttgaacaagtgtttctttgaaattgatattaaataaataaatttatcataaattaaaagataattcaataactttttacttgaatttaaggtgtcaatagcagttcgtacaaaggcagttcgaacaaaggcgtttcgtacaatggcagttcgtacaatttgcagttcgtacaataggcagttcgtacaatggagtttcgtacaa

SEQ ID NO: 35565 - DNA, 866 bp, Heterodera glycines
gggaaaattatattttactttatccacctacccgagtattggttgttctggcggttaaagcgaccgcgccagttcctgttattgcgcgcccgtctgccacgaaaaggctcattccgatacccttggtccgcacggtttccttaaataataattaaataacagaaattcagtccagaataaattgcaatcgttttaaaaaatgttaattaatatttaaatctgcctaatatgtgttataaataggaccaaaatcgtcaagttccgtgtcatgggactcctacataacatttttccggtttattcttgaatattaccatttattaaatatcccacaaaaatgggtaaattatctgtaaaatcatttatttttaatcggtttttaagaatttctgcccacgcgggttcctaagggtctgaattttggttgggatacatctaagactaacaatgttccaatccctgggagattagttccgacaggacccggtcccacccatttaaatttatggtatatcttaacggcataaaaaatttcaaaaaataatacggcaccaatctgaatcggaattggttggtcggggtatggctgaatcggttggttggggtacgtctcagtctcctcgttcgtggtctcaaaccgcacaagatcagatagtggtgtcaagccacctcgaccctcccggttttcgctaagccatgcgctgtaaaacttaatggttaaaataaaaataatagatatttatttaattatataaatatgtcctactcattcttataaatacaaaaataatgatccctctaaaaacctaaactccgccaagcttcgttcgagattggggcagtcaagtcggaatccgggaaatgca

SEQ ID NO: 35566 - DNA, 861 bp, Heterodera glycines
ttttcagttaaagtggtcaaaaaaagatttaaaaatgtttttgtcaacctacccatatacacgttgcatgagacatgtacacattcataagttacatattgtacatgtttttaatgcatgtacaatatgtaacccatgatgtgtacatgtgccatgcaacgtgtacacaaaggaccaagaaaaaaaaaatcattttttgaccacttcaattaaaattatgcaccaaaacatcccaaatgtgaagcggtctcttcactcttcctcatgctgaggctgtggttccaccgacggcaattctccggaccccgcattcgaattcgcaaccgccgaactgtgaccggaccccgcatgagaattgcccgacgccgagctgtgcccagccgatgtggagagagacgacgaaatcggactttggtttggcgtcacaaaaactgaaggcggcgttcctccggtctcgatctaaacattttgagaccaatgcttaatttttgcgtctattcgaataagagaaacataaaagaagatagctagattaattaagcaatttattcgttttggcattaaacaaatatattttttaaattatcgaagaccttttttaaacgatttttaatttatgaaacttaaaaagcaaagtaaaaaatttaggattgaattcacatcctgacttaatgaaatgacaaatgctcaaaataaatttaaattaatgtgaacagatttagagagaaaaccttacctctctgatggcgacccaaatcaccaatatcgcatcatgggacacttgacaaaatttgaaaaagttctcattcgagattttcagacgcagcagatcccactcctttaaataaattttaaattaag

SEQ ID NO: 35567 - DNA, 1211 bp, Heterodera glycines
gcaaatgtcttgacacgattcatattgtgtcagttgtttcaacaataaaaattttatgtccttttgcaaaaaaaaatcgaggacttgaatcatgtgataacgaaattgacttgggaacaagaaacaaaaacgaccgagacacaaaagccaatgttttggcacggcacaaattctcgagcagcatgaaacttgagccaaatcgaatcaaaatcttgtttgaataatttagatttgataaggtacataaaattcagaataataaaatttagctaatatttgaaattttacttttatttttgttcctcaaaggcacttttgcttgcatggccggcaatatggtcgggtcacagacagccgatgcccatttggacgtacaatcggcacaaattgatcagttggacaccacactgaatgaccaaacattgcgcagcattgttgatgaagcatcgcaaaacatagacaggtattaaatcaattttaaaaataattattcactttaagggataaaataattcttaatttaagggattttttagcttagttaaagattattccaacataatccattaagagaatttttttttaaatttgggccaatttcttagagaattgcgtaatttgacttacgcttgctaattgcgtttggtttatttcattattctcatttgtcagggcaatttcgaagacaaatgaagagctgaaaataagcaatccgcaagacttgctgaaacattttaaatttgttggcaaacggccgacgagccaactgagccgagcgcgtgaaatttatgaggagagtttgcgcttgattgagaagcatgtcgaactcggtgagtcaccgcctccctttaaatgctttaccaaaatatttttgaaaaaggatattttatattcttaaatgcttgttaacggttcaattaatctatccaattcacattgaattgcatgtaataataacacacagtagcatatttttaaataatacggtatcagatgctttctgttttttcgaatcacttacagtagtacatttaaaaaaatacggtaccacttgttgatttttttttcttctcgaagatcggaatatttttaggaccaatccgatgagttcaaaatttatcaatggacccttttgtttttttatctttgcataaatgtttaggtattaacctacgcccattggacatgccaaacgagaacatttcatttga

SEQ ID NO: 35568 - DNA, 913 bp, Heterodera glycines
tatgcaaattgggctacccaattgaggaaatactcgacccttggtctatgagcagccggacactgtgctgacattgcccgtcactggtactgtttgttttttttttttggttttttacgagggtagagacaaacccatcgacagggtggattttccaaaaaatgctcaaataataggatttgtaatgatcaatcagaaatggtttgatttaatgcaactgcccaaaaattagtccaaaaaatggccgggttggaaaatctcggagaattcctcaaaagtttttagcctggttgtttctacccaagctttggcattttcttgcctagacacattttgttatttagaattcaccatggaatatatcaaaaaaagtcgggcttgcttcgcccactttttcagcgtaccgccggaacagttgggaattaggtttcctgttttctatttttttacttttcgcttaaaattttgttatagaatgccggacccggagcaattcggcgttttggatgtgctcggtgtgttctgttatttgcatttcatgcctttaccctctcaaaatgccacagaatggtggcatttggaactgatttggacgaagggacgggtgccattggaattggcggagtgccaaacggaggacgaaaatgggggacgaatgtgctcaaaagagtcatggcgtttatctagtgcatgtctattttcagcaagaaaacaatttgctcttacagtatgctactttctcttccccaactgtctctaccgtaccccctttcagtccgccctctcttcgtttctcacccttcgtcattttcggtgatctctccgttttgcctgaccttctccgtcattctgctggtcggacttcggacctttcattcgttggctgtcagcgacgaattgccatcgatggaat

SEQ ID NO: 35569 - DNA, 507 bp, Heterodera glycines
acgagctggcgccgaaagggggcgccgaaacgcgaccgtcgaaacgcgagcgccgaaacacgagcgccgaaacgcgtgggtcccgtttccatcccaacccaaccacaacgaacacaagagaaaatagaaaaagagacatcaaagtttagaccaaacatttgggatttcgaatcaaatattttttgtcttatttaaaatcaataaaacagaaaataaaacaaattggtcattttatttatgctcgacaattgaaggtatgggctcgcatgcatggaaagtttcggagtgatcgtagcacgtttaaagtcgctgaatttgtccgaacttgagctgagtgcattgaacggaattcagttttggaattacaaactattaagaagtagcctgtcaactattaagaaaataattaaatttttaaagtagcctgtcaactattaagaaaataattaaatttttaaagtagcctgtcaactattaagaaaataattaaatttttaaagtagcctt

SEQ ID NO: 35570 - DNA, 918 bp, Heterodera glycines
  unsure (1)..(918): unsure at all n locations
aaggaaagagagtcgatttaattatttgtttttcncagcggatactcatgaaaagggccgagtgaaaagtcatttctgatccatccactcacattattgaacaaagcagaaactccgcaaaaaactgccacagcctccgccaactgagcaccacgcgccaatcgtccgccccacaatcgaccaaatccaactgatcaaaagcaaacgaagagcatggatttggaaaagaaaaagcgaaacatttggcaaaatgggcaattgaagcgaaattcggaacaattggcaatttaaggcaaaaacaaaggaaagtcggggaacaattagcaagcacaatgccattgataagtaatgcttgactattcggcaaccaatgccgttcttttttatttcaatgcttttccttccatttgccattttccttctcatatttttcattttccattctgtcccacctgaatttcgttcagatggaaatggacctaaacaaagagaaaagtgaaaattaaaattaaatttaaaataaaatttaactgctcacaatttcgacaagcaaagccaaagtggagaaaaggagaagcgaacggatgagcaaagaaacgaagtgaccctaaggcggggaatgccaaaattggaattccttcgcctttcggcggacggaggaaaaccttgtgaatggaaaggaactgttgggcacacatttccgtgtcaattaccatcagcaaaatgccgaccattgcgaggaaaaggcacctgaaaaggccaaagaaaaggaaagtggggaaaggcacggcacaagcagtggataaaccaatcaatcaatcaataaactaatcaatcaatgaccaatcaatcaataataatcaatcaaaaaacattaaaacacctgtccgcgatacgcacccgatcagccaatcgctg

SEQ ID NO: 35571 - DNA, 1017 bp, Heterodera glycines
  unsure (1)..(1017): unsure at all n locations
caaattttcgcctgtcggcgtttggtccatcncacatttcgttgatgctgaaatgcggtacaatcccatttcgtcaaaagtgactccattcgcttcgtatgcatcaatttcgacggccgattcactgcagcggcgctgtaagcacgttccgcctttccactttactttgcactcgagtgctgaaattcggcgtttttctggccattcttcggtagctaacgaacattttttgaaaaatgtccgtatttgctctcgtccttcatttccatttagttcaggaagtttttccagagtgaggagaaattccaaagaacaaatttgtttttgttctttctcactttcgcatccaccattttgtaatgaaaccaaaaagttgcgattgtctttccaattttcctcggccgaaattttgtgttgacgaagaaattgcatgttgaaatgggattttcgtttcccggttttgaagtcagtttttagacggagttaatttaccgaactgacaaattttcgtgatttgtttcacactttacggcttttccttttcgaagttgcgttttttttatatgcagagggatttagttttctcgttttactgatttcgtggccacaaccaatgaagaaacttcattagggatttgtttcccttttccagagaccaggatttgcttttcctgttacaaattgcagaaggatttacttttccttttaaaatcgttgctcgtccaaatttgtcgtttattgccactgctgagccacctttgtacaggagcgccacgtcgtaggaaaaagaatagtccaatgggaaaggggaattgtatcccaaatccaaaaccaaatcgccgtctcttttcactgctttcttttacttccaattaataaaacaacacacagcaatcaattacaaatttaggaagagcacatatatcacacataccccaaacaaaacaaaataaaataaagggtcacaaaaactaaaacaaaacgccaaataattcaaatcaacaatgatatgacagg

SEQ ID NO: 35572 - DNA, 908 bp, Heterodera glycines
gctttcttttcttatgcttttcccatttgccaggtcattctctccctccccctcgtctccccccgtccttccccaaagttttgttgtcgtatgttttttttgtccacaatttgtttgacctcgtctctccccccccgcccccctacacagataactcattaacggcgcacaaaaagcatcggcacatcatcaaaattgggctgggaattgcttttacacctcaaattggaacaaattcgcagctcctcccccccattttcacaataaatgtaaaaacatttatgggggcaaatcaaagagaaggtcaaaattaatttaattaaattgaaaaggtccaagctgatcaacaacaaaaaatgatgaagaaatgcgaaattcttttcaattttaaacattttggccatattttacaattttcggctgattgatcactgatcgctcccttaagcaaacaattgcactcggttgttctctcgatcggccaccaccaattgatgttgcttctgatgcctcaacagacaaatgccctcgacgcctttgaattggcccgaggcggtgccccaagtgccaaaaacgcggagacaaacgccggagggggagaagaattggacacgattattgccagaatcggcaacgataattcgacccttaggggggggggggaagcgacggacaataagcagacaaaaacaatgccgacaaaagcaaattatcgtgttaattaatggtacatcatccgtttgtattctttttttggctcctttttttaaattttctatttttatttaaaaataccgtaaaaaatgaatgctattggggttatcgatgtttttagtcccaatctaacttaagtccataaaaacatgaaagccataaaaaatacaaaattctcgggttttcgacttttt

SEQ ID NO: 35573 - DNA, 802 bp, Heterodera glycines
caacatttccctcagaatcgaccaaaacaatgccaattctctccactggttctttgagccaccaaatgcttcttcctctttatctaaatattatttttttaatttcatgctgttatgccatacaaaaccgaatccaattgaattatcgagttgttttgttggtgacaaaaagtcggctccgtccgcttccctccaattcggtttgtatgggccgcactgcgagtgggggtcgggttgaacattctgaacatagccaaataagcagtttttaagggttattttaacagtgaaatattacaacaacaaaaaaaagattaccctccaaaaattcggttggcatttcgcttttagccaatttcgatgcatttccaacgattcttcggtggacaacgattcctcttcaaagcccattgccagtgcaaattctgttgctgtttgttttgtgctttttcctcctcaatttgcccaagggaaacctttctctccggcaagcaaagaatgttcagtgtaattcatcacagcccacgcgaccttggcggcgctttttattcgactaaattaattaatactaattaataatgcgtaaacagacacggggtacttttcggttttgtatacacacctcaaaattttcaaaaatatgccaacaaaagatgcactgagttttttggtggcacaaaaggaataatttgtcccaagaaaatctgaggctttttgccattttaagggtaaaatattattacctttatgcgatctatttcacttgaacatatcttaataattttgatgtatgaatacaaaa

SEQ ID NO: 35574 - DNA, 100 bp, Heterodera glycines
cccttcccccggactgatcactcccttcccccggactgatcagtcccttcccccggactgatcactcccttcccccggactgatcagtcccttcccccgg

SEQ ID NO: 35575 - DNA, 683 bp, Heterodera glycines
aatgtgtgaattttcacttcaacaattagaggacttcactatttaattagtgaatgaaaattgtgactcattagttgaaaagtattttattgaacaaaaaagaattgaaataaaaagaaattcgaaaaaattatttgctgatcattcgaatgatatgaacaagtatgtaatctcgcaaattctcacaataaggcgtcttttggaggacctgctattcggcgagagacattcgatagcatagccgcggcgcaattattattttatgcgattggccaatatttatcctatattttactccttctcgaccatccccgcccgcgtattcgatctagtgcgacgacctcaaggcgatcaccactcttggggaggacatttatccagggaccggattgtggcttactccggtttccccccaaatccaatcctcgttctcactcgttcccttcctcatattctgctctggacatcatcaccttcactagatttatacattcatcgatcattttatagacaattttcctctttgtaatatagaccaaatgaccaacgaaaaagactctatttggctatattttgacaaaattcacaattcttcttatgccaaatggaacattgagcttaataatcgcaaaaaccaaccttttttttgttgaaaatctgttaacaaattgcacccaaatttt

SEQ ID NO: 35576 - DNA, 1070 bp, Heterodera glycines
atgtgcatgtgtgtaatcacatgtttaaatgaaataaaatataattttttctcaaaaatttctccttcttcatcaatttcttactctagtctcgaccagtcatccattcttaccagtgcaaatttttagcggcggtaccggtactagacaaaccggtaccggtaatttcatttttgaaaaaaccggtaccggtaccggtaccggtaaaaaccggtaattttagaacataaaaatttttggacaaaattttccaaatacaaaatttttattcagttttcgcgcgagtgcctgttttttagcattagaattgttcagaagtatatgtatattgagggtgaccaagttttttttcaaattcaggataaagaacactaaaattcagatgtagacctcaaaattcagattattgcaaaacaaggggtcagcagccaattttccaattttgcgaaggggtctccggccatgtaaattaatgtaaatcaatgacctttttttgctttcaacaccgctttttacgcggcacgttttttccaagacttttgggggacaaggagggccggcggtgccgataggcgccgccgggaaaaattttgtaatttttaatgcgatttgttaacagaatttgtaaaaaaatgaccaattgattaagttttgggtttttaggatgcttaacatgaaagaaaaaagttagaatattttttaaaattaaaattttaattaaaataatggtaaagaaaatgtaaggaatattctatccaagtggggaattgaactcaggcgaaaaattatgaaaggtagaaagtttaaccactacaccacatgtgcaagtgtgtaatcccatgactaaatggaataaaatttaattttttctcaaaaatttcttcttcttcaccaatttcctactcttttctcgaccagacccccattcttaccagtgcaaatttttaccgacggtaccggtactagacaaaccggtaacggtaatttcatttttgaaaaaaccggtaccggtacgggtagcggtgccaaagaaaacaggtaattaccgaccagtaccgaaaccggtaccg

SEQ ID NO: 35577 - DNA, 1045 bp, Heterodera glycines
gtcccagtgattggaatgcaagagaattgagtcccagtgattgaaatgctggagggttgagtcccagtgatggaaatgcaagagaattgagtcccagtgattgaaatcctggagggttgagtcccagtgattgaaatgcaggagaatgagtcccggtgattggaatgcataaaaactgagtcctggtgattgaaacgcaggagaatagagtcccagtgattgaagtcttggagaattgagtcccggtgattgaaatgctggtgtgttgagtcccagtgattgaaatgcaagagaattgagtcccagtgattgaaatgctggagggttgagtcccagtgattgaaatgcaggagaattgagtcccagtgattgaaatgctggagggttgagtcccagtgattgaaatgcaggagaattgagtccctgtgattgaaatgcataaaaactgagtcccagtgattgaagtcctggagaattgagtcccggtgattgaaatgctggtgtgttgagtcccagtgattgaaatgcaggagaattgagtcccagtgattggaatgccgaaggaccaggtgaggttaggtcccagtgattggaatgcaagagaattgagtcccagtgattgaaatgctggagggttgagtcccagtgattgaaatgcaagagaattgagtcccagtgattgaaatgctggagggttgagtcccagtgattgaaatgcaggagaatgagtcccggtgattggaatgcataaaaactgagtccgggtgattgaaacgcaggagaatagagtcccagtgattgaagtcttggagaattgagtcccggtgattgaaatgctggtgtgttgagtcccagtgattgaaatgctggagggttgagtcccagtgattgaaatgcaggagaattgagtcccagtgattgaaatgctggagggttgagtcccagtgattgaaatgcaggagaattgagtccctgtgattgaaatgcataagaactgagtcccagtgattgaaatcctgaagaattgagtcccggtgattgaaat

SEQ ID NO: 35578 - DNA, 1357 bp, Heterodera glycines
ttttgttttcttcataattcatttccttcgaatagcaactggtgacttgaccaaatacttggactgccttatcatttctcactttcatctcggtaagtgcattttttcaaaaggaaataggtaataccaaaatgttgctgaggatgcatattagaattagaagtagagtttggggtaatagtgtcgggtcccttttttgaaaaaatttcgtgtttttcgagagtcattttgggagttttaagggtcggaaaatccgaatcagacttccattgcaaagttttttgtttcctatagggtgggaattgatgggggaggggggtatggcgttacgtacgtatacctttcctggatttgtccctccccttcgttgatttgtttggttggccgatggtatggtacttattgtcagacgatcctcccttcacacataaagaaataagcagtcacattaatctgtctcattctttccatatcactgtggtgctcttccctacatgacggaaatgatcggctatcagggcccgatttacatgacctatccgaccaaggccattgtgcccgttttgctagtatgtttattatagcattttgcaatgattttggatttgcattcgtattttaggaagattttcgaaaggtggtcactgagcatcgcggagagacgaattttttcacttcggcgcacgtaaaagcatgcatgaaaaaggtgaattttacgttcagtttttgattcccaaattctttgtctttttcaggtcattgctgtgaatttgcacgaaatcattcaggtggacgaacaactgaccatccaggccttttacgccggacatgtgctgggggcagcgatgttcatggtcaaagtgggcgaggaatcggtagaatgaataaaaccatttgcaataaacgatgaaatgtttttcggtattttacaccggcgacttcaacatgacgccagacagacatctcggcgccgccaaagtgccccccggcctttgtcccaatgtgctaatcactgaaaccacttatgcaacgacaattcgagactcaaaacgggccagggaaagggactttctgaacaaagtgcacgaaacgatccaagggggaggaaaggtgaatgccaattttacgtgttgagacaaaaacgagtggtgcacaatatataacatacaattaattgtcttccacttattttcttcccgtttcaggttctaatccccgtctttgcgcttggtcgtgcccaggaattgtgcattttgctcgagtcgtactgggaacgtttggacctgaaagtgcccatttacttttcccatgggctcgcctctcgggcaactgaggttgttttctatttaagcattta

SEQ ID NO: 35579 - DNA, 780 bp, Heterodera glycines
cgaaaaagcgtatgactaatcaccccccccccccctccgaatttcttcgattccccccccccccccggcgatggcttctctcccccccccccggccattctctgccgtcccaccctttcatcgcatgactcactggacaaacactgctccgtcaacagagcacgcagcacaagcacaggtcgaattcctccgcagcattttgctggtgattgtcaaaaaaccctttacaaattccttggcttacataaaaatttccttacgcaatttgtattttcgacattttgaaaaataattaattcatttaatattaattctgaatacatatttcaattcatccatcccctttccgatcatctgtttcgttttgtgtcttttctccggaagggttctcttttcacaacaatttttcaagaacgctaactgtccaaaagctttgatcaaaatgtttccgatttcccgacaatttaaaattgggccaaatcccaccgattcccaacaaatcaatcgctttctttccgccagtcgtccgccccgccccgtctctctctccttttatgagcgatttgcttttgtcgcaagtgtggacattttcccccacttttccctcccctccgtctgtcccttttccattttccccccagggggtgtccccgcattgcccctcaaaatccaattggaaatacgttgaagaaattgtacaaatcgggcggggggggggggcgacggggagagtgggggtcatggagtgagtggcaaaaaggtggagatctgactaccaag

SEQ ID NO: 35580 - DNA, 1111 bp, Heterodera glycines
ctcggcttaagaagaatccgatccgctcggcttcatcgactatcgcgcatttggcgtctgcggaatgggcgaaggcgctttggaatggcatttgggggagagatttttggcggcgatggacgacattcaaaacaacaacggcaaatgtgatgccaaacatgaacagccacgtgcttgccaattccggtaaacaaacaaaaatttggtgccgtaaaaatgggtttcattcttctcagatatttcgacggcatttctggcactgtccgggcacacagtccgccactgcttgtgtaccgtaacgcacatttggccattacaggtgatgactggacacaatttgactaattaggctctttcatcagaaaatttcttgaggagattcggatgaatttcgagactctcggacggggcatttgtgggatcatttaattaggctatgccatttgaacccctcacatatttctccggaattttagccctttcgtgccaccctcagctccattcgtctcagttttacgtcaaattgaccacttcgtccaattgctgccattatcggaccagcagttcaccaattgccgattggccatcacttgtcagttgatcagttagcaataagtgatcactgcggtgatcagagtacttttgacccaattagaatttcctcctccccgtcgaccggtcgagcgaaattcgcattcgcgtcaaagagcgacgatggaacggtgccaaattggtgggcgaagcaaatgtgccaatggtagtttctaaaaattatgaaaagcacattgtaaatgccgaaaattcgcagatggatttgctggacggtgccgacaaagggtcagtggagcggcattttaaacaaaattgtcagtctaattacctatgaatttgtgcctcccctctctctttcccctgctgctccctcagtgtcggcacttctcctccctcacactctctctacggtgtcctctcaaaggaccggaggcccgcggtgccgataggcgccgccggggaaattttttgcaaattttactccgatttcttagcaaactttgcccaaaaaatgaccaagttgctctataaaacgatatgaaattctgaaattttcagt

SEQ ID NO: 35581 - DNA, 765 bp, Heterodera glycines
caacttggcctcgaaattgcactggtcatccgccgctttgactgcatcgtcgacgaacatttcaaaacacgcaaatggagattggagacgcaattgctaattcaatgggaaattgaagaaaatggcaccaagcaaatgaaaattgtcaattccgctgggaaagtaatgccaattccgcaaaaagcgttgctgaacaaagtcatcggattcggtgacattcagatcatataaacacttgatcagattggattgattttcaaccacattttctgcttttcacagtttgtgcaacaaatttggacatcactacggacaacttgcgcattttggaatttgtttcgctcaacatttggccaatgctccgcgactccgttcgtgtgatgcttttgaacaccatcgtttttcgccgtttacgtcaattggtcccgtcactgctcaatgattgtccatcacttcgcgggtgtcttgtttgatgatgatattctcctcgcttttccgcccaatgaaagtgccaatgcgtcggatggacaagcggtggccaaattccgattgactccgttgtgccatttgagctgatcaaccaaatgacttgagaaaaatttacgatgtttgcctcacccgttgtccaattgcatgggattaggctttacgggccaggtcgttttcgtacgatcgttttcgtacgggggtcgttttcgtacgaccgttttcgtacgggggtcgttttcgtacgaccgttttcgtacggaggtcgttttcgtacga

SEQ ID NO: 35582 - DNA, 849 bp, Heterodera glycines
ctaaaataccccttaggacatgtttttgaaagatttttggtgaaaaaatttttccactcaaaaaccatgtactcccccctttggtcgcaaattgcgaaatcacttttaattttataacttttttcgaaaaagtgataaaaatatgatatgaaatttataaaatagagaaaaaaatcgcggattttttcattattttaatttgtgaaaatacgttttcagaaccgagttctgaatttttttctgcaaattcgaaaatttccagaatttctggaataacttttttaattttacagatagaaattccaattaaagtccataaaatcgtccttatttttctcaatttttcttgctttattctatgaaaattggacaagcctaagtttagttatgatttttcaaaaattacctcaaattctcgaggcccaaacaatgaataattttcaaaattttttaaaaaattccaaaaattccgaaacaaaaaacaaaggtcatattcgtgctcagcacctcaaaataccccagaaaaaaatttttcacccccattttggcccaccaaaaaaaatttgaaaatttctagggggcctagctcgaaaatttttgaaaatttcccttcatatagtataccattcgatagcatttaaaatgctctacaaaaaagatctaagacaatttttggctaaaaccaacccctgacgagttatgggcccgggactcaaatgtcccgcttaggccaaaaaaattttctatttccgggaaaaaatcgaaaattttctaaaaacatcaccaatcgatagagctcgaaaaacgatgttttggaagtggtctccgttttccccggaaaaatcgtta

SEQ ID NO: 35583 - DNA, 714 bp, Heterodera glycines
aaaaaattttgtttttatgttttaaagcctcaatattttatttttaacttctaagaattaatttcactggtcaaaatgagatgttggtctcttaagtgattaaaatgtggtccagacaatgcgtcagtagttgattcttaatatttcaacttacttcatacttctattaattgatcatctcgagaaattatcatatttcataatttttataaaataacccaaattacttaaattaatttttacatcattttaaataaatctgggtgttttaaaaaataaatttgcttatagattagttactgacggattgtccacaacttttctttcccaaagagtttgggaataatcttatataaatcttgttctaatgttcagttgggataggattattagggcccaaagcaattccaaggcctaaaaatgccggggatctgatgcctaaagcggaaattcgtgcagctcgtgttcagcatttatataatcttttaattttgaaattgtaaaataaatttggttaacgactaagcatatctcaaaaaatttaaattgtttcttttaatttggaaaataaaaaaaacatactcgggagtagttatgagtacattttttgccctaaaattgccccaaccccgtacaccccaccatgcacccgcgaatcatcgagagaaactccccacagggctggtgaaaaaagttgaaaaaagtggtgaaaaa

SEQ ID NO: 35584 - DNA, 999 bp, Heterodera glycines
ttagtgaaaattcgatcactcatattctttttgctaattgagcagaagcgtaacaaactttgcagggatactccccggtaaaggactaacttacactgaaatgagcgccgagctagctggctcaaaaaaattttcgaaaatctgagtctttcgtttttatttattttttgcaaaattaattcttaaatattttttcagaaagggttctgaaacgcaccaaattttatttacatgttagtttaggcactctgatgctttttctatcaaaaagggagatgaataaaatttttaaaaatttttaattcctttttaaacaggccaaaaagtttaggcttaacttttttttcagaaactgatcagaagcgcaccaaactttgcagggatactgaaaggaagagaaataacctattttaaatattatctagtcagttcatttaaataatttttatccaaaaaatttttttttgggttttcggggcagtccccctgaaccgatgcgcccagatttatggggagaccgaatccttcgggaatagcttccctatagtctgtactttaattctgcgttggatttttgctccccataaatgtttgagtaccccaaacggacacttgaaaaaatcgatttttttgttttcggggcagtccccccgaaccgatgcgcccagatttatggggagaccgaatccttcgggaatagcttccctatagtctgtactttaattctgcgttggatttttgctccccataaatgtttgagtaccccaaacggacacttgaaaaaatcgatttttttgttttcggggcagtccccccgaaccgatgcgcccagatttatggggagaccgaatccttcgggaatagcttccctataccctgtactttaattctgcgttggatttttgctccccataattgtttgagtaccccaacggacacttgaaaaatcgatttttttgtttcggggcagtccccccaaccgatgcgccagatttatgg

SEQ ID NO: 35585 - DNA, 1071 bp, Heterodera glycines
  unsure (1)..(1071): unsure at all n locations
aagaaagtggcggagtgtgccgcagcataaaaaacgccggcggcgtcgtcgccgtctccggcggcgcatttattaattgatcaactaattagtcgtctgctcctccccctccctcgctgctaccgtcgtgctcattaaagttctcctcattcttctcgtgctgatcacacccatttcacatgaatgctattgatgatatgatgatgtctaattggtcgcacaaaaataattctttgtgcggtccaaaaattggccaatttggggtgcttttcacgtgaaataattccaaccccccctaattttgaaggagcaaaaagcgggaggatgaggaggaggagatgattcttacacaaaattttacccatcacactaattcattcattcattcattcattcattggttgtcgtcgttgtgatgtgatgatgacagaaaatttgtgtgtatgtgattaggggagagtttttggagctgattattgtggccgcgattggtttattcacattcatcgtttttgctactcttttgtgctgaactcgcaaatttcgggggtatggccataaatgtacacaaacaaataattaattaattgcaaataaatacacaaatgaacggggaagggaaagtgttgtgttaatggggtgcttttactgttgttgttttcgttgacgatcaccagagagagagagcatcgcgggttcgttcatccgttgcgaaaacatctcgatcactttaaattcaattaatctgactttacgccaacccatcacatggtgactttttaggtcacaaaattactaaaaaataattattttaaataggagttttgcgtattaattaatgggttattaattgatcttttcatgagtcaattactaattactttaagtataacaacgcgctttggaatgcttaagtaaaacgatttcttctccggcgccttttttgtctccccctcccgctttgttnnttttccttcccccttcttttgttaaggaccagcaggaggaagggagaaagnntcnttccttttaaggaactaacttattcgaaatttggcccaaaatcctcaa

SEQ ID NO: 35586 - DNA, 763 bp, Heterodera glycines
gaagggagtcaaacaccctattagttcttttctgtgccgagaaccggcaggcaatggatgactttcaatctgcaagaaattaaattggcaataagtggttgtaaaaaacttgtgtaaggaattattttttgaagtgaatcaaacaccctattagtgctttgctgtgccgagaaccggcaggcaatggatggctttcaatctgcaagaaattagattggcaatatgtggttgtaaaaaacttttgggtatggaattattttttgaagtgagtcaaacaccctattagtgctttgctgtgccgagaaccggcaggcaatggatagctttaaatctgcaagaaattagattggcaataagtggttgtaaaaaacttttgggtaatgaattattttttgaagtgagtcaaacaccctattagtgcttttctgtgccgagaaccggcaggcaatggatggctttcaatctgcaagaaattagattggaaatatgtggttgtaaaaaacttttgggtaatgaattattttttgaagtgagtcaaacacactattagtgctttgctgtgccgagaccggcaggcaatggatggctttcaatctgcaagaaattatattggcaataagtggttgtaaaaaacttttgggtaaggaattattttttgaagtgagtcaaacaccctattagtgctttgctgtgccgagaccggcaggcaatggatggctttcaatctgcaagaaattagattggcaatatgtggttgtaaaaa

SEQ ID NO: 35587 - DNA, 1428 bp, Heterodera glycines
  unsure (1)..(1428): unsure at all n locations
aaaaacaacttgttaattaacccataagtgaagtttctcaaagttcgtacaataggcagatggttcaaaaaaattttttttttatatttcaatgaaacccagattttttctccaaaaaaattaaaatgaattttcaaagccagaaaaccctaaaaaaattcagaaaattttttaagatttttagattttttcgattttgaaatacgttctgattttttggagaacaattttaggtttctttgaaaattaaaaaaaaaactgtacgaagtgccattgtatgaacttccattgacccccccccccccccgcttcctaggtcataacttttttgaaacataaattcacaaaaatttttgaatttttacgctaataaaaaaatatatatatttagctatccaatgatagaaagaatgaaaaactaaatttttaagcgtagcaaaatatgaaaatttatactaaaaatttcatttttataattttattagacagctccgtttgagcttaccccgacttggtccattttatgaatttgggttaattcaaacatgaatttcgttataaactggccgataaattgtatcaattcgacagtttcctaaaaaaaatttatttttaaatatttaaaatatttttatataaatatatttaatacctcatgaaattcaaaaaatattttttctttatttggcatatccaaaaaaatgttcatccgtcgaagaaggcacacataaaaaaacagcaactcttttttgcccacagtttgctctagtccagttggtttctcagttattctataaaaatttttgtaattttattaattgcattttaaataataatcgcacacatatcctttttagggagacaaattctaaaaattttataaatgttatacctaaaatatgaataaaaatgcgttaagtgtcaaaaaacacgaaatgccataaaaatctaaataggcttagaattaaatgtttttttttgtataaaaaagcaaattatgtgtaccataaaacatgtaaaaaaaattcccgaacccaaaccaaaatatgtaaaaataaaatcaataaattaatgggtctgcatcgtttcggcgccagcctaagtttttggactattttttttgaaattcgacaaccttggtattattcgaaagcttatcatgtttggaagctatttccaaacaattgctttgcgcttaaacaattaacaaaaaagttataactatttaaatcaaatgtagcaagttgcgggtttttcgcggtcttggcactaattttggcatttttaccaaaaaataatatattaggaaaattaattanattaaataaattacacctacattgntattttaaacaaaatctttgtctgtgcagcacttttcttcccattttgagtgttttcgacaaaaatatctgcaaaaaatttttc

SEQ ID NO: 35588 - DNA, 1282 bp, Heterodera glycines
ccaaatcttacaaatttgaaatgtccttatttgtaagatttgtccttatttaagctctttgtccttattttcatcttattttttggattcagtgagaaatttagatttttaatgataattgaaagaaatgttttttgaagcgaattaatatgcaaaatcttgacaagattcagttaaatattcaaatttttctctcggcggtttcttattctcttaaaaaaattagctcaaaatcgtaattttgtcattttttgaacaaaatcgttaagaaatcgcattaaaaattacaaacatttttccgcggcgcctattagagcaggggtgtatctgttcttatttctaagaaatgttctgatttgtggtagtgccttattttcatttaaaagaggaaatttctgaaaaattcggctaattcctaacaaaattcattaaaaattcttaaaattcccccagcggcgcctatcggcaccgccgaactctcttccctcatccatacccaaaaatttttcggaaaaattcgccgaaaaaattgctaaaaatatgttttttttttattctaaatgcactgaaatttaccaattgcttatgtttcgacaaaattgttaaaatattaaaattgattttcggaaatgtataaatttctcatttctaagccgaaattgctcagaaaatagttggcggtgagtaatgcttgattgtgttgaataaaaatgcgattcaaagttttcgaagcgtgttttaaaaaatgtccttatttttgaccctaaaatcttatttttgaccagcgatgctcttatttcgggaaaattttcaagggtaaccctgattaatgacccctagaaaattattaaaatgaaaaatgaagaaattattgaaaaccccactaaaaaaggcaaatgcgcttttgtgtgttgtttgatgcgtgctcaacacacacatgtacttgtaggtgtatgtaataatgtgtggcgttatgttatgcatgtacataataaaaaaaagtgtggcgaatgaatgggcagcggaggggggggggagagaatgtgtgtaatgaatgaatgaatgaaatggtgttgggatggaattgtaatgggaattatgggaaatgtatggaggaggaggagaagaagatggagaagtatatactgccgccctggtgctggccaatgatttgggggggggggaaggagaagcgtggcttatatatgcgcaacaaggtcgagagagcgtatgggatggagagagagagagagagcagagattagaggagaatggagttaaa

SEQ ID NO: 35589 - DNA, 633 bp, Heterodera glycines
attagtgatgtctcgagaccaaaaatttcccgagaccgagactcgaccccgagaccgaaaaccccgagaccgagacccaaaaaacccgagacttttttcaaaaaattttcctatttgcttaaaaatcgtttaaaattttttttgactccttttttaactaatttttggttttatttttattttgattcaatttggtacaatatttatcatttcaaaaacgcacaaaacaaaaaattagttagtttttttcgcggtttttgagtcaatttaaaaaataaagggtattttggagctccggcggtgccgataggcgccgccagggaaaatttttgaaattttcagtgcactttgtgaacaaatttagtccaaaaatgacaatattttatgattttaattgttaaaaattgattaaattcccttgaaaaaggaataattttgaaaaattagaagaaaaaattactcttggaggggtactgatccaacgcaaaaatgaagaacataaccaagagcacaacccactagaccatgcacattactaagggtatgaagcaaaaagttaccaaaagtatatttatttctaactttacaaaagccaatcattatggggggtaaaaaagtctcggtctcgaaagt

SEQ ID NO: 35590 - DNA, 1032 bp, Heterodera glycines
aaaaaatgttttttttttttttttggggggcactcccccccgacccaggttccccccaattttgggggggagccgaaatctttgggggaaaacttcccctaaacccctttcttttttttggggggggttttttcccccccaaaatttttgggaccccccaaagggcccctgaaaaaattttttttttttttttttggggccatcccccccgaccaaatgcccccaattttagggggagccgaatcctttgggaaatacttcccttataccctgtctttaatttgggggtggattttttccccccattattttttgagttccccaaacggccccttgaaaaaattgtttttttttgttttgggggcagtccccccgacccgatgcgcccagatttatggggagaccgaatccttcgggaatagcttccctatagcctgtactttaattctgcgttggatttttgctccccataattgtttgagtaccccaaacggacacttgaaaaaatcgatttttttgttttcggggcagtccccccgaaccgatgcgcccagatttatggggagaccgaatccttcgggagtagcttccctatagcctgtactttaattctgcgttggatttttgctccccataattgtttgagtaccccaaacggacacttgaaaaaatcgattttttttgttttcggggcagtccccccgaaccgatgcgcccagatttatggggagaccgaatccttccggaatagcttccctatagcctgtactttaattctgcgttggatttttgctccccataattgtttgagtaccccaaacggacacttgaaaaaatcgatttttttgtttcataaatatttttttcagaaagggttctgaaacgcaccaaattttatttacatgttagtttaggcactctgatgctttttctatcaaaaagggagatgaagaaatttttaaaaatttttaattcctttttaaacacgccaaaagagtttaggcttaacttttttttcagaaacttatcaga

SEQ ID NO: 35591 - DNA, 852 bp, Heterodera glycines
  unsure (1)..(852): unsure at all n locations
tacaacatagtaataaatgagaaattcaaataataaattaatgattgcaaatccagctttataaatatctcatgcatcacttaattaatactagtaaattgaatatttggaaaatatgctcaatgaagcagtattaattttgatttttcaaccaattagacatacttttctctaataagcttaaatacgcggcacatttttttctctcaaaaaaataataaatcgaaatggatggatataagagcatattaaatattatttgtcgcttgaattaattatattgtgcaccgaccagataaaagaaaaaacaattgcctcggcatttaaaatatatttatgttctagtttataatactcgaaataagtaaaatgctcggcctcggttaggaatccaacccactcgtacacccgttcgtggtcacttctaccattgagctatcgatccacatccgtccttttttatgatcttattaaccccgctttccacgtttaaccgcttattcaacttatttcttacctaattaatttattattaaaatgtgatgacaattatgtcagatttttttaaagtgtattccacttaaacaagaatgctgttccacagtatagttttcggtacacctttgtcctatgaaatatgatgtttttccaaaatgtgctaaatattaaattttcctcattgaccttcattatatccaaaagttattaaatttaatgatgagatataagtaaactaaaaatagttcttcggttagaaatcttggtcaagcagtaaatacagctaatcaaaaagcttaagcaaaacagtgatttatatgattcgaacccggantttatttggcttttcatttt

SEQ ID NO: 35592 - DNA, 1399 bp, Heterodera glycines
gccaaaacttcgtccatcttccagtttagaccaaatgactacgagcgcatgccgatcactgaggttttgtgagagggagggatggcattttttttataagttgattaaaaaactgcccaacgaacaattcataacaaaacaaacaggaaatctaattgctttttgacactaaatgccgttttttgaaatttgattttataaaattttcatttttttagaaatcaatcgcattccgtcgacggaattcgacgccgcctgccgagcccaacaatggcacactgtgttcactcaatgcgtttgtcatctgtttcagcactgaaaaaggttttcatttcctgtaaaatgttaattaatttccacgaatgcatatatctggcaccgtcggatttttaattttttttcctaaaattcttaatttagtaaatttgttacatggttcgtcctcttgcctttctgaacattttgttaacttttctgaggactaacaaattttttacaaattttacaggcaatagacgaaagcctagggctataaatgataatgattggttattgtcaaaatactcgaaaacccagttgttgttgtttttttttaagttttttggtcataattttttttttttgttatacaacgaaattttttggaaatttttgcattcctaatagagataatttagagttaccaaatgataatagattggttcaattcgcactaatatgaaatgagttatactcaaaaaccaggaaactgttgccaatttgtctctttccatattccacttcccacttatatttattattaatttaaaaataaatattttacccagaactcggcacatttcgcaccaatttggacacattttgtcggcgtcaaccaatcgcagccgccccgggcactggcgacgggaccgatgccggcaaaaagacggactgtgccggtgccagcaacaacaaaaagcgcaaatgtgacggaattaacggcaacaatgccgacgacgacatcggcacaaccgctgcggacaaagcggcaaatgggatgaaaaatgatcgcattggcggtgaacatgagcaaaacacgacgcactcggagtttgactcgagaaccgaacaaggttttcacatttatcgtttaatgacataattttttgttgtttgggtctttcaattctgacccaacgactgtccaaaaatgccatttttggggtaaaaatttattatttttagctttcatgattttttggagttttttctagttgaaaaatgaattgggctaatagacaaaatatcggtgggcgatggtgttaattctgataaattttctacaaaaaatggcataattttctctgttttctccccctttccaatttttgaaacttaattttacgtttttcttcaattt

SEQ ID NO: 35593 - DNA, 878 bp, Heterodera glycines
aaacttttcaaccccatttttcgcaccgtgaatgttatttttattgaattctgaaccgttttgagtagattagactagaaaaaattgaaaattttgaaatcatgtttcccactcccttctcccaggggtattattttgtaaagtctttttttccccaataaacttttcaaaccccatttttcgcaccgtgaatgttatttttattgaattctgaaccgttttgagtagattagactagaaaaaattgaaaattttgaaatcatgtttcccactcccttctcccaggggtattattttgtaaagtctttttttccccaataaacttttcaaaccccatttttcgcaccgggaatgttatttttatcgaattctgaaccgttttgagaaaataaaactaaaaaaaattgaaaattttgaaatcatgtttccccctcccttctcccaggggaataattttgaaaagtcttttttccccaaaaaaattttcaaaccccatttttcccaccgggaagggtattttttttgaattttgaaccggtttgaggaaattaaaataaaaaaaattgaaaattttgaaaacatggttccccccccccttcccccggggatttattttggaaaggctttttttccccaaaaaattttccaacccccttttttcgccccgggagggttttttttttgaattttgaacccgtttggagaaaataaacttaaaaaaaatgaaaattttgaaattattgtttcccaccccctttccccgggggaatatttttgaaaagattttttttcccaaaaaattttgctaacccctttttttgcccggaaaggtttttttttgagattttaaaccgtttggagaaataaaaaaaaaaaaa

SEQ ID NO: 35594 - DNA, 824 bp, Heterodera glycines
  unsure (1)..(824): unsure at all n locations
tgatttctgtaattgaaaatcagttacgcacagccctacccttaccgaaaaaaccagngatctccgatcacatatacaaaatctaaaaaaaatggaaatcaatgaattttcattcagcaacaagtggaagagcaaagtgaaaatagagggcagagcaggtaaaaaatttgaaaaaaattaattaaaattaaaaaagcgaatttagacacaaagcacagggactgaatcgaactgagagaacagagagagagcaagagtaagagagagagtgagagagaatgggaaaacgagagagagagagaggagaatagaaaaaaggatttcaaattgaaatagcctaatccaacactttttttgttaaaatttttcaatgggtcataaaaagagtgatattccgctagatctaagttaattttccagggtgtcatcaaattttttacaatttaaaatgacacaataaatgaaaattttataaaattaaatgaaatgaaaaaaaagaataatcaattaaaaaaataaattaataaaataattaatttaaagcaaatgacgatttggattttttaaaaataaaattaataaggctggatatttatttatgtgtttaaaatcaacgcaaataggtacctaaaaatgctaaaaaatatagaataggtgtttaaatcccgaaaagcccaaaataaagtagattaaataggaaaattttggtaaagtcatcgaaagtttaattaattattcaataaaaatgtgggaaaatgcgaaatagaccagtatttagacgtataaaacacccagtataaaaaattaagcagagcttaaaaaca

SEQ ID NO: 35595 - DNA, 665 bp, Heterodera glycines
aaaaataaaaatagaagactcagaattttgaaaattttttataaaaattgatgacaagctaatgtgataaaacaggttaattcttttcctttcagtatccctgcaaagtttggggcgcttctgataagtttcacaaaaaataataaaaaattaattttgcaaaaatcaataaataatgaaccctcctccttaataattttcctgcgcccatggtactcactcggccgcttcgaggcctcgaggggggccttcggccaccccccccccccccgcccttcaaaattttgaaaaaaaaaataaaataatagaagactcaggattttgaaatttttataacaactgatgacaagctaatgtgataaaacaggttaattcttttcctttcagcatccctgcaaagtttggggcgcttctgataagtttctgaaaaaaaactgaagcccaaactttttgtcactgttcacaaggatataccatatttttaaaatatttattaatctccttatttgataatatcagatgcagattgactgtattcaacttgtaaataaatttaggatcgcgttccgagcaatttctgtcaaaaaatttatgaataaatattgcaaatatcaaaaagaaatgaaacctcctccaataagaattttcctgctcccatggtactc

SEQ ID NO: 35596 - DNA, 962 bp, Heterodera glycines
tttaaaaatggtcagtctataagttacaatacttgtccttaaggggtggctcactttaacctttgaatacgctttaacatcgtcaggcaacagcagcgcaggcggcggcacatgcattaattcaccgatcgaaaatttaatattttttataattgcatttcattaacattaattaatgtaaaacatgccgaatgattgatgccccacatgaacacggagatgagcggctctttggcacggaacaacttccactttggcaccaacacccttttgtgccccgatcgcgacttgggctttttgactttggtcttatcctttcccattttggtgttgaagtttcaaactgttaaaaacaaaagaaaatggaagaaaatggcattggcacaaaagaaaaaggattggcgatgtatggtgtgggtaaattacgataaaattcgatttttcttttttcttttttgtatttctcgccaattaaagtgtaacaacaaaattaaacaatttaaaaattttatttatttctcgattcttggcgatttttgatcgatggcgatctcgttagtgaagaatgcctttccgattcgccttcgtcttctaaaatctgttcacgagccccaaaaagtgcgactttgtcttagggcggataggcgccatcgtaatgtttgtccgtctcctgccccgattttgcccgattcggaagaaaaggaagaggatgccgcacgggcgaccgtcggcggtggtggcgcgagaaattgtggtggctgatgcgaaccggagccgttcgactttatgcgatggtttttcgtattttttccgacgatttctaattatataaaatttaattttgttttaacccgaatttattttgttcgtttaagggcgattttggcacgattcgtctggtcaaacgggatgaattttgcgaatttgcgttgcttcaagaactgattctgctgacaaaacaa

SEQ ID NO: 35597 - DNA, 1392 bp, Heterodera glycines
  unsure (1)..(1392): unsure at all n locations
tttgcagcaacaaaatgaccgcgggaaaatatnagggagaatgaatgaatgagagaatggaatgaggaggggaagaagaaacaaaggcatttttatacgaaaatattagcgtacatttgagtaccggtgagcaaaaatcatataaaaggcagagaaaattgacagttaatttcattaagctttggtggacacgtattttgatggaaaacggaattgacaatttggagaccaatcgaaatttgcagagaaaattggactaaaagcaaaactatctgaatttatcggtagcaaatttgtggaatttcctttgcccgacaatccgctgacaaacaaaatccgctttaagcagggatgcgatctgttctgatttgtcagaaatgttctaattttgggttagcgaccaaaatttgttctgatttcttaaacaaactcataattttaaaattttatggcctaatgtcactattttgcaaaaatatataaaatttatggcaaaatttggtcattttttggacaaaaatctgttaacaaatcgtactaaaatcacaaatttttcccggcggcacctatcggcgccgccgggtcccctgtcctccaaaatttttggaagaagggccccgcaaaaaaagcgtttttaaaagcgaaaaaaagtcctcgcttggcttttaattgcaaaattggcagtttttggtgaaaatctgttaacaaatcagaacgaaattgcaaaaaattttccggaagtaaagatgaaaacagtcagaataaaacaatccaaagggataagaattgtttgaagatcgtgcctcaatgatgatgatatcatttacataattattaatttattctactacaggtttttgcgcaattaagaagtagactaaataattatcttctggaaatataagacactcgattagaacccgtgcacaaaaagcaattaattaacctttagtttactccattttacgtattattgcaattaaattaaccaagggatatctaaagcaatgaaaaaaaacttatcaataaaaaaaattataaaaaatccaggatattgactcggatgctgacagtaggcgctgatttcaagcgatcaatgcaaggacggaagagataagcaagaatttattaccttacatagagttattgctaattaattagaataattttgaggctttataacatattttttatcatttacttaataaaaaaattctttagaagaaattattaaaacaacaaatttgtttataatatctaattcttaattagaagcaggtagatatatttcaaatcaattgtcagacaaaaaatattatgtaaagttatttatttttccattcttttctcggtactttctctttctttaaatttctgataatgataaatgaa

SEQ ID NO: 35598 - DNA, 1168 bp, Heterodera glycines
  unsure (1)..(1168): unsure at all n locations
tcgggaatgcaatgattcatcgatgcttttccactnccctttggcactgaaattggagtaacctaatagaaaatgcacattaacgaatacaacaagttgcataaagtcaacaatatgtcaaaaattgcatttgtaattcaataaaaaatatatatataaagggcgataactttttgatttatcaaaacaaaaaattcaacaataatttgtgattgataacaatgcttccgggaaaacaatgaaaaatactcgggctttctccatcaattcaatcgagtttcttgaatccaatgtcggaggcgtattcgcggaagcagcgacggcaaatgttcagtgaatattttcgaatgagtccatgatgactgaaacatacgcgacacgagcgcgagccaggcccaaatttgcgtggccgggaccaatggatgttttcgtgaaccatttaatttactctcagttgagtaccaattaggaaaaaaattgctgaaaatatcaaaaaacaaaattcgaatttgacttttgttcagggcttcgatcgtaatttcaaaataagaacatcggagtgaaaaaaaattagaatgttttcgaaattgctacaattatttagtgcaatcttttacagattttacttaaaatttccgaattttgtgattttgatcaaattttcaagaaaataaaggattttagggtccggctgttctgataagcgccgcctgcaaaattttttaaaggtttggctactttttcaacagattttttcgtacaaaatgacaaaattgcgtcaaatttgaaaatttcttgagtgacaatttgccataaaagttcaaaatttatgaataattttaagaaccagaacaaaacgagcgcttgggcgccgcttcgcggcgccaaccgctctgttttattctcaaagaatttaaaattttgataaaaatttccatgtctcatttctcttctcctttatttttctcgcctccctccacccctctctctcatttcctttctctgcttttctctctcacttcctttctccctctctcgctccctttctctccctctctcttcatctctcatctcgctctctcactcaatcaatctccccccttttctttcctcaaacacacataatgaaaaaaaattttcttttccttcactatggacgctcacagtt

SEQ ID NO: 35599 - DNA, 1194 bp, Heterodera glycines
  unsure (1)..(1194): unsure at all n locations
tatttcatacaatttgcatataattccgtacaatctgatatntaattaataattatntccattgtaattttttttacgctaccattcattagctcataaatatagaccggatttttatgtttttacatattttttccgcggtttacttatgataagagaagctaaaaaaaagccattttccccaaacaatttcggtttagagagacttataataacataaaaacacatattttggcgttttggcacataaaaaccatatggaacatatctcggagttttggcacatatttttttcacatattttggcatttttgagaaaaatctgtaagaaaaaacaagaaacttgaaaaatatatccccaaaaattgcaatattttcaaattttaaaaaaaatttatttcgaaagacgaaagataccaaatcgaagttttcatcaaatggtcattgtatttcgaaactccatgctgtaacttattcaaatgacaactttcaattttaaaacaattttatcagaaaaaagaatcatttacccccgaacaccccaaaatgtatctgatttcaattttgctggagaaaaagataaagcaaaaattttttatttcacatacattttatttctgtttttatttgttatttgtattttttaatgaatttaaataaacgtattttagttttattccattggactttgtgtatattttgaggagaatttcttcttatttgttcttttttattaatatgaataaacaattatttctattcaaagttaattttatttcaaaattaatatattttttattaattcttttttaaatttgctttattttttggcaatattttttgatgaacctattttttatttattaagagtcaaggccgcattattatcattgtctagtccaagtccctggtgaattttaaaagaattatttttcatataatttttaagtaatgtttgaaatataataatttaatattttatttatttattttaatttagttatatgtaaataaaattattttaagactttacattatgttttaagttctgtcggatttttatcgttggttctatgagaaacctttttgttgcataaattataataatctttctatttctttttatttattttttactccaaaaatttatcttactatgatttaataaatacttttaaataatcttctttgaaa

SEQ ID NO: 35600 - DNA, 412 bp, Heterodera glycines
aaaagtttaggcttaacttttttttcagaaactgcccattaaggcaccaaactttgcagggatactgaaaggaagagacataccctattttaaatattatctagtcagttcatttaaataatttttatccaaaaaatttttttttgggttttcggggcagtccccctgaaccgatgcgtccagatttatggggaggctgaatccttcgggaatagcttccctatagtaggtactgtaattgtccgtggggttttagctccccatgaatgtttgagtgacccaggagtgcgcttgaaaaagtaggtttttttgttttgaggggcagtcccctgggagcagatgcagacggggttatggggagcccgagtccttcgggaatagcttccctatagtcagtacgttcattctgcgt

SEQ ID NO: 35601 - DNA, 878 bp, Heterodera glycines
  unsure (1)..(878): unsure at all n locations
aaatccgtgaagagatttctgttnggcaagcagtaatttttttaaattaaaaatgttataattttattattaaaattgttttcctatttaattttaattgttttttcggcactccgttggaccgaccaaaaatgcagtgaaaatggcattgtattttcagcagagaatcgccgtcaaatgcttggctcggcattgttcaaaattcgcttcccgctcttatcaaaagaagatttttcgggaaaaattggtaaaaaataatatttcttttagttacaaatctttttctaactattcaccagtcgtttccatatttacagttccatccggcattttaacaacaaacgaagtggtcggcgttgaagaatatcataccattcagaatttgcaatttccgagtcaccagcgaattaaggcatttggaacattattaatggacattgaaaaagtgtccgaatttgcgggagaggaagttgggagcaggcgacacatcgaaaatgtgtacataagtggactttcatggataatattggcacaaattagaatgaaatggagaagcactgacaatgagaaatgtttgggaatttatcttttgtgcaccgagccaaaagaaggtgcaattaactcttaattaatgctaattaacagcaatgattaacatccattaagactcgaattggcgctgccgcgttcattcggccacttttcgcattgtctcgcaaaagaaaggggcacataattccattggaacactttgcgacaatgtgtttaacaatagaaaggactggtcaggtttcccaaatttcatttcttttgcggtgagtttgacatttaatttattgcttaattgttcaaattatgggcaattaaggaattaatgg

SEQ ID NO: 35602 - DNA, 703 bp, Heterodera glycines
gtgtgaattttcctctgcacttgcccccgtttgacccccggcacatttcccgtcccactttctgcttcctctcctggcaatttcaacgcccgaactcctcgggccttgtcgacaccaccgcggcgacctgcaccgcactcaacgtcaagcgcacacggccaactccaagcagctcaacggagctcaactcaatcaatcaatcaatcaacgggtggtgatcggacatctttcaaaattcaaatttcttttttttcagggatctgttagctgtcaaagtcactgttcgcttcaaattgccttcctgcgtcggactcggctcttccggtcagtgccgtttttgcccatccgacaaaattggggtgaaggcactttgaccaaaattcaattcccggcctcgaacttagtcttggtgcctgattttctctctcaatagattcgggcaaatattttagccaaaaatatccgtccaaatttgtgttccacccaaaatgccaatcccttccctcctcaggagcttattgcgtttgcattgcgcccgccctccttcagacggccggcctaatccccccgccttcggtgtccgccgaatcggacgaactcacttgggacgactcagtgctggacatcatccgcaagtggtcttccgcagccgagtcgctgatccacggccgcgcctctggcctggacgcggccatttgcactt

SEQ ID NO: 35603 - DNA, 818 bp, Heterodera glycines
ggcggggagggtattttaacactcccagggtcaattcattttggatttagtacggtaattttttatttataaacttgcaatattaaaaaatttttctttctaaataaggggacaaattgtgcaattgcgtggaatctgggtccaaaatcttgggttccatatggattggataccagaatagaattgaaacgatttcaatatgccgcttttgatgcacatgaattaacaaagctaaatatgattaaaaaatatgtcgggagtaggtagtgatgaagttgaaagagccgaagaggcctggaaattcgtcagaaaagaatatatatgctaccgtaaaggttttaacccaatttacgcaaaccatcaaccaataattgagaaagaaaatacaatagttccaaagaaatacataatacttggaaatcaatggtttcgaagcgaaagttggaatgatgagcgtacgattcgctatcgttgttcaaatgctaattgccgtgtgtctgtttcgctcaatagaataacccacaagtattcagacccaaaccccgatcataatgatgttctacatgcgtttatacctgatcaaacgttattaaatcttccgtattatgttaaactatagcgcattagaacaatccacaaatattcagaccccatccccgatcataatgatgttcacatgttttgcttcggttgagtccagtcccgtccagtcccgtccatttcgtgcagtaggcggggattgacccgccttctcgccgccaatgaaaaaattggtgacattgccgccgcgccccttgacagttgaagctccgaagcgt

SEQ ID NO: 35604 - DNA, 1459 bp, Heterodera glycines
tcccgcacatctctaatttttgcgtgagaaattcatagcatcgttcaaatcagtcgactcaaagacgccgagacctcctctttgttgtaccatccattgatcgatgtcaataccgccggacatagagaaaggaaaatataagacatatatgttcaccaaaaaaccgaaattgcattcgccgtacaataatcacaaataatattggaccattaaatttttgtgacgaatcaggactgtacacatccttattgattgattatgaggtcaaacttggaaatgaattttttccatgtttaatccagcatacattttatctacgcccactccttttttcataataaaattcatgggatcaactatttcttgttggttacgatgtaatcgtgaatacgcctgaaatctattgctgctcattacccagacccgaattgagagtctataagccaatgtttagcaattccaatgaattgcactacgaccgcttcaaatgaactaactattccgtcctctatcgactattatctttcttatttaatatatctctcgtgcctaccatacatattattctgctggactttgtttttttattcttatgctgagactcgccactggtacactgacactgacacatgaatgtactgatatgaatgtactcgcgactaaatgactgtgagaatcattctccgactcctaaaaccaccttaatactacatcgaatgcattttacccattaaagccaataaaagcaactgaaaatgttctctgtttaggatgcgcttccatcgtttgacaagtgtgcaatttgcattgacaagaacagtgggggcgaatttatcgtggccatttcggactgcaaagggaccattcactttttgactgtccctcggtttgatgtcggcattcacgacgaggaacagtttcgccgagcgttttcctcggtccagaagcattcttccgacgtcacacaaactttggggagcggcgcccatttcattgcgaacgttgtgaacgcttttgtctttgtgagttgaaacttttgaccaagaatgtgttataggaccctttttgaaaaatacgtaaacttttaaaaggcactgaaaataagtttatgagggtttcggggtcgttgaaccgcacccttctcctggttggtacagtccctggtcgtttttttgattgctttgtattttttttttgtttaatttcagtttcccaagcggaagggcgcctctgtctatgcctttgctttgcatccgtccgacaatgatttttccaacttttccgctctgtttaccctcaaagaagacgtgcaaatggtgcgctctgtcggctgtttcgtctgtgttttgctcaaaagcaattcgcaattggtcgtctttgaccagaatttggtgcaagtccatgtgatctctctcgtgtcaaaagaggagaactgtgttattttggactttgaatttct

SEQ ID NO: 35605 - DNA, 960 bp, Heterodera glycines
  unsure (1)..(960): unsure at all n locations
tttaatgctgtttaggctatcagggactgataaacaattttgaacccgatttttgacataggagcaaatgttgggacacataactgactgaccctgcggaatccggagaaggatgacctcaaaatgtgatatgctttttcaacggataataaattgttttgtttttctctcgtttgtattttattttttgcatgaataaatttcttttgtttattttgacaacatgtatcaattaggaatatttgggtgggctgggaccccgacctttaatcctgaattttggcctgggacataagggaaaagtttgttgaaaattgaaaaaattgttgaaaaattaatttttgagttttttttaactgtgttgaggattttcagttttctctgattttggttcgataaaaaatgcatcaaacaaaaaacattttgatcggaaatttattttttcttttccaaaaaacgtaaaaatgaaaaatatttttcaaaaaatcgacttttcactaaaagaaaaattttctgtttttcgaccaaaatttccagaatttttataagttgacataaattgcaacttttgatggaaattattaaaagcttgggcaaattttagaaaattttcaccgaccgtggaatcccgccaccctgtaccgaaaaggctttcgataaaagcgtgccgtaaaaacgattctggaaaaaaaacatcgaatttcatcgctggactccattcacaaatttgaccgctggcccgaccctccatcaacaatgggacgcgaaaaacatgatttgcattttgaccgaataaattgaaaaaaaattaagcaatttggaaatttttatcactttgaactgcaaaattacagtacaagacagatactgtataatttcccttgacaacttanaagaattatttgaaaaggcatatggcggcattcatcactcccatcatccatcgcctcacacacactc

SEQ ID NO: 35606 - DNA, 868 bp, Heterodera glycines
aaaattgggacaattgccaaagatagggaaatgaaaagcaaagagcaaagaaaattacggtgattgaactgacgggcaccgtcgcccattgtgccgaattttgtaagaaaagcgccctcggcatcgaacatttgaatgcgatggttgtctttgtccgccacgtaaatctgaaagacggcaattagcggaaaaaaacaaataatgaaaaggaaaagccaaaagacagaccagcccaaactgttcatccacggcaatgccccaacactgctgaaattgtccgggtcccgtgccatggcagccgaatttccttttgaaagtgccgttaaagtcgaacacttggaccctaaaagaaaacggcacaataagcgcacaagcaaatgaccaaatgaatgaatgacctgtgattgtatcggtccgcaaccagcaattcccccctcacgccattcacgcaaatggcacaacagcctaaaaagggagcaaaaggcatctatctcaaaaggcaaaatgccttttcttttcaccgtcaaattctccgtttccgctgccaaaagtgccaaaagtgcgcaccaaagtgccgtcggtcccgcggaagatttgaatgcggtgatttgagctgtccgccacggcgaaaagcgctgcgtcaccgccgtgcggaagtgcgcaaatgccacggggccaattcattctgtttttgaatgtttgcgcctcagtctgtcgacctccgctcactcactgatcggatgcggtgccgcgtccgcccaacacaatccgcggtcgcggtcggacccgcgagaagtccatcgccggctccgctccttccccgtccgtctcttcgtcttccatttcgtttccatctctgcttgtctgc

SEQ ID NO: 35607 - DNA, 1548 bp, Heterodera glycines
aaaattgcaataaagcgcgttcaatatgaactgacttattttggaggcataaaagcaacattttccgccaaaatttcctcaaattcatcgacgttacgtggcttacagtactcgcgtccgagaaactcgcaaaaatacgaaatgaatacttggccatgattgaacacactttgttactatttttttttattgggtgtgccttcaaaacgggaaagtacgcaaatctattttttacttcactgtcgcttttgtccaaattgccaattttaattgaaatgttgtgccattttcagatgcccttggggttgaggcgatgcaaaatttcattacatttttccgcgtcggagacgaagcgcaacagcgcctcatcgacacactgcacgtcaatttcattgtgtggtttctgcggcaaaacattggcgaaatgtttcgcatggcgaacaaacggttcgaaatgaccaagggcgacacgggcacgttcattgacccggacaattgggcaaaaatgctgaaaaaggtgcaaaaatcgcggagcaaagtgaccatttgtctgatgtatcaattcggggtcagcgtacacaacttcatgcaacttgtccgggctgaacaccgtgggaatgggtcaatatgctgcacagattgaaaatgcatgagctcatcaatgcgcatgtgggcactttggaattttgagtggccgaacttttttttggcatttttggaaatttggggactaataaatttggggaatttgcatttcatttaattaattctattacttacttttcattaatttttaatcactccctccctctgtctctctcctctctctcccatccctcctctctccctctctctcgctctctctctctctctttgccaaataaaatgaacaaatttgcccatccaattagtcaatagaagcgactattaattttcattttatgttatagccggaaattaattgcgatgatgatgatgagattgagaagttttatcaatttttgatcgattcttccctaattgacacaattgtcggcttttgtctcgacgaatttctcaaaatgtccgattcttttcggcactttttctgccatgagaatgatatgcttgtgctgaagatagcaatgagctcaaaattggtatttgcgtccaatttggtgcatttggaggacgaatttccggaagttttgcgcattggtaagcagagaaattgagcaaaaaaaaagggattaaaatattaaattttttattagagcagagcgggaccgggacgaattcccggatctccgaggtaccagtcccggattttgaaaagcccaggtcccggtgcccggtagagtcgagaccaaccgggaaaacaatttcgtttttaaagttatattaaatatattttcatttcttctttttgcatacttatggttaaaaaaatcgactcaaaatccctaagtttggtgaatgtttggattttataaatagaaaagaaaaaaagaagaaaaaaatcttgtaatatttcacttccggtcccgctctactctactttttatttat

SEQ ID NO: 35608 - DNA, 768 bp, Heterodera glycines
aagtgcgttccatgcgaattgtgctggccaatggcactgaggcatcttttggcccggagagtgccgaactgcgtgccgtcgcgtgcggattgggcgcctttggcgtcatcaccgaagtcgagctgaatttggtggccaccttcgacacgatcagctacaatttcgtcaggtatcatacacatatttcaaaagttgctataccgaacctaaaaaagtcgaaaatgggggggggggtaaaaagtttaataataataaatattcatgaaataatatattgtctctgaaatatttaattctttatatattcatagtcgtccaaataattgtctaaatttccttaaatttcaattcaaattaatttttgaattctttgaatatctgtaatttttttttttgaaattaaataccctattaatgaaacatttatttgatagagctatcgaatggcatatcaagaaaatgaatgtctatttggttactttgatcattttattatttattatttttaaaatagtttgtcacaatattaatttaatatttactttcatttctttctttttttttatctttgccccgttgaaacttttttcggtcggttaacatattttgaaaccaaattttcagtgctttttcttcattttttcaattgttcagtttgccaaccgaaagtctttacgcgcattttgacgaaattcagaaaatgggcaataatgttttgcttatgacatcactggcgaacgaaactttgtgggacaaagtgacgtgagt

SEQ ID NO: 35609 - DNA, 897 bp, Heterodera glycines
  unsure (1)..(897): unsure at all n locations
agcatggaatgactntggaaagaattcgaacccattcctctctcctcgccttcttcttcagccccgtaattgtagttcgggtcataagaaaccatttcgacgcttatcttcacaatgctcggcacaaatggcgacaattcagtcgtacaacgaaacgcgaatatctcaaacgcctaaaaacactctcaatatgtcaattactgatttcaattgcatttacctgtaagcaaatctcgcgcaattcatcgtcctccaccgattcacacttttgtatcaaaattggcacaatctgataatttataataaaaatattaaatagtttattgttgatttaaacctgtggcaaaaatttggcaaagcgagcgcccgaagtgcgacaaattgtaataacagaaatgataaatgtcttcagggaactgagctcagtttcagaatctgcacaagtgccaaggactttctccacgattcggtcgaattgttcgtcaccaacgacatcggcaagatgacctcaagaaaagtggaaaagtaagaaaaactcaaatgaagggagagtggcaaaaagggaaaagtttaaaaaaagtcagaaacgctacaaaggacataccaagggtagaaattgctcttttgcgcatcgtttgcctctctttttcgagttgaacaaaaagaatattttcaatctttaaagaaaggaattgtaattactataccaaaatgcacagattgtgataagaaacagggaataatcaaaatcgaagcgcaagcaccaaaagaaaattcaacggttttataatgttataacaagccattttaaaactcaacaatttcgaaaatttccaaaagcaattatttatttatggcatggtaattaatcgtatttttcaaagagcaaaaaatata

SEQ ID NO: 35610 - DNA, 652 bp, Heterodera glycines
  unsure (1)..(652): unsure at all n locations
aatcacaatatatattttttgtttcatttttgctaactaaggaaggcccccaggtgtctgtgggatttccgaatgaaacttggtggtcatgtgttcttaagaaaaatgtctaaataagcacgaataccgagttatgacgtgccaaactttttaaatgaataaacaaatcaaactatttccaaatcgagcagtgtccattggtgaagtggtagtgtgctagtctgcattctttaaaccccatgttctgattccctaaattcaattattttaattaatatttatttttgctttttatgccaagacaattatcaaaaaattgttaaaaacttaatttttaatttattttattttatttatttgatacataaaatactcaagaaaaattaaatcaacttttaaacagcattgttttattgcatatttatgttaaatgtaatttttaatgttaaatcaaaaataaaaaatttatttcataaatatttttgagaattgactttgcataaaaagcaaaaattaaaaaaatggatttacacataattttgttgataaatggtaaaataattttcattttctacgtaatttcattanattgtagccaattnaccggttttggcccatttgcttgtttattaataaatctatgaagaaattt

SEQ ID NO: 35611 - DNA, 957 bp, Heterodera glycines
atgctctacacgataaaagtgatttaaagcgatctgactctcaccggacagttcggaatgttcccttgtcagcacgtcattctatacccataaacattctcaattaacctgcaaaattcaaaattcattaataatatgtttgtttgttattgatcagtaaggttggggaaaacaattttaaattattttttggcccaacttttttttttgaaatttaatgaatttctaataaaataaaaaacgatttgactagagagtgatgcgcaacataatcattttcccgtgccacagacattgctccttgcgcgacgattaccgcggtgacactgatctccgagtacaactcgcccacggccaaaccatctacgggatcgattatctgagcttgttttggtgtgtatgtgttttccaagtggttttgttttttacttggctatttgtccttgattccaaggacggtttccttgaaaatcggcctttaattggcaggaaaactcgccgaacaaatttgctctctcccctccatttttgagttaaaaaaataaataaattcccaaacaaatgggaaaatatgttttacagcggaatccttgcatccatttcttcgaattccgaacccgagttcgatcgctgttcccgctgaaaaaagcgctatgattttttcgaatcttatattaaaaaaatttcgaggcggataaagtgcaccctcatattatctaccgccaatggagccccgaaatttgcggggctcccggtaaattggacattattggatataaaataaattaaaaataaataaacaaaaattttggttttgctaaaagattgtattttagtctgcacatccctgtgtttttataagcgtaataaaatggcaataaataaggtttttattattgtaacattaggagaaggaagccaccataacattcataaagaaagaaacaaagttttatt

SEQ ID NO: 35612 - DNA, 679 bp, Heterodera glycines
gataaaattaaaattttttattaattttcacgcgttaaagaaatttgtaaattttttaaatttaatgtgcagaagaacaaaaaacagttaaaaagcaaattattttatcatttaaatagatagctctgaaatttaaaattttaactatcaaaagatttttcggtgaaggagctcagcagtgccgacaaccaaatttgcctaaaaatttccgaattttaaaaatgccgggcacgtaatttttgttccttttttaatttttcatgtcatttgtgggattttctggaaatttcttaataaaatagaaaacaagaaagaaatagcatgactaagaattgaccaaaaattttcaaaaaatattcttcataagaatcgattttttttaaataaacctttaaatattttcaaagtgccacccacataacattttttaattttttttttctgaatcttaaaaattttttcgagcttttttaagaaaatataggaacagttttgttaaaagtttgcagggaattttaatggatattttctgatacaattgtttttttttctttacaaagtgccgggtcgttactcaaaaaccatcaaaatgcgcgtctcaaaacaactagggttcggaccccgcccccgtcacccccgcccctgccgggggcgggacaggttttttggcctcaccccc

SEQ ID NO: 35613 - DNA, 1013 bp, Heterodera glycines
  unsure (1)..(1013): unsure at all n locations
ttaattcgtttttcctttttgttgaaaggaatgaatttaatgatgatttcagaaaattaatagggtttatttctaaaaattcacacttaaacagttttgaatcgcttaaatataataatataaacgcagtttctcattataggtttttaattcatcatcaaaatataccgcccgaatttctagagagaagcttcagagttttccaaaaaatatgctggtacccaaccacaggcactaaaagaatctttttacaacggcatttcatttttcccacgaataattggcaataagaaagaatttccaatgttttttggcacacctgggcaaataataaatatgcaaaggttttataattttcttattaaaatacttaattatataatggaatttgtttaattcgtttttcctttttgttgaaaggaatgaatttaatgatgatttcagaaaattaatagggtttatttctaaaaattcacacttaaacagttttgaatcgcttaaatataataatataaacgcagtttctcattataggtttttaattcatcatcaaaatataccgcccgaatttctagagagaagcttcagagttttccaaaaaatatgctggtacccaaccacaggcactaaaagaatctttttacaacggcatttcatttttcccaagaataattggcaataagaaagaatttccaatgttttttggcacaccttggcaaataataaatatgcaaaggttttataattttcttattaaaataattaattatataatggaatttgtttaattcgttttcctttttgttgaaaggaatgaatttaatgatgatttcagaaaattaataagggtttatttctaaaaattcacacttanacagttttgaatcgcttaatataatatataaacgcagtttctcattataggtctttnattcatcatncaaatataccgcccgaatttctagagagaagcttcagagttttcaaaaatatgctggtacccaccacaggca

SEQ ID NO: 35614 - DNA, 956 bp, Heterodera glycines
tgaaattaaatggcgattgcgcaccgcacttcctatccttctcgagagcatttgtaacgtataaaatttctcaaaataagagatagtcatttttcttggatataagataaatttaaaaattctctgagaaattaaatggcgattgcgcaccgccctccctctcacgctcgagcgcttttgtaacgtataaaatttctcaaaataagagatagtcatttttcttggatataagataaatttaaaaattctctgtgaaattaaatggcgattgcgcaccgcacttcctatcatgctcgagagcatttgtaacgtataaaatttctcaaaataagagatagtcatttttcttggatataagataaatttaaaaattctctgtgaaattaaatggcgattgcgcaccgtacttcctatcatgctcgagagcatttgtaacgtataaaatttctcaaaataagagatagtcatttttcttggatataagataaatttaaaaattctctgagaaattaaatggcgattgcgcaccgccctccctctcacgctcgagcgcttttgtaacgtataaaatttctcaaaataagagatagtcatttttcttggatataagataaatttaaaaattctctgtgaaattaaatggcgattgcgcaccgcacttcctatcatgctcgagagcatttgtaacgtataaaatttctcaaaataagagatagtcatttttcttggatataagataaatttaaaaattctctgagaaattaaatggcgattgcgcaccgccctccctctcacgctcgagagcttttgtaacgtataaaatttctcaaaataagagatagtcatttttcttggatataagataaatttaaaaattctctgtgaaattaatggcgattgcgcaccgcacttcctatcatgctcgagagcatttgtaacgtataaaatttctcaaa

SEQ ID NO: 35615 - DNA, 863 bp, Heterodera glycines
tgaccaaaactgacttggtgatcaccttgcatgagattcgttttatgacattcaattagattctgaaatttttagttgttttttttgttgaaaattagaattttttttattatttaccacaattgtgttgaaatctggcgcgtccaagttcagttttttcatgcgtactaatgtgacgagttgacggtgggcgatgagcagtccaaatgcaattatctatcgaaaaattaaaaaaaaaaatttccggtaaatttttttttgtagaattacatttggacataattcattgataactgtgcccattgtttgtacaagaaagtctctgtccgcctgatggagtggcaaaattcgaaagcccaaaaaaacaacaattatttttgtttttttaataaatcagttaaaaaaattgtttgttttttttaccataaagcaccaccggatcttcgttgaatcccttggcacacgcatcaattcgcttatcaataccatcttaaaataataaaaagataaaagtgtaatttgttgcaataattcctaaaatagggttgcaaaccgtctccaaaattttttttggcgattttcgaaatttgtctccgacctcgacccccgatatttcccaaccccgacgttgaagttgcaaccctagtccaaaagcgtaacaaaccaaaaagtgttctaatatcaaagttatatccacgctttgcataatatccctttagcatttggcgagaaaacatcgaaattatctgaaattaaaaaatcttcaaaattcgtccctaaaatattttcctcaataaaaattcatccaaaaattgtcaaattttatttcaaccaacttgattataaatggtatccaattgaac

SEQ ID NO: 35616 - DNA, 1022 bp, Heterodera glycines
tggtttgagtaccccaaacggacacttgaaaaaatcgatttttttgttttcggggcagtccccccgaaccgatgcgcccagatttatggggagaccgaatccttcgggaatagcttccctatagcctgtactttaattctgcgttggatttttgctccccataattgtttgagtaccccaaacggacacttgaaaaaatcgatttttttgttttcggggcagtccccccgagccgatgcgcccagatttatggggagaccgaatccttccggaatagcttccctatagcctgtactttaattctgcgttggatttttgctccccataattgtttgagtaccccaaacggacacttgaaaaaatcgatttttttgttttcggggcagtccccccgagccgatgcgcccagatttatggggagaccgaatccttccggaatagcttccctatagcctgtactttaattctgcgttggatttttgctccccataattgtttgagtaccccaaacggacacttgaaaaaatcgatttttttgttttcggggcagtccccccgaaccgatgcgcccagatttatggggagaccgaatccttccggaatagcttccctatagcctgtactttaattctgcgttggatttttgctccccataattgtttgagtaccccaaacggacacttgaaaaaatcgatttttttgttttcggggcagtccccccgaaccgatgcgcccagatttatggggagaccgaatccttcgggaatagcttccctatagcctgtactttaattctgcgttggatttttgctccccgataaatgtttgagtaccccgaacggacacttgaaaaaatcgatttttttgtttcgataaatatttttttcggaaagtgctctaaagcgcaccaaattttatttacaacttaattttagcactctgatgctttagtatcaaagaaggagagatggagaaaaaaatttttaaaaaatttttctattatattttggttatatcgtttt

SEQ ID NO: 35617 - DNA, 1145 bp, Heterodera glycines
gggtattatattgtaaaaagtctttttttccacaatatacttctcataccccatttttcgcaccgtgaatgttatttttattgaattctgaaccggtctgagtagattagagtacaaaaaattgaaaatttcgaaatcatgtttcccactcccttctctcaggggtattattttgtaaaaagtctttttttccccaataatcttttcatccctcatttttcgcaccgtgaatgttatttttattgaattctgacccggtttgagtagattagagtacaaaaaattgataatttcgaaatcatgtttcccactcccttctcccaggggtattattttgtaaagtctttttttccccaataaacttttcataccccatttttcgcaccgtgaatgttatttttattgaattctgaaccggtttgagtagattagagtacaaaaaattgaaaatttcgaaatcatgtttcccactcccttctcccaggggtattattttgtaaagtctttttccccccaataaacttttcataccccatttttcgcaccgtgaatgttatttttattgactccggaaaaattttgtaatttttaatgtgatttgttaacagaatttgcccacaaaaatggccaattttgcaattttatgcaaaaattttaagaaaattaaggatttttagggtccggcggcgccgccgggggaaaaattgagaattttgaccatatttttagcagattttcattaaaaaattctttattttgtggttttttggaaaatttaacaaaaaaccacaaaaagcctcaaaatttctgaaaaacccacaaaaagcctcaaagcctcattttgaaaatttagcctcattggcctatcaaaaaaccacaaaatgaggctaaagcctcagatctgcgaaccctgatatttagtgctttttttaacttaacgtattatctctaattatccccccccccggtggattattgttcaacctcctcagaaagggggggggattcttagatcctctcaaatttttccggcgcatggacggtaaaaaagaaaaaaagcggcaataaatatttttatggataattattggcgttctgttgaatttactttttatctttatttctctcaatagggtgtactatct

SEQ ID NO: 35618 - DNA, 569 bp, Heterodera glycines
caagcaatcaaagtcggcttcagttcgacgcaatcgccagtggttcccctcttaatcttcacggcacggtcgtgcaaagtgctgggcgatgagtaaccgactcggcaccctttggacaggcaaacgatttcggcacacacttcaagaatatgtgccaacggcaaatagccgataattgtgtcgctggtactgaattgtctgcagtctggactaattgtttcctgcttattcacctgactgaaatgacagcgctctgtcccgatgccgccgtgatgatgttgcggtgcgacaagagcactcctttcggctttccggtgctgccactcgtgtacatgatcatagccaagtcgtccggttccacatttcgctcgagttttgctgtaattaaaaagttaaagctgttcagtggattgtcagtgcagaaaaagagaaaacaaagagaaatttggtccttcgctatgactgagatttttttttttggcttatcaaaagcacttatttgctttttattaaggaaatgggcctcattcagagtttatccttttcgaccccatcttttccaagagttt

SEQ ID NO: 35619 - DNA, 611 bp, Heterodera glycines
taatatgaaaaagaatattgtcaaacaaaataacaacatttcgtcccccctggagcaacccctgtctggaaatgccttcctgatcatttttgtagagttcgaacaatgttcgacttttcgaccttttgttcgaactcgttattttcagcaatcctgagctgtcaatcaatttacaagtctttaaactcttttctgaggtcttacaagtgctctgtgagcgaaaataacaaatgaaatttgttcgaactccaaaaagtgggtctaaacgtcgttttggagcaaaaataacaacatttcgacccccctggagcaacccctgtctggaaatgtcttcctgatcatttttgtagagttcgaacaatgttcgacttttcgaccttttgttcaaactcgttattttcagcaatctagagctgtcaatcaatttacaagtctttaaactcttttctgaggtcttacaagtgctctgtgagcgaaaataacaaatgaaatttgttcgaactccaaaaagtgggtctaaacgtcgttttggagcaaaaataacaacatttcgaccccccttggagaaaccccctatctggaaatgtctgctatcgatgctcaagtcggca

SEQ ID NO: 35620 - DNA, 1414 bp, Heterodera glycines
  unsure (1)..(1414): unsure at all n locations
ttttgcctggccgcaccaatttattgaacctttataatatttattaataaatatataaaacaattatttattagcatgcaaaataaggccagactaaagaagaactgagttgacctgctgagaaggtcttcgaaaagccgagaagacatttgattagccatcacagagccaaaaactaaacagaacgggtaaacgaagccaaagagaacatttgcaaatgaaaaaggcatccgacattttcatggtacggtattggaaacagaatcacggctggacatcatcagttaacctgttacggtaaccataacctttaactggggaacccggtttttaaactccgtattcaaccctaaaaatggcgtttcttttcgaaatttcacataagagtcgtttcaattcaaatttcaatttggtgctcaattaggcacttaaaatgtattttaatttgtccaaatcttaagcgtcggattatccccaattgtcgttttacctttcatagttaaagttacaaaactaaacactatctacatacatattaagaaattattcaaatacaatatgtattcattaccaaataatgtggtgaaaataaaatatggatggataagcattgctaagcgaatgaatggacggacgaccgggggggggggggggacttttcggcaattgacaagtggcggtggtgggaatggaaggaatgggtcggcaaattagttttgccaacgaaaaacgaagaaagaaataagaaaaaaaagagtgggtttgctattcaaaatggaatttatacgttagaaaaagcataaattaatctgcgaattgttttcggatgattggtcaatggtctttttcctccgctgacaaacagcagtaacatttatttgcttttgcgctaaaaaccagcgcacattcgactacagcgtccgtaggtgtgccgagactccggaagaagtccgcgcgtgatccgcaggtggttgagggcccccgcattcaaccgcctgtgacgctcgtcagactgctttctccgctcagatggcatcagtccgaattcaacccctattttaagacaatcatcaatagctttctaatgataccaaattattagcttctcaagacgaattgattggtacgtgattagcagcaggctgggaaggattacagggatattttaatcccgacatcgggatcccgatcccgaccgcaaaaaaaagagccgggatcaggatcccgggaaaatctcaacgggatcccggtccgtccgggctctaaaaaatagccaccgttctacagggcgattgaatcggaagcaaaacgctaaaaaaacatcaagcaaaattggataggaaacgatgttacatagtatttaaaaagtgaaaatgcacganagaagaataaaatgtctcgcctttgctttgac

SEQ ID NO: 35621 - DNA, 622 bp, Heterodera glycines
cagaaaatttcgaactataaaaaagatagaaataaaaaacttttaaaattctgccttttttgcggttttcaactgataacttttttgagaattgattaatcactgagaaatagcttataaatatcttctaaacatctagggctttcgaatgataccatgattgtgaagtttggccaacaaagaaaaaagttatagctttttgaacattgctgagacggagttggccagacggagttgacccctaccgataaaattcaaaaaatcgctgaaaattttttcaaaaatttcatttattttttcttgaaattggttaacacttcctttacctccaactccgtttgatccatgcgccaattccgccgtttgatcgctttggcataacaaatgcataaatatgatggataacaatgtgaatttggcgaattcgaataaaagcatttctattgcttatataggaggttctaagtacacttttaaaatttttaccaagactcaaaaaaggtcaatacttttttgaaaatttgcaaatttctgatactcaaacttacattaagatagaaaaattcggcaatttgtacccctcccctaccccccccccctgtgtttaaagtagggttgagcg

SEQ ID NO: 35622 - DNA, 1034 bp, Heterodera glycines
ataaaatttatgacaattagccggattacaacacaagcaataaaaaaatgtgaaaataatatcatgtgcaaaataatttatcgttaataaattatattattgtaataataatttttcgatgaagttaatatctttataaacaacactaatgcatgaaagagtaattaataattatatttttaattaaaagcaatgaaaattaaagctgattaaatgtttaaatcaatttaatattttaaaaataaatttgaaatataaaacaatataattaatttacaaattttcacattatctcagacatagcgataaaattatgaagcgacaactgtcagacgtgcatggcatggcatacatgggcgcctgtcctcgcactacgacacgagcgttttggtaaaatcaaaaacaacaaattaaaaaaatattgctataaaatatttaatatttgacgaacgaggtaataaaagaaaatatattttttaacatattagaagattataccatcatagccatgatatgtaataatttgagctaatttgtgagactaattgaagaataaatgactgatttagtttaaaaatatttaataacaaataagaaattaaaaaaaataaatagcaagctaaaaactgcgaaatgtgataaaattcaagaagcataaaaaagggcgcatacaacaactactcgacattagaaatataaattcgcgtaaatattttaaatattattagtataaaacgatattttaatacctaccagtgacgaaacaacatgataatatcgagggaccttatcaaattaataaataaaaataaatgtcaaaataatatattgtataaattaaagtaaaatttaaaaagatttcattaaaaaaatatatttttaaaataaaaaatttaataataaaactactcaaaaatggaaaaaatttcgattgaatcaaagtaaaatttttcatgttattaaaattaataattgcaaaaaaacggcaatttcagatggtataatatggcaaatcaattaaaatgagatttaat

SEQ ID NO: 35623 - DNA, 875 bp, Heterodera glycines
ataaataaattcaatttaaggtcaacatttatcgactgctctcaaagggtctgtggaagaagagatcgttgaaagggccaaacagaaattagtgctcgaccatttggtcatccaaagaatggacacaacggggaaaacagtgctctccaaaaatgccatcaatcatatcccattcgacaaaaccgagctgactgctattctgaaatttggtgctgcagaacttttccgggaggagggtgaagaatcgcaggatcttgagcttgacattgatgaaatattgaacagagcagagacgagagaatgcgagaacatggagtgagttaaattgtggtgtacacagcacaggcaatctaaagcattaaaacaaatgtaaacacaaattaagatcagcgaatgatttgctcaactcattcaaatatgccaattttaccattgacgaggagaaggatttggcagaaatttcgcagttggacgactcaggcatgggcgagaatagtccaaaattgaccgacaattcgcttgacaacagcgtgaaaagggacttggagaagcaatgggatgaaataatccctcggcaagaaattgagcgattgaaagaaatagaacagagcaaatcgggcgaaggcgacattttgttgccgaggaacagaccgagtgtttcaaatgtgaattacggagggttcactgatgaatcatcggacgatttggacagtgaggggagacggaaaaggaagaagaaaaacagcgcaaagaaagggaggtcattgaaaaaggcacgagtggacggggaaatggacaactcggaggaacgcaaaatgaaaagggaaggaaaggaacggaagccgagaaagcggaaagaaaagagcggcgaggag

SEQ ID NO: 35624 - DNA, 1458 bp, Heterodera glycines
  unsure (1)..(1458): unsure at all n locations
ttttcttggtccatcaccgtttctttactcttttccttcttagtttttggtagttgcagtttacatgccatatttcctatacatttatgccaataagtgggctgaaattagatactggtagtttaaggggttcactgatcatgaataacgaatcccgggcccgtttcgaacaaaaaaagtcaaggattcaaacaaaaatattttaaacgcacccaaaaaacttaaggcaaacggaggttttctatcaagttgtggaagacattcaccgattgtttcaattgtctaccaattgctgctttaatcgacgagaaaatcttctgttgtcatggaggattgtctcccgatttacaaaatatggaacaaatccgcagaattatgcgaccgacggacgtcccggacaccggtaccacgcctaacacaagatagttgtttttagtgtgttgttcaggacttttgtgtgatcttctctggtctgacccggacaaagatgtgcagggatggggcgaaaatgaccgtggcgtttcattcacttttggcccggacgtggtagcaaagttcttgaaccgacacgacttggacttgatctgccgtgcacatcaggtcactcaattttatacacaaactcgcaggggcgtatctagaaacatttttcggggggggcccgacctgaagaccttttttttgggtaacaactgcactttttcactaaaaagacccaattttggccattttaaggcaaaaaacttgtaaaatagtggaaaatggaggtccggcggtgccgataggcgccgccgggaaaaatttttggaaatttgagtgttatttgttaccaaaattgcctattaaattttttaattttcgtttgggggggggaattcgaaaaaattttccatttttagttttaatagacatttaaaaatttaaaattattttttccttattcataataaatgtatacagaaaatgatttgccacctcaattcaaaaaacgaattccttatttacttacagtctaattttattgtaactaactaataacgaactcatttaccatggctttgattgtttttttatttttctattttttatatagtccagcaaactaagtttatgtaattgtcgtataaaaataataaacatggaatacatgaaatgtaaaaaattaaggtggtggaagacggctacgaattcttcgcaaaaagacaattggtcactctgttttctgcgccaaattactgcggcgaatttgacaacgcgggtggaatgatgtcggtggatgagactttgatgtgctccttccaggtgcatttgtgtgggatgagaacaatcgcatgtgataaacaccttttgcagattctcaaaccatctgagaaaaaggcaaagtatcaatacgcgggcctcaacagcggaaggnccctgccatcgccagtccaacgaaacaaccaacagcagcagggg

SEQ ID NO: 35625 - DNA, 1450 bp, Heterodera glycines
ttattttttgtaatttattattataataaaacaaccggttcagtgtcactggctcggcaacaaggcaaattttgtccaacaaattcatttcatctaatgcctttgcaatcaaaccaattcggtccgccggaagtgaagatgagtcttaattagatctaagacatattggaaaaagccttgaattgtgttgtatgttggacctggacttgactttctagattgaccaagagctactgcccaaaatctcagttccaggaaaaagttcttggacaaaagcccaggaaatccttggtcacggaaaaatccagtttggttcaatcttatttctcatgtctggatgcgttaatctttttttcaattgactcaattccgcaaatttccgacaaaatttcttatataaatttatttcacaaattagtggtaagaaaagatctattccattcggctcatatttcttaataaacgttgtttcttgttccatggtcccctttgtttctcttaaataagtacaaccgcgatccttgcagtatcccattggggcaacttggatagtgggggggcacaacgcaaggcaatggacgaacgaatgacacacaacacacacacacccacacagctgagagtgattatccatcccccggggggaaagacgacggatatttacaatcagacgaattggcgtttgataggccaacaaaaaacaattctcgggaatgaattcgagaaaatttgccgggaaagacaattcattttcactggcaacggagagtaattaaagaaaaattggaaaaagaaaaacaaaattatgaaagcgatgaaaaaagaagagacacataaagccccacacaatcaatttgagggaattaatgaaaaaaaaaattgggaagaaaagcgccgctccccgggggcttatgactgatgagcgatcatcgatcatatttttacccggggcgatgtttgttgtctttgtgtgcccgctcatttagcagcatcgaatgcactcaatcggcacaaaacaaatgtgcttttattaagaagcatttttattaggcaatttgatagccttaattagttttataacagttaaaatataaaaagccgttacaaattgtttaattttgaaaaagatattccagatttcgctttcgaaagttttaagaaatgccaaaagcagttttacgaaggggggggggagagcaaagagtccggcacaaaagaggcgtggccatcccccggcggggaaaaggcgaactttgacaacgaatggaagagaaatgaatttgcacgagcggagggagggacgacaaccaacgacataatggatggatgaataatgtgtgcaattcgtcgtcggatgtgatgagaggggaagggggggggggggagggagaaatgaatggaattacgggtggttaatcgcatccttttataccccccggagggggggggg

SEQ ID NO: 35626 - DNA, 1613 bp, Heterodera glycines
aaaaagcgcgcccgaaaaaagtgctttaaaaattgacaaaaaaggtcgttgcattgcttggcctattcccaagctaaaatataaattataaaattttttcgaatttttaataaaaatttcaaaaatttgaaaaaatcccagtcccggcgggatcccggccaaaaactgttaccgataccgggaatcccgtttaaaacgggagtccaggtcccgggtcccgtcccggttcattttccaagtcccggtcccggcaatttcaaaattccggtctctactttaaatcatttattattttctcttgacaaaaatttatgttttttatttattaatttaattatttaattaataggtttatttattttattataaatgaattatttattaactcttgtctgtgtccagaactttttggattttcggcggaagtcatttaaaattaataatttagaaaattttgatttgtgaaaaaatttaaatggatctcatattgataaacaaacaaaaaaagatattttactaaaagtttcaattattaattgttggtataataaagtgaacttattttcttttattttaaatgtttgttcttaatacaaacgaattttcaaaatcgaatgtttattttgtttagttgtattcttgtaatagaatgcaaataataattactatatttaaatattcgaataattagtaaattttttatttgtttaagtaaatacagaaataaaataaataatcaaaatattatttattgcttttaatctaacgataattaacaatcatttgctaaaaataaataaattatttgtttcattgttattcattttatttgaatagatattttgtattttattgataaatatttgttttccaactaaataattgctttattctttaattattcatttcacataacttgtccgcttccttataattatgatccatatctgctcggaatttatgatttgtttatgtatatttgttggtaatataacatgaagatacatttttgtcttaaattttgacaaatatttttgtttatattttttatcaatttatttttaattcacattgaaagaatttaaaaagttattatcgctcgaacttattatgtgttttatacaaaaaataatattattatattatttattatattagttttgtttggttgcatttaatattttatttaatttacatttcttcaatttctaaattgaatttattttgtaaatgattgaattaagtgaaacaatttaaaaaataattgaaaattttttttctggaatttcgtacataaaaattaattctattttcatgtccatataaaatagacaaactcagattcatcactgaactgaaatgtgaagaaagaataatacaaaatggtttaaggtctatcatatggacaattgggacatttattaaaagtccaaaaatgaaaaattgttttttgatttttcatcattaagtttgtattaataaaaattttaaattattaatatgttaaaattaattaaatgatgcttaaatacagattacttcaaaaatgtgactctctcgttattaattatcattgatttattatatcttcgtggcttaaaccttggcgaaag

SEQ ID NO: 35627 - DNA, 1221 bp, Heterodera glycines
tcagcaagcgtacttgcaaatgtgccgccaaatcgggcttctagaaaccggagagcacttctggattcctccgcagttcctcgttaagagcaaggaagagctgatagattatgtctatcctaacttccaacaactccttggcaatgacaaggagctgctcaatcgtttgattctcgctccgcacattgacacgtgtgatgaagtcaacgagatcatgatggcgaatgtgccaggtcaagtgcgggaatacttgtccacggataagccccttgacgaccggccactggacatcgatgagattgagtccgaagtggctgcgttgaaccggcgcacagactcgggcatgcccccgcacagtctccggcttaaagtcggatgcgtcgtcgtccttcttatcaataaaagtgataaggaaggactgatcaatggcacacgcatagttctggaagaacttggcgatgatcgcctcattggtcgtgttatcaatagcaatgctattggcggccaagtgagattctttcttgaaagaacacgaaatgtctatgaagacaaatcgcctggcggcataaaatatgagcgtttgcagttcccaataaaacctgcattcgctatgaccattcaaaaaggtcagggccaaacaatccgcactgtcggcattgatctggaaagggaagtattttcccacggtcaattgtatacggccttctctcgggcaacggacggaaacaatgtccgtgttcatgctcccaaccgggaaattgatgcccaaggccgagccaaagtgctgaatattgtagctactaatatgctcaagttacaataattggcttagtccagagcagttgggcacatggtttttggagagatgccaatcccattcccatctgcactatgttgggtgcgaaaatggtgagaagcttggatccgggacatggaccggtcagccctctttagggcctacaggtgaattgccatttagcgctcaacccaataacgtgccaacgcctggactaagggagggaggagggatgacgtgcaacgttagggcacttccggtttccattgcattatgcgatgtgtcaactccaattattggaggaaaccaagtgcatgtcggctgacgcaaagaccctaacagactaaaacgcgcctaggtagcgaagctcaagaagcgcgcagcgctttccccagcgccaccctcgcatgcacacacccgctagt

SEQ ID NO: 35628 - DNA, 1222 bp, Heterodera glycines
cagaatttgccaacgaattttgtcgcattgtgcgttctttttgaattgagtaaattgggattttaggcgttaaattaaataggaccttagattcgagaatttttcaaaattttgacgaataaatcccaaattctgccggcgatttaaatgccaccatttttagcgttacattgacatcggtgggagtgaaattgtgcctctctcgggcgtgctcagaatgcatcgggaacacagccgaattgtgccgctttgcatgcagctgaccctggagagtataaagccaccgaacagagccagcgaatggctgcccaaagagtgcacttttttccgcagtttaatccgaacggacagagcgatgagctgtcgaattcgacattcgaaccaaaggtgggcctgccctttgaaaagggacggatgtccactgaatcctttctttggtagcgccaattatcagccgagcagttacaattcgtcgccgcaaagatggtcaggagtgtttggcgtcacttctttgctcaatgggaactttcgagtggaagaacaaatggtcgggggagttgagaacggagaagggaatcgcgaagtgatggccgcgtgggccaacctcgagaatgggttccactgatgcgagagagagagagatttctttctttgtctatgtttccgaatgaatggctcaattttcttttgcctttactcagtgttcgcaagcttttctaacatgacaatccaagctaattcaggtttttaaaataatctcttgcactttgctccttagctgagaattttccatttcgaatatttacgaacactgctttgttttatttgtgctgttctcttctcattttttctcctgttttttcctttgtaagacgattaccaattttttttattcagtaataacattttacaatttctctatttattgtatttattttttacaaataatcagtttttacttttttttttttttgtagtttttacatagttaagcgtaatatattaccgttaatccatgtttagagttcattatctgtcccatcatcttcgaattgccggttttgtttctctgtccttccctcgcctctttctctgtccattgcctttgtcccgttgtccccattggctgcttaacattgccaataacatttggtcgatgccgtcaacgagaagtgacgatgaattccgtgggagtgccataatgggcattggtgccacctcc

SEQ ID NO: 35629 - DNA, 960 bp, Heterodera glycines
ctaaagtgcaatagagccagggggtaaatccgtctgttgccagttgtttcgtatctgtgcaaaatttcaaaaaatttcgataccgggccatgaggctaacgcgcgggattcccattttttcattaatttttttttatttactttttcatcaatcattcgctgtgcaacatcggtcgccttttggcgtgccgtttgctcaacaaatgggtccacttgcattgttcggggcaaatcttctggacagttcgatggcacaaccattggttcaagaccctttagaaagagatttaaattttatttggcattattttaaatttaaaaattttttattccttgttaaaggctcacgaggttgtcaacaaaactattgttgcaggttaaaaagcccaacctcatttccttacaatatttttctcccaaaaaatagttttaaatacccgaaatatgtaataattcggtttgtttgagttttaatgtgcccggactgaattgggcaattcattttttcgagagttagcgtggaagcgtgtaagtcagtcccaaacttgattcatcgttttctccctaaattctaagccaaacacatttgagaatttttccaaaaaattatggaaaaattagtgatgaaaattagagtcaaaggaaaaaaaaattaatatattctttaaaagtaacactgctaaagtgtgcaagtggcttaatggctagtctccttgactttcccttcttcttccacctggttcaatccctctacagaaattaaaatattttgaattttctttttttgtatactcgtgggtttcctatcgacaaaatatgattcttaattttttaaattgtattttatcattttttaaagaaaatccatacaaattgagcctagtaatctcataaaccagcctttttttgttgaaatttgttaacaaatcacactcaaattttcaaaattttccccggcgg

SEQ ID NO: 35630 - DNA, 1767 bp, Heterodera glycines
aattagtggagtattagtagattgggttttaacaaaaccgaattgattttcggatattaatttattcaaagaaggaaattataaatgtttttgcatttattttttcataactttacatagacagcaagtaagagaaaggggtctgtaattatgtggatcatttcggtcacctttcttaaaaagaggtataacaatagattttttgcaaatttcaggaatcttgcctgtgtacctgtatattatgaaaagttcggaaattacaggagacagagtaaggtgtctactacgtaagattctataggtattctcatcaggggatgtggattgttgattcggtgaatgatgtacgatcatagatagttcatcatcagggcatcagccacgacacatacggctggcaataagcacagaagaaaagcgaccgaccgacgcccgacggcagcggctggtaagaatttgtcctcgtcttcgtccgctccgtcgccgccgccgctccgttcccgaccgaacgaaacgaacggacggacggacgaaggaatatttatgtaattgacgagcggcgttccaattccatcagaaaaaaagaattctttccctccgtcgttcgttctcctctttttacacacacacaacaaacacacaaaatatccctccgttcatcgacaaaaaatctccacaaaaaaaagaaaaaagaatcggaaatgcactaaatttttggctaaaaattttgggaccgaaaatggggagggaaaagcttcaaatttcatcaattttatttaaaaagccctttccctttagaatttcccgtgttaaaacattgttgtgtattggtaagataataaagcggaattttaaccttggttaattaatatttttaattgactgaattggttaacaacttttcgattgtttaattaaaaacatgaaaaaagcacgctttctcgagacccacgataatgatgaccttattttacctgaaaaaagcatttcacaaaaacgaatttgcttatttgattgaataatattttacggaaatcagaaatttaattctataaaaataaattttaattttaaatagaacaggcaaagaccggcatgagaactttttgaaataattaccaaataatttgcattatcatcgaccaaattttgcattaaaataaatgacccaaaaacacacagattcttctcagcaattgcggaaaatttctgcctgatttaaaccggtcgcaccattttatttctcagggtttctttgaattgaaaattaaattctaccttaaaagtgaaaaaaaccaagaaaaaagtgataaaaatctcaaaaagaagaaaaaagttaagaaaagccaaataaaacatatgtaagaatcttcaaaaaagtgtaaaatactttttaatcgttttaaaattcccatccctaataatcgcaatttgaatcactaaaaaatgtcattaaattttcgttggaactattaaatacattttttacttattaaagaataaaatagcaaattttaccttattctttgcgctaattgttttgctgcactttcgaccaaaggcttattacagtaattgtgctaccgacgaataccgtaccaaaggtgagaggaaaccctttctattttaataaagaacattttcatgagatttttggaggtatttttttgtctatggcaatttttaaaaaatgttgctaccaattcaatttaatgtacgagtataaaaagggcacggaccaacccaaatcccattataatccatgca

SEQ ID NO: 35631 - DNA, 2003 bp, Heterodera glycines
  unsure (1)..(2003): unsure at all n locations
ttcatcccttttttgcccggggaatcaaccaaagttaccagtattgggggcctgattaactatttaaattattttccctttggatcggggttagtttccctaggttttcctgtattttccaatttattaattttttccggtttttctgtatttttgtatttttaaatcaatacctataatatttccccttgattaaaattttttttgttaatgctatatttttcgttttccttcattccaatggaccctgactggaaattctaatacaattataggtagagcatgaagcagaacgatatcccgcgcgagaatttacgatttaaattaaattattggttttaattcaatagaatatatgtgcgtataactttataaaacattaaaactattaagattaaattaaattaaatttttatatttttccgtttgaaatttttcttccaagaaaagtttattgccatctgccgcattcaaaacatttttatttctctttaaattcagatttgtttttgtataatgagcctgttgggcgtatcaattttgttgcaattttgctatttgcactataaatgtttttttgctaaatgaagtactgaattaaaattctaatacaattaaaggtagatcaataagcagaactggatcccgcgagagttttgcggtatccaggccacaattataaatttcccgggattaatcccgctggatcccgtctggtaacattttgagtctcaatcccgcagaaggacacgcaatttgctttttgtgcgtgaacccagcgggaccagtattgaatttttttttgttgagaaattcaaaggacattatgccaaatattttctattacaataaattcaaaattttgataaatgttaatattgaattatagaaataaatttatcataataattagggatgtcaaaaatatgtacaaaaaatggtcaaaatatgtacataatatgtaaaaaaaatcccgaaatatgtaagaaaaacccaaaatatgtaccaaatatgtaaataaaatttttaaaatggttatttttttggaaaaaaattcttcggaaagggtgaaataggcacaaaatgccatcccgaaatatgtaaaatatgtataaaaccccgaaatatgtaaataaaagtccaaacttttgtttgcaaacacaaaaaagaaaatggttttcctactaattagagcatggagaatccaggaaaaaaaatatgtatttacataaaattgacatccctaataataatatttctaaacgatggtcgaaaataaataaatatgccaacttccattctttaaattcataatcattatcaataaatttatttttaacaatattttatttaaaagtgtcttgtttcttttacattttttattattttaatgtaaacatgtaatttgtagtgtatacaaaaattttaggcataattttaatttagtttatagatttttttaggattaaataaattattatgccttgttgtgaaaaaattttaaaaaataagctcaaaaatttcaagagaatgtaattttaaaattaatttaatttcgtttcccaggtagtatagtggttagtaaccgcgcctgtcacgtgcgagacccgggttcgattcccggcctgggagttaagttttgtatttattaaaataaatttcgtcaaaaattaaagttcattaagaaaacattctgtacagtgcgagattgtttcctcaattactagcatcaattagaaaaaaaattgcttaaaatgtgaaaaatttaatttgggttgcgttaaaagaaatgtcagtgaaaagtaaaaaaaaactttctcttgagacatcaacaaaatttttcaaanatttagaaaacgttttagaaataaatatatagctttttcaaaataataaaatatattgattaattnattantttataaaatattatccaaatgattctgttcattatttgcttttttcaaagattttctcatgaaatcaacaaattttttcaaaaa

SEQ ID NO: 35632 - DNA, 639 bp, Heterodera glycines
tgatgactaatatctaatcatttactctttttctcattgtctttactctttttcttctatccctcttctttgcttatagccatatgacaatttgcctggggcggtccttccctttgtctcctcccccaatttgcttgtatatgcttttcctttgtccatacacacatcactccacctggccgttggatccggatcccgaccccctcccttccccgctccgaatcggggaagctcaccattgttaaacatgtaccttcggaataaaggatattattccacgtattgtactttctgtggtgggcttatcaaaggtacgataacaccataatcatggaggtcccgccacgggaaagggagaatgtatttaaattttgggctgtaaatatgctacacacttaataaaattattttattagcaagggatcaaaaaaatattatttaaaactttaaaaaataaaaaaaaataaaagaaaaaagaagtgactaatcccaataaatggaagagataaaaagagtgatccatccgaaaaatggtagagtccgtgtgaaaatgtaaaatgccgatgtgcttcagacaatcgaaactgaggcaggcttaagaaatgaatgttgaatgtgacctcggtaaaagggtagagc

SEQ ID NO: 35633 - DNA, 1184 bp, Heterodera glycines
ttttatttacaacttaattttagcactctgatgctttagtatcaaaaaggaagatggagaaaaaattttttaaaaaattttcccttatattttggttatatcgttttgcttttggtggggtgcttggaacagtggaatcatgcgcacccgtccgatctggcaagttaagcaacgattgctgactagccaaaaggttcggtgccgtgatgaaacgaaccagcactgcttaccccgcggcacccggcacggtcccccgaaggaatggatttaattaaattctctccttcggggatttttttccattaggtcgtccgttagcgttcgattgctctagtcaatttttcaaaatttttgttgaaatatttgtcgtgctctgaagggcgtgggagggggggggggcgaaggcccccacgaggccgcgaagaggccgagtgagtaccttcggtgcaggaaaattattaaattttaaaaattttttaattgctttttaaatatgccaaaaaatgtaggcttaacttttttagtgaaaattcgatcactcatattttttgctaattgagcagaagcgtaccaaactttgcagggatactccccggtaaaggactaacttacactgaaatgagcgccgagctagctggctcaaaaaaattttcgaaaatctgagtctttcgtttttatttattttttgcaaaattaattcttaaatattttttcagaaagggttctgaaacgcaccaaattttatttacatgttagtttaggcactctgatgctttttctatcaaaaagggagatgaataaaatttttaaaaatttttaattcctttttaaacaggccaaaaagtttaggcttaacttttttttcagaaactgatcagaagcgcaccaaacttggcagggatactgaaaggaagagaaataacctattttaaatattatctagtcagttcatttaaataatttttatccaaaaaatttttatttgggtgttcggggcagtccccctgatccgatgcgcccagatttatggggagaccgaatccttcacggaatagcttcactatagcctgtacattaattctacgtaggattttccctccccataattgtaggagttccccagcacggacacatgaaaaaatcgaaattatttatgggttcggggcaatccccccgcaccgatg

SEQ ID NO: 35634 - DNA, 1424 bp, Heterodera glycines
  unsure (1)..(1424): unsure at all n locations
ttaacaaaaaacggaatttaatttttggaaaaataaacaaaagtattttaaagaaaccaagccatatacataggttaaacgcttttgtgcggcatgctttttccaaaaaacttttcgagtacagggggcagaacaggggtggcgctaatgcgatttgttagcagattttttcctaaaaatgacaaaatttacgtttttgagccaattttgcgggggaatgagtcgcgggggcgggggcggggctgaggccaaaaaacccgtcctgccccgggaacgcaggcgggggcggggccaaaaccnctaataaaaattttcagaaaattttcattaatttaaaaatattaccaggaaaaaaatttaaaaaattacccatgactttaatgaaacttatttgttagtgaattttttaaaatttatttatagagaacactttgagttattgaatgatagataattgggtttcttccttggcacttttacaaaacgatcagcactatttaacgaattttgttaaaataaaactttattaagtttatttgccgacagaacagaaatagaaatgcatgaatgtggtgaaagaatttccatagccaaatatgatcaacaaggatttcggcgaaatcaaattagacgaaactcgaaaggtaatttaaaaaataaaaagatctttaattaagatttttagtatttaaaaataacaaaacatttttaattcactttaagacaattttcaaattttaaaaagtctgaatgaatataaattttctgtgtatgaatcaacaaaaatgttgaagaaaatttacgaacaaatgaaagaaatctcttatggtaattacaattcttttcatggcaacaatcaaactgaagaaaaaatgccaaaaataattggagaattaattgagcaaattcataaagatttcagaatattgcatgaagtaaaaaaattcgaattttacttattaaaaattataacggattattttgaagaatgtgaatattttcgactacaaaaatatattttggtaaatttggagagaatgcttaaagaaaacggaattgcaaatgaaaaaaacgaatatcatgcgaatgttgacaaatttattcaggaaaaatttgaaaaagaatgcaaaatgtaagatttaaaagtgaattgaaatggattaaacttgctacaccttggaaaattttagctgtgcttatttgcaacaaagtacttgtaaaaaaaaacattttgcccaagaatgtaaaataaatttaagtttttggcattctgtcaaaattatttcattttttgctaaattatcagtattttctcagaagcgcaaaatttaagaaagcttttggccaaaatctgttaacaaatttcatttaaatattcaaaaaaaaaaaaattccccggtgccgcttatcgcgcttatcggcac

SEQ ID NO: 35635 - DNA, 594 bp, Heterodera glycines
ttctaatttttcaaattattcctttttcgataggaattcctttaaaattttaacatttaaaatcataaaatattgtcatttttggactaaatctattaacaatgtgcactaaaatttcaaattttccccgatttgaaacaacaagaagggatggcccagtatttgaaaaggtgcaaactaccaaaaatgagtgcatcgttcaaaaagaattgcagtagaagggaataattcttaattgtgatacgattaaaatattggaatttgtctttacagatatttgacctattatatcttataaatgttattcgcgagaaaagttcctaaataagaagagttatacagaaacagaatatatcggtttcatcagaatgactactgtaaatttttgctaaatatcgtatgtagattgaaagacctgaaattgtgtcgctaccgtttaatcaccccctcgtcccgtgaagggatgttagcaattcatgcacatcctactgatgccccggcacctaaagggatatgtgtcgaatacactcaagggccgctaaacaaaatacccccgtctcaagacatggactgatagctcgacttatccattaa

SEQ ID NO: 35636 - DNA, 731 bp, Heterodera glycines
ttattcctcatcaaaacgccaatggatttgatggtttgaaatcactaaattttggagggaatgcgacggggggggggaaaaaatctttaaatttcgacacggagccaaaaagagaatgcaatgctttatcatgctcatcagtcagaaggctttgttctgctgatcaattttaaaatatttgttctcctcactgttttttcttctccaattccccccccccccactcactttgaattgttttgccgaatttgcgccattggccgctacccaaggcacgctgaaacacattctctaagcctgaaagttaaaagcaaaaattcgtaaaacaatattaatggagaaatttttggagagaaggcgaaaagggacaaacgaaatgaaacgaaacgaaacagcccaatgggaagagaggggggggggggaggaacaaaagccatccgaaaataattgctgaattatccaattgtaagtcactgtggcaaagccgactacacttctgcgaacagtttccgttgtacgtccaaattctcagaaattgcctcaatgaccaaatcggcgcccgacaccgcctgcgaaatattcgtcgacaggtaaataattggaaaagaggcgcgggtgacaagttgattctgggttctaaaaaaaagcaataatttaacatttatccgaaattcaatgaaaattggtagggtaactcacccccgagtcttcaaattgattcttcggcaccc

SEQ ID NO: 35637 - DNA, 838 bp, Heterodera glycines
cagggaaatgagcaaaggacggaggtatgaagaaaacacagctaatgagcgacaatacagaaagtcaccaatggaattctgataattaataattgatttaaatgaacaatcgaattttattcattttgaatgtcattaattagggctaatgaatatttgaaatgtcctttaattgtttctttttcttcacatttacttatttatgattgcaaatgctctaatttcgcctcctcttacaatcagcagaaagcacacgatttttgacaattattcgccatccaaacattcgcacttccgttttggtagcatctgttctgagtcgcccatgtcccgcagtaaacgttggcgtcgacacattctcaaaggcattgactgatcaatcatttgatttgtatttttatcaatcgatgaatccgatcgattcatccattgtttccgcattgattggctgattaagcaacgcacccttcggcctgcagtacattttgctcagtgcctccgcgtccgacggggacagtccctcgcgctgtcccatctttgcgtcgttctcttccgggttcacttttgccgtcatcgttttcatcccaaattgacgtgccgcaattttgctgtcgtaatgcataacgctggagaagtcgtagcgaacgccgtaactgaaacgaaaagaacgaactgacaaaagaaacagcgacaatttgtgaacctcgagaatttgttggcaggcgaaacggcaaacatgtcatatgaaatgggaagggatggtcaaatccgacttaatcctccgccgatcaaatgaagaggcgatagccgacttacatcgctgggggtccatgttatt

SEQ ID NO: 35638 - DNA, 1105 bp, Heterodera glycines
acagtcattatcgacgtgtcaatttaggggttaattcacgtgacaattcacagtcatgatttacgtgttaattcaaaatcatgatttatgtgttaatttacggtaatgattcacatgttaattcccgggcatgatttacgtgttaatacacggtcatgattcacgtgttaattcacggtcatgtgcgtttaatttacagtcattattcagtgtcaatttacgggttaaatcacgtatcaattcacgctcataattcaagtgtcaattcagggtcatgatttacttgtaaattcacgggcatgatttacatgttaatacacggtcatgatttacgttttacttcacgggcatgatttacgtgttaatacacagtcattattcacgtgtcaatttaggggttaattcacgtgacaattcacagtcatgatttacgtgttaattcaaaatcatgatttatgtgttaatttacggtaatgattcaaatgttaattcccgggcatgatttacgtgttaatacacagtcattattcacgtgtcaatttaggggttaattcacgtgacaattcacagtcatgatttacgtgttaattcaaaatcatgatttatgtgttaatttacggtaatgattcacatgttaattcccgggcatgatttacgtgttaatacacggtcatgattcacgtgttaattcacggtcatgtgcgtttaacttacagtcattattcagtgtcaatttaggggttaattcacgtgtcaattcacggtcatgatttacatgttaattcaaaatcatgatttatgtgttaatttacggtaatgattcacatgttaattcccgggcatgtacgtttaatttacagtcattattcacgtgtcaatttacggcttaaagcacgtgtcaattcacggtcatgatttacttgtaaattcacgatcatgattcacgtgttaattcacgggcatgatttacgtgttaattcaaaatcatgatttacgtgttaatacacagtcattattcacgtgtcaatttaggggttaattcacgtgacaattcacagtcgtgtggggcgtgttaattcaaaatcatgatttatgtgttaattta

SEQ ID NO: 35639 - DNA, 1339 bp, Heterodera glycines
  unsure (1)..(1339): unsure at all n locations
attagaatttgataaagaaaataacgagcatagctgcactttctttacatcaaaccatatgtgaatggttatgaattgttgaaaatcctcgatatttttatcgttggacaaatggcagaacaaaaattatataaaaaagaattcttggggtgcaggacgacataacataaacaagcttgcgcatgcctatgtaagtaatccatatgatagaaaattttatacagtatgttttttggagggggaatccgaagaccttttgttgttctgtggtcaaaattttaatgggtccggctgtgaagacgccttctaaagtattaccaaacttaaaatatttggctctattccggtttacgctcttaatcattttagccgtcaaaaacaaatttacgttaaaactattaaaaaaatatccaacaaatacatagatttattattttgttgtacgtaaacgcattgtcattccgaatcctgtcaatcctgctaatatgcacgtcgaactgccaaacccaattgatacggaaactcaaaaagattgaagaattgataaaacatcacgagaaaaaaacgggcaagcaaattgagtgccatatcaacaaaatggcaagtgatttttgaaattttaatttggggaataaatactgacaaagggagggatggcattccgaggcccaaaaaattttcggaaatcggaattccgtgggtcaaaattttttcggaaatcggaattccgaggcccaaaaaatttttggaaatcggaattccgaccccaaaaatgtcggaaatcgggaagtcggaatttccgtgccaccctggngaattactaaaaacatttgtgaaataccttttacttggttaagaattaaaaaatttagcctattaaaatatttagaaatttttttattatattgtatattttttgaaaaatttccgatttcttgcaccgcaaaaaagtggttttgaaaagaaaaaatagtcaaatttatgaaccgttaataatttgatttccgatcaactttttaccgtcggatccaatcgaaaaatcttagtcgacccatcagcccctttcaatgcatcccgccagcccctaaaaatttatttttcatcattttttgatttttggaaatttattgaatttaattgaaattttttcgaattttccaaaatcccgcaatcccgcacgtttcaatttggaggtgacaaaaaatcccaagtgaaatttcgaaatgaaattttaatggatagagaaggggcgctactttaaaagtgggccttttttaaaattttttcaaaanggggggacccttttgttttgctaaaattttttttgtgatagtcataa

SEQ ID NO: 35640 - DNA, 1137 bp, Heterodera glycines
aaaataagccaaaaatacaaagaaaaataatgttacaccgtccggattcgaacctgctgccccccccctcagaacatgtcccagaatccccaatcacacagggattctgaggtcttgacgatgtcaaaagtaaaatctgatcacgtattcgtgatcagcggcccaaataacgcctaaagacatgtttttggaagatttttggtgaaaattttttttcacttaaaaaccatgtgcacccccctttggtcccgaagcccaaaatcacttttatttttgtatctttttttaaaaaaatgataaaaagatgaaataaaatttatataatagagcaaaaaattgcagatttttgtagtattttactcttctctaatgacttttcagaaccgaattatgaatttttttctgaaaaatcgaaaatttccagaaattctggaataactttttttcttttgaacattataaaaccaaataaatctcataaaattctcccgattttttgctatttttaaagctttaattcacttaaattgaccagtcctccattgagttatgaattttcaaattttaacccaaatttccaaggaccaaaaaaattaaaaatattttcgaatttttaaaaaattccaaaaaatctgaaacttaaaataaacatcatatttgtgctcaggaccctaatttaccccagaaaaaattttttcaccctttttttcaacccaaaaaaaatttttgaaaatttctagggggcctagctcgaaaatttttgaaaattttcgaaaatgaagtataccgttcgatagagcttaaaaagctctacaattttgctctaaggccatttttggctaaaaccaacccctgacgagttatgggcccgggactcaaatgtcccgctcaggccaaaaattttttctatttccggaaaaaaatcgaaatttttccaaaaaaattaccagtcgatagagctcaaaaaatgatgttttggaagtggtctccgtttttcctgaaaaattcgttaaaaattcctaaaattcaaaaaccaaaaaaccgttttttaggcctagcgggaaaatttttcaaaaatttcgaaattttaaaacttgaaaggatagcctttcaaatactacacatttttgctcagaa

SEQ ID NO: 35641 - DNA, 879 bp, Heterodera glycines
  unsure (1)..(879): unsure at all n locations
tcacaccctaatcattcaaagttatttccgagtcccggacacgattataccggtttcgaccatttccaagcaattcttccgctcaaaatcattcgatcaccactcctttttcaaatcgtaaatattttctgatcaaggattgcaaaaactgatcattgtcaacacttactcgctcgctgttgctttgatcagcagcagtgatcagcggcgcatgataaaagcattaataatcagaagcaattcagcaacgcggctgacgtctcttacgtcacaacaagcacataattaaccgatcacgcaaaaatgctcgcgtgcaaaaactttgttgaaaagcaatttattttttcgcccatggtatcgcagtcaattgagtctcagccacgtgcgaatttgtaatagagtccctgcgggcacttttccatttttgaggagttaaaatctttataatttaaaaatttcgaaaaagcattccatcattgaaatgggaaacttatttattagaaggaacaataaaacttgtgaaatactttccgggctataaagttatgatcggcaattctaattatctacaatttaaatagcccaggctaattaatgtcactgttgattaaatttaagaaatattgtccaaattattttttcatcaaaatttcacaaaagaattcaaaattgaattgggaaattatattgcattttggaccgaaacaataaaattcgttaaacacttttccggctcaagatttgcccggtcggcaggtcgaattattcacaatttaaatagtctaggcaattaattaatgccagtgttgatttanatttgtaaaaaaaatactcaaatttttgctggtttgactctaaaattattattttatcgcatac

SEQ ID NO: 35642 - DNA, 618 bp, Heterodera glycines
tcgaaatcgggtccgagatcccgaattggttgaaatggatgccatattcgtaatcagcgcccttgaaatccccccataaacatgcttccaagacttttcagaacaaaaaaaaattttcttcaaaaaggggggtaccagctatagtattacccatagttggtaaattaaaaaaaatttcgatttcttaactaggtaggtagatgaaaacgggaaaaactctgctaatacatatatttagtataaaaatgcccccttttctttcctcctcctcattctaattctctcattattctcccaatattttccggtcattctgttgctgcaaatgtcttcagaaattctgtactttttttatttcctttttttttgacttttcgcatttcttttgctcaaattatgaccagaattgttcaaaaccaatttttatatttggaagctttaacttcaattttggattccctcgctttgatgcttttcccgaatccatttttttcagttggtgtgccgtgtttcttctattggtcgattgtgccatcattcttttttggctctttttggacaatgccaaaaaacgacgacgccctcacaaaaaagaaatgtaaaataaattaataaaaa

SEQ ID NO: 35643 - DNA, 1165 bp, Heterodera glycines
  unsure (1)..(1165): unsure at all n locations
gcctgcgctcgtccgaagcgctaaagcgtcagaaatcgcacctccgccatagcggcggtgctgtcacaagaaganaatgaagaagagagaaagagagcagcgggaaaggccacgggcattttcaaaagggccgtcctttctctgtcatttcctcccccgcccccaaaaaagtgatcagagcgatcggaaaatgcttacacgaacacctattttgtgagttttaccatggatgatttggttttaactgtttagcaaacggcacaaaaatgaagcgtcgttggcaaagtgccgacgaaaaaagggaatgcacaacggccgaagacaaccgcagcaacggcatttgcggaaatggcaagggaattgggggagaggcggcaaaggcactggcggacacggcctcaacttctgctgctgaactgagcccaccgcaagtgaaacgcgcgaaaccgcagcaaaagcgacagaaattcagctcaatcgaacatttgcttagggaggaaaagcgacgagacgaagaaaatggaggaagaggagaagaaaggataagacggaagaggagcatagagaaggaagaggaggaggaaggaggacgagagggagtgggaccaaagagtagaaaagagggagagagagaaggacatactaatgagagatacgcaagggagagagaagaagaaagagggaagataatgatggaagaaggagggagcggaaaagatagggaagaggaggaacagagaggggaagaagggcggcagagaatgggaccaaagaggaagagaaagggcgaggaggaggaaggcattgaaagggaagaccaggagggggaggaggaagaggaggaggaggaagagttgaagaggaagaattggctaagggcaatcagtgtgccggacaatggaagtgcgttggacggactgaactgcgagttggagaacgccgagacgtggtcaatgggcgggggggggggccttggggagaatttgactttgctatggggggaattggacatgatttaattgtcctaaaacttcgggagttctgctgagccaacggagtttaatcgagaaaccgaaggggaggcaaaagtctcgaaaaattcaaccaaaaatgcttttcagggtaaagttcaataaactcggcactgaaatggtcagtttgatgt

SEQ ID NO: 35644 - DNA, 1422 bp, Heterodera glycines
  unsure (1)..(1422): unsure at all n locations
aaaaaaatcaaaaattttattgattagcctttataattaatattcaccctaatttaaaaagagaaataaattcanaaataagattaagttacacgattaactcacaatattattttgttgtgaattttgtgtttgctttccatggtgtctttttgttgaacagcttcagttttgccaacatttcgtggtgggttttgttcgcttacatcactaatttttaaatatttacaaatatttgattaattagttattttttacggtaattcattagttaccaaaatgcttcttcgtttccctggcgttccaactcatcgcgtcgatttttgaaccattcctaattaattaaccaaaatttaattatataaaaaatcccaaattcgagattttaattctcactttgacttggtttatcgattgattgctgagcattgccaaaaaagtacattcagtacgattcggatattttgtcttcttaaataagccttccaatggtttaaattgaggggccaaatccaatggtttgaatggcgtagccaaaagcttttgttgtccatcctttaatattttataatttaaacgacggcatttggcacggccaaaaatggcacaaaccgaagggcagaagaaagaatcaatgccaatgccattggcattcggctgagactgaacctgcggcataattattcttattgcatagttttgatcattttcacaaacatttttttgttgattgtcgtttgctttacattctttatgctgtctgtgctgggctcgtcgcttttggaaccacgcctaattaaatttaaatattttaataaattagaaatttaaattccctctaattacctgaatttggtccaccgtaatccccgtctcccgtgccaattcctcgagcatgaaaatgtccgggtattttctctcatcaaatgcgcatttcaaaatgtccaattggtcggacgaaaagttttgcagtttggtcttaataaaatggaattatttatatttaaatgaatggcttataacaccatttgtctagctttgtgtccaattagctcagtttggtccccattttgtggcattttttccttttcgtgttgcagatcgcttaattattttaattgaaaatataaaatttagtaattttttgtgggtgctgtttaacactaattagttagttacccagcaggtgtttcttcttatgatccttgccatttccattggtcgcgccgattatgaaaccaaacctaagcaattaataaaaacaaatattaataataattttaaaaaaacgattaaaattgctataaaactcactttcacttccgtttcagtaaggccaatttccttggccaatttttcacgttgagaagcactcaaatatttgttagccacaaattcgcgttccattctctccaattgctc

SEQ ID NO: 35645 - DNA, 980 bp, Heterodera glycines
  unsure (1)..(980): unsure at all n locations
ggggggggtggggggggtgacggcgagaccggcggcggcacggtgcagcaacaaagaaaaatgaatgggatgatgttggggcaattaattaaatggaaaacccgagagtgatgggaggggggggggagagaaagagatttggcgcggatggatatgtgacagactgcggtagaagcggcatagccagcagcagaggcattggcacactgtccggccggcgtcgggccaaccacaacgcatttttttttggcaaggcacacagcgcacagagtaagtgctgtgagtttagtgcggttgcggtgggcgaccgctaaattaagacgtggacgacggagcggcgggaagagctagaatggattttggattgtcgtcgaatggggggacggacggtaaaaaatggtaaaagatttgaggggggcggaaaacgacgactttttgctgctgatgaggagctgcggcgtgtgttctcgccgttgccaattatatgtacgactaccaccaaattttctgctcattttttctctgtccgtcctccggtccgttctgcaacactctctctcctccctctctttctctgtctcttttctatctctctctccttcccactgtccgctccacccccttctctctctccgccctcatttctcactgtgtttttctctctctcccccctcactcactctctcttttctcttctctcactctctatctctctccccctctctctcttttctcttctctctctctctctctctctctctctatctatctctccccccccctctctctctttcctctcccatttgtcccctccccctacactttcaatccctcacgncgtcntccccnttccacacaaatnanagaatntcntccntcnntcnttntgtcgtcctcaaagattcnttttttttnnctnctcnanttnttttcactaaggagaagaatttctgttaaattgcgactgatatgatgtgtta

SEQ ID NO: 35646 - DNA, 1074 bp, Heterodera glycines
tgttccatgcctcgtaagttttgccactatttgtctttcctttaaaaatcaaaaaataaaattaatgcataatttataaacacctgcatgaaaaatgatctttctgttgatttctcgagcaagagggtaccaattgtgcggctgagtaagatcagaaatgacttgaagctctttaagacattccaaatgggggaacacacaacgggcgtgttttacgaagaaagggtacaacgaatcgacgctctgttctatgataaagaaaaaacaaaaatttatttgatgggaaaaaataaattaggcccaaattaccctggttttttatgtcgctgaaagtaattctcaaagtcggctccatactttgtggactcgcattctctgaacagcaaagcaacctaaacaaaaacatttaattttttggctaatttacatttgaataaaggatcaattcaatttcgacctgaagctctgaaaagccttgtcgaagagacgccccgtgatgttttgctcttcagcaagctccctgatatgcttttgttgtgcaaattgttcaagtgttgctgagataaattggcgcgaaagtttcgcttgaacgccttcaaactacaaagtcattaaggaaccaaggctataactctgataattacctcaatttcagtgtatcgctccattgggacacgttgcggcaccaaaatgtcttccaatggtaattttgatatttcaggctttccaaaacggtctcccacgctttgtcgccttcgttgcctctaaaaatgtttttaatgcgcaaatgcatgtgaaaattgataggattactggtcgttcagttcgggagaaggcacggcaataattttgatgataagaatgatgtccgcataataagaagcaggacaatttggcattagtgcgagaaaacatcaataaacgaattttgaattatttatttcgaattttatgtaaaaaaagtgagccgcaaaagagattttcactggtttttcgataaatttcgggtccggagtgatgaatcaaatgataaacgaagttgtaatcaatctaaattttattcatattcttttg

SEQ ID NO: 35647 - DNA, 728 bp, Heterodera glycines
acccaagcgaatgagtcggaatatcatggttggctgtcctcccgagacgaaaccaagaaacgacaaatgcaaatgattaactcagagattggttgaattaatgaaagaaaagtttggcaaaaacgggcgaaagggtaaaaaagaaaggcaaaataaattaaaataacaaacgaatggacaaaaagtatctaaatatatcaacaaaaatggttagcgaattagtgcgtcaataatagaagaatccgcgacattttgacgaacggcaactgaaaaacgcagcgaaaaataaattaatgaaatttggacgaatggaaataaaaaaggcgcccacgtgcactccttcttctggcgaccctttgcatttccatcaatggcacaatagtcgatggtcaattcctcacctaacaaatgaaatgcagaaaatgattgttaggagattcaatcagttttggaattgagtgacaatttttgaaaaatcagcaaccggttttgatgtcccgcttggcaaagaatgcaatccgatggtacgactcgtcgaaacggtcggcgaacaccgcacggacaaccaaattcggggagcaggaatggttgatgaaacgggcctcgttgccataagagacggcgtccacgacaaactgacaaaagagtgtaagtaatgcgaaaagaaatcattctccacagaaaaggtaacatggacagagagagacacgcggaaagggagggaggga

SEQ ID NO: 35648 - DNA, 316 bp, Heterodera glycines
tgggcatggatgagttgggtatggatgagttgggtctcccccctagttgggcatggatgagttgggtatggatgagttgcttttatggatgagttgggcatggatgagttgggtatggatgagttgggtctcttcccttcccttccccctctcctcccttcctcgctcttcccttcccttcccttcccttcccttccccctctcctcccttcctcgctcttcccttcccttcccctctcctcccttcctcgctattcccttcccttcccttcccttccccctctcctcccttcctcgctcttcccttcccttcccc

SEQ ID NO: 35649 - DNA, 1040 bp, Heterodera glycines
  unsure (1)..(1040): unsure at all n locations
atgcgcattcactataggagagaggagagaaaaagagtaattgttaaaacccgaaaaaacgattaaattgtaaaaggacagcggcaactctaaagccccagcctaatggtattctcgggtatgcttagcaccactgcgcgagtgttcagccgtttttttgtgcccccaattaatcgatatcaacggaaattatcgatttgtgaacgcaacaatttttaaaacacatagaattatgaattgaaaaaaacttaagaaaaatgatcggaataaaccccctcggttctcttttgatcttcgaaaattaattagtgcggaaataaaggactatgaaaatgcacgattaaattaataaataaattcttttcaaatctatcccatattggaattcatacatctgatgaattcacaattaaaaggcttgtattttgggactccttccattaatcaataaacctcacacccaataccgaaaaattataatatgaataaatgaaaaatattttttaatgcacatgtaattaagaatcgaaaaaataaattttttgcgggaaatgaagggcaattttattctcgtttaatttttattaataagtatttttcccgatttatatcatgaaaattataataaatattttcatttcgggaaaattgctctgttgtcaaagggttttaaaaaaatatcagagaatttcgccctcatctaaagctatcagttatatctatttgttgttgttaaaaaataattaaaaccattaactaataatatatgattaaaaatagttaaaatatggcgggtaatacgctgccaccctcaaaatgaccccaacaaatcccgaggggtggggtacccaccaaaaaatcgttggcccacgtgcttacgtgtggtcggaatggtgcaacacttttttttgaaaagggcacgtatgtaagaagtgacccaaaggtcgatgcgcacgccactctcatttcccgcccnccaccaacccccctgccccatgggcacctgcccgccagcgaaacgtcgaaatgagcactcagac

SEQ ID NO: 35650 - DNA, 891 bp, Heterodera glycines
cttcctctttttccttctattcccctcctgtttctctttctgttcgtcttttgcttctcttcctcttctgatcctcttctcctttcccttctgttcctcttccccttctcttcctcttcgcattttgttcctcttcctttctcttcctcttcgcctcccttcctcttatcttctcctcctgttcctctttccctttatcttcctctttaccttctattcctcttcgtcttctgtcttctcctcctgttcctttccccatttctcttcctcttctgttcatcttctcttccccttcctctttttcccttctatccccctcatgttctttttctctttgcttttgttccacttctgcttctcttcaattctcttcctcttatcctgttcctctccccctttctattcccttttctttccctcttctcctcctgttcctcttctcttcccctttctcttttcccttctattcacctcctgttctctttctctttgccttttgttcctcttctcctcctgatcctcttcccctttcttttcttcttcctcttcgacatctgttcacttcctctttagttcctcttcgccttctcttccttttccccttcctcctcccctccttttccacttcctcatactcttcaccttttattgctcttcctattcagttcctcttccccttctctttctcttcgccttttgttcctcttctattcctcttctcatttgttcctcttcaccttctgtttatcttcctctttgtcttcgtcttttgttcctctttctcgttgtctttgacttttgttccttttcctcttccattcgtcttccctttcgtttcttcttcccttctgttcctcttccccttcctttttcaccagttcctcttccctt

SEQ ID NO: 35651 - DNA, 1363 bp, Heterodera glycines
  unsure (1)..(1363): unsure at all n locations
acagggaccacttgcatttcgcacgatagctgagtgggtcagtcggagtggcatgtatacatgttgcacncagagaacaatatctgaatgcatcctcggccaaaaatactttttacacttttttaatgtttttttaatattcatgtgccctcctcctaatggggagctgtggaaggattcaaaaataagtgaccgtaatgacacagggacaaaaattcgtgggacattacttccaattttaaagtataaaactccggaatttagcaataaattacatgccaaaattgaaagttggtccttttcgctttccgagaaatcagccggaaatgatccatttttcagaaagtcaatgtatgccaaaatttcagggtcattcctctgttcttcggccaaatctatctgatagctattcccatcctcatgcctcagggttatcgtattaacaaacggtgcaaaaactatatgagatcttgactgaaccgaaaaacatattggaaattggactatgtcttccatttctggcaaaccatcaacctccttagttggcacttcctcagcagcacgtgacagggcatctgccagtgtgttttgccgacctgccacatggacaattttaatctgataattttgaagttcaacgagccatcgagctaaatggggatgggtttccgcttttttgagtaaataggctaagggcttatgatcagtatgcagttcaatgtcactcataaaaataaatggtctaaattccctcagtgcgtaaataattgcacacatttcaatttgtaccgtcggccatcgcctttcagatgccgataatgttcggctgcagtaagagattgccgagaaggtacctatttcttcatttttttgcatcaacactccgccaagtccagatcctgaagcgtctgtaaagatgtgaaaaggcttgaaataattgggaaaaattaggtttggagattcggaaatgaatttcttaagcatttctaaggctttttgttgttcctccttccattcaaacttgacagattgcctcgaaaggctcaaaaaaggctcagctattgtagcaaaattcttgatatgtctacggcaaaaacttgcttttcccaggaagcttttaacttctttgacattgccaggaattgacatatcttttatgagctctattctgctcatggttggtctataaccatcagctgaaagagtaaagcccaaaaattgcatttcttttgctataaaactacacttttttggactgagtttgagattgtaaagtctaaaacgttcaaaaacttttctcagcgaaatcaagtgatcttttaacgtgccatccttggtgaatactaacacgtcatcgacataa

SEQ ID NO: 35652 - DNA, 1088 bp, Heterodera glycines
  unsure (1)..(1088): unsure at all n locations
gggttcaatcccgcgcggcgaaactccagcgcattcaacgcccacaccccaaaatctcggcaacccccatcccacaccctcaaatcccgaccccacaacgtcccgcgcaccaaccaccatcccaaacccacatctccatacacatcccccaccccattgccgtcagagacgcagacacaaccacccaataggcacggaccccccagctgatcctctctgcgcttagcggagaagatcaatcgataattcaagtagtcttaccatgtagttacggtctggagtcgtactaaagtataggtgcagtaaaagcatattaatccgatactataaaatcggttattttatgagttaaataataaaaatataaatagttcactttgttacagcttttagtcatgaaaggcaaaaaacttcaaatttttgggtccatttttaaaaagtgtattttgatcagaattttaaaatatatttgagaaaaaaatttactttttttgtactattttaagcatttgtgtaaatttaagaattttttttcaaaagttaatactttctgaaaataagaaaccctgtaagatttacacaattagtttccactataaatgaatttttgtcttttaatatattgtagtgaaaagaaaagacatttataaattagatggaattatgggttggtatagaaatataatgaacaaaacatttatttccggggggtcatgtaaatacattaaataaaaataaatatttataaaaatattttttgatgaaaaagaaaatgttcatacgcctcaaaaaaaacaagtcatgaaatagcacacctattctgtggctagatcggttattttataataatttatatattcatgtttaaaaaaaataatatttctttataaggttctttgatttgtatttgattcataaaaggttttcaatgtttttgtcgcctgttctatcctaaaaaaatttttttagagtgaaaattaaaaacaggatagcgtcatagaaaataaataaattaacattattagtttagagaagtaaatacgataaattttaaaattttaaattttgcttcacctgcagnngcatgc

SEQ ID NO: 35653 - DNA, 1078 bp, Heterodera glycines
  unsure (1)..(1078): unsure at all n locations
actgggttagattntccgaaaatttgggtttattttaaactgtaatcctttgaaaccttaaaattcgttattttccccagctatggggtgcaaaatttattagaattcacccgtttttgctattcttcaaattcagagaattaagcgatgcttttcggcattttctttctgtttttgggtctcaagatgcggtccattctgatttgggatatttattttttcccattcattcctttttctcccatgcgcagtcgcggctgttgagtgtgtccggtatgagtaactacatgccgcagttgtcaccaaccgccgacaaggaactgacaacgtctttgagcgagttggcaatgaaccaacggccaccagccgccggagcgggccattgtttgaaatcgtgcaagagcgagtcggtgacaaaaattcaccaacatctgaaaggcttgcgctgtcgaagcgagggacaagttacaccggccggaaaaggttttttgacgggcataaaaatttttaagacaatctttttgaaaaattaaaaaaactaacggttttaattaatttgaatctccgatttattacgagaattatccaagaaacgagactgagactcgcaaaacccgatactgaaaaccgagcatctcgacaagcattaagatatctctctattaataggaaagtcaaactcggagacgtcttccattccgttccacgaagctcttgaacgtttcggcggtgacgtgtcgaaatcaaagtctttcgctcaaaagcgtaaagaggtgttcgaagtcatataattaaataaaaaaggttttttggatattgtaatgcaatcaattcttgaaatatttggctatttgacattcattttcatgaaaattttttgatgctgggtgggttaagggcccaaccgttcgctatttgccaattcccccttctctcatgcgcagaagcagcaccaggggacgacagtgtccgagatggtccaccacggccagcagttgggagaattggcacaatctacgagccaactggcaacggaaaatcaattgaacgttgaacaggacaacaaattgctcaagca

SEQ ID NO: 35654 - DNA, 1666 bp, Heterodera glycines
atgcggcgcaaaaagttgtttattcataaaaaaatgacgttacattcacagataacaaacccaagggtcaactcactatgggttgggactcaaaatttttgcgggattaatcccgcaaaatcccgtgtttccaaaaaatgcgaaatgctgggatcccgcaaaatcccgcgcgggatctcgtcccggcgccgggctctactacccagaaaatgtttcttgccaaaatttcatgaacatttgggggctggcccattctttaaggccccatttttaaaaaaatgaaattttgtttaccctttttaaattttcccccaaatcattcgcacaaacacaacagtcagtcaaatcagtacaaataagacatacataagttagcagcggctaaccgcaaacaagctgctgaacatttctgtttgctgttgttctccgaagcgctgccgaccgccgcttcatctttcatttccattcattcagtgctttttcaccgatgcttctcccccgccccgcccgctcaaaatgtctctcactttttttttctcccatcggccccattcatttggctgctaaaaggtcaacagcaacacaacaccaacgccagtgcgtcctcgtgttccctggcctttattagcccagggcagggcaaaattaatgattcggtttttgaaagtgtgccacgagaattttttggtattttttgatttcgaattttgtttcaaaaatttttttttgttcatttcattttcctagttcgggtagttttcgataagttttcgcccccagccctgttttagactccaatcattttggccataactctgggctgaccccttggataccgaaatttttttttgaaaaaaaaataaaaatgccataatgattctcaattatttccttcccccgcccgccctgccattggcccatttcccaatctctttcaattgttcttctgctgatcgctactggcttggcttaacctgtttagccctcacagcacagctctggtctactctctctctctctcgctctctctctctctctctctctgctggttaagaattaataatggaacccccgaggcgatggaatttgtggaatggaacaaaaacttttttccggcatttcctgttgaccaacaataaacagaggagtattataatgataagaaatgataatttgtgcctaattaacccccccccccgccccccattgggtctaattgcccggggcgaacggcggctgagtctattaatagccaattatcacagcaattaggtattctactgattgttgcactcatttctcatttatcagccgccccttcccccattcggtggccaaaaatgcacattttaattataccggtcgccgctggcgcggcgctgattaatgataattagtgtccacagtgggggaggggggagtgattaatgataattagtgtccacagtgggggaggggggagtgattaatgataattagtggggatggggtgtaattatgatcgaacgatgcgctaatgaatgtggggtagtcggcccggcccatccatcggcgacagcggcgagttcaacgcaccagcagcagcaggcagcagcgtttttatcagctcattttccgcaattatgcggctaattgcgttgctgttgatgttgatgacaccacacca

SEQ ID NO: 35655 - DNA, 905 bp, Heterodera glycines
aattacccccccccccctcccctccgtaaatggcagtgtgccacttctctgtccctgctgtgatggcattccatcggccgcctttcaacgtgccgccaaacaagcttcacatatgatgcaaatgcaagagattgagagactgaggagaaagatggaaacgcatttaacaaagcacttggaaattcggtggaccattgcgaggctaagggttcggccaaacatttcaatgcccttcctaaaccaatggaaaactgattcattcagttggacggtcaagtgcccatcggttcgctgctctcttctgtctctttcttgcgccgtttggctttgcccagcataacaattggtcggtttccaatcactcacttttgttggatttaattatttgcgcttttctctgtgctatgcttcgtttagacatgcttatcaatgacaaaaagtgtgcgactgatgagcaccttctcatcggaatgggggagttcgtgccaatccgagtgattatttattgctctttgggaggtgaattggccagtcaatccatttcttctaatttatattattaccaaattcagctaatttatttggcgaattgtctctttcatgttgtcaatatcaaaatgaaaattcggcagttttaaatcgcgagaatgttatgctaatttgtggggaggattgtgtgccttttcgagtttccgggagcgaagaggaaagagagggcgacaacaaatgccaatcggaggaagtgccatcggtggaggaacagcaaaagatgggcaaatttgagacggagtttcacgcggcattcagccacgagggcattttcaaaagtagtccggtgcttttgccaactcagttcgctgatgatgcagaaaagaaacgggaggggccgctgccaaatgccgagc

SEQ ID NO: 35656 - DNA, 526 bp, Heterodera glycines
ttgattggaatgttggtgggttgtgtcacagtgattgaatgctggagagtagactcccagtgattggtattctggtgggttgtgtcccagtgattgaattgtggagggttgagccccagtgattgaaatgcaggagaattgagtcacagtgattggaattctggtgggttgtgtcccagtgattggaattgtggtgggttgagtcccagtgattgaatgctggagagttgagtcccagtgattggaattgtggtgggttgagtcccagtgattgaatgctggagggttgagccccagtgattgaaatgcaggagaattgagtcccagtgattggaatgctggagagttgagtcccgttgattggaatgttgctgaggttgagtcccgttgattggaatgttggtgggttgagtcccagtgattaaatgatggtggattggcgcagaaaattgtggggggccgaaggccccagtacgaggccgcgaagcggccgagcgagtacctttggcgcaaaaaattgtggggg

SEQ ID NO: 35657 - DNA, 535 bp, Heterodera glycines
gataaacaagttaaaatgtcgggaaacggagtagctgtctgatttatatttaatgaatcgggattgggttaggtcgagattaccaattatttaaaaaaattgaacccctttacaaattagttcttgacgatgggcactcgaactacacatccgcccatagtaaaatataaaattgaaaaaaatcccgaaaaattagtcaacccattgaattcaaaattcgaaaatttttcattgactcacacgaaacaggggacatcaagctaattgcttgacgaaaaaacgattaaaaattaatttcagcagcacaaataaagcaagcagatttctccattagatgaaagcaataataaaatcacagaagaacggacctctttcaaacacacatcatcatgaagcagctcacaacaaaaaaaacaacaccatcaacatcagccagtacacacagccttcccaatacatatcaattttatgcctcattgagcaatttggcgattaacgacgaagataaacggggagggggggggagggatttggg

SEQ ID NO: 35658 - DNA, 876 bp, Heterodera glycines
ttagagttgcacgggaccaagactggtactgaaaaaaggcacacatgagtacccaagtcccggttttgaccggcaccgggactagtcccgggttttttccggttttgcgagcaaaaaggcccggtttttcaacccgaaaatcccggtaccggtttttttacatttaccgattaccgccctactctagttttttgagtgacggacgacccggaaccatcgattgtttcataaattaattctggcataggttacccgggcgatgaaagttggcaaccatcggaaaatatttattcgcaagaattggtggctgattttattgagtattctacggtaatgtgcgctgtacatgcattgtccggcaatgaatcagtgcccgagcatattgcagaagaactgcgcgaaaatgagaaattcaagaaatgtatgaaaataattaaaaattaaaaaatgaaattttaaattttaaattaaaaaacttatacaaaaaagtatcaatgtcattaaaaatgaattaaatttgatgttattataaacccaattagttttctatacatatgtataataaataatttaaaattcattttaagttttaaataatttaattaggtaagttttttttaataaaaatttacacaaaaaaatcaatttgagttattagcaaatatttttggcgttttgcctaaaatttgttaacaaaaatacaataaaaacgaacgattggggttttttagaagcaactaactattttgtcagtttttagcaactatcagttgcgtccctaattattatacatttaatctacacccaattagttttgtatatatttataaaaaaaatattaaaaagcaatgttaatatttaataatttaattaatg

SEQ ID NO: 35659 - DNA, 790 bp, Heterodera glycines
acccctcccctcccccccccccctccgtgctcgatgtgtgattttcggaaagaaatttccggtcgataatcccgcgaagttagcaccgctcgcccgccctccagccgccctgcttgctacttgtggtggtggtggtggtggcggcggtgtgtgtggtgacacattcgattcgcacaaaatatcaccgaccgattaaaatagatttgaacggtttaagacgtgtaaaaattttaacatgggaaacgagatttaaatccggtgcttttccattttggggcctagatttggattttaaaaaaatcatcgactcctatttgtgcgagttcctatggcgcgaagatgtttaaaaatcgtggcacagaaattgcgacacttatgccacccgccgttataatctagtttttgcaatcctcagtgtcctttgttcatttttaaaaaattcaaatcttgccccaaaataaaattaatactgtattgaaaattgtattgtatagtaaatgatgtcaagtttcccctccattaattacaaatttgattactttaatccaattttaatttcttttttcccacccaattttgcggggtttccattgattgactttcattttacgttaatttgttattacgtaggaattagttaaattgcgcatttggaggtcacattcgccccttacccttctggtacattacacatgaaaatgttgcatagaaattaatttttgttatgcactcattacattaaagaattttatttagtttatttcattgaaaaaactcctcatttattaaa

SEQ ID NO: 35660 - DNA, 1226 bp, Heterodera glycines
  unsure (1)..(1226): unsure at all n locations
tgcatccgatagcgtttcagatttgaaaatttcaaatttttcgagctagccncctcganaattnttcgttttgaattttatattttttgccgattttcnccagggaaaacggagaccacttcnnaagcaaccgtttttcgagctctatcgattggtggcatttttgaaaaaatttcaaaattttccggaaatagaaaaattttccggaattgagctccccatttccgttcaaggcttataactcgtcaggcgttgattttagcggaaatttgtattagagcatttttgtagagaattttaagctctatcttatgtgctttatctcatgtttttaccgtgagtttaaaaaaagttataaaattaattgtgattttgaaactcaaaaccataggggggaccccatggttttgcatttcacgaaaaatttttttactcctaaaattgccaaaaaatacttttctggggtaatttgaggtgctgaacacgaatatgcactttatattgcgttttggattttttggagggtggtaaaaaaaatttgaaaaatcgtcaaaatttgagccccagaaaatccaatgaaaatttgaaaattcctaactcaatgaaggactgctcaatttaagtgaattaaagctgtaaaaatagagaaaaattgggagaattttatgggatttatttgggacttctatcttccatattccagaatttctggaaaaattcgatttttcagaaaaaaattcctaactccattctgaaaaagtattttataaaaataatatactcaaaaaatccgcaattttttgctctattttataaattttaatttagctttttttaggggttatttggccgctgatcacgaatatgtaatcagattttactttagacatggttaagacctcagaatccctgtgtgattggggattctgaggagtgggagcgcctgtcctgaggccgcgaagcggccgaacgtctcctaaaaaattaaagaacgggcgcgaagcgcccgtcctgaggccgtgatgcggccggattccccccacaaaattaaaaaacgggcgcgaagcgcttgtcctgaggccgcgaagcggccgaatgtcccccaaaaaaattacaaaacgggcgcgaagcgcccgtcctgaggccgtgaagcggccggattccccccacaaaattaaaaaacgggcgcgaagcgcccgtcctgaggccgcgaagcggccgaatgt

SEQ ID NO: 35661 - DNA, 1003 bp, Heterodera glycines
  unsure (1)..(1003): unsure at all n locations
gctgtgttcgttcaagctgcaaggaaatgatttgacattttgtttgtgttaaatgcccctatgccctgcctgttgagcaatgtactgcttgaccgactcgttcaccaaatgcatggtgctgctgctactggttggtgttgttgctgttactgttggtctatttgctgacgatgcaatggataattgggcgtggaaatggacggccaaatcgaaggcactaatcaattgggggagggggaaaattcaattttcaattgttggaactacggttttcatacggttcaaatgcgaatcgcgccattccatcggccccggtagtcctgaccaaactgatgccaaacgagcgcatcagctccaccactcgttggaccatctgacgctgttcgtgcccgtcaccgccgccatcggaccacaactgaaagaggggaatttaggaaaaataattttatttggctgagagtgatgaaagctgctgaacctaggcataaaaaaagatatactgggttaaaatattaataattataaataaatattcacaatctgaggtcgctattttcatcatttgttaacattcagcccaaaaatgagtttcgtttcgcaccgaccgatgctttgacgggcggttggagaacaaaccaaaggagcggggcaaaccaagtgaacaagtcgacaagtccgatgcagcagtgcgcaccagtgaccacgttggcacggagggagcgcatcacttgctgattctcgcgctgctgctccacaaatggctaaacaattggcaaaaaatgttaattgccaatgccaaaattggactgtgtgtggcaccgatcgacctgaacagacaagttaaattggagtcggcgggacacgtgcagggcacagtgtaagtgaacaaaagcgagcgcaaagggaatgtaacgggcgagcacaaagtgttgggcccgntggagcagtggtttggagtgcgtccaattgggtgaacagagcggagacgaaacggcactgaaaa

SEQ ID NO: 35662 - DNA, 762 bp, Heterodera glycines
aattcctcaattcacccaatccctaaaatgtaccaaaattcgaaagaagtgattgactttgcagcggaaaatttgggctgtgaaaaaggagagcttgcggttgttcttcaaagaatttcaaaaagaagtgcgctaactaaattgatcaccgaaacactcaaccgtggcgcaacattgtggtatcgactcgacgatgggtatatacaaaaattgggcaacaagctgagcatatcggcagaccggccttttattggttcacggccccgtgtttctcatcgcatctttgcttttcaaatattgagaatcagaagaacacagggaagtgtgctcggcccaatggttgtgaccggcggcgtttattatccacttggggggctaatttttcggaattttcgagaccaatacgatgattttggagagttttttgccggttttatgaaagaagaattggtggtgaatgttgctaaaccgcgggtgaaaatgtgtgaagcgacgaacaagacgacttgtggagaagaatcggatgagcaacatgtaagggattcaacaaaaaaggttgaaattgttagcaaaaacctaaatttaattgtctcgggtttaaatggaaatttaaaggtggactatgaaagtttaataggcacggaaagccaagggggtgaagcaatatttaagatacgagggcgcggcatgatgaaaggcacattctttttactcattctttgtatttggtgtacggcatttacggataaaggagtttggcca

SEQ ID NO: 35663 - DNA, 1056 bp, Heterodera glycines
ttttgaccttgtttcattgtaatttggcatggcctttccgaatttcccataccaagcgccctcgtacacatcaacaaaaggcgcgagtgaagtggtgttgcggaaaaagatagtttgtatggcacagacgggtagaccattccaccggcgtgtactgatatctcacgcaagtcaaaaggctcaaacttgaacggggttagcttatagtcaccattgaaagccgaatttgacaccatcgctatgataacgcgacggggaatggttgcactgaacacgttgtattcaaactcatagcgaccaacgctgatgaaggaagacttgatctccgttttacgaaccgcataagtggctggttgtttttcaagtgttttgtacaagctcatattcagcgaaggttgtacctctaccatttttgcgtaaatttttacatcgtgaactgacaagcggtatttggtcgtgtcattgtcctttagcgtttgtataagaaatgaatcctttgccctgtaaattgtaaacagcaggtccaaattgtttataaggtaaagctcctgatttcccaaatcaaagtcgaggcgtgagaggaactgtgcctttcgcccatcttgaaatattttgcaacgttccttgaacccggtgtctgtggcatcatcatgtttagtgcttggttggtaaccggttgagccaaggaagtgttttttgacgtttccaggtaagctcaattcgttcgtgatgtatgctttgaagggatacaaatttccactatcatacacttccgtgttacccaaatgtcagtccaatggcttggattgccgatacattggtgtcttcggccttaattggtgtccaactgccgttagtttcaaacttttcaacagaaacttcaaggtgcagatagattcgtgacaaatcggtccacaggttgtcgctgtagagacggaagaggtagggcgattcttgtgtgattgtcgccaagggaagcacttggcggaagaatgatcggacaacagagacgttaggaaaggcacagagaacagatttaatgcactgtttattgca

SEQ ID NO: 35664 - DNA, 1047 bp, Heterodera glycines
  unsure (1)..(1047): unsure at all n locations
ttatttaatttttatatcaattaaatcttttgtttctacatagaaattatttattttatttnaantttaatnaattctataaaagaagatcttattaattattccgtcataggcgataatgttttattaaataatataaaacaacagatattttaaagctttaataattatacttgatattggaacaataagtattctttttatgtaaaaaagaataaaatttaaaaattacttaaaaacaattttttgcagattcacaattataaatgccctgccggttcggaatattgctgatttcaacataaactgccggtcggccattccgcgtctcgctctttactttggaagcgcttaatgaaattaagcctgattcatttatcaaaaattttacacttgcatttagagaatagcttaacaagaacacattttataccacgcgaataaaattcaaatataaaaatttaattttacgaataaaaaattctaagaattaaacaattaaatacatgcaatcgaataaataaaaaaataaatattaatattatgattgagaatattattaacaataactcaggattctatttgaattatgaataaaaaactggataaaattatataaacgaaaaatgacgcaaaaaagttattttaaaaaaataagatacatgcttaaaaattgtaattttttcaaaaaatggaatatacaaatataataataatataatatctattctaaaaacaattgacatggctataaaaaaataaaaagtaaaatattcctaatttaattaatctgagataaaggcgataaagtaattccaataattattatataaaaagaataaaagatttatttcaaaatttttttcttaatactaaagaataatctattaaaatataatttactcgaataaataaaatttttgatgattgatagcactcaagagttttattagaatttatgaataaaagaaactgaataatctatatcatcgataaatctctggccttttttaaaaaatatattcgtaatcagaaataattaaataa

SEQ ID NO: 35665 - DNA, 687 bp, Heterodera glycines
gtcatgggaagagatgggcggcggaggaacggaggcctttaagagcagcaaagatccgtcatcaaatccccttagggcttttaatgaagaggtaccggatgggtgggagggggtccttgagatttcttcgttaatgagtggagagcggggcaggggacggaggacggactggctaaattacaatgagtgactgagtcagtgaatgacctgcagagcctttaaatggcggaaattttgagtaaaaaaatggaatctccaaggattacggtagagaagatgccctgtagagaatttaaatgccggaaatttgtgtctaaatttgaaaatgaatctccaaagattacggtagggtagaggatggcctctctaagaacctaagtgccggaaatttggagtctgtctaaatttgaaaggtacctaaattgtgatggactttttaatcacgaaaattcgaaaattcaaaggccaaatcgtaaccagatttatgaatttttagactaaaaatttccacaatttataatttttttaaaaaatcaaaaaaaaaaatggaatcatttaaaacagagtttaaaaataatgacaaatgtcggaacttcagatttaatgtctcatttatatgaagtaattttccccaaaaaacccgaattctagccctactaaatctaaaaaattcgaataactggacat

SEQ ID NO: 35666 - DNA, 923 bp, Heterodera glycines
tttttttccccaataaacttttcaaacccccatttttccccccgggaaagttttttttttttaatttttgaaccgtttgagtaaattaacttgaaaaaatgaaaaatttggaatcaagtttccccctccctttccccgggggatttttttgttaagtttttttttccccaataaacttttccaacctcctttttcgcaccgtgaatggtatttttattgaattttgaaccgttttgagtagattagactagaaaaaattgaaaattttgaaatcaagttttccccttccttttcccaggggtaatattttgtaaagtttttttttccccaataaacttttcaaacctcatttttcgcaccgtgaatgttatttttattgaattctgaaccgttttgagtagattagactagaaaaaattgaaaattttgaaatcatgtttcccactcccttctcccaggggtattattttgtaaagtcttttttcccccaataaacttgtcaaaccccatttttcgcaccgtgaatgttatttttattgaattctgaaccgttttgagtagattagactagaaaaaattgaaaattttgaaatcatgtttcccactcccttctcccaggggtattattttgtaaagtctttttttccccaataaacttttcaaaccccatttttcgcaccgtgaatgttatttttattgaattctgaaccgttttgagtagattagactagaaaaaattgaaaattttgaaatcatgtttcccactcccttctcccaggggtattattttgtaaagtcttttttccccaataaacttgtcaaaccccatttttcgcaccgtgaatgttatttttattgaattctgaaccgttttgagtagattagactagaaaaaattgaaaattttgaaatcatgtttccca

SEQ ID NO: 35667 - DNA, 861 bp, Heterodera glycines
aaccaaaggggagcaattggaagcgcaaaatcatttttggcgaagatcgtcaaccaaagtttcagtttttagttcttttactattacgttttcgttttagagttcactgaaaatttggggtcgactcgcattgaacgtgggagagagttggcgaacacggaaatgctgaagcagcacgttgaggacgtcatgaaggccgagcagtacgcggcttggcacgtcaacaagtaaatgcagcgtagagaaattggcacaataggacacactttcagggtaaagctcgagctgaagcgcaaaatggcattgaaggaggaaatccagaagatggttggcatgcttcatcaggtgaagcacagcgtaagaatgggaagcattggcaccgtttgctttcagaattcactcgaccgcgacattgagaaggccgaaaagacattcggcaacttttactccgacttggccaatgcgccgtggctgccggagaagcgcgagattcagagggagttcaagaagtacgacgacgagttggcgaagttccgtgaacagatcgccgagtacatcaacgccatttcaaagatcaaatcggaaggtgcgcaatggcattttgttgtttaacggactccaaaattcagcggaattgcatgccaagttgccgttcagaacattcgtttatgctctcgccaattattcaaggcaatcgggaaaagtttgtcagctgacgaaaagggaacagaagaaggcaaaacaggtgaaagtcatggatttaaagcagtaattcggcaattttacgatatttagctgaaggaaaagctgtcatcgatgagcgacgaggaaattcgcaattcaggggttagcttttgattt

SEQ ID NO: 35668 - DNA, 1195 bp, Heterodera glycines
  unsure (1)..(1195): unsure at all n locations
gcaagttgaagagttcaaataaaccagtggttggatgatgcctcgggtgattggtcggagatcgcccaaatctctcttccaaaagccagtgggatgtccttgagaaccttccaatctaattggaagtaagcaaaaatttgtcatgaaaaccattcaaatccctttgctttgttaagcaatcaatcacaattcaatgatcatttacattaccatatgaatcgctttagcaaatgcctttgtttgcattcactttgtcttgtttaacttttgttggctcttttctttgtccatttgtcctcattacgaccgcccccccccgcccttcatcagaacacttcagaaaacaaaatttttttaaaaaataaaaaaatttgactagaccaatcgaaagctaacggtcgacctaatggaaaaaaatccccgaaggagagaatttaattaaatccattccttcgggggtccgtgccgggtgccgcggggtaagcagtgctggtttcgtttcatcacggcccccatccttttggctagtcagcaatcgttgcttaacttgccagatcggacgggtgcgcatgattccactgttccaagcaccccaccaaaagcaaaacgatataaccaaaatataaggaaaaatttttaaaaaattttttctccatcttcctttttgatactaaagcatcagagtgctaaaattgacttgtaaataaaatttggtgcgttttagagcactttctgaaaaaatatttatgaaataaaaaaatcgatttattcaagtgtccgtttggggtactcaaacaattatggggagcaaaaatccaacgcagaattaaagtacagactatagggaagctattcccgaaggattcggtctccccataaatctgggcgcatcggttcggggggactgcaccgaaaacaaaaaaatcgattttttcaagtgtccgtttggggtactcaaacaattatggggagcaaaaatccaacgcagaattaaagtacagactatagggaagctatttccgaaggattcggtctccccataaatctgggcgcatcggttcatggggactgccccgaaaacccaaaaaaaaattttttggataaaaattatttanataaactgactagataatatttaaaataggttatttctcttcctttcagtatcctgcaaagttgctgcgcttctgatcag

SEQ ID NO: 35669 - DNA, 993 bp, Heterodera glycines
attgaaagggtggttgcggaggaaaaagggaaaagacctccacgagtatggttttgtgaaatggcgtgggtacagcacacctttcaacagctggattccactgaactcaatcacgtcgaaaaacatataaactgcaaacaaatgaaagcaactaaaaatgccttcaaattcattttacgttatccttccttccaacacaagtgttgatggaaaccgaacaaactccttccgggtgcgtctgcctctcaaaatccaattcaattccgagtgggaagtgggtttggcggtcattgtttatccacattcatggccctccattgggacggtggaagaacaatttgtgcaggttgattggcagaccggaagcacagtgcacattgccgtccccactacaaatattaaaaatcctgatgatctgagtaaaagtttgtacaggctgttgggcgagggaagcgaaccgttggcaaaaaaagcgcgtaccgctcagttggcattcaacaattccgcctcggttgctcgccaatgggccaaggatgagtacattcgacgaaaaacacgagagaagcgagccatccgggatgaacaaatgctcctggacgcactccaaactggcggcactgacagcactgttgatttgatggacgcagcagcccaaggcattgtgtcgagggagaaacgtgcagagtcaagccaaattccgttgagagaaaagatgtatgacaaggacacataccaaaacaagctggacaattatttttccaccctcaagggggaggatttggaactgcttgatgaacttggccgaaacaaattgaacgatgagattgcaaacatgtttgacgaagatcgcacaatccttgacgccaccaaagaactgggccttgaggcgtggatacaggcatacaaaaagggtgagatttgcgtgcaagtttacttttgacactcacaaaaaccggttcacgctgagacttgacccccgttatgtacagcgcg

SEQ ID NO: 35670 - DNA, 962 bp, Heterodera glycines
  unsure (1)..(962): unsure at all n locations
aaaaaagtctaagtcctcaaagtgtaaaatgtaatcgtaaaagncaaanaggnaaggnacgannggggncgnnnncgcgcggccannnncgcggggnngcananaccgnananacncnnnnnanangccaggcnccannaancggccagccnccaannananacccccnncngaggaggnngaaaaanaananaccagncnccagnnagcagccaggggggacaaaaagaannnanaaanaannancngggcacaccgcccaaaaaaaaaagnaaacncaacncaacagnaaaaggggcnaagaaacgaacaannncgccccancnccgacgccanccagcccggcancancancagagnagggacgcaacnncgagggacggaaaancncgaaacagnnaactaaaaaaaaaaattgtgggaagaattttaaaattttaaaatcgcttaacattagtggtttgttctgtgactttagtgtgagacactaatgtgtgtcatgcttttgaaaaaacattagtggtttgttctgtgactttagtgtgagacactaatgtgtgtcatgcttttgaaaaaacattagtggtttgttctgtgactttagtgtgagacactaatgtgtgtcatgcttttgaaaaaacattagtggtttgttctgtgactttagtgtgagacactaatgtgtgtcatgcttttgaaaaaacattagtggtttgttctgtgactttagtgtgagacactattgtgtgtcatgcttttgaaaaaacattagtggtttgttctgtgactttagtgtgagacactaatgtgtgtcatgcttttgaaaaacattagtggtttgttctgtgactttagtgtgagacactattgtgtgtcatgcttttgaaaaaacattagtggtttgttctgtgactttagtgtgagacacatattgtgtgtcatgctttgaaaagacctgcagg

SEQ ID NO: 35671 - DNA, 998 bp, Heterodera glycines
tctccccataaatctggccgcttcggttcggggggactgcccggaaaccaaaaaaatcgattttttcaagtgtccgtttggggtactcaaccaattatggggagcaaaaatccaacgcagaattaatgtccaggctatagggaagctattccggaaggattcggtctccccataaatctgggcgcatcggttcggggggactgccccgaaaacaaaaaaatcgattttttcaagtgtccgtttggggtactcaaacaattatggggagcaaaaatccaacgcagaattaaagtacaggctatagggaagctattccggaaggattcggtctccccataaatctgggcgcatcggttcggggggactgccccgaaaacaaaaaaatcgattttttcaagtgtccgtttggggtactcaaacaattatggggagcaaaaatccaacgcagaattaaagtacaggctatagggaagctattccggaaggattcggtctccccataaatctgggcgcatcggttcggggggactgccccgaaaacaaaaaaatcgattttttcaagtgtccgtttggggtactcaaacaattatggggagcaaaaatccaacgcagaattaaagtacaggctatagggaagctattcccgaaggattcggtctccccataaatctgggcgcatcggttcggggggactgccccgaaaacaaaaaaatcgattttttcaagtgtccgtttggggtactcaaacaattatggggagcaaaaatccaacgcagaattaaagtacaggctatagggaagctattcccgaaggattcggtctccccataaatctgggcgcatcggttcggggggactgccccgaaaacaaaaaaatcgattttttcaagtgaccgtttggggtactcaaacatatatggagagcaagaatccatcgcacaattaaagtacagactatagggaagctattcccgaaggattcagtctccccataaatc

SEQ ID NO: 35672 - DNA, 985 bp, Heterodera glycines
cgtcccgcaaaaaattttgagttccagtcccgcagcgggatccgcaaatttaaaatttccggtctctagttacaagtgctgccatatcaatcgcactagtttgtgatgagaagtttaaactttttttattgaaaaatattaaaattaaaattggcagggctatattataaacaagtttaaaataatctaaaccatctaaacccgaaatattaaaccaattttgtctaccaaatatattttagaaaaacaaaaatatataaataaaacaagtatttgagtatttattaaaacaaatatcagcagactgaaaatcaaaaataaatacaaaaataaattgatagccgatataattaaaccaaaataaattgctctaattaggaatggaaatcattgttttaaaaataatatgaaaatttttaaataataaataacataattaataaataaatctatcaaattataaatgcaaggaggaacatataaataaaccaaatgttgtgaggataataattaaaaagaaacaaaaaaatccttaaatttttatttagtcggaaaagtaataaaaaaaattttatacctattttaattaaaacatatttaaaattaagcatcgtgatgattagggatgatatttttaggtttttacctatttttttcctgagctccccgtagtctgaaatgcacgaaaaacatgtttttttgggtgttgttaagctacttttcgagttattagcacctattttctaggtttttatttttagcacctaaaaaacctaaaaaaattttaaaaaacttattttcacctattttggtgttttgcccaaaatttgttaacaaaaatgcaataaaaaagaaaaatacacccctaagaaccggcccaaaattttttttcaaaaaatacatccctaagaaatcaccagaaaattttcaaaaatgcgcccctaagaaataaaaaatttctcaaaaatttatctccaaaatttat

SEQ ID NO: 35673 - DNA, 848 bp, Heterodera glycines
ccgccggcgccgttgcagaagttcacgctcgctaagcagcagttgagccacaactttggcaatgcggcggtgccacaattggtggccgagttcaacaatttggtccgactttaagcgcccgaagagagtcaattgtggaggacagggatggattattattaatgacgaaaaaaaatttcatgaaaatttttcctttttgtgtcatttttttgtttgtaacgccgtccctcagaatagttgttaatatttcataatatatttttgtttgtttgttttggtcggagtttcgatttggaatcacattctttgtttgcaattttttaatattgtctcctttttcggtgctattttttcactttttgcaaatggcatctgagttggtgttgaacaatttgagggtggtcctcgacagtgttgctgaactgtgcgtccattcatcaacaggtggctggcatcaacaaagcatgcataattttaacaattttccaagtttagcagttcgtttggttgctgtttccaaggtgtgtttcaacggatcagtggtttcggaatttgtaaattttaccaagcttggtatcatgacatttctaaaaaatttccataaacaaaacgttaatttggcattgagtgataattcaatttcagtactattatggggatcgacccagttccatgccgccgtttccttgccgcaacacgggccttacttcctaattttcgggccctggaagccctacaaagcgatttgaaatcgcttgagaattcggggaaaaattctcaatccaatttaagagaccggataaagctggtaaaatagacaaaactccattttaaaaatttctatttcg

SEQ ID NO: 35674 - DNA, 463 bp, Heterodera glycines
cgaaaagtattgattattctcatagttattaaatgaagttgatgaatagaattggagccttggccttcatgtaattcataataattttctaaattaatggaatggtatttagttgctttatgttaataatgtcatgattattaacaaaatttttgtgaatataaatttttgccttatttatccctgacttatttcccgacttgagaatcacacgagataatttcagaatctcttcccgccattctatcttaattttttcctaaccaactaaattcataaatttactatttatttaaaatatatttttatttaattataagtttttttttgaaaccagtctaaacaggtaggctggtccttttatgctgttgtgtgcccaaataaccttggctcaactattccctttttaaaccttgtcttcgtaatggttcaagtgtacacatcaaaatgccatggctttctg

SEQ ID NO: 35675 - DNA, 791 bp, Heterodera glycines
cacctcgtcaatcccacggagtggccctccgacggccctttcggtcagagcagccaggactttcctcatccgacaagaccttacgaagctcgctcgacggctacgacaaacaccccactgttttcaatgaggatggccttttgtgcctcaaaacccggctcctgcacgcgaatggtccgcccactctcgcctctcccgtccttctcgaccgccattcatctctgactcggctaattgtccaagaaatccacgccgaccgccgacctaactctccagtagggacgaactgaagtctgtaaattgtctgcaagacaattgacagatgcacaaatccttcggcgttggttgattcgcttctgttgaccttctctcgccgcaaaaattcaattggaatgctgagtttgttgaatgtacaagcaaacaacaaaattccaaatttgcttcaattaaattgtcgacaatattcaaaaagcacgcaatattgcttcaattgcaataaaaaaaaaataactgctgcacgggcgtcgccaattgttgtgccggccgagggcaaacaataattaccaaatttattgaagacaaaataaataaacaaagaaagctaagggggaatatcgattggggatgaagcaacaaattaaatgaagtgaaatacaagtgaaagaatgggtcaaagggcggactatttatggggaggaaagtggagagagacaacgggggcgaggacacatacaaataaataattggggcggctacatgattcccatccctaacatctccccccttaaaaa

SEQ ID NO: 35676 - DNA, 880 bp, Heterodera glycines
atttctatgtaattctagctgaactcatcattagggggtgtatttttattataagctgatcatataaaaattgatcccgataaatatttgaccaaacaattatttgagagcaacaatttggtagtggaaattggttcatcttcagaagtgttccgtgaccaaaatgcgcactgtcggcacgggccgcggcagcggaggggtcgcctgaggcatcgaatcaaaatgcatttgtgaaatgtttaccggttcttgctcgggcagtgcctttttgataagtgggcacaattgtcgcgtcgaataagaaattggagcaacgattaaaacggaaagaattgggtgggaaagggaaacgatcagcggaagagtggtgaatgccaattcgaccattaggcgagtgcacttgggggggggggggagggcattcatagcgattgaaagcatttgaaagacctttccgcacggattgacgagcacaaactgatgaaggaggacagaaccggtgagaaatgcacaaagtgaccagagaagggcctcgacgaaaaaaaggtcgcggaaggaaagagccaagtaaaggaggagggacggacgacgcgtggagagagtgccacgccctttttgtggaagcgaatgatgcggctaaacagagatggccaaatggcactcaaaaagggtggccaaatgagcggacggaccattctgttcttcttctgctgttgggaggacgacgccgaaacgaattgccacagcaacgattggaccaattgggaacaaagcatcagagtgagcagagcaaaaaacatttctttctgacgaacggccaaaggcaaagaacactaaaaaaggggggaaataaggcaaaaaaagaaacgaaaaaagaaat

SEQ ID NO: 35677 - DNA, 949 bp, Heterodera glycines
ttaatggatccttttcgaatgataataatttaatttaattttttgcggcacaggcaccggcatcgtcaactgcaaatgatggcacaattgaggatgaagaggaagaggaggaaagcgccggaggggcgacgaatgccaaaaaccgtaaaaataggaaaagccgacaaacccaacaacaacaacaaaagcagggaccaaagaccaagtcgaacaaagaattgttcaacggagtggtggaacgtaagtgattggtcattttattagccaattttgacacgagttttgatcccgatcaaatatttaaaaactaaatcacagcagtatgaagttaatttgaagtccgattctggcatggaattgagagaattggaactgattgaatgcaaaaatcataaatgtgtattttaaatgatttaagtccaagtgtttggcaaagattttggctaaaaataaaacaatcattattttcatgccaatttgtgcgctgattagtttcccggacacaattaccgtatttcctcgaatatagctctatggggctctattgtgcaacccctccaaaaaggggctacattcgagagtggggttctattcaagggtgtggctcaattcgaggatatacggaatgcttttggcatcattcaaaattctgatctgatcaccatacgccagcaggagatgccaaccaagaaaaaaacaacggtgtagcgaaatgatctgtgatcactgatcagtagcgcaaaatttaccaattttctgatcattattgtaaggctatacggttgccaagaatgtataatttttagaagcaaaagccaaactgacgcccaaccaagcactggtgctggtccatgtgctggaccgcaacgacaaccttccccaaattgagcatttgaacgtggacgggcaaagtggtgggtgaacacacacaatttgatggatttcataa

SEQ ID NO: 35678 - DNA, 1143 bp, Heterodera glycines
  unsure (1)..(1143): unsure at all n locations
aaatttctcaaaaaaaagagatagtcatttttcttggatataagataaatttaaaaatttctctgagaaataaaatggcgatgncgcaccgccttccctctcacgctcgagcgcttttgtacngtataaatttctcaaaataagagatagtcattttctnggatataagataaattaaaaattctctgagaaattaaatggcgatgncgcaccgccctccctctcacgctcgagcgcttttgtaacgtataaaatttctcaaaagaagagatagtcatttttcttggatataagataaatntaaaaattctctgagaaattaaatggcgattgcgcaccgccctccctctcacgctcgagagcatttgtaacgtataaaatttctcaaaagaagagatagtcatttttcttggatataagataaatttaaaaattctctgtgaaattaaatggcgattgcgcaccgcacttcctatcatgctcgagagcatttgtaacgtataaaatttctcaaaataagagatagtcatttttcttggatataagataaatttaaaaattctctgagaaattaaatggcgattgcgcaccgccctccctctcacgctcgagcgcttttgtaacgtataaaatttctcaaaataagagatagtcatttttcttggatataagataaatttaaaaattctctgtgaaattaaatggcgattgcgcaccgcacttcctatcatgctcgagagcatttgtaacgtataaaatttctcaaaataagagatagtcatttttcttggatataagataaatttaaaaattctctgagaaattaaatggcgattgcgcaccgccctccctctcacgctcgagcgcttttgtaacgtataaaatttctcaaaataagagatagtcatttttcttggatataagataaatttaaaaattctctgtgaaattaaatggcgattgcgcaccgcacttcctatcatgctcgagagcatttgtaacgtataaaatttctcaaaagaagagatagtcatttttcttggatataagataaatttaaaaattctctgagaaattanatggcgattgcgcaccgccctccctctcacgctcgagcgcttttgtacgtataaaattctcaaa

SEQ ID NO: 35679 - DNA, 905 bp, Heterodera glycines
aaattgaaataataaaaagcaatgaacatttttttatacatttctggtaaatatcaaaatgtaattttatgaaaaagccacttaattattataaaaaaaaggaatgaatatgtcggactaatactaattaaattaataagaaaactaaaatccaaagcctttcaaattttatttagcgagtaatattaaaaaatatatatattcctaaagatggaaggaaatataaaaaatttgatatttaataaaagtaaataactatttatattggcacggaaaaatgcaaaagaaaaatgaaaagcttacagtcgggatcccgactgaatcccgatcccaatcaatctcgaacattttggaaaaacgatcgtgatggctcccgagtcgggatttcgaacaaatcccgatcccgatcgatcccgaagatttttcgtgatcccgcgggattatcgggatttgccaaaactcaattattttttaggttttgtgccaagttgtgttcaaatgcttatctaatatttataattgataggtctgctaaatatatattttttcctggcttctccatgttctgaacagtaggaaaaaatcttagaaaaaaaaattaaggaataaattaaatttcaggcaaaaatcaatcaaaataagataaatagccaattttaatctaattcgtcataaatttgaatgaacaccgaataattaattttatgtacgagaaatggttagtaattaaaatgcataaaaattatgaatacatttaatacacagtctaaccgaaagtaactcaaatacagtgatttaattaattaaaaattataattatcaaaataattatgaaaaattataaaaaaatataaacaagtattcaataaataaatataaagaaataatccaaaaaaatctttaat

SEQ ID NO: 35680 - DNA, 1074 bp, Heterodera glycines
  unsure (1)..(1074): unsure at all n locations
tcatctccccccccccccgctgttttgctcaggctcgcgttctttagataaatatattttgcaaatcaccccccccnccccgcacctggtacatattttcgggtggctttttcttcccccgtcgaatgtgtccaatccaatcgattttcttcggttgcaaaaattcctcggcttttcattttccatgctttgacaaataataatttactttttacaatcatttctctttatttagaccgttttgacaattccttttaaagttcaattaatttcgaccctggctctcatcgccgcaatttcccacctttttgtctttgttttcttttccatttctttttccgaagatatcacaatgattggctccaaatcggaaactcatcaaatgaaaaccacggaaaattttgaaaatccaatctcaaaattcacaaattatgcgaattttccgccgttgccaacggcagaagcaatcattcagccgatgaatgccttttttgaacactttttcgccacggatgaaagcatagaaatggacaaatgggagaaggcattgcccaccaaattggaacagcaacaaatgcgaaaggtcgcagcaccgaaacacgtgctgagaataagcattttggatccgtttttagttgattcactttctcttccgtcttgacgtcttttccggcatttcttccgatcgccgtttcctccaacgatttgtgcccactttggccaaatctgttcagctcacttttatcggcgtaattttgccatgattttttcttcttacaagtgattaaactacaaaatgtttaaggagcttttctgcgtcatccatgaacattttccacccgccccttttcggagatttccccgcttttggggttacaccgttctcaccgcccgtgcccactctttacggccccatctccaccattccgccgcacacttcgaatcggacggtgcattttaatttgcttattttcatactaaaggtcaattttaactacggtagttaacaacatcactttttggtttactaatatttctcattgactttttaaaggcaatgtttgcaatcaatcg

SEQ ID NO: 35681 - DNA, 1028 bp, Heterodera glycines
ctcgaggaatcaaggtccccgcgcgggcgttaatttgggttaatttttcaatatatatttttttaaatcccatactctcgtggctcattcagtcctctcaaaacatgaagaaatgaattctcgagtttaatttatgattcaatcaggcccgtaactagaaaaaatcttcgaaggctgctctaaggatcggccaaaaaaatttgttctcaagtgatattttttcaaatttctcaatgctagggagaaaaggcagaaattcgtagtccttttgtaagaaaatttaggaaattttaatgaattttgttaaattagtccttttttcttgaaaaatttttaatttatggatccatgttaattaatgccatgttccgtggctatagtaattgtgccaccttggctgcttggagttgtgtgccacgccatgacggcactcgcttttccttctttccgtgccgactcctttcccaaatctgttgctcctcttcttcctcctcctcctcctcctcatccttttcatcctcttcttccttttcttcttctttatcttgtcttttttcaatttccttaagattgtttttaaattgccttaggcaataaaatttccactttttctctgacctcctccttttcctcttctttctcttcctcttctcttttcgttttctctctttgtctgtcttcctcttctttttccatttccattctttggcgcttttttgcttcttttcgtgccttcaatttggcttcctggtaacaattttttctatttttaattgcttctaattttcattttttgcctctttttggcgccgccgtgccatttccgccgcctccttcagctttgctaacatccgctcttcttcatcatcggcatcattatctttgccattcttcatctgttcatcctcacaaatttaaaaaaattatttttttggtttttcatttttgcctctttatttttccatatatcctattttcccctccttttacttcttcctcttcttcctccctcctcctcatcttcttct

SEQ ID NO: 35682 - DNA, 923 bp, Heterodera glycines
  unsure (1)..(923): unsure at all n locations
ataattcatatcaatttgcatttaattataccatctttccccctacgcacactgaaggtaaatgcccaaacatttattttccatcaattgatttatttgtgccaatattttccatggcaatccctttatgaaagtgacagattcacttttacgttcactccaaatgatttctcgtgaaaaatcggaaaatttttcaatttccatcgaaattgttgcgtcggatttgcttggatcatgagtgaattttgccacttttgcatttttcactattaaatcaatggccaatgtcattttgtcctcgcctttgttgtaaaaaccatttccctgatccatcaattccttaattagtagtaattagaacaattaagtgaaagttaaagtgcatcttaactgtcaatttaatgaaattgacgaagccccgacagttccatttattgttaaaaatgatgtcattaaatttcccaatgcaattctcagcttcggcattttgtgtgacaattcgaaaggttgccgagcaaaggcatgaaccttaaaaaaacaatcattaggcaatttaaacaaatgctttttttaaccttcttttgacgctttgcagaaaaggaaaaagcccaaaaattttntctttggtttttatattaattcttatttctgccacaattctccatccaaatcccattatttgcactgttttgctgtatcggcgactccccacagcttctctcgcaaatgcggacaatttttcaatgtccatcacaattgtgccatgaggtgaaatgcgtccatggcacggaaattgcagtgggtacagtatgccgttggacatcccacgaaaattcgtttggctatggtacttttcaatgctggtcacttcttccgctgttacacgccgaaangaactgaaagattagaaaaatgaataaaat

SEQ ID NO: 35683 - DNA, 658 bp, Heterodera glycines
tttttttttgcgcgctagttccgatatattgagcataaaatatatatttccacttggtttaaagcttctacgttgacttttattacgcctttttttgatttttttgggattttcgtgccttaaatgccttttttggtgtttcgccgttttggtgctttttggcgtttttttccgaaaaattccattaaaaatgcaataaaatacacctctaaaaattgaaaaatttctcaaaattgatcttcaaaatttaattattatttttgataaaaaaaaaagttaaaaattttcctaatcaaaaaaaaaatatatataattatttattaatcatttaaatgattagttttttttattacgttttacgtgctttattccataaaaatccctaataaaaattttgtgcctattttcatgcttttttcaattttttggtgcctatcatattgcctttttcgcgaattatggtgcctttttagtcggtctctatggaaaaaagcggaaattattaagtgatataaaatgagtggttgcgattggttggaataggacaaaaaatgtttttggaaatttcaatttattgttaaaaaagtaatagttcaaaaatttggctatcgccgaaacgacccattccggtttttctgaaatggataaaaaaaaatgc

SEQ ID NO: 35684 - DNA, 980 bp, Heterodera glycines
aaaatccctcaaaaataaaaggtctatgcgcaccgccctccctatcatgctcgagagcattgttatgttataaaattttcaaaaaaagagatagccatttttctgggatacactctaaatataaaaatcctctgtgaaataaaatggcgattgtgcacagccctccgtctcatacgcaagcgcttttgtgaggtataaaatttctcaaaaaaagagatagccatttttctgggatagagtataaatttaaaaattccctcaaaaataaaaggtctattgcgcaccgccctccctatcatgctcgagagcatttgtatgtgtataaaatttttcaaaaaaagagatagccatttttctgggataacctctaaatataaaaatcctctgtgaaataaaatggcgattgtgcacagccctccgtctcatacgcaagcgcttttatgtgtataaaatttatcaaaaaaagagatagccatttttctgggatagagtataaatttaaaaattccctcaaaaataaaaggtctattgcgcaccgccctccctatcatgctcgagagcatttgtatgtgtataaaatttatcaaaaaaagagagccatttttctgggatagagtataaatttaaaaatcctctgtgaaataaaatggcgattgtgcacagccctccgtctcatacgcaagcgcttttgtgaggtataaaatttctcaaaaaaagagatagacatttttctgggatagagtataaatttaaaaattccctcaaaaataaaaggtctattgcgcacagccctccgtctcatacgcaagcgcttttgtgaggtataaaatttctcaaaaaaagagatagacatttttctgggatagagtataaatttaaaaattccctcaaaaataaaaggtctattgcgcaccgccctccctatcatgctcgagagcatttgtatgtgtataaaatttatcaaaaaaagagatagccat

SEQ ID NO: 35685 - DNA, 734 bp, Heterodera glycines
cgatgacatttttattgcacgtaaaatttatgaaaatgtgatatgttgttatatgggtggggcttttatacaacaaattgtgactcgtgaacccattcacgctcgggataccctatgaacttaacaagcatctcagtggacccattcgctccctttctctttctgtacaccttttcaatacgatagcttgtctgtgcatcctttcttacacgcgccagctcctgctcatagaaactacctttgaatttctctccgcgctcatcccgtagcttgcaccgaatggggcgtaccgctttcagtacctcgtcaacctccaatattttgtcaccataatttggcaaatagcttttctcaaactatcacttctctctgctcatgcgtacaaaatcgtctttgcggaagcatagcggtcgtcgtttttgtggcgcaccgtgtccatcaccgtcaccatataatcgcttcacacgctctgagcattagaaaagcccacatcaatcggacgcattccgtgggcacgtgacggggagcggttaatcccgtccacgattttctgtgctgcatccacccagttcagcgtctccgtttccgcaaaataccggtacagccgctgtttcacattgcggatggcccgatcggcgaccgacgccttgaccgacgaatggaccggctcgtgtttttcaatttctcgctgctcaaaaaagtccttagtaatctgttcttaaactcggttccct

SEQ ID NO: 35686 - DNA, 1272 bp, Heterodera glycines
  unsure (1)..(1272): unsure at all n locations
aaataaatataagcaatatttattgtannataganaatttcggtgtttctaagataatattctcggtccctgaaagctgaaaacccgattggctttcaaactcgcaaatttgaagccaaatgttagtccaatctccatgcaaaaatataaggggtcaacaatgaatgtgtggagggtggagggggaaataacaaaaacataatgcacacatattcaaatggtgtctcccgaacacaaacatttaggcctttttgtgtgaacggacaaagtgtagacaggcatgacaaaatgtccatatctcttgaaaatacaacttttatataaatctttttttacaggcaacaatggtggcggaattgaaacgccggctcagatcatcgcagatgcagctcagaccgagccagcggcggcacccatgccaccgcctccgcctcaggacgtacaggcaggctcaagaggcctatttttgtttcaaatatttaatttgttatttcatttccaatttaataattatttttcttattcttgccaatatttgttcagtaggataaaatttaatgagatatttaatattaaatatttccaatgagttaatttttatgctttctaagaaatcagtagaattgcgatttttgtcatgtataaaaaacatattaatattaaaattatatttttgaaaaatagatacaatttattttgagaattttctaacaaaatgaaattattactattgttttattcaattttaattttaattaccctaattaatccaattgaatcaacaaataaaaagttaaaagaaaaattaaaatgaattgaaaaaatcaaccaaaaattaactaaatttttcatttttttaaagaaaatgatataaggttttgtgaacgatttttgcataatcagggaattatacgttttttttattaaaaagtttttgttacttggcgatttaatatttgaatatatttaaaataaatattagacaattgttaataagaattaagttttagaaactttaattttcaactataaaatctgttattttgaaaatgtttcttatttttcaaattagaataaataattctcgtcaaacttctgttcaaatatctcaataattattatttttctaaatttacggctgatcattggttcatatcgttggctcgtaaaggactctggcggtgttgggggcttggtaaataaagcccccccccacacaagtctcatagcctacccaagaggcactgatgtcgtccatcagggtcaaagtga

SEQ ID NO: 35687 - DNA, 254 bp, Heterodera glycines
tccagtcgctcggatggtggggcatctttcggtagctgcttttgaaaatcagcctcttccatgagtagttttggatcgatactcaccacgtcagacggttttggcatcatcatgcgggtgataaatggcatcaccacaatcaacgccacagtgatgaaaatgttaaaaccactgaacagagtatcgcccaccgggatcagcccggcgatatgctcaaccgggttgcccggtgttgcagccaacagaggcattga

SEQ ID NO: 35688 - DNA, 905 bp, Heterodera glycines
catcaattatgaagccgcgcatgcactagcaacgaagtcctttgcgcgaagcgctcatgtaatgcatattcttttcatctctcacaagtatactgtctacaccgagcaattactgtgcaaagcataatgtctacgccgagcaattactgtgcaaagcatactgtctacaccgagcaattactgcgccgccacacgctagtttatattactctacagaaaaagggggtttcgtcttcaaaaacaaaatctcccggccgaaggccgggagcgccctgaaagtagtggaagggtcttacaactttttgaggcgcatctgggaaaaatacgggtttttctctcaggtggccaactgagtcccggcggctaatttctcacttttgcttgcgtttgatggcccgtaactttttttctaaaactcgaatcaaaaaatgcccgctgcgagggcaccccgccaaagtgtcctctacatgctggtattatttatttttttaatagagccaccccctggcctgcagaaaatggcaactgaagcgtgctcaaaaagtacacttcagtaccaggcgaataccgagtcggggttttatctgagggaaaggtgcccagcagacttattgtagagttttggaagctcgattttctgaaatttaaaaatttcgaaaattttcaaaaattttcgagctaggcctaaaaaacggttttcgggtttttgaattttaggattttttaacgaattttcctggcaaaacggagaccacttccaaaacatagtttttcgagctctatcgactggtatttttttcggaaaaatttcgattttttcccggaaatagaaaaaatttttggcctcagcgggacatttgagtcccgggcccataactcgtcaggggttggttttagcaaaaaat

SEQ ID NO: 35689 - DNA, 1037 bp, Heterodera glycines
  unsure (1)..(1037): unsure at all n locations
cctattctantgaccacattctgaaaaaaatcccagaaatacgaggaaagatatgcttggtcacaataaaataaaaaatggctagtatgtaaaaatttgcggtcactaataaaataaaaaatggctaatatgtaaaattggcgtccagaaatttttagactaatccgaagcaaagcacgaatgaattaaagaggcgaaagaattcacagtatcgtttctaatagggaaatattgacaggatattcggctaaaaacgggtttgatcatttttagcgcatttttaggtatacatttgagacaagggcaggacaagaaaagaatgaagttgatgcctcatgaaactcggaattggttatgtttagtcgaaaatatccttacataatactcataaaaaatacaaataattcaacccacctattctatgaccacattctgaaaaaaatcccagaaatacgaggaaagatatgcttggtcacaataaaataaaaaatggctagtatgtaaaaatttgcggtcacaaataaaataaaaaatggctaatatgtaaaattggcgtccagaaatttttagactaatccgaagcaaagcacgaatgaattaaagaggcgaaagaattcacagtatcgtttctaatagggaaatattgacaggatattcgactaaaaacgggtttgatcatttttagcgcatttttaggtatacatttgagacaattgggcaggacaagaaaagaatgaagttgatgcctcatgaaactcggaattggttatgttttgtcgaaaatatccttacataatactcataaaaaatacaaataattcaacccacctattctatgaccacattctgaaaaaaatcccagaaatacgaggaaagatatgcttggtcacaataaaataaaaaatggctagtatgtaaaaatttgcggtcacaaataaaataaaaaatggctaatatgtaaaattggcgtccagaaatttttagactaatccgaagcaaagcacgaatgaattaaagaggcgaaagaattcacagta

SEQ ID NO: 35690 - DNA, 888 bp, Heterodera glycines
catattcatttgcacagcatccttttcacttgaagaaaacgcaaaataaataaaacgaagaaaaatggacaacgcaatgaatgtccaaacgaaaaattgttggaaaaaataattaattacgtttgattgaacagctttttgaggagaaagaatggagaaacggttaatgagagacaaattacgatttcttaataaaatgcaaatttcaaaaaatgaaaaagagagaaaatgtgagaattgttgagcatcagtcagacacaaacaatcaaattttgagatggaattttcttcgctttctctccccgtcgttgtcattcattcgtcgagttgtaatagagttgaaactgaaatgagagatggactcttttctgtgttcttttcccccggatttctcgccttgccaatcgaatctttttttgttggcggataaattaatttcaacttgggacagaacagcgcgaaaaagtcctccaatcgttgactgtcctgcatcagtttggcgtcgaacaacggctcacagtcggaaagcactttgtggagcaggtcaaactgaattaaaaatgggggaaatgaatggaatgacgcgagactgaactggccaaacgcactttgaccggcgtggaacagcggaatttgtatttgtatttgcagaaggaagtcgcaatggcacccaaatggtgcattttttcctgaaaataaaatggtaaaaagtaaatatttttattattatttttgcattatttatgcctcggtgagattctcccagtcagcagaatgagcagcagcaacagccgacttggaacttaaagggagcatttgcattttagggcgatgctttggcacactcttcgcccaccatggcaccactccgtcgtcgtcggatgagtc

SEQ ID NO: 35691 - DNA, 1296 bp, Heterodera glycines
ttttaaatcctttttaaacagtccaaaaaagttttaggctaaaattttttttcagaaactgatccaaagcgcgccaaactttgcagggatattgtaaggaagagaaatagcatctctaaatattatctagtcagatcatttgagagatatatatccaaaaaatatttttaggtgttctcggggcagtccacctgaaccgatgcgcccagatttatggggagatcgtatctttcgggaatagcttccctatagtctgtactttaattgtgcgttggatttttgctccccatatatgttagagtaccccaagcggactcttgaaaaaatcgatttttttgttttcggggcagtccccccgaaccgatgcgcccagatttatggggagaccgaatccttccggaatagcttccctatagcctgtactttaattctgcgttggatttttgctccccataattgtttgagtaccccaaacggacacttgaaaaaatcgatttatttttgttttcggggcagtccccccgaaccgatgcgcccagatttatggggagaccgaatctttcgggaatagcttccctatagcctgtactttaattctgcgttggatttttgctccccataattgtttgagtaccccaaacggacacttgaaaaaatcgatttttttgttttcggggcagtccccccgaaccgatgcgcccagatttatggggagaccgaatccttcgggaatagcttccctatagcctgtactttaattctgcgttggatttttgctccccataaatgtttgagtaccccaaacggacacttgaaaaaatcgatttttttgttttcggggcagtccccccgaaccgatgcgcccagatttaattcgatcactcatattttttgctaattgagcagaagcgtaccaaactttgcagggatactccccggtaaaggactaacttacactgaaatgagcgccgagctagctggctcaaaaaaattttcgaaaatctgagtctttcgtttttatttattttttgcaaaattaattcttaaatattttttcagaaagggttctgaaacgcaccaaattttatttacatgttagtttaggcactctgatgctttttctatcaaaaagggagatgaataaaatttttaaaaatttttaattcctttttaaacaggccaaaaagtttaggcttaacttttttttcagaaactgatcagaagcgcaccaaactttgcagggatactgaaaggaagagaaatagggtagttaaatattatctagtcagttcattt

SEQ ID NO: 35692 - DNA, 814 bp, Heterodera glycines
  unsure (1)..(814): unsure at all n locations
catcaatngggcatcgtcgttctgctgctgatcagctnggtaagcataataatcttggctccctgcgccctctcncatgtgctgttgttgttgttgttgttgtgcaatgaacatttgttgcaactcctccagcgaaatttctgcaaattgcggcgcaaatgcatcaatcggttgctctggctctgtttgacgttgcatcgctttgtccatttgcatttgaaaatcattttgattaaactgatcgaatccgcccattccctgctgtgcaaattggtgaagctcatgcgattgttgccaattcggcggatcggatggacaataaatttgttctcctgctacaaattgctgggcatatttttgccaccacaaatccaaagacaatgattgttcccaattttgatcagttggataagtattgtaaagcgtttgttccgcataaatttggtgccaattttcagttggagtttgtccaaattgtgcctctggcatttgatgccatggcatttgcccttgttggccaacagtttcgtcagtgactgaacttgttcctgacgatgatggtgtcatctgctgctcattcgatagcattggcactttcgtcaaattcgtctgcggtggtgccgtccccgtcttcgtcctttgctgggcgtttgagttggagcatcgtcctttgggtgtccattagggcacaaaacttgtcaccatattagtgatggtaatagtacaagtagtgacgtaattatcaagaggtttgagcattgcaatgtgaggggtaatatatgaacgtaggagagtaaagagtttgtcaagaaaa

SEQ ID NO: 35693 - DNA, 745 bp, Heterodera glycines
agtctaattacacatcaaataacaaaaaatatactttagccttctatgaagcttttatgattttgttttctatccatatttctccgtttaattggtccatactcaagtgtaggagcctcaaaatgtaaatgccaaaaatctgtgtcgggcgttcaaatgtcaaatcttcaaatgccgcaccacatctctctatccatactgtacctgctgcttgcgagacgggcatttggcttcttgttctccggacatccgccctcgccgtccttgcggcaatttttacacccttgcggacagtccctggcatacagtttatcgcaacagtagtaacagctgcacgacacatctatgtcacaatagtccacggagtgatccttgtgtttgagatcaaacgcgcagaccacacagttattgccgaaaatgttgcaatttcctggatgcactggcagcatacaactaaaaaaaattaaccagttttcgttgaaaatttttcttttcctgggggtcgcggcttattggggaccgcccactttggcgcctgccattttgggccaaacattaaagcataaataaataaatggcctctgctggtgtaattttagaacgcttaatagtctttattacgggcccttttgtagaaccgggctctcgcaaagtgtcagtggaaatgcgtcagtgataaagtatttttagaactatagtattttgtgtatgttgtactgtaatataaaaaatttaaaattgtcta

SEQ ID NO: 35694 - DNA, 1004 bp, Heterodera glycines
tttctgttgttgttcattcatcacaaatcgcgtcaaattcgaattggatttcgcttcatttctcctcaaatccgcccccctccattcgccaatttctctccccccgataaatgcggtcgaaatttgagcctaggatatttgcggtcactttcttaaggccattttcggacatttgcgccaagactttcgcggcatggattaaaataagtctcttgatttatactacactgtgttacattaatataaggacaccttattttttgttagttcccatgaaccgatcgagttgaaattttaactgtacatagcgattctgaaaatattaagattctaacagtgacaagacgaaaggatttcggaaaaaaattttatggatttttttttcaaaaaaggggtgttacataaatataaggacactttggaatactgagaaaagcctcaacaactacaaaaaagaaactgataaaacaagctaaataataaagaataaatcttttttcacatttctgtttattttgcgaacagaaatatatcttttagggagagtttgttgaattttctaagttttccgtagaaattaagggccaaaaggcttaaatcgcctctaacatttgcccaaccgatcaaactaacagcaaccaacactaagataatgtacagacatcccttaagcatttttattcactttatgccagaaaaaattcattaaacacaaaatttttgcgggtgaaaaaatacgaaaatctgagtaaattcgaaaaaaattctagggggttgggaaaaagtttccgtagaagatgaatatgacgaacagaaagagcacaaaattctctacaaaaaggcctttggatgattgctctatggcaagtattcgctgacaaatgaggagcgtttggttaaacacgaatgtcgcaaaaagtaaggaaaatggctaaaaattggtcatttttgtggttgttgatatttaaccaaatgctcctcagcggaaacgcggcatagtgccc

SEQ ID NO: 35695 - DNA, 963 bp, Heterodera glycines
aatgctatcgaacggtgtgctctatggccggaaattttctataattttcgagctaggccccctagaaattttcggaatttttttttgggttgaaaaagagggtgaaaaatttttttctgggtatttttaaggtgctgagcacgaatctgatgatcattttcagtttaggaaattttagaattttttaaaaattcaaaaatatttttcaattttttgccctcgggattttgggcgaatattggtgagattctttcttgaaagaacacgaaatgtctatgaagacaaatcgcctggcggcataaaatatgagcgtttgcagttcccaataaagcctgcattcgctatgaccattcaaaaaggtcagggccaaacaatccgcactgtcggcattgatctggaaagggaagtattttcccacggtcaattgtatacggccttctctcgggcaacagacggaaacaatgtccgtgttcatgctcccaaccgggaaattgatgcccaaggccgagccaaagtgctgaatattgtagctactaatatgctcaagttacaataaatggcttagtccagagcagttgggcacatggtttttggagagatgccaatcccattcccatctgcactatgttgggtgcgaaaatggtgagaagcttggatccgggacatggaccggtcagccctctttagggcctacaggtgaattgccatttagcgctcaacccaataacgtgccaacgcctggactaagggagggaggagggccatgatgtgcaacgttagggcacttccggtttccattgcattatgcgatgtgtcaactccaattattggaggaaaccaagtgcatgtcggctgacgcaaagaccctaacagactaaaacgcgcctaggtagcgaagctcaagaagcgcgcagcgctttcccaagcgccaccctcgcatgcacacacccgctagttactata

SEQ ID NO: 35696 - DNA, 1603 bp, Heterodera glycines
  unsure (1)..(1603): unsure at all n locations
tctttcgttcatcacctcaaattaattgacgcggttggcggagagtgccaaaaaaagggagggcaaaatgcggggaaggaaaagcaaacatgcgaatttactcattgttttttgtgctgcttaattgctttttgatgttattcttttaattatgcttattgagttcgtatgttcgcttatttacattttccgtcccctntctttcctttccttttccccccgggggtcattcattcccttcgcttgtaaaagtgccaatttcccttttctcctctcgtccttttttggtcaattacccattcgtgtgcccatttggccttactttgcttctcatttgaatgcgtccaatcgctgtaattccttttcctccttttctcttctcttttcttccctttttttccttttttcctttccctccgccggttttcctctgatgatttattgcaatttgttattattattattattatttcttgttatttttctgatgggtttttttcaaggaaatcaaaaaatttaaaaataatttccctttttataaaataaaaaataattcctttttttttgcccttaaaatgtttaaattcgtccgtcgctcattcaaatgaatgaatggccaacttttccttctccatttattcgccgcccattgtcagttgcaccggcaaaaaggtcacttttttgtgtctgtcctccgaaagccccggccattaattaattaattaaataataattaattaattaaaatttttcctaggcactcaccgattcggccttcgcccgtccactctttctgatcgcttatttgtctctgttttttgtcggtttcgttggcaattttctcgtcgtttgggtggtcgccacttgcaaggtcccatcaaataacaaaatgtcattttattaaatttcaattcaaaaacagaatatgcagacggtgaccaacggtaagacgaacaaaaattgtggaaaatttcaaaggaaaaagggggggggggaagaaaaaccgaaaaacgaacggtggccatggaaaggacaccgccaacaatcaaaaatcgcttcttccgtccgtcagttttcatcgccaatttggccgtgtccgatctgttcgtctgctgcacttccatttggcttacgccttcttacactttcatcggtcattggatttggggtgcttggatgtgttacgcactgccattgttccaaggcgcttccattttcatttcttcactaactttgacagccatcgcattggacagacattgggtgggcggagaacggaggggaaacgattaaggaaggaacggggaatagggaaggggggggggcggaaaagggggaaagggaagcggaagacggtatatgggaggcggaagcggaagatatatgaaaggggaaagcggataaaggatatgagagaggggagtgggggagaagcggaagacggaacagcgggaggagcaaagggagggggaaggagtaatgagaaacggaagatggacctttgcaggtgatctgccgttctcagcctcgaactcacgcatcgacctccaatgaggtgtctgttgtctgttttcctttgtccgatgagtcggtcatttgtccg

SEQ ID NO: 35697 - DNA, 1111 bp, Heterodera glycines
ggcactcatcgccatcccgcccatggaattcctttgcctgttcatatgcgttgcctcgtgccccaattgctgagaccgttgccgctaaaatggcattttatcgggatttgggtgggataaaggcgattaattggcggaaggaatgcgtgtcaaatggcactcacaaattgacgcccgcaatattggcacgtgaacggcttaaggccggtgtgaattcgctcgtgctggtccaaatggctctgcaacaccaattaatgaaatgggacggattgcgttttttgaccttttgcgtaaatcgtttggggcaatagcgacaatggtaagggcgatcattgatgtgaatttttaaaagaatacgacttttgcggttgaaaaatgtgcaaagcaattaaggaacacccaataatgaattccgccgaaaattaaaaaaaattaataaaataaaatttgaatacaaaataccaaatgccgtttccccccccccccccccacccaaatttgactacgagtcgagcacaaatgaaaaagctgattaatttgtataattgatctgttcccaatgggcaatgtgatcaaactctgatcacgtaggaatggcctaacacttgacttgccaattttgagtaatttttaaatgtcttggataattgagtgctaaacgtgggttagctgccctcctccgctgcacgtactgctgtgctgctgcagtccgccgcgtgctttgaaccgctttccgcattgcgtgcactcgtgcattctgaccattctgcagtcttccaaatgcgcttgcagttcggcttggccgcccacaattttcttcgggcagtatagacatttcagcgaattgccgccggatgagcgctgtcgccgttgagaagggatgccgccgcgagaccacgggacggccaaagagccggcctgagcagtgatccagggcgacgccgaactagggaaactgacagcactgttgatgtgatggacccagaaggacaaggcattgagtcccgggagaaacgtgcagagtcaagacaaattccgttgagagaaaagatgtatgacaaggacacataccgacacaagctggacaattatctttccaccatcaaggggg

SEQ ID NO: 35698 - DNA, 430 bp, Heterodera glycines
cgaccaagaacagcagcgttttgcgcaccgcaaattttcttgtgatttagccgaagcgtttcggaaatgcataaaagaagtggtagttggtcagatggatggacgaaatgcacaggaggaggtcctgggggcatttgttgatgatgttgggagggaccgaacaaagacgacggaatggttggtggaaaagtggggggaaggggggatagaggaaggaagagggggacgcgaaaaggactatgacgacgcaaatgatgcctcacagaggggaaggaggggacagagctgttgtttgggattggaggttggttgaatgttgggtggtagggaggggagaaaaaagggggggggggaggggaggggaatattattgtcagtgaggagcggtatggcggagtgagaggcaatggcaatgaatgctaaactcgga

SEQ ID NO: 35699 - DNA, 946 bp, Heterodera glycines
  unsure (1)..(946): unsure at all n locations
tgatcaaatgaaaaatgagtgatcagagagaatgaaaatgttggcattgggtaattaatttaaaaaatgaaaattttcattaaaaagtgccatttaaattttaagaggtgctttggatggtccatacttcagggcatttgcaaattacttcaaacggtaatccacttacataaattaattatgttatttgaaattttgttgagtttcttcgaggaataccaacgaagtgccaatgtcactttttggggccttacactgaccaacgaaccgttgcacggacaacggccgggcatgtcaatgaattcgtcagtccaacggtgggtcccgggaagggcagcaggggaagacgaataccgaaactcgagatcgagaaattaccctgaaaccgagaaataccccgagaaccatgactctcacaattaattcaatagtgccagcgaaattttggcattttcaaattcgagtttcgataattttgacaaattccgaacttaaaatgtgaagagaaattgccataaaaactttagttaaaattgctaattaagcgatttggtagttttttaaatattaatgaaaaatattccacagcgattgggccaacaaaatattggcaccgcttcttcaacaatcgccaatctccaaaaatgtgaccataatggcgcatgatgacaacagacatttgcttttcgatgcggcaaaagaaataagatttcgtaatttaaaatattttaattttattattttttagatttttggccaatggaatgagtccaaaaatgccatcgccggccttggcgtccattggtactcccctcccgaatatccgtacgacgtgctctcacgagtccacacgcttttccccgaaaaatttttattggccacagaggtaaatgtgaatggtttcataaatatttanacatttaatttatatatcccataattcata

SEQ ID NO: 35700 - DNA, 1160 bp, Heterodera glycines
  unsure (1)..(1160): unsure at all n locations
cgacaggtcaaatgggtagtagtgatagagacaanttancattggtgatgaaaaaaatgaggtcaatgggcagttgtgatatgagttgaaatttaatntaaagaagcggaaaagtcgacctccagcaaagggaaattggtttttataacaatttgagtaaaaaattttttgtgggaaatttttaagaaatttgtagtagaaataaatggaaaaatgaaatgaatttcaataaaattaaaatgaaaataatgcaaagaagtttttatgtgagaaaaagaaaaaaaaacattgacgatttgatgaatttaaaagtttatatggccaaggcaaacagaaagaatttgtgaaggaattgggcatttctgaaatgacattttggaaatggaaaaaagaattaatgccaaattgtcataaatgtaagcaattattttaattttgagaatttttttattcagttaaatatgtttttagcaccaaataaatattccaatgaggaaaaattaagaaagataaagcaatatttcgaaaccaaagaaaagaatccaaaaatttgtgatgaaacaaaagctaagaaattgagaattgcgagtgacactctgagaatatggaaaagaaacttactttagttccggaaaagtgattttttaaagaagtttatgtttttttgatattagcttgtttatgttatgataaaaaaatttaattgttttatttttttgtgtgactaatagcgaaattttaagctggttacaaaggcctaaattaatttaaatatgtttagaagtgttttagcccattttcatactgctcgagaattttgttcaaaaaattagcatttgagtcttaaagctataaaatttttaatcaatttaaatctcatttatttaaatttaattcttttttccattttatatatttttgcaactttctcctgataattttccaattttcttttgattagttttgatagcattttttcattggaatattcacttgtttggtcaattgattcggttccattttcttcttctctggtttcttgactttcttttttgtcccattcttagccgaatatttcctttttggtcccagtgcccggggtccaaatcctacagggcggtttcctaaaaaccgcccaaggggggggtttcctaaaaacc

SEQ ID NO: 35701 - DNA, 1632 bp, Heterodera glycines
  unsure (1)..(1632): unsure at all n locations
ggggaagttgtattcttacattacattttaagaaaagtatattttaaaaaatgacacatgtgtttttcgatcccgagtcggtcgattggtcatcttttatcactccccaacatggaagaggacagaaacaatattttgtcggaagcaagtatcaacgaggattcggtttccttggtaatgtggcacgtttcttgacccctattgcgaggaatattgcctcgagtgcaggacatgaggggctcgccgcggggcagagagttctgagtgacatcgctcagggccgtgatttaagggatgccgtcagggaacattcaagacaggggttgactaaccttaccgacaagttacaacaatgtgggaaaggaaaaaggtctctgatcactaataagaaccggaaacaagtatatgatcagttaagtttcatctaaaggtataaatggaataaataatacaaaaagttaaaaatgacaactctcaagaaaatcgacacggcgagtgaggacggtctcgaggggggcctttcacttttcgacatccctccgacgaatgttgcaattaataaatccagtattcgggaattgctgccactttcagcaataaatcaatctggaccgtatatctttagacttttttcagataatcagttttgtgatctcaataaaacttttctttatttgtcaacttcaattgagagaaaagacaaaagcaattggattccgattaccaaggacagtgaagctgaccaacatgtcggtgtcattcaaaattttgggcacagctttgtcaaaaccttaaaggtgtcaatttcaggtgttgagtcttatgattccggcatttactatgcgtttagggcatatatgatgaatgaattgggattttcagaagatgtcaaaaagggtctctgtgaagcgtcctgctattatgtcgacgatgtcgaccaggatgattatacaaacagtggctttaaaaacagagcgtcacgttttgctgatggtgcaaaatgtgaaacaatggtgaaacttaattttgatctcgcccgtcagtccaattttttgcttaataactctgacgtgatttttagcatacaccgtaacaccgatgattttctaattatggcaccgccatatgtttccggaaatgcagtcatagtgaacccgcacacatatcgtattaacatacacgatattagaatttatgtaaaaacagtagatgttacccagtcattaaataacataataagcaatcagctacaaaccaccccggccaaatatcctatgagaaaaattgagatcaggagtcttttcatcccgcgtggcacttctgatctttcacacaatgtttttatttacaagaccccgacataagcgaggacctcaaggcgaagagacatgattggctctataaagaaagacgtacggtaaaggggatacttgaaaatagaccacagaaggtagtgattgagaatcatgtaccaggtccaaatgttgcaccatatctgngcctcaataaccaatccaaccacaggagaccgaagaacacgggaaataattattcctaggaaaagacttaaagagcaaactcctgatcctgaatcagataatgatacactttgagggagtaactccggagccc

SEQ ID NO: 35702 - DNA, 1022 bp, Heterodera glycines
  unsure (1)..(1022): unsure at all n locations
cccccccccaaacgaaaatttaaaaattttatgggtacatttttgaatataggcaattttcataacaaagtgcactcaaattttcaaatttttttccaaaaaaatcccggtcccgtgcaactctactttaaatattaaaatgtctaaattaaagtcttaacattcttttttattattttggatcagtagtaaaattacattaatctagtccaaattttcaaagctttcgtttattctaattcattcgattttgaactgcgaattatttaattcaaatttaatttaatttaatttaaaaataactgttttaattaggtggctccgccatttcccacctttctcaacaacatttaaactgatcgatcagaatatgactgaaacatttgacgcaattgacaacgaaattgccaaaattgagaaacaacgccaatttgagacaaatttatgtgccgtttcgttggtcgaccactttttggatgcaattaacaacaatgaacagcgcaaaaagaatggcacaatgccattggcacaggacaaatattttcagtaaaattttaattgaaaatttattaaaaattaatttgtttttggttgtttttaattgctgagacggactgggcaaaaacaggataaatgaattttataaaaaagaattctaattttaaaatccctttttacaattgttatttttcaaggaataatttaacataaatgtttacagcatggaatccctccgatcagtgtgctttgacttttatattgctgctaatgtaagtatatatactgtagtatactgtatttgatttaaaaatatttgatttactctattcatatagaaataatttaattaataaaaaaaaatatttttatacatacctacatctgtgaatgttcaggaaacgactggaaacacattgaatttcatgttgatttacatgattttaaatcagcatattcagaccaaattgcataacgaattgacggcattaattattattattaattatatanaacactattaa

SEQ ID NO: 35703 - DNA, 668 bp, Heterodera glycines
  unsure (1)..(668): unsure at all n locations
atgcgattcgcncacttttacatttttgtccaatatttcctcaacatttccaattaattttgccttttcctcactttttggcgatttgtccgcttttcctcccactctttcgagctgttcaatcgcatccaatctctgctttatctcgaaaatgatgcttgcttgctcaagaataaacactttctcgacgcatggcgaccgaaaaaaggcgtcgaacagctcattgagctttaattcgtcacaaaattcttaaattatttatatttattatactctgatttatgctgattattttgatttaccaaatacagagaaatatttcaaaaatattacttaaaagtcgaaaaggatttagaaaaaataaataaataaatgcctccattctctgggaagaaagattttgagttactatttttttaatatatttaagaaattggggctggctggggtcggcgtcgcatgtgctaggtcgtttcttaaaaactgccagttgtaggtaaataaaaaaatgtaaattggcccaatttcaacctaattaatatttcatggtgtcattcaatagctttatgtgttctctatcagaatattaattttcaaaatttttaaaatagtataaaaaaaagttatggttattaaattccacaaaatcataagtcggaattttttgt

SEQ ID NO: 35704 - DNA, 546 bp, Heterodera glycines
cgccgatccagccaatgtcgcagatccatccgatggtaaatgatctgcccgactgttggtcatggaagcccttcaaaaatgtgtgggggagggatagtatgccaaaaaaccaacaaaaaaaaaagagtgccaaatttgaatgccaaatttgacctgataagcaaatgagccgccaacaaagtccatttgctgttcaaacaacttctcaaacgtatggccatcaaaatgtccaacaatcagagcattcattcgttccctgaaaatttttttcgaattttcccgtaattttgcaaaattttcgatttttaaatcactaaccttccctccgcgtccttgccaagtacagggtatgagcctttgtccgacacatatgacagtacccattttgtgttacggtccaatgggtcgcccattgcgacaagcattgggcactcgcataagcgcaactcgaaacggttgtcctcatacacgacgccccttcaaaatttgggccaaattaagaattaaattttttagacactcaaaattggtcacccccgtaaattt

SEQ ID NO: 35705 - DNA, 754 bp, Heterodera glycines
tctccccctccctttcccctttcctttttccttcccctctcacctctttgcccccttcccactctcccctttcccccctacccctccgtcctcttcttctcttccccctcctcccttactgctttctctccccctccctttccccctttcctttttccttcccctctcacctctttgcccccttcccactctcccctttcccccctacccctccgtcctcttcttctcttccccctcctcccttactgctttctctccccctccctttccccctttcctttttcctttccttcttacctttttacccccttcccactttccccttttccccttaccccccataccttctcttttcttccccctcaccccttactgttttatctccccctccctttccccctttcccttttcctttcttccgaaccacttgaccgtataaccactttccctttttcccctttcccccgacacatagtatatctttcacaaatgcccttatttgtttatttatcttctctctttaacacaaataacacttagaaagcctcaaatccattagaacggaatcaaaaaccaacctgaatatcgaaattctccgctccttgttatatttctgacataaaacctaaagattttagacaaaatatgaataaaatatcgaaatatggacatcctacatcgcaaaatatggaaaaatatggaaatatagatatagaaacccattctaaaagcttctgaccaagctaaaaactaa

SEQ ID NO: 35706 - DNA, 780 bp, Heterodera glycines
ttttgcggtgttcacctcggtttcgtcgttttcctcatcggaagaagaacattcggtgcgatcaaagattgcaaaagcattaggctcaggccgtggcgaagacattttgtctgccctcggatggaataatagagcaatgttggaaggcaatgtaaataaatgtcttgctaaacatggatgactgtattatttgcacaattacaaacactagtgtagagtagctagtgtagaatgtctacactctacactactgcactcagtatgctgatgctggacaaaaagtgacagcggatgagcagtatcgctgcacttatatagacttttctggtggaacagtgtagaattgctacactagactagtgtagctgttctacactctacactactgcactcaatatgctggtgctgaacaaaaagtgacagcggatgagcagtatcgctgcacttatatagattttcctatgggagtagcgtagtaactagtgtagctgttctacactctacactactgcactcagtatgctgatgctggacaaagtgacagcggctgagcagtatcgctgcacttatatagactttcctatgggagtagtgtagagcattttaaggcagttttggaaggaaaaaatttctcagtttgaaacccaaaggggggaccctatggtccggaaattcgagatgacttttcgggccatagttttttatgaaaaagaggtagttaaatggtgtaaagagcttttttgtagagcaaaatattacgggtttttgcatcattcaagt

SEQ ID NO: 35707 - DNA, 1430 bp, Heterodera glycines
attccaatcgaccacgttaatccctccccggtacatttagtgtcttatttcatgaaattatatactatttaattttaaataaagaggcaaatttttacagaaaataaatagacgctgactaattagctaacatttataaagaaagtagaaatttgattaaatgcatatacaaaatattacttttttaaaatttgtataaagttcctagtcgtatgtgctttgcgttggttggttggcgtgggtgactgtggtggttgggccgtttttgcgatattatggctggaaaaaagatgcgatttcgctatggggagcgcggccgtctgggttcaagtgcttgcttgcgcttgtgctcggcattgaacggtgatggctgctgctggggtgccacctttgtcgtggcctcagtttctccagcgattggcagctgtcgaaatgaataaacatgcagctcgtctgtgtgttaaagaaatttggcgagttaattgacttgtgtaaatgtggcctaaggcacaaatgctgtggggaactcagcactggggatgctgaacctaaagttgggtggtggtgttggtatacgagtgagtggcgtattgccatggttgacaagccctatgagttcgtggatcggaactccttgcctggggaccagtgtgcttgcattcgaaaaaacacgagacataagcgcccgaaggcctttggcctgaggaagtgtcctaaccgggaaatccggagtgctcgtgtgagtgcctgtgcactgccctcggagctgtgtccagcggcgagatggttcttcccaagtccgggaagctcggatgcctggccagcgctgtgtcattaccacttgctcggtcgccttcgccgcccatgcgcacgcttgcgctgaacggagttgtttctgctgaaactatccgtctttacaagacggctgtaatagcggcgcttggcaacgctcgctagcagctatctggttgatcctgcctgaactgatgtgttcatttcaaagattaagccatgcatgtgtaagtttaacctgccagacagggaaactgcgtacggctcattacaccagctataatttacttgaccttgacttcttacttggataactgtggtaattctagagctaatacatgcaccaaagctccaatctccccagagcggagcgcatttgttcgccacaaaaccaagcgccctccgggcgtccagtgttgactcagaacaactaagctgatcgcacggtcttgtaccggcgacgtgtctttcaagtgtctgccttatcaactttcgatggtagtgtatctgactaccatggtgatgacgggtaacggaggataagggttcgactccggagaaggggcctgagaaatggccactacgtctaaggatggcagcaggcgcgcaaattacccactctcaacgcgaggaggtag

SEQ ID NO: 35708 - DNA, 750 bp, Heterodera glycines
ttgatttaattgtttttttttaaagttatagtttatcaaaaataagtgtattcgaagtgttttgcggttgttcgtctttcgtcccatcggtcggaccctttgatcggcgcctttcaaaattaggccaaacgtgtcattatttttaagtttagtaaattccgaggttcaaggcattgaagtgattggccgaggtaatcgactgtttgcctcaagcatcagcaatgtgccatctcttggtgtttgtgtacctgcccccccccccccccccctccccactgcgaatggagaataatccatgccgattaatacttgtaattactttaccattaactttatgtcaaatatttccggatgttgttaattaatggactgcttgcttaatgtttgattcgttgctgatttgacattcattctgctaaacaagacgaccatattcaattatccatccattatttcttaaattattatttttattgagtgaaaaattgttaaaatgagaaaatatacaatatttgcgcaaaattcggcaaagtaacgcacggaatatttgtcaagaaaaattgtctgaagattctcgaaaggcgaccggaaaacgcacaataaatgcttattttggcaagcgaagggaccagcagagggaagtgatcagatcattagaaaaggggtcagcagaaggaggtgatcagaatgagaagtgatcagaccatcagaaaaggggacaacaaagggaagtgattagaccatcagaaa

SEQ ID NO: 35709 - DNA, 1166 bp, Heterodera glycines
  unsure (1)..(1166): unsure at all n locations
ttttagtatcttttttgaaaaacaacaatttttaatacntgatacggtagcccaacatccattgccncaatgtacccttcggtttgtcaacgggagctaacaattgatgagtttgtttggtttcttttntaagcaattttccctcattgctcaccaaatgttaggcgtacagcaacggcggcacttgcatccgatgcagctgttcacgggctctctaaacctatttttattttttttctatctcttctctgaatggagttataacaatttttcacaacagttttgcatttaacagacacattctaaaatttctaattagtatggtagtccaagcctattatttttttttttgacttgtctctgaatggggttatcccagttttagtatcctttttgaaaaacaaaaattttaataactgatacggtagcccaacatccattgccccaatgtacccttcggtttgtcaacgggagctaacaattgatgagtttgtttggtttcttttttaagcaattttccctcattgctcaccaaatgttaggcgtacagcaacggcggcacttgcatccgatgcagctgttcacgggctctctaaacctatttttattttttttctatctcttctctgaatggagttataacaatttttcacaacagttttgcatttaacagacacattctaaaatttctaattagtatggtagtccaagcctattattattttttttgacttgtctctgaatggggttatcccagttttagtatcctttttgaaaaacaaaaattttaataactgatacggtagcccaacatccattgccccaatgtacccttcggtttgtcaacgggagctaacaattgatgagtttgtttggtttcttttttaagcaattttccgtcattgctcaccaactgttaggcgcacagcaacggcggcacttgcatccgatgcagctgttcacgggctctctaaccctatttttattttttttctatctcttctctgaaaggagttataacaatttttcacaacagttttgcatttaacagacacattctaaaatttctaattagtatagtagtccaagcctattattattttttttacttgtctctgaatgggggtattccaattttaatattctttttgaaaaaacaaaaattt

SEQ ID NO: 35710 - DNA, 833 bp, Heterodera glycines
tagaatttaatgttttagttcagcaatattatcatatttttaagcaaaaaatttgattgaattaattttttataattttagaaagcaataattattaattttatttatcaatttgatttcaaattagttaaatttaattagttaaatttgacaccgatttctttgctctttggtcattgggcagttgcccaccacagttttgttgtttgcctgttgttgatgttgtttttccccatcattagtgctgctggttataaaattgttgctaccagctgcgcaacacgtgtaaatgcgcttgttttgcactgttctctgaaaaaatagaaatttagcgactaacagatggacaattcagtgctagcaaattcagtacatttttacgggtaaattcccgggttttcagggtttactcgacaattatatttaattgacattaataaatacataattagttaattagttcatgaaattatagtaaatttgaatttttgagtgaaattttccagatattcgagaatcttttaacagttcaagaatagcccggcattatcagtaaagtcgggattttgtaattaattaggccaatcccataatttgagtgtcgaggaataaaaatcccggtaatatttaagaattaaaatctcgattcttgagactaagcttcggtgtgcgtcaatttataaattattttatatatttaaaatcagtaaaatgttttaactgaccttgaagaagcctttgcagctgaaaagtattgttgaaaataaaatgcaaaattgttaaaatgtaagtaattagaaccacaaaaataaaaaaataaatgaaaaaatata

SEQ ID NO: 35711 - DNA, 833 bp, Heterodera glycines
tggcagagatggtaggccaaggaaaataggggggagtacgggatcgcgaaatagcatcgtagaacaatttccctcgtcgcattcgcgacactgcccctctcctcagttctttccgagctggtcggtcacttccgtcggcgggggcagcacaaacagggcattcgagaggttcaagagttcggcctggacgtctcccaagcgctcctgcattgatgccacccaccaggccagggcagggggaaggccggtgggagtcgtcaagtcagcgtgagcggtggagaggagggcagcggtattatgagtcctgtagcgcagaacccacagcgatcggtgcaaatcgggaggaagagaagaatgtaggtggagaggataagtccgggggtttctcgggacgctctcgactttgccagggcgggccggaagagaggcggggggaggggggttcggagggagagggggggtcggagagagacgacgactggggagtgaagctggaggggggacgacaaattgagtgggctgagggcgacggcggggataataggggggggttgaggcgtctgccgtttggtggagagtacgatctctggaggtgaacgcgacggtggaggggggagcgagaacggcgagacggggagtgatgagcggaacgcacattggaggacgatttttctgccacctcgtcggtcgccgacggcgcgctggagcagacgaccgaagctagcttagggattgggaaaccgggcagagggtcaaatatgcgattgtcctcgtcgccgctgtcctcacgagtttgggcggacgaactaaggctcgcttattcatatccgttt

SEQ ID NO: 35712 - DNA, 726 bp, Heterodera glycines
acgaaacgaatggttaagagaaatgttctcactttaccgctcggatgagaaaatttggaagagcgaaggtggcgagggaaagaggggaaacgagagagaaaactaaagaaagagagagagaaagaaaatgatagagagagaaaaagaaagttagagagagaacagagaaagaaagagagtaaagagagaaagaaggtgagagagagagaaaaaagagagaaagatagagagggagagagaaaacagagaaaaagagagagagtgggcaaagggtggtgggggggggggaaagagtgtgttccccggggaataatccatcgaatgggcgggggaggggtaaattgtgtcctgtcatcccaaaaatttaatttcaccatttgaatgcgaagaaaatccccgaggggacttctttaatgatgggctgtgggggagggggggggagaagatccctctcgattttaagacgaaaatcactcgacggatttggggcattgattgtgcacaagaaagtcgtcgattgaccagcaaattttgactttcaggttaccgataagaaaatcgaccacaaccctttcgccaaagggttccgcgactgccgcgcgggcaaacgcgagaagaagcggcagctgaatgccgcgcagcacagtcacgcgctgaaccacgcgcaccatggggcgaacaacgccaactcggcgacggcggaacgcgttttgcatggcgactatt

SEQ ID NO: 35713 - DNA, 1621 bp, Heterodera glycines
ttggcttttttttaggcatttcccgttgcaccactttggccccgcttacctgtttcaattccgatggctcctactactcctattgtgccattcgaattgttaatgaacagtctcaagtatatctgacacagataaccgagatcttaattggaagtctttatggtggcagatgaagcggtgcccaactagtgtaaaggcggcgcttcaatgggaattccatattttggaaggattgatatgattagagcatttattggcataatctctatcaaatggggtgagcatcgacggcgctttaactgcttatcgaacatctcgaatctctgctgatggatagattttataaataatattcttaaaattttttaaaatgattaatcttgtgatagctattttctttctatttatcggaatttttattcaaaatctctccataaagtatttataaagagtgtctttggtcggaatttacaagtgatcagcgtgtgttgtatcttcatgcttgcacaattcgaattagtgttttatgtttattttcaacaaactctcctattattgcgttttccatcatttgctgatcagctacgaagatattaaattattaattttcgatataaattcatattaattattttctatcaaccaacatcgtggtggtttctattcaattgtccttcttaaaaatcctaattaatgtcttactttgctcatttctttatctctccctcggaatcaaggagtgagtcccttcggtgcaggaaaattattaaggaagagagttcattatttatttgttttttgcataattaatttataaatatttttttcagaaacgggttctgaaacgcaccaaattttatttacatgttagtttaggcactctgatgctttttctatcaaattgggagatgaataaaatttttaaaaatttttaattcctttttaaacaggccaaaaagtttaggcttaactttttagtgaaaattcaatcactcatttttcgagtagtgatcagaagcgcaccagattttgcaggggcctaaaaaggtcaaggaaaggcgtctctgcgttgatttagcagtagtacctatgaatttaaattttctatgaatttttaaagttttttgaaatttttttaagtgcaaaatggtggtgtctgcaaaaaattttcaccgggtttaaaaaatctaggaaaattagtaagcatttgtagtgttccgatacgtatccctgcaaaatttggtgagcccctgatcaattacaaattatttatggacgatcaaatttttagaaatttttatttatttttgcataattaattcataaatatttttttcagaaaatgctctgaaacgcaccaaattttatttacatgctagtttaggcactctgatgctttttctatcaaaaagggagatgaataaatttttaaaaatttttaattcctttttaaacaggccaaaaagtttaggcttaacttttttttcagaaacttatcagaagcgccccaaactttgcagggatactgaaaggaaaagaattaacctgttttatcacattagcttgtcatcagtttttataaaaaattttcaaaattctgagtctcctaaaattttatttt

SEQ ID NO: 35714 - DNA, 837 bp, Heterodera glycines
ttttatgtcaccttcagcaaatgaatcccgactatttcttctatgaaaaagcgtaagaatctcgaacaaactaagtcccgtctttaataaacaactaccttaaaggcaaaaaataggaaatcaattttttatgatcaaatgagtcagatcactccgattattttccaatattagtagctcaatcaataatcaactcgaattgtcgaatatttttaaaatattagcaagaaaatcaattaaaaattaatgtttttcttttttatttggctttttattttatgtcaccttcaacaaatgaatcccgactattttatattatgaaaaagcgtaagaatctcgaacaacctaagtcccgtctttaataaacaacttccttaaaggcaaaaaataggaaatcaattttttatgataaaatgagtcagatcactccgattattttctaatattagtagctcaaccactaatcaactcgaattgtcgaatatttttaaaatattagcgagaaaatcaattaaaaattaatgtttttcttttttatttggctttttattttatgtcaccttcagcaaatgaatcccgactattttatattatgaaaaagcgtaagaatctcgaacaaactaagtcccgtctttaataaacaactaccttaaaggcaaaaaataggaaatcaattttttatgatcaaatgagtcagatcactccgattattttccaatattagtagctcaatcattaatcaactcgaattgtcgaatattatttaaaatattaaaaaagaaaatcaattaagaaattattgtctttcttttttattttggtttttattttatgtca

SEQ ID NO: 35715 - DNA, 1019 bp, Heterodera glycines
ttcttttttataatttgattcaattcaattcgaataccctaattcacaaatgttattttaagtagtgagcaccagggttgtgtgccgacgacaaaaaatttttgaaaatcggaattccgagggcccaaaaattcggcaattggacggcccaaaagaatcagaattccggtctcaaaagagtaggaaatcggcatgcctacacattcctgctgctgtcctatcataacattattatataccgtacacagaaaaaaaaaattatgggtaacctatcgctactctatgcctctgcgaggtataaacctatataaatgaatttgaagtgtgacaattgaaaaaaattatgcgtaaaaatttataagcgcctcacatgatcaccacaatgcacaccaattggagcagccagcccggctggtcgtccaactcgcccagcgcgttggccatcagtttggacagtcccgactccttgacgccggccgccagggcaaagccaccgccgagcagcagcacaacaccccactgaatgatgggtgagtgaatggggtggacaatagagcccggaattttgaaaaagttgaatcgagatttgggattggcatcaggctgggtaggattaacgggaatcaaatcccaattttgtcagaatcccgatcccggcccttttttctaaagatctagggaaaatcccggcgtgatcccgaccccgttcgggctttagttattcttgagccgagactcgggaccagaggatttcgagcagactacgagtgaacaagtgaaacaaccacatagatcaaaacggtggaagaaaagccaacaacaaaaagacaacgaacgaatggacggcccgggagtttgggaaggattgacggaattgcttaaagaacccagggcctgtcctaggtgcttagcggtacttaaaattcgggccttccctaaaatacaaccctccgcccttaaattaaagccgccctgagatagagccccctccctaattagagccgctctggaataaagcc

SEQ ID NO: 35716 - DNA, 1281 bp, Heterodera glycines
gcatggcgtagattttggccatgtgtcccctgagaattcgtcggttccgcagctgaatgcgcccgttggactctaaattagcggctgccaatgccaatgtcgtatccttggcttgtttccgcgcttcctgaacccgattaagcattgatcagtgacgtgttctcatccgtccccacccttgtgctgatttggctccgaatattctctttaaatccttccgcttccttcgataattgattgtgatcaaatgtcgtatttcgctcgtcatttctctccctaaagaatttaaaaaatggctaacattttgtctttgattgtgtttatcttcttacttgaatggtccttgaatgaatgaaaatgaatcggattgaagaaaattcatttttgtatattaatagacgaataaattttgttttgaaactgttgtaaagtgccgctggatggcttaatcctaaaaagcaaagtaaaatcaaattcattgaaaaaaatttaattttaaaaataacggcaaaacacattcttaaaacattcaattaaatttttcctttccctaatttgtttcctaaacaatgctttatttgattttttgatggaatttcccattttctttttcccattgcgattcgtttttctcccactgattgggttttcttcctttgatcaaaattcaaaatcccttttaactttcgtctgatcgcaatgctaaagaatcgcggtccctaatttaacttttttattttttttatttttggctcaaaaatcacgaatctgaactcggatttactcaattccgaaccccggacccgaaatcgaacaaaaagttgaaatttttttccaaggattacatttttcgtggataaaagcttctaattcatttaacactatttattttgatccaaaataatgcctcaacattaattgcataaaaaatatgcaatttacgccaaaatttgaccggttttaactttttttggaaaatttttttttctacttttttgtcgaattcgggtccggggttcgaaattgggcaaatccgagttcatattcgtaatcagcaccctcgaaaaccccaggaaactgaatctgagcccagaataaaaaagttaaattggggaccacaaaccattgccacagaatgataatatttttcattgatttattaattttatcttgtttaatcagttttagagcaatagggaaaaattttgaaaatttcagttttcatctttttgttctaattcgcgttcggggttcggaattaatagaaatgggtgtcagatt

SEQ ID NO: 35717 - DNA, 1467 bp, Heterodera glycines
ccctaaattgaaagtttttagcaacatttttccaatttaaaaaaacccaccggtagctcaggaaaaaaagcaaaaacctaaaaaatattagccctactcatgacaccaaatttgaattattttttttggcgaaatattttaattttgaaaatttttaaaaatgcaaaaacaatgatggcctgtgaaaaataaagacaaaaattattttaaaaatacagaatcgaaattatattatcatctggcattctgtttttttcttcttcattttttgtctctcggctgcaaggtgtgccaacggacaacctaaaaaaaaacttgaaattttcaaattaaatttcaaaaaaacattcttaccggcctcctggtcagcatcatctcattccactgttcttgagcagctaaactgacggaagccaattgtagattggcagaggaaagaagcacctgaaaaacggggcggacggaaaatttgtcggttccgaatttgtggcgatttgtacaaattaaaaaaaaaaaaaattaattcttagtgttgttcgagactcccggtttagacacaaaaaatctcgaaattttggaattcgttcttcacattgacggcctcgcaatttatataatttcccattttcagttatataccccaaaatggatcgaaatttttcgaaatctcggttcttgagcctagaaatcgtaaaaatttcatatttttttgaggatgcgaggagagggggtggccaaaccctgaagttttaatgtctctgaaatgccttacttcaccaatgaagtcatttttgctcattttatcgtaatcccatacggtgatgctcagatgaactttctgagaacaaaagtaaaaatttatatattttttatttttacaaaattaaaaattatatatttaatttaaaaaaataataaatttatatttaatttttcaacacgcgccaaaagcatgtttaaatagtaattaatattgcaatttttgagaatttttaagaaaatatttcataaatgcccgtaaataaatccaaaatttcacatttttttgtagatagttttattatctgtatattttggtaaatatttacgagtttttttacatgtttaatgtttttgcaatttttttacatataattcctagccctatgcttttcggaaaaatgaaattttaaattttgatttttaaaaatttattcattaatttgatagaaaatttttttttaggcggaaataaaaaacttacgtccattttgtccggaaccattttgaattggaaactttcgttgtaactgaaaaaagtgggaaaaataaatgtaaaattttcaaaaaaaaaaaaataatatttacttactaaggattcaatgttttgtatttgatggtcgtttttttctttgcacacaattttttgccctcataaggtacagcttgacgtaggggtctaaaaaattttaaaattaaattttttaa

SEQ ID NO: 35718 - DNA, 1046 bp, Heterodera glycines
  unsure (1)..(1046): unsure at all n locations
ttacaggcatgccgcacttttactccttttctttttcctttaactcaaaatatancaccgcgaccccactccgactctcatctcacacaaacccaccctctggcatgattggaatatgcctgtccttcaaaaattttgccttgaagatcttcataacgactcccgcaattgtgacactgtcctttattacatccaaatctcctgttatccccaaaaataaccgccggaacttcaaaattgattccatcaaaatttcaacatcgttttcgcaatacgtcttaagttgttcccctaaaaccaatttaaattaaaaagcccatatttttccgtctacctagttcaaattccttttgaaaattctcattatgccatgcttccaattttacggcttcttcctccttcatattgtccgggcaatagtcttccaaaggtggcaggttggatactctcttccgaaaattctcattcttattgtatttgtgtggaaaatacaatttagctgcagtttttaagtccaaggtttttggaaggtcggccaacctattctgactaagcatccaaaaatcccgaaaatacactcttcccgcctttatttgataaattttcaaatctgccatcatcagttccgtcgcgatttccttcttcgttagttcagacaagacaaagtgggaatcgaatctcccagcataatgcgcgaaagcaatcgtttcaaatcgttgaaaccccattacccaaacgacaaactcgctcattgggtcaaaaccatccgctactgaccatgtgattttcctggggccttcgcaaatctcacattcccgctttttctcccgcacaaatgttgcaagtacgtgcagcactaacaagattaagcccggtgttctcccccatctacagtcgtctccaggtcgaatgccacaaatctgtaagctttcctgcggtcgcacttgaattttttttgatgaaacattgccccccctggggggaaaattttgcaaaagttgcaaaaattttccccccccaaagggtttccaaacgggtttggaaaa

SEQ ID NO: 35719 - DNA, 860 bp, Heterodera glycines
gtaaattaaaatgacaacaatcagataattacccaggcattttgggcggaaaaacggcatcggaccatggaaacgaggcataacgacacaaaaaatggataccaatttacctatttttggatacacacacagagcccttttaaaaagtcccaaaaatggcacataaccaatttgacatttagctttccatttaaagaaaattaatttaccccaaaccaattttcacacgccattcttttgactttctaaatgggttttgttgtgtgagcacagcaaaacagtaaacatccaaaaaaaaaaaaaaaattttagcagcccaaaaaaaatgaaaatttttaatgggccgagagcctttgtccacaaaaataagaaaaacccgaacccaaaatcaaatgttagccgcactctgaaattaacatcatcattttgcgaagtgttggcacacacctcaagccacgacggtggcaatccggtgaacttttggccatcatagccaacatggattcgatggaccacgtcgctgggtgccgaaatttcgttgatggtctgctggtggcatccctttttcagtggactggtgctggtgcgttgtgccatcatcggagttggtggtgttgttggccactcctccgctgctgaaaattcggccaagaaggtgccgtagtcggacctttgagcttttgtcacgcgacggtgtgccaatggtgctggcggtgtccattaataaaagttcttagagaagatattgtcaattgggacattttgcaaactcttaaaaaggagcgaaaagttcgtttagtaaaaaaagagagtaattttcttcccgatttttgagttattttcataacaaaaaatttttc

SEQ ID NO: 35720 - DNA, 1277 bp, Heterodera glycines
ctatagggaagctatttccgaaagattcggtctacccataaatctgggcgcatcggttcggggggactgccccgaaaacaaaaataaatcgattttttcaagtgtccgtttggggtactcaaacaattatggggagcaaaaatccaacgcagaattaaagtacaggctatagggaagctattccggaaggattcggtctccccataaatctgggcgcatcggttcggggggactgccccgaaaacaaaaaaatcgattttttcaagtgtccgtttggggtactcaaacatttatggggagcaaaaatccaacgcagaattaaagtacagactatagggaagctattcccgaaggattcggtctccccataaatctgggcgcatcggttcggggggactgccccgaaaacaaaaaaatcgattttttcaagtgtccgtttggggtactcaaacaattatggggagcaaaaatccaacgcagaattaaagtacaggctatagggaagctattcccgaaagattcggtctccccataaatctgggcgcatcggttcggggggactgccccgaaaacaaaaataaatcgattttttcaagtgtccgtttggggtactcaaacatttatggggagcaaaaatccaacgcagaattaaagtacagactatagggaagctattcccgaaggattcggtctccccataaatctgggcgcatcggttcagggggactgccccgaaaacccaaaaaaaaattttttggataaaaattatttaaatgaactgactagataatatttaaaataggttatttctcttcctttcagtatccctgcaaagtttggtgcgcttctgatcagtttctgaaaaaaaagttaagcctaaactttttggcctgtttaaaaaggaattaaaaatttttaaaaattttattcatctccctttttgatagaaaaagcatcagagtgcctaaactaacatgtaaataaaatttggtgcgtttcagaaccctttctgaaaaaatatttaagaattaattttgcaaaaaataaataaaaacgaaagactcagattttcgaaaatttttttgagccagctagctcggcgctcatttcagtgtaagttagtcctttaccggggagtatccctgcaaagtttggtacgcttctgctcaattagcaaaaaatatgagtgatcgaattttcactaaaaaagttaagcctacattttttggcatatttaaaaagcaattaaaaaatttttaaaatttaataattttcct

SEQ ID NO: 35721 - DNA, 1719 bp, Heterodera glycines
  unsure (1)..(1719): unsure at all n locations
ttttaaaaattttttattccttttttaacaagcccaaaaaggttagggtttaacttttttaaggaaaaattcaacccctccatttgtggaggtagtgatccgaaggcgcacccagattttgcaggggccctaaaaaggtcaaggaaaagggtcctctccgttgatttagcagtagtacctataaatttaattttctatgatttttaaagtttcttgaaatttttttgagtgcaaaagtggtggtgtctgcataaaattttcacctgggtttaaaaaatctaggaaaattagtaagcatttgtagtgtgccgatacgtatccctgcaaaatttggtgagcccctgatcaattacaaattatttatggacgatcaaatttttagaaatttttatttatttttgcataattaattcataaatatttttttcagaaaatgctctgaaacgcaccaaattttatttacatgctagtttaggcactctgatgctttttctatcaaaaagggagatgaataaatttttaaaaatttttaattcctttttaaacaggccaaaaagtttaggcttaacttttttttcagaaacttatcagaagcgccccaaactttgcagggatactgaaaggaaaagaattaacctgttttatcacattagcttgtcatcagtttttataaaaaattttcaaaattctgagtctcctattattgggcagtccccccgaaccgatgcgcccagatttatggggagaccgaatccttcgggaatagcttccctatagcctgtactttaattctgcgttggatttttgctccccataattgtttgagtaccccaaacggacacttgaaaaaatcgattttttttgttttcggggcagtccccccgaaccgatgcgcccagatttatggggagaccgaatccttccggaatagcttccctatagcctgtactttaattctgcgttggatttttggatttttgctccccataaatgtttgagtaccccaaacggacacttgaaaaaatcgatttttttgttttcggagcagtccccccgaaccgatgcgcccagatttatggggagaccgaatccttccggaatagcttccctatagcctgtactttaattctgcgttggatttttgctccccataattgtttgagtaccccaaacggacacttgaaaaaatcgatttttttgttttcggggcagtccccccgaaccgatgcgcccagatttatggggagaccgaatccttcgggagtagcttccctatagcctgtactttaattctgcgttggatttttgctccccataaatgttcgagtaccccaaatggacacttgaaaaaatcgatttttttgtttcataaatatttttttcagaaagggttctgaaacgcaccaaattttatttacatgttagtttaggcactctgatgctttttctatcaaaaagggagatgaataaaatttttaaaatttttaattcctttttaaacaggccaaaaagtttaggcttaactttttagtgaaaattcaatcactcatttttcgagtagtgatcagaagcgcaccagattttgcaggggcctaaaaaggtcaaggnaaggcgtctctgcgttgatttagcagtagtacctatgaatttaattttctatgaatttttaagttttttgaattttttttagtgaaaaagtgtggtgtctgcaaaaatttt

SEQ ID NO: 35722 - DNA, 666 bp, Heterodera glycines
tcggtgggctggcgagtttactttgaacaatcagagtgcttcaaacaggcgtttcgcttgaatgttcgtgcatggaataatagaagaggatttcggtccgattttattggttttgctgaccgagataatggttaacagagacaaacggggccattcgtattgctacgtgagaggtgaaattcttggaccgtagcaagacggactacagcgaaagcatttggcaagaatgtcttcattaatcaagaacgaaagtcagaggttcgaaggcgatcagataccgccctagttctgaccgtaaacgatgccaactagcgatccgccggcggatttattcgccctggtggggagcttcccggaaacgaaagtcttccggttccgggggaagtatggttgcaaagctgaaacttaaaggaattgacggaagggcaccaccaggagtggagcctgcggcttaatttgactcaacacggggaaactcacccggcccggacaccgtaaggattgacagattgatagctttttcatgattcggtggatggtggtgcatggccgttcttagttcgtggagcgatttgtctggtttattccgataacgagcgagactctagcctactaaataagttggctcattgcttctgtgggcacaactttcttataggaattttc

SEQ ID NO: 35723 - DNA, 1370 bp, Heterodera glycines
ttaaatttagcaggcagaaagtatttatactaaggtatttctctgcaaaaattcatatttttctgaaaagtacgaaacgaacaggaaaatcagcatttttaaattccgtgaatcttatttacctaaaaatcgcatccctactcattagtgaaagagaggggagagaaagagagacatagaaagaaatacatagagagagagcgagagagagtgaggtagagagatgagaaaacagacagacaaataaatacacgcaaagttacatagcacagcagagatagagaggaacacgcacacgtgtaaaacaaacgccgtggggcgagggacgacgaggcggtgcggtgagtgagagagtgcgtgcggtcacaggggcgacaaaacaaaggaagcggaaggagaaaaagggggagaagaaagaagggaaggaagggaacacaaaggaaaaaaagagacagcagagggagagagaaaagtgacggccaaacaaacagccaaaaggggaagagaaaaacaaactcacgcaaaacaaacacagaaaacacgtccaagagcaccgttctctgttctctgccctttccttgttgccagccgaccgacgacggcggcggcggactgtcccttgccccacccccgcccctggcgaggctgttctcagcgtctcagcgacggcacgtgtgcgttgttcgttcgtatgggcgaatttaatgaacacacgctgcctctttgccgtctccgccacctacgtggtatttctctctctgccttttctgtcgtcactctctctcttttttctatgtcgcgcctccccttactattttcgttttttttcgctgtccttcttgacaatacacagaaaagttgtgaataatgaatgattggatgacggatgatctctgacttaaatggccaaagaattccgctaattaacttttcttatctttttttctctgctttctcgcttttccactgcgttttatgtttctctgccccttttctccaattttcttttctgttctttctttccctttacgtcattgccatttttgctcttctcttccttcctctccttcttgcaacatcgaaatcgaaaatgttgccagcggcaactgcgtttttttgttaataaagtctttttttcagtggcttttcgttggaaggcaaaacacaaagcaatggcggggaggggagaaataaatgaatttacaaatgatgtttcattgagataaaaatatcgtatactttgtaacactatacggtgcttcaccgatagtgtactgtagtaaagtatctaaaaactgttcttttaaaatatcaatttttcctctagggggacttctcactctccggcacagggggaagcatttttttat

SEQ ID NO: 35724 - DNA, 737 bp, Heterodera glycines
  unsure (1)..(737): unsure at all n locations
agtgcgatcagagaccaaacaaaacacaactgatcagacgacaaaaaatgatcagagaatgtcagatcagatagtaagtatttaatcatttaaaattagaaaaaaggataaaaatgttttattgttgccttatcgctggtgaatccggcaaagagtttaatgccgaactgcgccagcggagccaacgatgccgaaacgccagtgtgagcgacggggaagtgcagcacggagttcaaatagctgaaaaacagccgaattttggaattttttacgaattgcgcacctcggcgaatagagaaacatcatattgacacacaccttaagagaaggaacgaatggagaaagggaaaagcatttaaaagacaaaacaaaaaagtgataaatgaattaaaacgcacgaaattgccaatggcggcgatccaaacagcccaaacggagcctaatgatggattaattaattaatgagtgagtgatttcgaagagtgtccccccgcattagccaatttcaaaattatgccattcccttttgtctttggcatttcgtcccccccccctcccccactcgcctgtcattaggatttgcttcagcgggatcttcttcaaattctctttgctcagctccgatttgcccaccgcaattttacgtagctcaacttcgcccacaaaaggatgcttatctgatagtgatcagagggaatttgcacaattataaatataattttttaanctttttttaa

SEQ ID NO: 35725 - DNA, 1106 bp, Heterodera glycines
  unsure (1)..(1106): unsure at all n locations
atagcggaattaaattatatattatttgaattcattttttcggcggtacattatgtaaaccatgtgtggttagcacagaaaatttataaaaatctctacccctcggtttcatgaggaaatacataaaatttcagaaatttcataacggaattaaataatattatttttattcattttttccggcggtacattaagtaaaccatttggggttagcataggaaatttcaaaaaatctctggccctcgctttcctgaggaaatccatcaaaatttccggaatttcatagcggaattaaattatatattatttgaattcattttttcggcggtacattatgtaaaccatgtgtggttagcacagaaaatttataaaaatctctacccctcggtttcatgaggaaatacataaaatttcagaaatttcataacggaattaaataatattatttttattcattttttccggcggtacattaagtaaaccatttggggttagcataggaaatttcaaaaaatctctggccctcgctttcctgaggaaatccatcaaaatttccggaatttcatagcggaattaaattatatattatttgaattcattttttcggcggtacattatgtaaaccatgtgtggttagcacagaaaatttataaaaatctctacccctcggtttcatgaggaaatacataaaatttcagaaatttcataacggaattaaataatattatttttattcattttttccggcggtacattaagtaaaccatttggggttagcataggaaatttcaaaaaatctctggccctcgctttcctgaggaaatccatcaaaatttccggaatttcatagcggaattaaattatatattatttgaattcattttttcggcggtacattatgtaaaccatgtgtggttagcacagaaaatttataaaaatctctacccctcggtttcatgaggaaatacataaaatttcagaaatttcataacggaattaaataatattatttttattcattttttccggcggtacattaagtaaaccatttggnggtagcataggaaatttncaaaatctctgggcctcgctttcctganggaatc

SEQ ID NO: 35726 - DNA, 946 bp, Heterodera glycines
agtatataccaaagaaattaggaatttaaataaagttcatgcttccaactccattgacgacaatctgtcaaccggtggaaaattcggaaatcattttattcttttcaactttaatgatttgcaaaagccgttctgccgatgacatctttcgttctcccacattcattgacaaaaaaatcctttggtccatcgattgtccgaaattgggtcacagccaaaggagggcaccattcaactcgttccaagcggagcaaaatgccaacaaaaactgttgctgtggttgaggggggggggggggtggacattctccgaatttcctccctcttccctctcttttcgggtctttccatccttcgctcatttgtcttcccattctctgatcattttttaaaatcattttcccctttttggacctctccctaattgggtaattatttttctccgtttttctgtacttttgtccgcccacccattcactttttcaattagaatcgattaattttgtcagtccgtcgaaagctgtcggatggtgggaaagtgatcagtcacttgtcaaatcggagattgactcgcaaatagcgaattattttgatcaattgtttgtttttggactgacaaaaactgcaccaaattcgcaaaaggcgccgaagaaaagagagaaatgcgtaaaattaaactatttttgtgatagttcactttcgacacttttcttccgccgcctttcatcgtttgccaattaatctaacccccaattaatttgattaattaattaattgctgcctttggcatttatttccttttccatttttcattctgctttctgccatggatgatgatgtttttctgccaacttctgcccaatttgacgccatttacacggacaccgtcggcattttcgtcgatgctaagtgggggagcagcacccaagcgggggtccaactttgcc

SEQ ID NO: 35727 - DNA, 974 bp, Heterodera glycines
aaagtccaagtaccttattggacatctacgtgtcaatgagcacagtgacctttgtccagtaatgtatcggaaaaatgtgaatatcagacaggatcccttacaattctaaaaattcctcttttcgtctaaccatccctcccttttgtgcactatttcgtttcaaaattgaatcattttttttgtctttttgaaataaattgtgaaaaatatacgaaaattattttcgcttttaattatgcagtacaatgcttttaagccccgccgtgaggcgggacagttccaaaattttgtaccacattttactgtggaaagtccaagtaccttattggacaactacgtgtcaatgagcacagtcgcctttggccagttgtggaacggaaaaatgggaatatcagatggggtgcgctcttttctaaaaattcctcttttcgtctaaccatccctcccttttgtgcactatttcgtttcaaaattgaataattttttttggctttttgaaataaattgtgaaaaatatacgaaaattattttcggttttaattatgctgtacaatgcttttaagccccgccgtgaggcggctccccttttgtgcactattttagtttttaaaattggttccggactttttggctttttgaaataaattgtgaaaaatatacgaaaattatttagcttttaattacgctgtacaatgcttttaagccccgccgtgaggcgggacagttccaaaattttgtaccacattttactgtggaaagtccaagtaccttattggacaactacgtgtcaatgagcacagtcgcctttggccagttgtggaacggaaaaatgggaatatcagatggggtgcgctcttttctaaaaattcctcttttcgtctaaccatccctcccttttgtgcactatttcgtttcaaaattgaatcattttttttggcttttgaaataaatttgtgaaaatatacgaaaattat

SEQ ID NO: 35728 - DNA, 838 bp, Heterodera glycines
ctgagttatgatgtgatttaataattaatttgcactatttttagcattcagtgtaggaatcgctccgaaaaagaaacaattaccagcaaaagtcggctcttccgaagaaggaattcctgtttttgggagtgccaattgaaatggcatttatttttgcatcaaaagacaaattgcccacctcagctgacaatacgcggatcaatatgaacaattttggaatattcgcgaattattttgtcgaaaatattaaaaaactgataaattctgacaatttcgacgaaaaaatgaatcagggcgaaatgaaaattcaacaagaccttttagacaatccgagttgttttcgcagttagattaatcgattaaaaaataattaaaatattttataaattaaaattcagataaatttgaaatggataaaattttgaaagagaaaagacaattagaaataacaaaagaaaaagcacaagaaagaagaaaaatagtgggcgaacaagaagcaatgctaagggcactgtcaagtgaaatttataaataaatcgaaaaaaaataataataattttcagggaatttaatgaatgaaagaattttggaaattttatcgcccgtccaaaaattggacaaaaattacaataaaaaagtgtttaatgaaaatagcaacgaaaggctgcgcgttgtactcgcatatttggaattgtgggccaaaagtaagaatggaaaaatataaaaataaataaatgattattattaaattgtttcagaattatgaataaataaataattcagacaattttatctacgggacagaaattggttatttgaactcgtctggtgttattga

SEQ ID NO: 35729 - DNA, 147 bp, Heterodera glycines
tattttattagtgggagaacaatagaaatggatcatgaaagggatttttgccatccggcgatttcctccaacaattagggattggaaacgagaatttggtacatttgcgggcaggaaagatcatgacggaagtaaaatgggtcgggg

SEQ ID NO: 35730 - DNA, 892 bp, Heterodera glycines
tagacgttttttcaaattttcagagccaaactcgcccacaatgaaaatccataaaaattagggtcgtcgctattattccgaaaatgtggttggagttcatttgagtgttgagcagaaaaagagatagacgttttttcaaaattttcagagccaaactcgcccagaaagaaaatccagaaaaattagggtcgtcgctattattccgaaaatgtggttggagttcatttgagcgttgagcagaaaaagagatagacgttttttcaaaattttcagagccaaactcgcccagaaagaaaatccagaaaaattagggtcgtcgctattattccgaaaatgtggttggagttcatttgagtgttgagcagaaaaagagatagacgttttttcaaaattttcagagccaaactcgcccagaaagaaaatccagaaaaattagggtcgtcgctattattccgaaaatgtggttggagttcatttgagtgttgagcagaaaaagagatagacgttttttcaaaattttcagagccaaactcgcccagaaagaaaatccagaaaaattagggtcgtcgctattattccgaaaatgtggttggagttcatttgagtgttgagcagaaaaagagatagacgttttttcaaaattttcagagccaaactcgcccagaaagaaaatccagaaaaattagggtcgtcgctattattccgaaaatgtggttggagttcatttgagtgttgagcagaaaaagagatagacgttttttcaaaattttcagagccaaactcgcccagaaagaaaatccagaaaaattagggtcgtcgctactattccgaaaatgtggttggaattcatttgagtgttgagcagaaaagagatagacgttttttcaaaatt

SEQ ID NO: 35731 - DNA, 1682 bp, Heterodera glycines
tttcatattttgtttgttttgacgggcgctccgcgcccgttttttaaatttgtaagctcagacgggcgcttcgcgcccgttttaaaaatttagttggccttttcggccgcttcgcggcctcagaaagaggtacaaaagtgataaaagaggtacaactgtgattagaagaggtacaaaagtgattagaagaggtacaactgtgattagaagaggtacaacagtcattagaagagatacaaaattgttagaagaggtacaaaagtgattagaagaggtacaacagtaattagaagaggtacaaaagtgattagaagaggtacaaaagtgattagaataggtacaaaagtgattagaagaggtacaaaagtgattagaggaggtacaaaagtgattagaagaggtacaacagtaattagaagaggtacaaaagtgattagaagaggtacaaaatgattagaagaggtacaacagtgattaaaagaggtacaacagtgattaaaatttgaacaaaagtgattagaagaggtacaaaagtgataaaagaggtacaaaagtgattagaagaggtacaaaagtgattagaagaggtacaaaagtctaacttgttatgagatgtacaaaaataatttcataattttaaatataattttatagaattaggtttatttaaaaattttaaaaaaacaaaataataaaaaatgtaaaagtttattttttaattaataaacggaataatttattttactttattttgaaatgaattattatgcatccaaatttttaaatctaattttgcttaaaaataaatctattcatcaaaagaaaaattaaatttaattaaaataattttgttaataataataaaacaaaaaataatttctttaatttaaaaaaaataaatttaaataatttaaaacaaatcttcaaattaattaaaaacagtgaaaataacccaaaaatgcatagaaaaataatgtacaccgtccgggtccgaacctgcctcttccctcctcataagggtgcctcagaatccccaatcacacaaggattctgaggtcttaaccatgtcaaaagtaaaatctgattacgtattcgtgatcagcgggccaaataacccctaaagacatattttttgaagatttttggtgaaaaaatttttcaactaaaaaatcctatgctcacccctttggtccataatcccaaaatcggttttatttttgtaacaattcgtaagaaagtgataaaaatgtaaaataaaatttatattataaagaaaaaaattgcggatttttgtagtattttaattttcaaaaatttcttttcgaagggggttatgaatttttttctgaaaaatcgaaaattttcagaaattctggaataactttttttctttttaagatagaaatcccaaataaatcccataaaattctcctgatttttctctatttttataatataattgcatgaaaattgatccacccttcgatttgttatgaattttcgaaaattaacccaaaatcccgaaggccaaaaaattgacgaattttcaaaaatttttaaaaaattccaaaaaatctgaaacgaaaaacaaaggtcatattagtgctcagcacctcaaaataccccagaaaaatatcttaggagccttttcaacccaaaaaaaaaattccgaaaatttctag

SEQ ID NO: 35732 - DNA, 944 bp, Heterodera glycines
  unsure (1)..(944): unsure at all n locations
tgatcagtatcggctaaaatgccctattatgcgggattcattcgtctctgatgtgatacaaacatgtacaatgttttgcccaataatttgtatttgtcaaccggacactcaacttacaatgtaattgccttagtcatgtcaacccttggtggcattcccattttcacaccacgatcattagccagtttgaccagagattcgatgaattgcctgaatttttttgttcattttacgcgtttctagtgcaaaaagaataattgatatcacattggtaaaaaccgattttaattattttaattcatttttggcagcaaaataagcttttaaggctgatatcttaatttgaactttttcatatggctcctcgtagttagcttacttgcatttatccttgcaaacacattctcctacaatggacaccgcccaagtttgtggaaattcacaaggcgacgcgtattgacggttcaacggcaacccgccttcaaccattttgaaatccaattctggaaaataaataaactaaattttgacttcaggcaaccgaaaatttttatgttgataacaatttaattacatcttgttgaaccattttttgcctagcaagacaacagacattttgggtgaaatttgttaatgataccgtattccttttttcaagaaaaagtgacaaaactttataaaagagtgaaaaggaattctaaatttttcgagtttcgcatttttgggttcaaaccctgtttaaaaacaaatagtcagcagtacttcaatacaaaaaaacgaaattcaaaaatttgagttttcgactttttgttcgaattcggacccaggatgtcggactanattanatganattgacaattatgtgatattttgcacatttgtatcatattttaatttgctgcattgntaaaaaatgggcaagtttgcgtcaaaattaaaaatcc

SEQ ID NO: 35733 - DNA, 366 bp, Heterodera glycines
attttgtcgataggaagcccatgagtatagaaaaaaaaaattcaaaatatttcaatttctgtagagggattgaatcaggggaaagacgaagggaaagtcaaggagaatagacaccaggccatctgcacttttgtcagtggaacttttaaagaatatattaattattattttttaaattttttccttcaactacaattttcatcactaatttttcactcacaaatcagacccccattcttaccagtgcttgtttttcccggttccagtttgccctaccgggaccgggaaacagtttttgaaaatccgggaccgggaaccgggacctcggaggaccgggaattcccgccccagtcccgtcctacccta

SEQ ID NO: 35734 - DNA, 1362 bp, Heterodera glycines
  unsure (1)..(1362): unsure at all n locations
ttttggggattataaagttcaattggtaggattttcttttaaaaaaggataaaatatgtatcaatttaaaaaaaaattaaaaggaatcatatttccttatagggaaactcccgagtatcaaaaaaaaaaaataattggaaataaatctaatttctgtagagggattgaaccaggggagggaagaagggaaagtcaaaggagactagctattaggccatttgcgcacttgggcagtgttactttaaaaggatatattaattattattttttatttttccctttgactncaattttcttcactaatttttcactcagaccccattcttaccagtgcttgtttttctcggttcccggttgccctaccgggaccgggaccgggacctgagcttttaaaaacccgggaccgggaaccgggacctcggatgaccgggaattcccggcccggtcccggtcccgtggcactctacttaaaatgtcaaacacatgagataaatgaaagcaaaagccaaaaatcaaagtcggaatattatgaaattccatttgattcgaaaggcactgaaaactcgagaaaataaaaaaaaataattttcaactattgtccaaacgagtcttagacgataagattgacttgaaatgtaaataaaaatggacgaaggaattaaataaaacaatattttttttattttaattaaagaattaaataaaacaatattttttttgattttaattaaagaattaaataaaacaatatatttttttgattttaattaaatttaaatttaaaaaatctatttcatatagacaaacaaagtcggtatataaaaaaattaatttaaaaagcaaaaaattactacccaaagagttcaaacattaataattcataaaatttaactgaataaattattgctttattaattggaatttcgatttaccaaccaatacatatataaaaaacaatatgattgattggtacaactttttgcgagacatcaagaaaataattataataaaaatattagtaaaacaatttaattaacagattaaataaaaccgacggaaattcaattaaattcactaaaagcaaaataagaaaattcattatcagccaaaatttaataagatgaaagagtttaaaatgaaaccagcacgttttttaacaaatcagtaaaattgcttaattaaaagaccaattaaatataaaagaaaaagctaacctttgaaaaaggaagatggaagatttacgagtgccaaaaaagtaaatttactaataatggcaaaaaaaaagcctagcaataataaacccaataattataattaatagaaaaacaattataatatcaatanaaccggactaaaaatgaa

SEQ ID NO: 35735 - DNA, 693 bp, Heterodera glycines
agcaaaaatccaacgcagaattaaagtacaggctatagggaagctattccggaaggattcggtctccccataaatctgggcgcatcggttcggggtgactgccccgaaaacaaaaaaaatcgattttttcaagtgtccgtttggggtactcaaacaattatggggagcaaaaatccaacgcagaattaaagtacaggctatagggaagctattccggaaggattcggtctccccataaatctgggcgcatcggttcggggggactgccccgaaaacaaaaaaaatcgattttttcaagtgtccgtttggggtactcaaacaattatggggagcaaaaatccaacgcagaattaaagtacaggctatagggaagctattccggaaggattcggtctccccataaatctgggcgcatcggttcggggggactgccccgaaaacaaaaaaatcgattttttcaagtgtccgtttggggtactcaaacaattatggggagcaaaaatccaacgcagaattaatgtacaggctatagggaagctactcccgaaggattcggtctccccataaatatgggcgcatcggttcggggggactgccccgaaaacaaaaaatcgattttttcagtgtccgtttgggtactcaacaaatatggggagcaaaaatccaacgcagaataaagtacaggctataggg

SEQ ID NO: 35736 - DNA, 1158 bp, Heterodera glycines
attaaaattctcagtttgctaattattttatgttttgctttgcgcttcgatgtctaaatggtgatgtgatgaagttgtaggattatgagaaagtgcccgagtttggattcaaaacttttaataattatttgcttttaaccgcttatatttagttttatctgctttttgtattattattttgtgcttcatttatcataaataaattttgtatttttttttataattttctttggtattccataattaattgttcgcaacattaataaattgctccttcgttgagtcaattatgtcaataaaacaaaaattcttcccagctcaatttaatccaataatatcatatttttgaaattaattttcaaccgaataacagttgttttaattttaaattaaatatgctaaaatatttatttgccgctttttaaataatttttaattacgcaacatatcctttgtcattaacattgacctttgtcattagtgaatgtcataaaattttgttttacgtatttttcaagacccgctcgtttaattattcattttcactcaaacaaagttattatttatcattacaacatttttatcatacagtcacaatttgtatgattgtaatcgaatggtaaatttgaagggatgcaattttaggtgcaaaaaaatcacaaaagcagctaactaaggaaaaaacacaaaatattcatagggtaggtacgcaaaagccccaaatagacaaaaatagtgctttaaatgtgccatgcttttgaaattttataatttcgggtccagaagccgcctaaaatatatcccaaaagttttggaccaggattattccttcgaaaatagatttgaaaaatttgctgataaagcgttttctgtttcattaaggacaattcaagtgtattttctgaaaatgaaattgtttgctttttcggaatttgcctaaaaagcatcccgtcaaaatgttaattaaaaaatcgtccggtatctcttagaaactgcaaattcttggtaaacgaaactttcgcctgaaatgtttaaatattaaaaaaatttactaaaggattatttaataattaatacatttataccaattttgtgcccgaattaatatgggtttagcacctgaaaaaaagtaattaaataagtcataaaataatatct

SEQ ID NO: 35737 - DNA, 1077 bp, Heterodera glycines
  unsure (1)..(1077): unsure at all n locations
aataatttaatatttgtgatgattttcttattatctaaattgtgatatttcctattcaatgtgattttcgtgcttagtattagtcactcttttttgttgttgatcgttctgtctaaattgctccacctccgcttttcctctctattnaaacacgcacgtttttcgcttcaacacattcttttcatctgacatcttattatatttaccaaataaaacttcttttatttattcggtatttatcccccccttattcaccccgccctctctccctcgcgccttcccaaaatttttttttttaatttctttcaacaattttttttttagatttttactagaaaaacttctaacaataagaaattttaaaaacgaaaatatttttttttctggggtagggcacccaactggcccagtcattcgtgagaaaaagttagttccaacttcctaaaaaatgtagctttgacccatgtttttgaattttatcaccaagaaaatttttcaatttttgaccaactcagtgccatgcgtttcgtatgccttttgctgttcctgctcttcgttgtccaactgttcaagttcgactgtgagctgtgcgcttcgttcgccttcctccgcctcggatttggccaaatttgcctcctcaattcccaactaaataaaaaaggggaaaaatgccaaaaaaaaatgtgccaaaattttcaaaacacctcttccaattcacgttccaattcctccaatgactgctgctcattggcggagtttattgcttctgaattaacaaaaaatatcaaataaacaatttaaaaattaatttccgtttcaaaacttcaaaaaaatttttttaacccctaaatgatttttgtccaaaaaaaaattcaaaattaccaatgttttgctgttgttgctccatgtaaaccattctgataatcggcatttgactagcaattccgtcgcgccgttgttggccgtcaatttcggcaccttcctcttccatgacaatcaatcgttccccatcatcatcatcatcgtcctcattctccgccaaattcaatccccgaaaaaattaggtattttttaaat

SEQ ID NO: 35738 - DNA, 1114 bp, Heterodera glycines
cattggtttggggatattgatccgtaaacaaaaaaaatcgattttttcaagtgtccgtttggggtactcaaacaattatggggagcaaaaatccaacgcagaattaaagtacaggctatagggaagctactcccgaaggattcggtctccccataaatctgggcgcatcggttcggggggactgccccgaaaacaaaaaaatcgattttttcaagtgtccgtttggggtactcaaacaattatggggagcaaaaatccaacgcagaattaaagtacaggctatagggaagctattcccgaaggattcggtctccccataaatctgggcgcatcggttcggggggactgccccgaaaacaaaaaaaatcgattttttcaagtgtccgtttggggtactcaaacaattatggggagcaaaaatccaacgcagaattaaagtacaggctatagggaagctattcccgaaggattcggtctccccataaatctgggcgcatcggttcagggggactgccccgaaaacccaaaaaaaaattttttggataaaaattatttaaatgaactgactagataatatttaaaataggttatttctcttcctttcagtatccctgcaaagtttggtgcgcttctgatcagtttctgaaaaaaaaagttaagcctaaactttttggcctgtttaaaaaggaattaaaaatttttaaaaattttattcatctccctttttgatagaaaaagcatcagagtgcctaaactaacatgtaaataaaatttggtgcgtttcagaaccctttctgaaaaaatatttaagaattaattttgcaaaaaataaataaaaacgaaagactcagattttcgaaaatttttttgagccagctagctcggcgctcatttcagtgtaagttagtcctttaccggggagtatccctgcaaagtttggtacgcttctgctcaattagcaaaaaatatgagtgatcgaattttcactaaaaaagttaagcctacattttttggcatatttaaaaagcaattaaaaaatttttaaaatttaataattttcctgcaccgaaggaaaggctcggcctcttcgcggcctcgtggtgggccttcgccc

SEQ ID NO: 35739 - DNA, 883 bp, Heterodera glycines
cttcattagcaaaatccgccccagggcattcgttaccttttgtggcggtgttcgaaaccaccaaagtaaaaaaaaggagagaaaatgaatttaggggaaaattgtcgccgccatttggaaaaacaaagtaataaaacaaaggccgaattttggatgaactggtgctgttcagaaatcgtcaaacaaaattggaaaaataaaaacagaatttgtaaacaaataaaagggtcgaattatgaaaaagagttcttaaagaaattagcggcccaatggtgccgatagacacgccataaacatttgggaaatttgataaaaatttgtgaagaaatttaataaaatctttataatattattcttagaatgggttaatactagagtgccacgggaccgggaatttttgccaaaaccgggaccgggacttgccgggacctgagaagccgggaccgggacctcgatttttttcgggaccgggaccgggaccgcaagaaaaaccgggaaccgggaccaaccgggaaattttaaaaattcaaaaaaattttaaattaaaaaaaaattcaaattttaatttatatcaagtgaaaataatacaaaattatttggttttttatttaataaattaaattaatgaaaattttcaaacaaattttcttcaattatttcaaacaactaatcatttttggactaaatcatcgaatattaatagaaattcagatttgattttcacatcactttttttcggagcgctttttcaaaaaacttttgggaaagaaggggtccggcggtgccgataggcgccgccggggaaaattttaaaaatttgggtgcaatttgttaacagatttacagcaaaaaaaggttggtttttgcgattataagctcaatg

SEQ ID NO: 35740 - DNA, 1003 bp, Heterodera glycines
  unsure (1)..(1003): unsure at all n locations
tttacgattttntggtcaatgtaattccgagccctatttattagttacaacaacggcgccgtaatgaactgatgctgcactttaaaatggcttcttacggtgcgcccgtggcattgggcactttggctgccggcggaatttgtgcgtacttacaattagaattcgctttccaatcactcggatttttattcttttcagtgtcttctttgccaaaaatccttcgtcttcccaattcgattggcttcactgtttgcgggtttggcctttccattggtgcatttattgtcggtgctcttcttttggacggaccgatgtacgcgtacaccgaatgggttcagcaacggacagacaaaggaacagaaaaacaaaaagtggaatgaacaaatgcaaagtccaaccaaccgactatgatttttttgttttgttttctttaaacggatttataaaatatgaaagaaactaaacaaattgctgattcatattttattttaaattgtaatatttcaacaaataatcgttttttatccgtaagtcgtaaataacaaattgtcgtcacaggtatctacaacgatgccaactgaagtggtaaacaacaaatgtgataaacaatttctggagcttttaggggtcgcgtgtcatgagtatacatccattcgggctaattcagagtcccaaactcggggcaaaaagtcgaaatattgtgactgggatttttattttagataaatccgttgtctaaacgtcgaaccatcaaacaaatgattcttaggattggctaatcctaaaaaatctttcagaagtctttgtcatgggctgcaacgaggccctgtctcctggtgacttttccgaacatgcgaattttgctcgactgtgccgttggcatggactcgatggcctcctttctgccatgtcccgtggtccgaaggtgtgttcgaattccttcctttttttcgatttgtcggcttttacctaagcaaccgaatatcgggcaaaagaaagtgca

SEQ ID NO: 35741 - DNA, 473 bp, Heterodera glycines
agataaagaactaataaaaacaaattctttaaatcaatttaaaataaaacttaaagttcactagggtaatatgtaagaccgggaaagctagaatgtaacaaatttctaagtgatttggtatttcgacctcatttgactttgacctcaatttatttattatttattttcacatattttgtctttttttaattcctgtgatcatccatatattttgtcacttactctacgacacatttaccggaatagtcgtcagagtaagtggttttcgcccttctgatgacttttttattttttatgaataaacaaaattcatttttcatcaaaattcacattcatgcaactaaagcaatacaaatgcacgaaaagacgcataaagatatattttgcgttctcttttatgtttccagcttattaattaatatggctgcgttggaagcgtttcggaatttctcgctgaaaaaattgcacgaaaa

SEQ ID NO: 35742 - DNA, 671 bp, Heterodera glycines
actcaacccaccagcatttcaatcactgggactcaacccaccagcatttcaatcactgggactcaattctcctgcatttcaatcactgggactcaattctcctgtatttcaatcactgggactcaacccaccaacattccaatcaacgggactcaacccaccagcatttcaatcactgggactcaacccaccagaatttcaatcactgggactcaacccaccagcatttcaatcactgggactcaatccaccaacatttcaatcactggtactcaacccaacagcattccaatcactgggactaaacccaccagcatttcaatcactggcactcaacccaccagcatttcaatcactgggactcaattctgcatttcaatcactggcactcaacccaccagcatttcaatcactgggactcaacccaccagcatttcaatcactgggactcaacccaccagcatttcaatcactgggactcaacccaccaacatttcaatcactggtactcaacccaacagcattccaatcactgggactcaattctcctgcatttcaatcactgcgactcactccaccaacatttcaatcactgggactcaacccaccagcatttcaatcactgggactcaccccaccagtatttctatcactgtgactcacaccaccag

SEQ ID NO: 35743 - DNA, 748 bp, Heterodera glycines
acattcggtatgtttgtattaatgaaaatcaatttgaaatagtaatgtaaaaaataaagttaataaaaaaaagtcaccggtgcattttttatgaaaaaattttttgattaaaaatttttcattttttgcatgaattttttgcaagaagaaaacttataaaaaggtgaccaagcatgaaaaagcttaatattacctcaaaaaaaattttctggttgtaattgcagataaggcaaatactttcaaaaagaagaaaaaactttaaaatgcttgtcgcgaaaaaataaaaatattttataaatttttcaagtttttccattttattattttttaaaatttcatcttgtctttatactgatatttttatttgttatataaatttgcatgagaacttttcgaaaaatttaaaacttccaaatttgtattgcgaaaaacaatgttcaaattcgtactcagcacccctaatttacccaaaaaaatattttcacccccgttttggtccaaaaaaaatttcggaaaatttctagggcggcttagtttgaaaatttttgaatttcccggtcatatagtattcgatagagcttcaaaagctctacaatttgccagaaactattttctctaaaacgaaccccaaaggagttatgtgcccggagctgaaatgtcccgctcaggccaaaaaatttccctatttccgggtaaaaatcaaaatttctaaaaattatatcaatcgctcgaaaacggttgcttgaaa

SEQ ID NO: 35744 - DNA, 1016 bp, Heterodera glycines
attcattgctaatataacccgctttgagcgactttttaatccaaagctgtgccaaagcaaaagcggctggcaaatctaagtagaggtccgcaagaacagcataaagacgggtgaaccccttgacgatgcaagaatcgagcaatgttcctttgtctgacaaagccttaaattgaagaaatttaggcttcatagcggagtcagtttaattccttggcgacacctactagtactgattcatggacaaaaaaattaacaaaatttccatgcttattgacaatttctacataagagggagatgtgatcatcatatttagcgaaaaaatttttgattctgaatcaatgctctttcgtctgcccatatcgccaccaaaaaacacactttgagaagtgtcgcgaggttgcccatcacattgtcgtgcatttgttcaagggcaagaataccggcctttaaatgagtcgcctaatttcttaccattcatttagggttggcacctgatacacaaactcgtggttgaaatgtggcactttcaattcggacaaacgcaattccgccgtttcctggtcgttgctttgtacatattccttcaaaatcaatttgaattgtgccgaaaggacatcaagcgattgatgaccgccagatggaacgcatttcccattgagaagatggcgattgttggcgaaggcaatggcatcagcaaaaatattcctgtccgaatgaaaacggggttgaaatgaatgtactttaacccttaagtttcctagtgccccctcccctcaaaaaaaaacaaggcgtaaatcccagagaaaaattctaaatttctgactctttatgggtttaatgtaagaaaaacttgttcaaaaacaaacttacttaacggactccttgccatccgaatttttataggccaaaaacgaaataacgttcgatgtgacgatgttttgctcaaccagcttagcaattaacacagccaacgtgtcacacagtttcggcacgtccttactcagctcatcaaccg

SEQ ID NO: 35745 - DNA, 1165 bp, Heterodera glycines
gataaaatgaaaaaaataattaaaaaaaaataatgctggtgtggtaagtgtgaagaactgtgttcctccaggcaaaaaattctaagaaaatttataagcatttgtagggttctcagcagtttccctgcaaaatttggtgagcatctgatcagtctagaacgttgggtgataaatgaaaaaaataattaaaaaaaaataatacttgtgtggtattaattcataaatattttttttcagaaaatgctctgaaacgcaccaaattttatttacatgttagtttaggcactctgatgctttttctatcaaaaagggagatgaataaattttaaaaaatttttaattcctttttaaacaggccaaaaagtttaggcttaacttttttttcagaaactgatcagaagcgcaccaaacttagcagggatactgaaaggaagagaaataacctattttaaatattatctagtcagttcatttaaataatttttatccaaaaaaaatttttttttggatttcggggcagtaccctgaaccgatgcgcccagatttatggggagaccgaatccttcgggaatagcttccctatagcctgtactttaattctgcgttggatttttgctccccataattgtttgagtaccccaaacggacacttgaaaaaatcgatttttttgttttcggggcagtccccccgaaccgatgcgcccagatttatggggagaccgaatccttcgggaatagcttcgatatacctctactttaattctgcgttggatttttgctccccataattgtttgagtaccccaaacggacacttgaaaaaatcgatttttttgttttcggggcagtccccccgaaccgatgcgcccagatttatggggagaccgaatccttcgggaatagcttccctatagcctgtactttaattctgcgttggatttttgctccccataattgtttgagtaccccaaacggacacttgaaaaaatcgatttttttgttttcggggcagtccccccgagccgatgcgcccagatttatggggagaccgaatccttccggaatagcttccctatagcctgtactttaattctgcgttggatttttgctccccataattgtttgagtaccccaaacggacacttgaaaaaatcgatttttttgttt

SEQ ID NO: 35746 - DNA, 854 bp, Heterodera glycines
tttgggggtactcaaacaattatgggggagcaaaaatcccccaccgaattaaagtacaggctatagggaagctattccggtttgattcggtctccccataaatctgggcgcatcggttcggggggactgcccctaaaacaaaaaaatcgattttttcaagtgtccgtttggggtactcaaacaattatggggagcaaaaatccaacgcagaattaaagtacaggctatagggaagctactcccgaaggattcggtctccccataaatctgggcgcatcggttcggggggactgccccgaaaacaaaaaaatcgattttttcaagtgtccgtttggggtactcaaacaattatggggagcaaaaatccaacgcagaattaaagtacaggctatagggaagctattcccgaaggattcggtctccccataaatctgggcgcatcggttcggggggactgccccgaaaacaaaaaaaatcgattttttcaagtgtccgtttggggtactcaaacatttatggggagcaaaaatccaacgcaaaattaaagtacaggctatagggaagctattccggaaggattcggtctccccataaatctgggcgcatcggttcggggggactgccccgaaaacaaaaaaatcgattttttcaagtgtccgtttggggtactcaaacaattatggggagcaaaaatccaacgcaaattaaagtacaggctatagggaagctaatcccgaaggattcggtctccccataaatatgggcgcatcggttcggggggactgccccgaaaacaaaaaaatcaattttttcaagggtccgttgggggaactcaaacaattatggggagcaaa

SEQ ID NO: 35747 - DNA, 737 bp, Heterodera glycines
tgcttggcccggcactgttcaaaattcgcttcccactcttctcacaaatggaattttttgagaaaatcggtaaaagcggatttactaaagaatttattttatttattcttacaaagaaagaaaaataatttaagattttgaatattaacggaaaaacaatttgaatatgttttttccttccaatttttctaaaataaatcaaatcaagatttttaaatttgattgattttgagtgaagctgtgaataattttttttttaaattttcttttgttggtttttttaggtttgccaatattttcaaaatttgtgtttaacctttttcagttccatctggtgtattaacacaacaagaagtgacaagcgtggaacagtactgtagcaaacctaaaatttgtggtggtacgtccggtgggataccgtacccattgaaatttccgtgccatgagcgtaatttgacatttggcaaaattgtgatggaaattgaaaatgtgtccaaatttgcgcatgaaaaaatgtggcacattcgatgcagcaaatttgtgcatataagcggaattccatggagaattgtcgcaaaaataaacacaaacgaagcgttggcattttacctccaatgcgatgtttcaatgaaaggttcgcattaaagacgcgtggccggcttttaccgggcggcccggtccaagtcctgttttttagacaaacctcgggaccaggacgccctcttaattggcttttt

SEQ ID NO: 35748 - DNA, 1234 bp, Heterodera glycines
  unsure (1)..(1234): unsure at all n locations
aaattaattatagaaaatttaaataaaaatgcattaataatctttttaattaattcaatgtttatttctcgactattatttctgagaatgcgatttaatgagcaaagattaaattgaatacaacattcttcaaataatttattgtttcttcttataaaatacaacagatataggttttataacaattattgctggaatttaaaatatttctttgtaaaaaaacttaaactattattaataatttattttttcatacattaaaatatgaacctagtttcgttggtttattttcttaacactaaaagtttttataatttagcagtttcaaataatttgaaagtacataattgtaacaaaaaagtcttaattttattttcttctgtttttgaatatacctgtatagtttaaggactttgggggagcgtgccattgcataaacaaaaaagtttagctatgataaagtagttatttgaattagtaatattatttttaagataataatatttttaacaaatttattaaacttataaatgtgtgacttggtcgccttaaattttgtaaatttataatttatctttttcaaaattcaaaaaaaaacttaccgatttattgaggtattactgatgaattatttaaaaatacttgggaaatatgtttacacctaattaaattttatgtaaatttataaattaaactatatttaataaattttattcaatccagctccttgattttgtaaagagcttcgcgaaattcgatggttgacaaatttcattaaaaaatgtttattattatattacttatttttgtattaaagtaaattattttttcattttaaataaaaattttgaaacaaattaaattgcttttagttaatttctttgttcaaatatgtaatttcatataatttttcatgcaaaattgtcaatttcgtttaaaaaacgattattaattttttttattattaaaaatttctcttaatactttcattttctgtaaaaaaaattaaatgtttttttattttaattttaagacagttatctaaattataaatttttttcaaatattattctaatttaactaatttctttaaaaattagaagatttataacaaaacaaaagatatttgaacattaatgttaacataataatcattttctggtattttaatttataaattanatcacattagtattaagaccccttattgtgtagacgaaattttatcttatgt

SEQ ID NO: 35749 - DNA, 1077 bp, Heterodera glycines
  unsure (1)..(1077): unsure at all n locations
cagtgattgtaccaaaacaatttactgaatgattacctcttactgatcagccgtcattttgtcacacaatttntgtgcactctttctgaaacaattagtgtattttataaatttattcaacaaaaaaaaaaattcgacgaccatttcatttttgtatcaatcggactttgagtttttcgagtatcataaatgtcagaatcggagcgagttgttttcaatctcagaatcggggttccaagcctaaagaaagtgatgtcgtcatccttttggcttttggcacagtttaaaatggcacattttttgttgacactctgtctcactttcgcattgttggcacattgtgtctccgcaaaacggcggcccggcttgcgcacttgggactttgaggcgaagccgggcatggacaattcggtcggcaaagcgaaggatgaacaggatgaagatgaggaaaaggaaccaaaagcggatgatggtgtaggggataaagcagtaacagatccgattccgccattcaaaatcagcagcacaacgaggcaagcaaaaatatgaaatattttatttttaaaattatttttttaattttaaatttatttctagtataaaattaaatgagtcaactattggaatccatttaataaacttcgcgattttccttctttattaatcataaatgcgttggtctaatcaaagaaaatcggattaactaaataaaaatttgtaaaaaaaaaaattttttttcaattgccttatttagtgatattgacaagaatgaaatatcaaacgaatttgatgaatcaaatcgaaacattgagcagataaaagaacaaaaagaagatggtaaaaatatttaaataatataaaaggattaataaataatttattattgttttttaaatttaaaaatttcattcagaagcgatcagaaaaattcttgagcaatcattaaatatgactgaagacacttttgaagaggagcaaatgccactgaacacttcacttcttttaacgggttaataaaaattattttttaattaccaaattaaaatgataatttttcagatatgacagacaaaaaaa

SEQ ID NO: 35750 - DNA, 857 bp, Heterodera glycines
ctaatggaaaaaaatccccgaaggagagaattttattccctaattccttcgggggaccgtgccgggtgccgcggggtcttcagtgctggttcgtttcatcacggcaccgaaccttttggctagtcagcaatcgttgcttaacttgccagatcggacgggtgcgcatgattccactgttccaagcaccccaccaaaagcaaaacgatataaccaaaatataaggaaaaatttttcaaaaaattttttctccatcttcctttttgatactaaagcatcagagtgctaaaattaagttgtaaataaaatttggtgcgctttagagcactttctgaaaaaaatatttatgaaacaaaaaaatcgattttttcaagtgtccgtttggggtactcaaacatttatggggagcaaaaatccaacgcagaattaaagtacaggctatagggaagctattcccgaaggattcggtctccccataaatctgggcgcatcggttcggggggactgccccgaaaacaaaaaaatcgattttttcaagtgtccgtttggggtactcaaacaattatggggagcaaaaatccaacgcagaattaaagtacaggctatagggaagctattcccgaaggattcggtctccccataaatctgggcgcatcggttcggggggactgccccgaaaacaaaaataaaatcgattttttcaagtgtccgtttggggtactcaaacaattatggggagcaaaaatcccacgcaaaattaaagtacaggctatagggaagctactccggaaggattctgtctccccataaatcctgggcgcatccggttcggggggaactggccccgaaaaaaaaaaaaa

SEQ ID NO: 35751 - DNA, 1623 bp, Heterodera glycines
aaattcaaaaataaataaagaaattctttaatttaaaaaaaataaaattaaataatttaaaagaaatcttcaaaaattaattaaaaacattgtaaaataagccaaaaattcaaagaaaaataatggtaccccgtccggattcgaacctgctgccccccccccccccctcagaacatgtcccagaatccccaatcacacagggattctgagggcttaacgatgtcaaacgtaaaatctgatcacgtattcgtgatcagcggcccaaataacccctaaagacatgtttttggaagatttttgtcgaaaaaattttttcactcaaaaaccatgtgcaccccctttggtcccgaatctcaaaatcacttttatttttataaaaattcttaaaaaagtgataaaaatgccaaataaaatttatataatagagcaaaaaactgcggatttttgtagtattttatttttcctaatatcttttcagaaccgagttatgaatttttttctgaaaattcgaatttttccagaaattctggaataacttttttccttttttagatagaaattccaaataaagtccataaaattctcctgatttttctctatttttaaggctttattcctgtaaaattgatcaacccttcgatttgttatgaattttcaaatattaggccaaaatcccgagggccaaaaaattgccaaaaaataaagaatttttaaaatattccaaaaaatctgaaacgaaaaataaacatcatattcgtgctcagcacctcaaaataccccagaaaaatatttttgacctcctttttcaacccaaaaaaattttttgaaaatttctagggggcctagctcgaaaaattttgaaaatttccaaacataaaatacaccattcgatagcatttaaaatgctctacaaaaatgttctaagacaatttttcgctaaaaccaatctctgacgagttatgagcccaggactcaaatgtcccgctgaggccaaaaattttttctatttctggaaaaaaatcgaaaattttccaaaaaaattaccaatcgatagagctcgaaaaactatgttttggaagtggtcttcgtttttctgggaaaattcgttaaaaaatcctaaaattcaaaaacccgaaaaccgttttttaggcctagctcgaaaaattttcaaaattttcgaaattttaaaatttggaaaaatcgagctttcgaagctctacaatagtgccgctggccaccctgcgctcaggtcaaaacctaatgagttattcaacggggactgaagtggacaaagttggtactgaaaagttctagaagcacccagcccagggggttagagatagaggtctggaattttttttaacttttagtcaacatttcaacttagggccctcacagcgggaattttttgatccgagtttctgaaaaaaagttatgtgccgtcaaacgcacgaaaaaatgagaaatccgtccctgggactcagtcgtccgcgcagaatttttttctatagttttcccggattctcctcaaaaagttgtaagacccttccaccactttcagggcgctcccggccttcggccgggagattttcttttttgaaacgaaactccttgtcaatataa

SEQ ID NO: 35752 - DNA, 193 bp, Heterodera glycines
tgttactagatcggggatcgatcccccgttaggtcgctcgagcaggacctgcagaagctagcttgatgcttatcagattgtcgtttcccgccttcagttcaaactatcaagagtatgagtatgatggtcaatatggagaaaaagaaagagtagttaccaattttttttcaattcaaaaatgtagatgtccgca

SEQ ID NO: 35753 - DNA, 845 bp, Heterodera glycines
cgtcgcttgcttcgtgctaattgcgctgggaatatgccattcggccgaactggtggggttggaatgcgaattgcgaagggaccaaaaagtgggcgaattgggccaaagagttgtgccgaggaactgaacggcaaacaacacgaaaccaattaagggcaatcagcagcagaacctcttgggaacttgtgcccggttcatcggcatgagaaagaaagcgacgagcggagtcgggggaagaatggaaaaagtgggaggaggggcgggaggaaacactgttggcatacagcttctgcagcagggaatttaaaatggcaaaggttggattgacagagggattccagaccaaatcaacaaggtttcaaataaaagagttaatttggtaatccatcccaattaggctaatttgattaattgaccccaccccccccccctttttgatcacctcttccaccactgttttcttttggtgccgatttgctttgctctgctgctgttttccttcttcgatgtgatttggcaccaatgggcatttctgctgctgtgttccatcacttaagtgtttcatccatccctcctcatttggaggcaaatgagcacattggcactgtgaaggaattgccttttgaggagaatttgaacgcgactttgagcggacgagacggcgcagaaagttggacatggaatcagcagggaaggatgaagataaagcacaaaagccccggcaggaagaagcagcggcgtgaatgatggatggagagagagagagaggcaaagggagagaaaggggaagggggagaagcatcgcctgggaggggggacaattgcaacgatggaagggggggggg

SEQ ID NO: 35754 - DNA, 693 bp, Heterodera glycines
cttgatttttgttggagttctaggacgccaccgatcgcttcaacgtctcctttttcctcgacgacgacggtgcgccgacgtgcccactcattggccgacttcccgcctctttacaatttttcccagcgcccgttgactcacattcggcacagcagtttgggtgaaaacagtggagcggacccaaattttcaccggaggtaattgcacatcgatggcgtggggggtactccggctcgtttttaggaaagtttgttggagaaaggaaattaggcgatgagtgccgccggggaaaatttaaaaaaaaaatgacaaaaaaaacttatttataaatttgagaagtttatgaaaaatttgtttttaatttttgagttgcaaatacatgttttacgaatttcatacaaaaaatgagttaaatctcttccttgctttaggcgttttatcaactcgttgctgaaggaaatccggaggagcaaggatttggagcgcaagttggacggacgtcgggaggagttagacgaagcatgtcgtcgagacgcacatgaggtttatttgagtggggcggggtgatgattcaaaaaaggcgggggtcgagaaaaggggaaaagaggacggtgtggaggaggcgacaaaagaggaaggtaaaatgcaaaaaaaaaaatgggcgggcgatcggcgaattcaagcaaagaaagg

SEQ ID NO: 35755 - DNA, 1592 bp, Heterodera glycines
aaacaatttttttaaaaatttttttgccaaacaaattgaacaatcttgatatcatttgaaagctctggatgagaagaaacgttttcaaagcaaaagctaagctattagaatataccaaaaaaaagatatggacgtttaagtttgtttttaataaattgctcttaaaacccttacatttttttcgtaattttttttctttatcttttatgcacaatttaattcaaattgtattaatttaaaaaaaagttttattgagagaaatgattttgtttttctctatgaacagagacaaagaaatagtacgcctaaatgagaggtgtatttttctctgcactctctactattttaggttcatctctcgctgaatttacctaatagatgaatttttttaaagtatttgaaactaaaaatttctgcaaaatcaaataatttatttctttttttcagctttaataaaaaaacttttcttctttttcacaaaaaaaaatgttgcgccgaagagcctcgtcgtttgcggcccaccatcgccacgcatcgccgccatcgcgcagtggcggcggcggacggtcatcgcggcactcgccgccctcgtcgtcaattcggcacgccgactttcgttctgctgccggcccgtcaaggtttttgttggtcactttattaattttctggtgggcttaaactaaggcagactcaacccccccccccccccccccccacaaaattttttttggatgacaggcggactttttttggcaaaaatctttcttttgaaattcatacagatattttctgaattttcttgcattgattacaaaaaattgttttggtacaaaaccgagcttttttttgaatgcattgcatttgatttagacaaaggctgccttacggaaatccatattccaaggcttttaaatacggaaaattcctgcccataaagttgatttttttactaaattttatttgaccattttttggtcaaaattttggctttaaaacttcgttaaaaatcattttttcggggtattcaatggagctcccacacgaacatgacattcatatggtcattttcggttcttaaattaagccggattaaaaaacgcataattttttaatatagagtttttgggtgccttgcatttcatccactttttctgtcaatttttttaaatttaagttccttccgcgtgcgctttccgccgtccgctccgcgcggcattggctaccgtccgtatcggccccgcgcgccgccgccgttgaatccccgcttcgcgcgcagcagcgcccattaccgtgcctcgcccccacgtccgtcattccgcgccgctgtgccacgtcgcggcgccggtggacgcttcgcagccgtgcgcggtggacgcccgcctcctccgcgcattccctaccattgccgcatggacatttcgccgcgtcgctcgccgtgccgaagtcgcagtcgttcaccggtggatgctggcggtgccgcacgaccgcgccattcctccgcttcatccgcaatccggcaccgaagtccgtcgttgccgctggcggaaaggggtagaggaggcggtcgacgcccgatttaccggcgtggcggc

SEQ ID NO: 35756 - DNA, 1237 bp, Heterodera glycines
tatcctcgaattaataaagttttgaattaaaaaatcttccttgttccatgtgaatgaatctttaaatttatttttggttaaataattcaaataaatttcaagattatttttttcaaatatttcgaaatgcatttacaagaaaatcaaaatattaaacataaggttaaaaattaaaatttacggggcaattttttttacatcagccctttaaaataatgaagtgtctatggtgagtcatagaaatgccatttgttcataataatacactgccattttatggacaaaatgatgaataacaatgtcatttgtgcagtcaatgaaatttcattcgttaaatcaaatgccaaaattcggcttattcttttcaattattttattatcatccgaaaatgatttttggtctctctgtaaaagcattttataaagtcactcaatgatagctttttgtcaatttaaatattttatttatttttatactttaagtcgcgttttgtttcttttttagcaatgggtttggcatcaacattttcattgctattcttcataaaaattgctctgttctcatggaatgttttgggccaaaaaagtcatcagctaataaacaatttatttattttaagttttaatgggtaaaatcatattttaatgcctttagatgatcgacaacttcggaagccagtaaattgtgaattgctgaaggatggcaattatgtgtgggactgcagcaggtacatgtcaaaaaaacaaacattttgaaaataatattaattgattagtgaaatagccattccgaaaagcatgacaaaacatttagtgggttaattaatggacaagagtcaagacaaaaccgtaacccttacaaacactaatgaactaaaaatagctatcatttttatttgaatttatatttcagttattactcaatttgtgccaatgggcgcgaattgccgatggagtgctattccgggctgaagctgaacccgaacaccaaccaatgcgatacgccaagtttggtggacccgtgccacagaaaacatcggccttcgaatgtgctgtatcgcgcggcggacccgttcaattgccaagtgagcagcggaccaaagggggagatttaggattttaaatctacaaaaataaaaagggattagcttaataattttggattcaaaaaattaaattaataatttaataaaattaattattattttgaacaaaaaggaaaacccggacggcgatt

SEQ ID NO: 35757 - DNA, 59 bp, Heterodera glycines
ttcaacatgcacttttggatcaagtgagcacaaatgccttttttccatttttgatgact

SEQ ID NO: 35758 - DNA, 615 bp, Heterodera glycines
ttttgaaaaataaataaaataataggagactcagaattttgtaaattttttataaaaactgatgacaagctaatgtgataaaacaggttatttctcttcctttcagtatccctgcaaagtttggtgcgcttctgatcagtttctgaaaaaaaagttaagcctaaactttttggcctgtttaaaaaggaattaaaaatttttaaaaattttattcatctccctttttgatagaaaaagcatcagagtgcctaaactaacatgtaaataaaatttggtgcgtttcagaaccctttctgaaaaaatatttaagaattaattttgcaaaaaacaaataaataatgaactctcttccttaataattttcctgcaccgaaggtactcactcggcctcttcgcggcctcgtggtgggccttcgccccccccccgataagcattccatccatcaatactttctcaggttctaacagctaaaccatcaagctgccattccaagttctgaaaattggcaaaatgcttttttaaaaaatgcggtgtctattatttacctatatttgtttcttcagaaaaataatcgaacgctcaactcaagggcttcgcacattttcacaaacagt

SEQ ID NO: 35759 - DNA, 1107 bp, Heterodera glycines
tcgaatgcttttcattgttttcgaccgaaaagtcattatattttaggccattttgaaatattttattcatttaattattttaaacttttgctattgatcacagcagatctgatcagttcgcctctttttcaccttccccccccccctcattaatcttcacattacaacagatgttcttccctttttcccttttcttcccttttattctccgttcaaatattatttattattaatgggggggggcaaaaggtcaaattgtccatttggaagggaatgccgcgggggaatcccatgcccaaggggctaattgtcggattcattccaacgccttccccgggattttgggcggcattcactcaaaaagtgtccggcgacgaattgcgtaacggtgctctaataaggaaatgacgggcccattaataatgattgctggtgatacattgcggaatggacggaaagggagcgactaacgaaaggcgaatgaatcctttgggggaaaagcgagtcgagagtctcgaggattgactaagcgaaaaataaaatgtgaaaggattaattaattaattaatgcaacgtgacttttttggccactctttcccgaagaaaatattccgtaaaatttggtattttacgctccgacaattcttcggcgttaatgaataaatttacgcggtcaaccctttgatatgagcggaacagccaaaaacaaccctttcaccattcatcatcattaccaacaaccgcggacagaaatggcaaattgcgcaatgccatagaaaatggggggggggggaatgaccggggaatgaaagaatcactgatcagtgatcggtaaaaaacccaaaacgaacgaatcacaaaatgaaatgcgataaaatgggatttaattgcatagaaaaaagttggcaggcacaaaaaggtaaaattggcactttgaaacaaaagaaataaataaaaaagatatttgacaatatgtcctttcttcttttctttcgttcttttgtccgttttgcctttctcagcttcggtccgccgccgtcgcttcgttttccaaaacattagttaaatttgtgatgtgattgtacgcattttgcagtgcttcgaatt

SEQ ID NO: 35760 - DNA, 1182 bp, Heterodera glycines
  unsure (1)..(1182): unsure at all n locations
acacaatggtacggtagcggcgggggaagagcactggaaaatggaatggctttctggtcatcgattgatcgttaattcccgacagattctcgaccggctgagtgcgcgagggacaagcgaattgctgcgcagtgcgacgcatcaacacctcgacaaattcgcgacgnacgttctncnaacattntncacaacntacaaaccaatnnacnccgaatactnctccaantnnntnttcaatccctttttntttttnncnnnnactaactnaccntccnatcatnnccatntantnatcantttctcatttncctttnnnctnatcnntnnnnntnncctcatcttcatttgtttttttgattcaattaactgtcaaaggatcgtcttcgcactgcccaattggactcccagcggaaggacgaacttgtggaggcgctgtacgaggagatggagcaggacatgcttctgctcggtgcgacggccatcgaggacaaattgcaggacggcgtaccgcaaacaatcgcaactttggcagcggcgaacatcaaaatttgggtgctcaccggcgacaaaacggtgagcgaattttgaagaattaattttactttaatttttataaatatttttttaaggaaacagcgataaatattggatattcatgtcgccttttgacggaagaaatgcgcgaagtgttcataatcgacgggaaggaggagaaggaagtggaagtgcagctgaaggacacgcgacgacgcatttgtagcgccaaacagacacagcaggcaaaagaaatgaaaagagaaaaataattaggggtaattaagggtaattaaggggattaatggggggtaatggacggtagggagtcaattaagcgggagggaggggtcggaatggagcagactttcaccatcctgactcttcaggtccatttcaaatatttaaaaaaacaacaaaatgctttttaatcatttgttttttaatgggtaattaattattatttattaaatggatattatttttttcatttttttcccttttcttttttctcacatttccccaatttttgtcttcttctaagatccaccgaatgtgcaatcaaaatgagcgcaacaattttttttattctcaaaatttgacactttgtncaattactaaaagcaaaataaacgaaaaaagaattga

SEQ ID NO: 35761 - DNA, 869 bp, Heterodera glycines
ttggcagaattgaatgtcaaattcgtgttcagcaacccagaaaatccccaaaaaaatgggctttatgaactttaaaaaaattcgaaaaaggggagggcgtaccatcaaatcaataccaagaaatattcgaaaatttgccgcattcagatggctacgagtatgtgatctcccgtgacatggcccgacgtcgtgatggttggaccaaaaagacaaaatttggggaataaataagggaaaactcgaggaaatttggggatgtgtgtccaataaatttgccacatttttttatccattcccccatttttatagaccaaaaaggcaaagaaggtggcaaggacggggagagcaacgggcagacggtgcaggaacattttgcattcggcgacttggaatactggggcaacgaaacggagacggtaaggaggggaaagaagggagagggatacagtcagtttcgtaatccaaaattagaaattttttttctgcgaaaattttaaacgcaaaagagaaatttttgtcaccgattttaaatttttgaaaaaaacataattcataaaatctcgaattaatttgctgaaatgtttttcttttaattttggaaaaaattacatacttatttttttcagaataaaattttaatatcacaccaattttgaaacagaatttcccaatgccggacggggtggacaaattcaccaaaattgcctcaatgaatgctgaattggtggcactggcggacaacggccaactttacgcgtggacatgggcaaagggcagtgtgccgtcaaatgtgccgcatgttgtcaacagtcaatttgcaatcacaggttgagaaaattaaaaaaaaaactaaataattatttttattt

SEQ ID NO: 35762 - DNA, 1009 bp, Heterodera glycines
tcttaatttcactaataatttctcaattttcttctataacagattaactcttctatggtgagtttttcaatttctatgtactttattaagtaaacaataataatcaaacatttttctatgattgcaaagcatttaaaaaatcataggcttgtttattttcattatgttttggaataggtcaattaaataaacaatttttttttgtaattttattaattgtataaatcttatgcaattttctataagcaatcgatagtgtaacaaatagagaagataagttctgatcaaacacacacctttcattatttccggttaaatatgtgttcatattttaacaaaaagcagtcttgaatgtcgtcgaaatttgtgataattccatggcttatagccgaccaattgcgctggaattttgccatgaggcttattttttgtgctggtttcgaatttacaggcgcccatgcaattggagcgcattaaattttttgtcgatttttcttcaatacccactttaaacgctaagcatttcctcgcacaccgctctatttgctctgttttaaacaacaaaattttcccaagcattcatacctactttcttaattgcactgggatcacatctaaacgactatgctaaaaacggggaactaaactgtattaatatttttaacaaattgcagtccttttcgcctaccctgttaagagaaatcttaatttcactaataatttcccaattttcttctataacagattaaatcttctatggtgagtttttcaatttctatgtactttattaagtaaacaataataatcaaacatttttctatgattgcaaagcatttaaaaaatcataggcttgtttattttcattatgttttggaaaaggtcaattaaataatcaatttttttttgtaattttagtaattgtataaatcttatgcaattttatataagcaattgatagagtcactaattgagatgataagtgctgatcaacacacacctttcattattt

SEQ ID NO: 35763 - DNA, 808 bp, Heterodera glycines
aaagagagagagacagtgagaaaagagaaaatgagaaaaggtgggagaagagagagggagagaagaaaaaatgctaacattcaccgaaatatggatacagaaaaaggacgcatttaattaaacagtatcaattaaaataaaattcccccccccccccccccgctgacctccttgagcttggcctttcgggtgaccaccgcgcgcagtgacgcgcgctccacgtaactgcgctgcagcatgtcctcaatgcgcaactgctccacccgcagcaggttcaacagcatgccgtaggtgagccggaagcgactctccagcgcaattggctttccctggaccaatatttgttggtttagtttaggccaaaaattggggccaaattttatttatttttttaaattcagtggaggactaggagggattcccggcccatgtttgaaaatttttttgaacgttgcctggcactaataagtaagccaagtgccgaggaatgttaaatgggagcagttcgtttcccgcccaaaacttagaaatttttcaacaaaaaaatcttacaaatttttttataagaaaattctaagaaaaaagatttttcgacaaattttcagcaattttttggaaaagtttttgaaaaatctttatttttaaattttttaataaatttttctggtatgaaaaatattagtaattcatgataaaaattaaaatccacgaatttggcccaaatgaccgcctaggagtcgttgatacaaaaaatgtcaaaaattattttttattttttttgaccgcgagactctcccaatgccaaact

SEQ ID NO: 35764 - DNA, 1380 bp, Heterodera glycines
tttatttaccgaaattgagaggtttttcttcataaaatgcatttgatcactgatgaattaggtcatttttaattaattcatttcttctgcagctcatcattgtgttttttgttcttttgtccatcactaattgccagcaaaagacggccaatttgtgatgctttgtcccgtttcttctgccggtggcggagacaatggccttaattaagcgcaaatctcaaatttggatatgtataaaaacaaatcccctttttattgctcacccaatgcaattagtggtaccgaaaagccaaaagaacacattgttgcaattgttgtcccaatttccgtctttccaataaaccgtcgcggtctccccaataattttgcatcgtttcattatccaaccgatgccccattcattttcatttgctttggccaatgtcagcttttcctttgtccattcgttcaccaattcaaacggcaccatttgcattgacggcgcaggaacagaaaaatgaatttcgtaactgacggaagaaatggcattggcacggagaaaatgctaaacaatttgaaaacaaaaatcaatcatttgtcgaattatggccacaccagggatggcactgaattccgatttccgaaatttttgataaaattcggaatttttcagaaattttcgatttataacttttttggggtcgggtttcagaaaataactcagaatgccatccacagaccgagtacacccctaaaacgtcgccgtctcgtataaaaactaattttctgaatttccagaaaaagaaaaaaacgacttttttacatttccttgaattttcttaataatttttttcgaatttatctattttttttgatttaggttaggcaactaaattttaaataatttttttaattaaaataaaaatttgcggctacgttttgtccccccccccccggaccgcacctccttgaaattgtggatccaatctacgatccgcttggccgttgcaattatcgcaacacatatcgcttgggatggacatcttttctcggagagtgcaaccattttgacagaacttggccagcagaaattgatgcatttggcccatcaaaatcatcaccaatcgcctcgggcaaccgaccaaatgaatggattgaattgagttggttaagatcgatgagaattgtctgcgaaatttgacaaagcaaattgtgcaaatgatcaccatcgctatagcgcaagtggcgaatgtttgccgaaaaaattggacatatttcacgagcaaaaatgacccatattggatggccattcgtagggagtgatgatggaatccacacatatacattggtgcctcttttgtcgaagatttgatgatttgaacgattaacagcgatgacgga

SEQ ID NO: 35765 - DNA, 1075 bp, Heterodera glycines
cccttaattaagtgtttttgttattgatgagaaaggtgtggggttttcagtggcaaaagccccaaaatatttaattaaataatgacaacattggcaaaaaaagcgaaaaatggcaaaaaaatggtataaaattttaaaataagaattttttttttctgtaaaatgaaattaaaattgctttaacaatttattcaccgattttaattttcaaaagaatgaacttttttttaattttgcaaaaaaaaaacctaaaaattttttttcaaggacataaaattcaaggaaacgcacaacttaacgaagaaatttttaaatcatcgaaataagtattaaaaaatattttttaataatttattatttaggggaaatggctcttgtataaattggttttttaaaatttttttgaatttgtccctgttaagagtgaaatgggcattttgacttaaaagctattattttgtttagttttagtgtccttatcttccagctttggcctccgtgaagtacacccggtggttgaccgtgtccagcgccaggtggtccagctcggccaggtcgatgttcaccaacaccaatgggttgccgccgtccatgtcggcacgtgccacctttgtggccacaccgcccttgccttggtcaagccaaaacagcaggccccgatcagaatccaccgcaatggcaatgggttgcgcaaccgcggtcggtgtttgatcattgtgcaggatcaccgcccggaactgttgttgatcagagggagaggatgatttttattgaaaatcaataaaatattattgcaatataaccttttttgaatcagaaaatttttttataaaattcatattccgaaggacaagctgaaaaatcaggacatatttgaaaataagaatcctttttgattggcttaaatcagattttgttttcgcaaattattttatataaatttccctattttattataaattaatgaagaaaacaaaaaaaaaaagaaaatattttcactattattaatttttatttagaccatttttttttccaaatatttacaaattttaatatgaaaaatttataaattttt

SEQ ID NO: 35766 - DNA, 1051 bp, Heterodera glycines
  unsure (1)..(1051): unsure at all n locations
ttattaaaaaaggcaaaattcgccttaaattaataagccgtaagtttgaaaatgtttattaaaaaatttcaggatgaaatataattaaaataaatcaaaaagaaaaaaaataaatttatttttctaaataaataaaaaacattgtcagaggcagtgtctgccgaaaaaatagacaaaattttttcaaaaaagccaaaaaaaaaattgaaaatttaaataaatttaaaagtgaaaaaaattaaagtaatttaaataggcatattttaaaaaagcctatttttttgccttttcacaagagaatttattaaaaaaaggcaaaattcgccttaaattaataaggtgaaagtttgaaaatgtttattaaaaaatttcaggatgaaatacaattaaaataatcaaaaagaaaaaaaataaatttatatttctaaataaataaaaaacattgttagaggcagtgcctgccgaaaaaaaagacaaaattttttcggaaaaagccaaaaaaaattgaaaatttaaataaatttaaaagtgaaaaaaatttaagtaatttaaataggcatattttaaaaaagcctatttttttgccttttcacaagagaatttattaaaaaaggcaaaattcgccttaaattaataaggtgaaagtttgaaaatatttattaaaaaatttcaggatgaaatacaattaaaataaatcaaaaagaaaaaaaataaatttatttttctaaataaataaaaaacattgtcagaggcagtgcctgccgaaacaatagacaaaattttttgaaaaaagccaaaaaaaattgaaaatttaaataaatttataagtgaaaaaagtaaaaaagcttccaacaccttcgattcccaagacgtctccgttccaagtacaaagaaggcccaacgttgcttaacttgccagatcggacgggatggcgtactttcaacgtggtatggtcgtaagcgaaaggacagcaattaaagtcatttaaataggcatttttaaaagagcctattttttgccttttctcaagaganatttataaaaaaggca

SEQ ID NO: 35767 - DNA, 1643 bp, Heterodera glycines
  unsure (1)..(1643): unsure at all n locations
ggttttagagggttctgattacgaatcttaactcttatttgcctaatttcgaacttcggacccgaattcgaacaaaaagtgaaaacatttttccaaaatatacgttaaaacaggtcaaattttgcgcaaattgcgcctttttaaccaattaacaattgaagcattgatttacatcaaaataaatagttgttaaatgaattagaagctttacttcaaaaaaatccattcttgaaaaaaattctaactttttgttcgagttagggtccggggttcggaattgggcaaatccgagttcacaactcgtgaaaactcctaaaaactagttttagcccaaaatttaaaaaattaaaattagggacacccattcttcaggattgccgtaaattatttgggttttatttttcacgaactctgaaaatgctgattttgttatttaaatttagttatcaaaatgactaaattttgcagaaaaatccgatagcaaaaaacctaccagcctacaaaatttcataaaatttcgtacactcaaaaaacttttttaaataaattcctttgacaaacacacaaattccctgctcagttatgatagcccggaggtgcctgccaccctggcattccgttcggttgcatcggatgttgcggctgcgcctgttgccattgcgcattcgacgcttgcatgggaagttgcgcctgttgcggttccgcactcggtgcgtgttggtgttggagtcgtccctggtttagttgcatcattcttatcgggtcccagtgggccataaatatgctgttgcatcgggtacattggttgcaacggtatcgtactcattggcattggttgcgccacggacaggggctgtacagcgtactgtagtaattattgtgttaccatgacgaacagtaagagccgttgcggaggctcccagaaaatgcgtcggtggaaaatgcatcagtggaaattttaatgtcatcgaaacattttccttgggttttcgagtcatttatcacgaatccggtatccatttcggcaaattccaaaccccggacccgaattcgaatataagtcgtaagtccaaatttttgaatttagcatttttggttcaaaaaactgcgtaaatgatcactcattcaagtatgggtgactttcagtttgtttccgtgtttaaccagcttttgaaccaaagtgtttaagcaggttttgaaccaaaaatgctaaattagaaaatttggacttttgactttttgttcgaaatcgggtccaggattcgggattttatatacaatacttaatgctacagaatttatttttaaaatatttgtttcattgacgcgtttctactgacgcattttccactgacgcattttccggtcacgcttgcggagaggcggggaggcagggatgggccaaattgaaaaataaaaagcgtaatgcgaaaagcaaaatttgcgaaactgaaaaatgcgaaatgaaaaaaaaagcgaaatgcgaaaagccaaaatatgcgaaaatgcgaaaagcgaaattttttctacaactttttaatagttaaaatcataaagcaaaaatcattttttaaaattttattccaactttaaatcaatanaaacgcttttttgaggcgcgctttttccaaaaaaactttttg

SEQ ID NO: 35768 - DNA, 1006 bp, Heterodera glycines
aaatttaaaaattccctcaaaaataaaaggtctattgcttaccgccctccctatcatgctcgagagcatttgtatgtgtataaaatttatcaaaaaaagagatagccatttttctgggataacctctaaatataaaaatcctctgtgaaatacatggcgattgtgcacagccctccgtctcatacgcaagcgcttttgtgaggtataaaatttctcaaaaaaagagatagacatttttctgggatagagtataaatttaaaaattccctcaaaaataaaaggtctattgcgcaccgccctccctatcatgctcgagagcatttgtatgtgtataaaatttatcaaaaaaagagatagccatttttctgggataacctctaaatataaaaatcctctgtgaaataaaatggcgattgtgcacagccctccgtctcatacgcaagcgcttttgtgaggtataaaatttctcaaaaaaagagatagccatttttctgggatagagtataaatttaaaaattccctcaaaaataaaaggtctattgcgcaccgccctccctatcatgctcgagagcatttgtatgtgtataaaatttatcaaaaaaagagatagccatttttctgggatagagtataaatttaaaaattccctcaaaaataaaaggtctattgcgcaccgccctccctatcatgctcgagagcatttgtatgtgtataaaatttatcaaaaaaagagatagccatttttctgggataacctctaaatataaaaatcctctgtgaaataaaatggcgattgtgcacagccctccgtctcatacgcaagcgcttttgtgaggtataaaatttctcaaaaaaagagatagccatttttctgggatagagtataaatttaaaaattcccctaaaaataaaaggtctattgcgcaccgccctccctatcatggctcgagagcatttgtatgtgtataaaatttatcaaaaaaagagaaagcccttttttctggga

SEQ ID NO: 35769 - DNA, 1138 bp, Heterodera glycines
ttctatctcgtaaccccgatgctaatccgttccggagagcctcttcaaaattttttccattaccctaagagctgcggaaattgtgaattaattctcagaaaaatggttatctctttttaggacaattttctatctcgtaaccccgatgctaatccgttccggagagcctcttcaaaattttttccattaccctaagagctgcagaaattgtgaattaattctcagaaaaatggctatctctttttaggacaattttctatctcgtaaccccgatgctaatccgttccggagagcctcttcaaaattttttccattaccctaagagctgcggaaattgtgaattaattctcagaaaaatggttatctctttttaggacaattttctatctcgtaaccccgatgctaatccgttccggagagcctcttcaaaattttttccattaccctaagagctgcggaaattgtgaattaattctcagaaaaatggttatctctttttaggacaattttctatctcgtaaccccgatgctaatccgttccggagagcctcttcaaaattttttccattaccctaagagctgcggaaattgtgaattaattctcagaaaaatggttatctctttttaggacaattttctatctcgtaaccccgatgctaatccgttccggagagcctcttcaaaattttttccattaccctaagagctgcggaaattgtgaattaattctcagaaaaatggctatctctttttaggacaattttctatctcgtaaccccgatgctaatccgttccggagagcctcttcaaaattttttccattaccctaagagctgcagcaagtgtgaattaattctcagaaaagtggctatctctttttagcccaatctccgatctcgtcacccccatgctaatacgccctggagaacattttcgaaatctgtttcaatcccctaagatcggccgagatggcgaatttgatgcccaaaaaggctggatattgtcggaggtcggttgacatagaaaaaagttataaccaaaaacccgttggggcccaagggtgcgggggcccaactgacgggttccgtcccccctccacgctcataaaaatgttatgctccaacaaataagggtactt

SEQ ID NO: 35770 - DNA, 853 bp, Heterodera glycines
  unsure (1)..(853): unsure at all n locations
aatagcttccttatagcctgtactttaattcagcgtaggatttttgctcctcataattgctagagtaccccaaacgcacactagaaaaaatcaattgtcttgttttcgggacagtccctccgatccgagtgcgcccagatttatggggagtccgaatccttcgggaatagcttccctatatcctgtactataattatgcgttggatttttgctccccataattgtttgagtaccccaatcggcactcttgaaaaaatcgatttttttgttttcggggcagtccccccgagccgatgcgcccagatttatggggagaccgaatccttccggaatagcttccctataacctgtactttaattctacgttgtatttttcctccccataattatttgaataccccaaaccaacactttaaaaaatctattttttttttttctaaacattccccccaaaccaatacacccatatttatccaaattcctaaaaaaaaaaaaatatcttccctatatcctctactttaattctccatttcattttttctccccataattttttnaataccccaaacaaacacttnaaaaaatcnatttttttatttcataaatattttttcanaaaatnctctnaaacncaccaaattttatttacatnttantttanccactctnatnctttttctatcnaaaannnanatnaataaaatttttaaaaatttttaattcctttttaaacannccaaaaantttanncttaacttttttttcanaanctnatcanaacctcaaagaactttncannnatactnaaangaaaagaattacccaggaagatcacattagcttgtcatcagtt

SEQ ID NO: 35771 - DNA, 1025 bp, Heterodera glycines
  unsure (1)..(1025): unsure at all n locations
caaataactttccgtttgcaatttgttgtgagttatctaagttaatttacttaatagcttcaaatgagataagcatggtttgatttagagcttatccattaataatgccacacattttaaatttatttttgtacattagtggaaaaaagtctttttacaaacagacaaaaattcatttgttcgaaattttcaccataaagatgacaatgaaaaattgattgtaagactttttttagcattatttgtcacggactcgctcagttgggccccagcacgtctttggattataacttttttctttgtcaacaaaatccaaattgtcctagcatacggctcgttacatgctttattagccttacaaaagcgaaaagactttctagcctgtaaaaaatttattaagaaaaacttaaaaatttcgactttttaccattttcattaggcccaactgaaagtaaaccgatgtgtcatgcaaaatttagtaaaatttatcgagaaaaaatttgagatattgaaaagggtaagttgttttgaaatttttaagtgctttttcctatcgaaaaatcatttaatcattttggaataaaacaacttttttccaccattgataaaaaataacgcgtgtttaatttttgtttccattatttccccccttttttcccttttctttttgtccaaatggcgccccgtggggccaatgaaaattaatttaattacataattatttatgtttcaatttgactatctcatattttttttattgtcaacaaatgctacatatttaatgaataaattctcacccattacactgcttctgcacattcattctcatgtcattcccatcattatttttttgtatatttttgcccttaggggaaaaagtgacaataaatccaaaattaataattcaattgattgtccttcnaatattgaaagtgatagataattgagtttattaatttctttttcttttttttgtgcagtttttctttttttaattttatattttagtcaaatcaaaattcacg

SEQ ID NO: 35772 - DNA, 1203 bp, Heterodera glycines
ccgggatgtgggaacgctttttcccgcacccaatgaaagcggacaaagtgactgcaattcacaaaacattcaccggattgtatggcttagatgacccggataatgagaacaccaagcgtgtgattcaggtaattatcataagcatcatgatggttttcaaattcagaacaaatgtctgaaattaaatttttatttgaaaaattttgggacgttttttaatatttttacccaaaaattgggtaatattgttgatgcttgggcctgacttttaacagaatttccatttgatttcttaatagattttgaatcaaaataagaaatgtataggcggaattttagaaaattaaaggaatttttggattggacagaatgttcatttaattgctgtgaaatttattatttttcaatgacttacctcctttaaaaacttgggagtctggattaggaatgtgaaagtctcgaaaactaggcaaaatccaacaaaaacccgaaaatcctaaatacgggatctaattttctttaggatgccattgctcatcctgataattacgtgatgaagccaagccgtgagggcggtggaaacaatttttggggcgatgaaattccaaaaaagttgcgcgaaatgagccgtgccgagctcagtggccatattctaatgcaaaaagttcacgcattctctgctccggtaatttttggcataaatcaattggcatgttcaggaattacattttaattgttcgagttttggataggaatacatggatctggagagtaaaaaatcggatccgggtgttgccgggcccagaaaagccgagtccagatacaagtttttaaaccaagccagagtctgggaccacaatggtcatataatgaggagaaaatttaagtaatagctaacaaaaattagaggtgttgctaaaaataacaatttttcctcagaattacatggtccggccaaatgagcgcgtgcagcacggaaatgtcgtcaccgagctgagcactttcggcactctgctgggccatgtgaagacaaaggcggtgctgcacaacgcgcagcagggacattacgcacgctcaaaaccggaaggggcaacggagggcggcgtttacgggggcggaggcgttgtcgactcgccattcttattttaggagaaggggcggggaatgaaatgtagtattattgtatatactattatacaagta

SEQ ID NO: 35773 - DNA, 900 bp, Heterodera glycines
atttgaactaagattttgaaaaattattgattttgtctatgacttttcattgcaattgtcgcgaaatgacatagcaccaatgaaattataaagaaactcaacaatttgtaatcaaatttttgtggtagaagtcataaaatatataatataaattaaaaattgacattttaagactttgaataagacaattattggaaatcccattggattttgcaatactcacaaagacaagattaaattttgattataatagtttgaaataaatcaacgtattttaaagcaaatcaaaataaataaacacaatgacatttttatttttttcaataaaaaaaaatttgtccaacgtttattaataaaaggatcaaaaatatttggtaaaaacaataattttgattagaaattaaaaaattaatttcaaataaatgaattttgcactcttaatcagaacaagagataactggttaaacctgaagaaaacaaaaaaacaaaaataatcgtatatttaatcaaaattattaatttttaaattatattaaattaaaggcattatgactaatgagaaaaaatcgctgtggtagcgaatttataaaattaaaaattaaaacaaaaaatggcatatatttttgaattttgtaattcttttctttcgagaattaaatatttaaatggatattttaaaaatttacccctttaatattaaattctattttttaaagtaaattaagttttaagtattttaatgtggtggctgagtcctctgcagcatccgatgttccatctcattagctcattaaagaggtttccaatccgcattagttaaacacaatgacatttttatttttttcaataaaaaaaaattttgtcaacgtttattataaaaggatcaaaatatttggtaaa

SEQ ID NO: 35774 - DNA, 1166 bp, Heterodera glycines
cgcgaggcattggactgccgtccgcctccacagcaacgacactgacattccggaaatcaacatagctgacgtctaactctacaacgagctcaagctgaaacaacagtcggcccccagctctcaaacgacagccgtcactgcagacatcagagcgacacgaaaatgtgtgaacatctagaaagagagagagagagagcagagagaagagtagagagtgcgagagagtatgagagatgagccacatacccattactatgtggatggtgataatatgtggatgggaccatccacataagagtgtttaaggggatgggatttgtccccataagagcgtttatggtgatgggacccatccccatgagagtttttaagaggatggcattcgtccccattagaatttatctccatccacataaccattactatgtggatggtgatactatgtggatgggaccatccacataagagtgtctaaggggatgggatttgtccccataagagcgtttaaggtgatgggacccatccccatgagagtttttaagaggatggcatccgtccccattagaattaaattttcatgaaattttttgtcacttataccatttagcgtagactcaatagaaccaagcatacttggtgtctttagatcgatcgcaacgacacgcatctaaaaacaccaaaaacgctttgttctgttgagttttcgctaaatggtgtgagtgacaattcggtggtcaccaatttcgtaaaattttttcagtcaattacaccatttagcgtacactcaacagaaccaagcgttcttggtgtctttagatgcgtctcgatgagagcaacctaaagacaccaagttaaaaagtcagatactgttattaataaagtatttgaataaaaaaaatttagttgaaagccaaccaaaaagcaatacttttcattttttcttacttttgagacagatttaccaactttcattaaaaaaaattagataaacaatgatttcagtaaatgatctgattcttaggggtcaaaagccaaatggttgccgctcgaacaaagtatttttggaaaagcttaatgaagcgatataactaacatatggacataatgcaaaatatggacaatttgaaataggacataaaacgcgtttttctctatttttaaggctt

SEQ ID NO: 35775 - DNA, 271 bp, Heterodera glycines
tgaagaattcgaaacgttcccaccatgtcgcccagaacatctctggcaaaaacggtccggggccttttccagcctttattaccgctgccatagttggacttttcttaatttgtcccactcggatcaattcaagatgctgatcaactgtaaattatttttgagactgaaacgagaactcctagccatttctcacacccatacttttacaacctctgcttttattttaaaaatatttttttatttcaactaatccgatagatttaaataattt

SEQ ID NO: 35776 - DNA, 1498 bp, Heterodera glycines
ttagtgaaaaaaaatatggatcgaggaaaacaaatgaaatcaggaacattatacctattcgctttttaaacacaactctaacaaagtcataagtagggagtatttttaggtttttaactattttttctgcggctttatttcgacgagaaatgcttattttggaagttagccactaaaatagttttttgccactattttggcgtttcgtcactatttttgccactattccgacaacttttgaaaaatttctcaacaaaaatacaagaaaatttaattattttgggaaaatccgatctaatttcaataaagaaaaaaaaatcattttcaaagaaaattcaaacaagaaagaatttcaaatcgtgttggctggcctcttttattgggacgggattgacccaagggggggggggggactttattggcttaatttccgcccctcccccgtttctcctttggcaattttatgtaaattttgggatggggaggaaatggagcaatttacatcacttccatcattccatcgaatttatttccagtttatttttttaacaaacggagaaaaatttgtggaaaaattttagcgataaaaattcctctttttaaattttaaattttattatttttgacaagttctgtcagttatttttttttgtattatttcgtacaaccgataaaagaagatcattctacgcttggtaaaaaatttcaggtcgattgcccatgggaattaggtgaggtggagaaaaaaatcataaatttataattttgaaacggagcatattgtttgaacttttgtctcaataaaatagccttgatttttaaaaatcctctcaaatcacaaaaacttaaactatttcccctaataatcaaaataacataaaactttaaatgtattgaaactgaatctcatcaaaaaaatttttgaaaaagaacattgctgaaaaataaggattttaatgcaaaaataaaggacattaaaaataatgatttttttagttccattccggaaaaaaatttgaaatttctttagctttttaaaaaaatagagtttgtcttaaggcaattttgtacagttttaaggctaaaacttattacttcctgtcatattttaaatatttaattattcggtccctctaaaaatggcaatccttttaaaacccacaaaattgcccatgcctttcggtgtgacaatgacgcaattttggccaattgccccgggctttcttgggatttatttggtagcttttaaagaaataaaaaaggaaggcatagaatttgtcatcgctgcattaattaattcatcctcagcttccaaatgcgcatttatttcagtgtcggcactttcgaattgttcgaattgctctcgagactcattagctctttacactctgactaatgagtcttttttttaattttttgtccctcccttttcaataattggcactatttccccggtacatcccccctcagactgccccccccccgcaattgttttgtg

SEQ ID NO: 35777 - DNA, 1012 bp, Heterodera glycines
gtacgttgtttggcttcccgggtcaaagagaactgctactttgattatatttcggctgtcacgatttgacttggccaacaaccgtcgcgtcatcagatacgcgtgcggttttttgcacttgggagccttgttggctctccctttgctggtgtccacggtggacatccccatggattgaacaatctccccctctcttggtggagggtttgactgatcgttctgttgaaatccagccgtgatcaggtgggtttggctttccacctgccgctgagggaactttcgccctcctggctctcttcccgacttgggggaggaagcagaacgattcccatttgaccgtgaatgggatcctccctcttgaagcatatgaggaagtggtgtttgttgccacaatttcggcaacggtatggtgaggttcacctgagttgacgaatcgtcacattttggctgggttgacgaatcgtcacataatggcatcatcaagatgttgttctcagcctgcttcttacagtgcaaacgcacaaataccaataacggcaatggatttagcggatgctagcagtgaaacgtctgaaagtggttccccttctgcgagcagcagcgacgatgaggaacgtgagttgttgaatggggtgggaaggggaatgacacaaattttccataacttttttgggcctgaattctggaaaatttctgagcctccgaaggcattcacagtgtgtggccgaatgaaaacgcaattttccgctcatcaatgtttgtccgttcatttagtcgtccgtctgcggccgtatcatggagcggctggagttgcacggcagtcacaaacgcgtggtgattgttgcgcaggactctttctaccgcgatttgacctcggcggacgaaattgcgaaggcccggcgcggcgactttaactttgaccatccgaacgcatttgagcaccaactgatgctgaacacactgcgacagctgcggcagggcaaatcggtggtcatccccaaatacgacttga

SEQ ID NO: 35778 - DNA, 975 bp, Heterodera glycines
  unsure (1)..(975): unsure at all n locations
ggggaggggaatggatcggagaaacaaaaaaagacaaagcaatagagagagaaaagngagaaaaaaagtgatcagatcaattgttcattagctttttgcatcggaattccctctcctcggctcgttttgttcacttcttgatcaagtttcaattactttcctccgatcggatacggtgaaaatgtttttcgatctgaaattgatcttctcatttcggaatgccctctcaaaggttcgcaaattgtcgtcatcgttgggccatggaatttttaagacacttttttttgttcaattggccaatcgaattgaaacagcaggcggaaaaagcatttcaaaatttgaaagcatcaaaagatgatcactttacatgactcgattttgaaatgagcagagaacgcttcaaatggccgggcgaatttcaggaaaattcgggaattaacttgacagccgatccgctaacaaatgtgtatttcctaactcaatccgccaaagatttgcttaaaaaatttgggtcaaaatatttttggctttttaccgattggaaaaaagtgcgtcattgagggggacgaagacggaagaagcggaagagggggcacaaagcatggcaaaggaatgccacccgaaaagcaatgtttgttttttgtaccatcccccgcctttccctttccatgctaaaaggggaccaaaagggcgggggaggggggaaaagccttgtaaatgcgaaaggcaatggacaaacattttgtgggggaggagggccaggggaagggccaaaggatggggagggaaggggatagggaaggaaagggagggatagggaaggaaagggagggaaagggaggtaaagggagggaaagggagggaaagggagggaaagggagggaaagggaggaaaagggagggaaagggaggggattggtttggatgagttttgacaagaaatggacggaagcggacaatggggaggaatctgtc

SEQ ID NO: 35779 - DNA, 909 bp, Heterodera glycines
atacgtattctctgcataatgaaaatccatgttcaatttgaacaacgcttgccagacctcatctgcactgtttgcactatttaggactaataaaataaaacaattatgcacattatgaagccattaaaattaatgattatttttatcgtaatttaaaatttgattactgtaaatcgattgattgataaagaatttgcaaccattttttatgaaaaatcactacctacttgtatttagtttatcttgcataggtgccactgctgatttggccaaaattgcttaaaaattaattaaaatactaaatttacttttaattataaaatttctaataaagctttatatatatatatatatatatatatttacagctttttatagatttatatttctccacaagaatgacatcattttgatttagcagcagcaaatgacgctgttcaattttctgaaaaagctcaagaacagcggcatatctttccaactgttcttgtgatggcaattggcatttctctactaggttgtgcttcatgtgctcaaatattattatttatcacttttaaaattcgatcaaatccgcaattttagcatatttttgggcaaaaaaaaatggcataactttacccagattaattaatgaaattttacacattcttggtatcgtctgatagtgtccaggagtgttttgtttattagcctaaaaatttcgtcaaatttcaaaaatttgtatgaaaatatgaccattttttgccatagcttataggccaattagaatacatttagcgctatcgagaactatgcctctaaaatgtaaaatttggtttgcttttgaacacagttagtgccattttttgccgtcaaattagaaaattcaatgctaattgtaagaatttaatactcacaatcagaaca

SEQ ID NO: 35780 - DNA, 1000 bp, Heterodera glycines
  unsure (1)..(1000): unsure at all n locations
ttttctaggcctaatggctaaggtggcgtcattttttacctctgagtaacncggaatacaaattaatattttcaattaatttttggcactatactgctatagtggcttggccttggcttggaatttttttctgtagctcagcttcctgacagtcgttttttgatttgaaggtaccattcgaaagagctcttttttctaggcctaatggctaaggtggcgtcattttttacggaagaataaccggaatacaaatcaatattttcaattaatttttgacactatactgctatagtggcttggccttggcttggaatttttttctgtagctcagctccctgacagtcgttttttgatttgaaggtaccattcgaaagagctctttttctaggcctaatggctaaggtggcgtcattttttacggaagaataaccggaatacaaattaatattttcaattaatttttggcactatactgctatagtggcttggccttggcttggaatttttttctgtagctcagcttcctgacagtcgttttttgatttgaaggtaccattcgaaagagctcttttttctaggcctaatggctaaggtggcgtcattttttacggaagaataaccggaatacaaatcaatattttcaattaatttttgacactatactgctatagtggcttggccttggcttggaatttttttctgcagctcagctccctgacagtcgttttttgatttgaaggtaccattcgaaagagctcttttttctaggcataatggctaaggtggcgtcattttttacggaagaataaccggaatacaaatcaatattttcaattaatttttgtcactatactgctatcgtggcttggccttggcttggatttttttctgtagctcagctccctgacagtcgttttttgatttgaaggtacccattcgaaagagctcttttttctagggctaatggctaaangtggcgtcattttttacggaagaataa

SEQ ID NO: 35781 - DNA, 810 bp, Heterodera glycines
aactaaaaaggattcactggcgttggaaaaaaattggttgttcaaacacgccgccttccactaaaactcccatggggaatgaatgtcaaccaaaaagagaatttgtttaaaaacgagcaaaagaaaacaaagggaccaaaaagtgccaatgagaatcgaaaagtgaagaaaaaaggaattttcattaattttatttgtgagttgattttgttttgaaccacctccctaattattccgcaacagctggaagaaacaatttgcttttctggtggtccgactttggtgaattcattttttaatcaaaaaaattttctttaacctgggttcctaatcatttcattccaatgaaattgatgtaaattgtagccaattattattttgatccattgtaatggtcgttacaaaatatggtgggctttgaaagtttatttccaaattttcacaatttcccaattccaaatttttaaataatttatgcaaaaattttcggaatcattttccgttccaaatattcatctttaattcccttttgctttatttcttgcccgcaggcaaaggtgttaagataatattggagttatttgtttttcactattttaagagaaaaaagtacatatatgagcaaagtaaaagacagaaaatgaaaatgaataactgtgaaaagaatttatggaccgatcagtgagaaaggggcgagacaatgtacacataactagtttaacaaagatagctgatgtaagcataaatggatgcaagagaaaacgtttgagagacaaataaaataagttaataaattgaaatattttaatt

SEQ ID NO: 35782 - DNA, 832 bp, Heterodera glycines
atctgcggcgtaatcacagtaaaggctaaattgtcatattaacaaatgaaaaatatacatttttttaccattcaaattttttcttcgaaccgtgcatcgttaggtgctttgcgtacccgatgaaacgttcaaaattggcaggacatttgtcacagaagtatttttttgcctataattaaattaggtagtaatttttcaagaaaaatttggacatttttttcaaataaaaaatctctaagaaatctttgcaaatttcttcttcttgaaacattattaaaaaaaaattcggggcgtggggggggctatgatgtgatggaaaactgatcgggcggacggagaaatgatgggggggggggggacggcggcgggaacgagctgttgggagcagcagagcagagttgccgtgggtcgggatttcggattgtattccatttttgggtggtcatatgtttatggtggttttgaagatggcaaaaataaccaatatttttggtccaaaaatttgaaaagattcatccaacaaaattttatatgctcatcaaaaaatctttaacagcaacttgacagtgcactccttcatactgatcgggataccataaaatacactgaaaatcaggggaattttcagaaatattttttttaggtggatggaaatatttttgtgaaatttgagtagggccattggaaagaggataatacttacttccgatttggcttttgaatggtgcacctacgacttatagccgttgaggtatgggcacttccatttcggtgttgatcatatctagtgtgaaggtggcctatattcttaaagaaataccggtactttttt

SEQ ID NO: 35783 - DNA, 1005 bp, Heterodera glycines
agaaatgcccaattccttcacaaattctttctgtttgcgttggccatataattctttaaattcatcaattcttttgatgaattctttctttttttgttcataaaaactctttttcattatttttactttatttaaatttaattcgtttttccatttgtatattttatggcgacttgtgcctaataattttccaattttcctctcaatttagttggattttttcttttccattttcccatttctcttaacttttctttaattttatcaaatttttgaattatttcacttttttgttcgtcattttcctccttctcttttggcaatgttttgatcagagttatcagtaaattgatcaattgggtcgctttcgatttcttcaccactctgatcaactgttgaataatcattttgtgcgttttgttcaatttttattaaactttcttctctttcatttttgacccaccagtcgccaaatattttgtcaaaatttggtcggattcaaaatcttttcaatattttcgtagcgcttccataacaattttttaagataatttttatagaaacaacagaaatatagaaagtaaatgttttttagcggcaattttagcaaataaaataattcaaatttttcgtaaccacttttaaggacaaacctaacatttttcccacaaattcaaatccgtacagatccgttcgaccagctcttctaaaaaattttttaattagggtaatgaataatatgttatcaggtaatatcatatttaatgttaaaaaaaactgaaaatatgttatttaaatatatcaggtttgtctcgtgttattagtttatgttctctctcgctctctctatctctctcttttacagagtgaatggcgaacattttaaatccaattggaaaatgaaattgtttgatcaataattgagtgcaaaaggagcgggtgtaaaataatttgtaagtgaaactcatagggcatcggtcagaaaggtaggaattataaaaagcg

SEQ ID NO: 35784 - DNA, 926 bp, Heterodera glycines
ctcgtgcagtgtcttcttcacttcgctttgactcatcaccaaaagttgttgaaaaagggggaaaaggaaaataaaaaataatctaaatttgtgggaaatttaatgagaagcataattcaagagtgacattgaaaaaatgataaatattttaaggaatgcctataacaaatctgacgtccatttcgaattgcgaattcgataaaaggtgtaaatgtgagttaagttaaaaggcaattttcgattttttgttcacggataataacgataattcctttgccaaaagttggtgtttgttgtttattgaaaatgatcggccatcataaacaaataacaagtcaacacaccacacaccatcccaaaaacgagagatgaaccaataaatagagaacatagagaaaaatacgtctctcactttagcgtactatttctttactctgctaacctttttctgataggcctaactaaaattttcaagaaaaattttcctaaccccctaggaatttttttcgaaaatttccccgattacaagccatttttggcttttcaggtcaccatgaaggagtgatttgatcaagttggtgtaagagacttttttgatcagtatcaaaagttagcttagcagaaattttttcagaatattttgcctacttggaattgaaattttggcgattaactattttgttcatttacttttgcacctgactgtatttaattataaaattatattatcaagacattacagtataatttttgtaataaatttgattctttttaaatccaattaaatatattattttaagatttattcagatcttatttcaatatttatttccattaaaattcattatgatttgcatattaatggtcaggaaacgcaatggtttcattgcgtttctcaatgtcgactcttatctttcataattttt

SEQ ID NO: 35785 - DNA, 1267 bp, Heterodera glycines
  unsure (1)..(1267): unsure at all n locations
tatcaaaatttcgttgnactcaataaccctcagacattttcactcggtttttgggaaaaattttcgaattacggattttatgcgatttgtcaatattttgctaaaaatcagaaaaaagcatcttcgctaaacattcaaaaagccacaaaataaaagaaattctcggatatgccggaaaagaagtgaatgcctaccctttggtaaagtctgtgattgaaaatgcgacacttcaattggttcaattgtcggacaacgaaatgcgattggagacaaaaaaggagcagccagtgaaaagtgcccaaggcaaacatgctaaggatgtagtccgatgcctcgtggaggctttcttttcgacaaaccaatctgtacagtccgcgcactggggaaagatgctaattatttaagagaaattggaacaaaattttggacgacagcaaataccgtactctgctccccccccctcccagccttccatttttgtttttatcgttcatgggtaattaaatcaaatttcgagccttttgaaaaaaaacaaattgttacaattgcatttcgttttagtgctgagaaaacatcgttatcattaccataagtggacatggatggtggacagaatttctgttacgaaatacccccaccctctcagaggcataatttttactgaattaaaacacttccaaatattttctgacctctttctttcctttttgggtttttaggccatttctggcctatcgacaaaaccggggaaaaatgagtgcaatctgttaacagtttcatcaaaaagtgcttctatttacgtgaatttacaaaagtgaaatactaatcttggttgacccctcccccattctgatgaatgaccgaggcggaattggcacgttttgaagtggggaaagggaagggggcaaagcacagcaaaaccaatttatgtataggataatcacttcctgaagtcatacggtggaagcagcaaacagaaaataaagttcattttgggcaaccaatgcacaacaggaaataacttttcgaatagcaccacaattgcgataccaacaagactcagaattaagatgaccaaaagtgcccttgtgacggactgcgactttttgaacagaaacgacacgcagcaaagccatggatggtaaatccaaaagaagagggcaaaaaggagcggaagactgaaagaaaaggtaaaagtaattagataattaatattagcagagctgttcaaggcatggaaaaaactcaaaaattgacctttataaga

SEQ ID NO: 35786 - DNA, 838 bp, Heterodera glycines
ttcctcaaacgatgccatcaccgaaatcggacgatgtctccgccgacggcacggccaatggcaataccaacgccgccgccccaatattactcaccgccaatgggcgacatttttcaatttcgaccaaatgcgagtgttagacatcgatcggaatcacaggtagggacaaaatgaaaattaatttgcacggcttttgtaaatgagtgccgattgttcccattgattaaccagggattcaccgaagtcaccgtccaattgcccgcgtcagtttgtcggtaattccaaaaaatgaatgctttccatttaattgcctcccttttcgccctctccacggcacacactctctcaacattcgtccgaccacttctctgacgctccacgaattccacaatcttttgttggcaatgcaaagggaaatgttgacggaacagcggagacattgcgaaaaccaaagtgatcaaaagctaaccaaaaacactaattgactcggtcgctttgcctaattatttgctgtccccaaaaggccttcggttggctccgttcgctgtgtctgccgccgttccgcccgtcgaccctcccccaaattacgagtccgcccttctgctcagttcacctcacccataatgctcaattttcatctgattattgcatttaattttctctttttgcgctggtgaaataaaagtgaatcaaaatcagacaaatgggacaacatttggtcaatgaattgacaggaatacgaaaaccttcgagtgttcgtccctccgcctcattattttatttttttatgtgctaatagtattttaggttttactcacaaatccttccccctccctct

SEQ ID NO: 35787 - DNA, 459 bp, Heterodera glycines
ttttgtcttcgtcattccctttttcatcttgaccaaaaaatctcatcccatcgtcattccctgttgaaaatgggacaaaaaacagaaccctgacagcagaaaaatgatcgaattcatcgtgtcaacaaatagaggataatatccttaaatgacctactcgtagaatgacgattgtcttattatacatctgattataaattactaagatgccgcttgattaccataaacataataaaaatttacttagatcatatagtaatgaaaataaattctgagatatctgccgtgctaccctttgatgataatataaaaccaagatatgttacattgactaaacggagaaaggtcattctatggctataattcttgaaaaatgcataaaacttcgactaaaagattgaactaccacttattgaattatttttccatttgattaataagtattttaaaaaacaaatt

SEQ ID NO: 35788 - DNA, 1397 bp, Heterodera glycines
gatgcgtacaccctgaatttgtcggattgggcttttcaggcgcttgggatcagctgaaagtcacttttcacttcaaacgcctctacggttattatgtgctccaaatgtacctccccacttatttgtccgtctttatcaggtgggccaattcgaatgggtcaatcatgataaattataacattctaaatttaaaaagatatggcaaattactcaaaaaataattattttctggccttgagctatcttaaaatctcaataatttttgattgattgacaacaaaaagttcttttccaaaacacaggcggttttttgggatgacaagcaaaagaagaataataaaatttaataataaagaaaatttataaatttatttactggtagagactaccggtttctcttatattcaacaattaacaattagttatttttgggttaaacctgttttcttttagtttacgggtggcgcgtccgttaaaaaaagccgggggttagccgccccctccccgtaaccaattttgactaatcccttaatccaccttatccaaatgatttaaatgggtttgttttatcccccctgtgtcagctggatcgccttttggctggacagtcgtgcactccccgcccggatcactctcggcgtgtccaggtcgttcgttctccgttcgtttgccgttccgttttccatcattttgtttcacttcagtctcatggcattgactttccaattcggaaatgtcgtgaaaaatttgccccgcgtttcgttcgtcaaagtctctcttatttttgaattcctccaaaaatggccaaatttgcctcaggcaattgatctttggttctttgtctgcgtctctttcattttctcttctctggtcgaacttgctttggtcggttttgtcgagaaaaatcacgagcgcaaattggtcaaatttcatcgggaaaggctaagccgacgcaatccgcacaaacattcgacaaggcatttcccttttttggaattttaaaatttcatttttaagctccaaaccgcgaaattctctcgctctccctaccacaacacttaacaataattcacaaaatgacgatcaaattagaaatggcgaagttgtgagaagcggatcactgctcaaaagggtgtacagtcggcgttacagtttgctaaggcatagggccagaaggtaatcgtactgtaatagacgtactgtcattctttgcggcatactgtatgcaccacttgttcctttaaagaagcttgatctacgacgatgatgaagcgtatatgcactggcgaacgcccaccgagctgagcaaccgcgtggacgcagtcgccgcgcggcttttcccggcgttatttgctttatttaatggtacggtaaatgaatgtgaagataatacgctt

SEQ ID NO: 35789 - DNA, 1009 bp, Heterodera glycines
  unsure (1)..(1009): unsure at all n locations
aaaagcgctttgcgtatgagacggaggggctgtgcacaatcgcccattttatttcacagaggatttttatatttagaggttatcncagaaaaatggctatctctttttttgataaattttatacacatacaaatgctctcgagcatgatagggagggcggtgcgcaatagaccttttatttttgagggaatttttaaatttatactctatcccagaaaaatggctatctctttttttgataaattttataccttacaaatgcgcttgagcatgagacggagggcggtgcacaatcgccattttatttcacagaggatttttatatttagaggttatcccagaaaaatggatatctctttttttgataaattttatacacatacaaatgctctcgagcatgatagggagggcggtgcgcaatagaccttttatttttgagggaatttttaaatttatactctatcccagaaaaatggctatctctttttttgagaaattttatacctcacaaaagcgcttgcgtatgagacggagggctgtgcacaatcgccattttatttcacagaggatttttatatttagaggttatcccagaaaaatggctatctctttttttgataaattttatacacatacaaatgctctcgagcatgatagggagggcggtgcgcaatagaccttttatttttgagggaatttttaaatttatatctatcccagaaaaatggctatctctttttttgataaattttatacacatacaaatgctctcgagcatgatagggagggcggtgcgcaatagaccttttatttttgagggaatttttaaatttatactctatcccagaaaaatggctatctctttttttgagaaattttatacctcacaaaagcgcttgcgtatgagacggagggctgtgcacaatcgccattttatttttgagaggatttttatatatatacgttatcccagaaaaatggctatctctttttttgagaaattttatac

SEQ ID NO: 35790 - DNA, 881 bp, Heterodera glycines
ctattaaatacatttgtatacgcatttatatgtcacatacgcatatatttttttcatgaattttttttacaaaattcccattaatttatttgccccttccttcataattgtacaatgttttattcaagcaaaattcccatcttacttacacacagtgtgtggtatctgtcctgatttgtcagaaatgtcctgctgattgtagggagtgacccgatttgttctgatttcttaaaatttttcagaaaatttgtaattttatggcgtaatatgtcactcaaatttcaaaattttatacggcggtgactaaaaactacgttcaagaaaaaaccactcttgtcatgtcctcggtcatattccatgttagatctgttcctgcattttccacaaaaaacccagaaaatccagttccaaattttttttttgataaatcataaaaattgcaattaattttaaagaaataattcaataaattgctaacgaaccaaatatgacatttttaaatttatgaaaaattaattatttttactgatatacaccttataattattactataatacaatatcacaaattataattcctttatataaagggacattctctcaacaatcaaacaaattaaaatttttatttaaatataaaatttttaattattttaaaaatttacctacgaaatgcacgaatttcgccgtaagtgctcaacatatctgcccttttcactccattccttcacaatgcacgggaaatgctcatttcgtacaaattcctctgtaactgcaatttaaatttaatttttgtgcacctttccctatataaaatgtcgaaaaagcttttgatgacattggcatgatcaacggctacaacaacgtttgaagtccacctc

SEQ ID NO: 35791 - DNA, 972 bp, Heterodera glycines
tagtgatgtcgatatgtcaaaggatcgtctgggcattgcacaatcgaatggcgcatgtccaatatatacagaatggctccgttggacaaatggatgaaaacccgttaaagtataaatcacaattaagtcaatattttgccatttattttatctagaaaaatggagattatgacatccaaaacattaaacgagccaacctcatttaatgttaacggacgagttcatcgaccggaagacggagcagagcaaaaccaccaaacgatgcacggagcagcggatgcgtctaagtgagtcccgacaatacggtggcattggcgcttcgctcatttagacaggagaaaatgcacaaactgcaggagattgagaaggccctgctgccttttgcggacacttccccttcctatccaaacgctgcgccctttcccgattcgaccaataatttccggccacatttctttgcacctcacggccaaatgatgtgttttcatcgtctgctttgttttcttactttatgaatattaagtcaaactcctcacgcccacttttgcgcaattcgtcctttgatgggttcttttcctcaaaaccatcctcttaaaatggcacagacgaatacgaaccagcaaatgtacaactcaataggggagcaaacgacagtgatgcagggcagtgagtcatcaccaagactaaagctgtacttttctcaacaattcagtgactgatggggttgtgatgacggctgatgaaactgaaatttcgcaacagacttggcgcccacagtagaaaagaatgattgacaaatgtgcaataattttaacatccataagttaatagtttccggattatgaactatggactgtctcgtaattattgtcgttttttgataaagtgaaaaattcaaaaagttgggcttgagaaaaactgctttatgtaattttaggggacgggacgaaatctcgccgccgaaatctcgcc

SEQ ID NO: 35792 - DNA, 1019 bp, Heterodera glycines
ctcaaaaacaatgtccgtctcatatctttgagggatgaccgaccctccatcatcatattagctttgcctccaaagtgttgcacaagtctgaaaatttgtttgaaattgaccggcaaacccaaaatgcttcaccccgccccccgtcctcccatctcccgccggctgtccgttaagtggttttgtggtctgctaatgagtgtaaacacaaaacgggtggttgaccccacacacacaaagtcattattgttgcgctgaagtttgacactgatcagcagccaaaattagtgtacttgtacattccaaacgcatttacgtatatttgaaccccaaaagttgtcaaaatattaacattttataaaaattataaatttcatttttaaatcagaaatatatccttcggtatcattaaaataataaattaccaccactttttccctgaaaaaagtggtaattaacaaaaaattgccttttattgtgcctaacaatataagtacaaattaataagtcatgacttaacttctgctgaaaagtctgtccataaaacccttcactcatcggcatttgccgtcgtctggaaattacaatattttcatttttctcttcattcacattctctcgaaacacaaataagagcaattcctgttttatcgagctttcgctcaaatgatcagataaagccaaaaaagaagcgccatcgtcgagacggacggatggaaatgtcccctgccctccgctccccccggggggcaggggaatcgcggccattgccattgcgttgtaatgcttttccgggacggatccgttctatctgtgagcccaacaacgccaaactcagcaaaggacagcagcaggcacaaaagcattcattcattcattcatttggtctcttttttcattttccattattctcacattttgccacttccaccatcaatcagcataatattctcagttctttcagcatttttgtatccaatatttatataatttcttttttttttttgttctccctttttttg

SEQ ID NO: 35793 - DNA, 1053 bp, Heterodera glycines
  unsure (1)..(1053): unsure at all n locations
ttacgcatcggcaacacncaacggcccttaatggcgcgagtcgatgtcacgaggggaatcacttacgaccttttgaaggccatttcctcttcatgcaacaacaacaaacggggcgatagtaataaataattgtttttgctcaatttccatttgcctttttgtgttttaaaattttacttaatatcgttttgccaattttctcattcatttttcggttgtttttgtttcaatgccattgttctccaatggttacctgcatagttttgatttgagcatttccatatttccattcaattttttgctttttacgaatttattgaaaaatgactgaagccaaaaaattgccggaagtgccggagacgctgctgaagcgacgcaaaatcagagccgcacaacgggctgccagggcgaagaacagcttgaacaccatcaaagtatttcttacacaatcaaatattggttttccatggtttactgacttcaaaaataagacctcagttaatgattcgataaattagaaaacaaaatgcaaagtcacaaaacgcacattattattttggatacaaatgcgcataatttggtaacatcatcaaattgatttgctcgagaaaatgagttgtgtcgattttcgcaatttttgttaattttaaaaatggtgtttgactcaaaaacagaaaagtaccaataattgtcttgtctagtaatttggttgatctccgttgcacacgcaaatttttgtgtcgaattggtacttgcacatggacaatatcattaactgaaattcaaatctcaaatcatttctcaattgcagaaagcgaaggccaaaaagacggaaatcttcaaacgggcggaacattacttggttgagtaccgccagaagcagcgccaattggtcgcgttgaaacgggaagcgaagaaagtgggcaattactacgtgccggatgagcccaaactcgcatttgttgtccggatcaagggaatcaacaaggtgcattctaactttanattgcttttttggtacaaatcttggcctgtttcgagcactttgccatc

SEQ ID NO: 35794 - DNA, 912 bp, Heterodera glycines
atttctccacaagtccgacaaaaacagcgaagattttgtcatggtaactaacaaatacatttttgttccttttaaattaccatttttttcctgtacagcttgaaaattttctgtacaacaccaacccgctcattttgcatggcaatgggccgtccaagtcgcaactgaacgtgctggagaattacttgactcgtggcaaaatttatcaggtttttttcaacagttttatgtctctttattttggcaccgctgaaaaaaacattaaaaattcgtacattgatagtccataatacaataatttaagaaaaacccaaaaaacattctttaagaactttcattaataaaattttcaaattttttgaaaaacaaaaaaaatttttttatttttctgatattatatgaattgtcgtgacactttctcatccacctgtttattgttaatgccttacatctttgaaaaatttttttgttatagtcctcttgacaattttccccctattttgcacccacaaaatttatttttttccctcccttttttcgaatttgccggccatcggaatgccgttatcttcgcccgccgatgccattgcaattgtcgcatttgtgttgaagccgacgccatacattgaagaatttttgcaccgtttgtctttgttggaatatccggacaaaaacagtcgtgtcaatctgcgcatttacaacaaccaaatgtacaaaaaacgacactttgaaacttgggcaaaacggcgaagcggaaaaaaaaagacgatttgggattgtgcaaattttgaatggcacggcaaggggcaaaccaaaattccagcggaagcaggggcagtgaaatttgaaatataaataattttgaaaggaaaaaggcccaaatttttggggggaaatccttttaattggata

SEQ ID NO: 35795 - DNA, 923 bp, Heterodera glycines
ggccattttttggtaagcagaactggcgatgtgggatgaccaaacgtggagttaaggtgccaaagtgcccgctcattagaccccataaaaggtgttggttgatatagacagcaggacggtggccatggaagtcggaatccgctaaggagtgtgtaacaactcacctgccgaatcaactagccctgaaaatggatggcgctggagcgggccacctatactccaccgtcattggcttgtacacgtgcttgtcgcgtagtctggccatgacgtgtaggagggtcgtggtggttgcgttgaaggctttgggcgtgggcccggccggagcttccaccagtgcagatcttggtggtagtagcaaatattcaagtgagatccttgaagactgaagtggagaagggttccacgtgaacagcagttgaatgtgggtcagccgatcctaaggcaccggctaacgccgtaacacactacggatgacgacttttctgtgcttgcgcagttggtccatccggttgccgaaagggaagtgggttaacattcccacgccaggctagggaaatgacggttcgcaagagctgttttgcgcggtaacgcaaatgaactcgcagacgtcgtgtggagtccgagccagagttctcttttctggtttagggtgtgcgtgcctggaagtggctcagcctgagatagggatgttgcgcccgtaaagcaccgcggttcctgtggtgtctcgtgcgctccacacggcccttgaaaatgcgagggaagctatttgaatctcctgcctgatcgtaccgatatccgcagcaggtctccaaggtgaacagcctctagtcgatagaataatgtaggtaagggaagtcggcaaattagattcgtaacttcgggaaaagaatggctctaaaggtcgggtcagccgggctgttgcg

SEQ ID NO: 35796 - DNA, 504 bp, Heterodera glycines
aaaggggaaaaaattactgcaagaagtgggattcgaacccacgcgggcagatgcccactagaaaacccagtgaaacgggcaagtgtttgcgtcacttgagtctagcgccttagaccactcggccatccttgcacataaggccagctcacattagtctattcatttagatttttattatctataatttttcgtttctttttgctggatattttataagttatgactgcttaaacgaaagagtttcaatatgaaaaacggaaacctcaatcaatttattcagcattttttcatgtaaaaatgcttataaaagacaaattttatacaaaattcccaaaaattacttaacaatgtttattaagtgcactttcttccttctcaaaaacaatctcctgcaaaaaaaaaaactttttaagcggttacatacacatttagcatattttttgacgagaaaagggaaaataaattatggctgaatgtgcatgtaaccgcttaaaaagttttttt

SEQ ID NO: 35797 - DNA, 930 bp, Heterodera glycines
atgaattccaaccacatatttcggaatagtagcgccttcataaatttttctggattttctttctgggcgagtttggctctgaaaattttgaaaaaacgtctatctctttttctgctcaacactcaaatgaattccaaccacattttcggaatagtagcgacgaccctaatttttctggattttctttcttggcgagtttggctctgaaaattttgaaaaaacgtctatctctttttctgctcaacactcacatgaattccaaccacattttcggaatagtagcgacgaccctaatttttctggattttctttctgggcgagtttggctctgaaaattttgaaaaaacgtctatctctttttctgctcaacactcaaatgaactccaaccacattttcggaataatagcgacgaccctaatttttctggattttctttctgggcgagtttggctctgaaaattttgaaaaaacgtctatctctttttctgctcaacactcacatgaattccaaccacattttcggaatagtagcgacgaccctaatttttctggattttctttctgggcgagtttggctctgaaaattttgaaaaaacgtctatctctttttctgctcaacactcacatgaattccaaccacattttcggaatagtagcgacgaccctaatttttctggattttctttctgggcgagtttggctctgaaaattttgaaaaaacgtctatctctttttctgctcaacactcacatgaattccaaccacattttcggaatagtagcgacgaccctaatttttctggattttctttctgggcgagtttggctctgcaaattttgaaaaaacgtctatctctttttctgctcaacactcacatgaactcaaccacattttcggaatagtagcgacgaccctaatttttctggatt

SEQ ID NO: 35798 - DNA, 1031 bp, Heterodera glycines
  unsure (1)..(1031): unsure at all n locations
cctttgaaattgaacccttcgactantgggaagcaaaccgtttataaattgcttataatttcagcagaagacactccaacgaagagctcgagaaaaaactgatggaacaaattgtgaatttgcagacgaaagttgacaaaatggaaatggaacagaaaaagcaagagggtaagggaaaagagtgaacaacggttactgtacctaccataatatacctaataattattactatattaaatattattttcgcttaagaaattcaaaagattaaatacattaaaattaattaataatttttagttagtacagacaaaatcgaacatttgcaaaatgaacagaaaagaaatattaatgcattggaaaaggagctgaaaaagaatcagatggaaatagttagttgaattttaattttaggcacttttaaatattatatttgaaatatccaaaatttaatttagataaatatagttgaattttaatttaggcacttttaaagttccgacaaaattgttgggatgccaacaatagtcataataacatcgacataattgatgacaaatgtttggcggtcaatcataaggaaaatgaatgtaacttttataaattttaatttataaattattattttttttaattaagccgagttttgcaaaatcttcgctacccatccaattttatttgacaaggatttctccaagattttttactttgaaattgaaatcaaaaagatgcaaaagtaacagtaatataatacataataaaaatgtttatttttttcttatttttaaaattatttagttcctttgacaatttcctctccttcggattcagcaccaaacaacagaaaaacgttgacgaaataaacacttattcatattgtaatcacggcttttttatcattaacgccgaatatcattatcaagaagctcaacaagatgattccttcaaagaaaatgatgttgtcggatgtggcattaattcggccacccgacaggttttcttcaccaaaaatggacggcgtcagggtttgt

SEQ ID NO: 35799 - DNA, 999 bp, Heterodera glycines
aatatcaaaaaggaaaggaacggtccctttttggagccctgacggacgaatgaatgaaagaatgaattagtaaatcgcccggggggagggaatggctaacgaaggccacctgctgagaaagggtgtggaagaatgaattaatgaagtgatgagtgaagagaatgaagcgaatagagagcatcgaatcggatcagcggaagaagcggcgaagggcaacggagaagggcacgacgcactcgccacccaatcattgtgaaggtcaaatggacaaactaacgataggacgaattggagaagggtcaatacaaacagaacagaggcgaaaggtagaaaatggaaagaaagaaacgaacgaacgaacgctgtacaaatttaaaataataaaattaaaaaaaattattgacacaaaggctcatttttcaccgagggacggcatttctccccccccccccccctctccacaatcccatcttttgaggacaaaacgacatttagggacccgaaccgagtctttttttgttggagacggatagccaaaaacaatttaaattctctcaaatcataattcggtaaaattaatgcctgaataaatttatgcaagtattctttcttttaaaagtcaaaaatgaacgataaatggaatgtaattcatttgctcatcatcggtttcatttcacactgctcgacgcccacaaatcactcaaaaagtgatcaattgtcagacgacgctcttgttggaggggcggttaaatagcgacggcattcgtccaaaaaagggcaaaaaggcaaagggcggcggtgccgaactgttggacgacgagggaccaaaaaatggccgaaatttgaatgggttgaactgctgctcctcacttcccgactcttcccaattgctctcctccgatgccatttccgacgaatagttcggcgcctcactttgtccattgacaaaaatggcaataaagaaaataaaagcagcaattaaaaatttgttggccatta

SEQ ID NO: 35800 - DNA, 947 bp, Heterodera glycines
tgtccttaggaataaaagccaaagcgtggctgcgtcccgtccaacaatttcctaatgcttagtgatggactagcgagtgatgtccgtaggaataaaagccaaagcgtggctgcgtcccgtccaacaatttcctaatgcttagtgatggactagcgagtggtgtccttaggaataaaagccaaagcgtggctgcgtcccgtccaacaatttcctaatgcttagtgatggactagcgagtggtgtccgtaggaataaaagccaaagcgtggctgcgtcccgtccaacaatttcctaatgcttagtgatggactagcgagtggtgtccttaggaataaaagccaaagcgtggctgcgtcccgtccaacaatttcctaatgcttagtgatggactagcgagtggtgtccttaggaataaaagccaaagcgtggctgcgtcccgtccaacaatttcctaatgcttagtgatggactagcgagtggtgtccgtaggaataaaagccaaagcgtggctgcgtcccgtccaacaatttcctaatgcttagtgatggactagcgagtgatgtccgtaggaataaaagccaaggcgtggctgcgtcccatccaacaatttcctaatgcttagtgatggactagcgagtggtgtccgtaggaataaaagccaaagcgtggctgcgtcccgtccaactattccctaatgcttagtgatggactagcgagtggtgtccgtaggaataaaagccaaagcgtggctgcgtcccgtccaacaatttcctaatgcttagtgatggactagcgagtgatgtccgtaggaataaaagccaaagcgtggctgcgtcccgtccaacaatttcctatgcttagtgatggactagcgagtggtgtccgtaagaataaaaccaaagcgtggctgcgtcccgtccaacaatttcctaatgcttaatgatgga

SEQ ID NO: 35801 - DNA, 653 bp, Heterodera glycines
cttaatttgcatttctatgtttttcaggcagaaattactttgcaaaagcaaagtctcagagaatttaagcaaaaattgcaaaaactacgagaatatttgaccatggtcagaagaattgtgacagaagaaaactttcgtttgtctgttaaatactccgaagtttttgaacaaataaaagaggtaaaatgttttaattgactttaaaatttaaataattattttaggaggccccggaattggctgaaaaattggaagaattgcagaaaatgcagcgaagattggcctacctaaagttttcgaaaaatttcactgttctgctcgctgaagtgcgaaaatacttgcgaaaagggaattacttacatttgttggacaattacaggaaactactccaaataccacggaacagtcctgaggttttttggataataatgtgtttttttgaaatattctgccaagggcagccccgtagccggggggaaggggttgaatccctcctcccccccccctcgaaatgaaaagccaaaaaatgtcattttttggtgaaaaccaactcaaattcctgttctttgctcttgggcgcttaaattttttaaataacactggagaattggtccgaagagcaaaaagaaaaaaaagttcgggttccccccccc

SEQ ID NO: 35802 - DNA, 859 bp, Heterodera glycines
  unsure (1)..(859): unsure at all n locations
aatcactgatatttatcataaggggcataatacaaatctattagaggcaatccaaaaaagaaaacatnnnggatgagcactttaataattccataattcaaattggtcgatcatttctcaacagttcattcattcacttctgctgatcactcgggccgggagttgtgtcgagaagcctaaaaaaagaaaaaacaaaaaacatttgaatttgtgatcaagcattcgcttacccgtcgccgatctgatcctcgccataaatatcaatgtgaatttgattccactggttataaatttgccaatcaatcgcttcttcttcccatttggtccatttgctttcgtctcgcccaattggacaacggacgaacagaaaacgatggctattgaaagttcttttcaacgccaattgttcccgagtcaattcattggtcagcgcaaatggcacaacggaggaagcaaaagatgatctttgaaaccaaacggaaatgatgaaattgacgggggaacaagccgaggcaaaagcctgaatgtggaaatgatttaagcataacaaatgacaatgaatgacacttttcggttggggaggggcacgaaaagccaacgataggtacttccttttactgtttagatggtccattgtgtccaatgaaaaatcaaatgggtaggaggaaccttctggttttttaattaggcaaataataatgatttgtcaacgcattccaaaaactgtaaatgccaattcatcaaataataatcaccgctttgagtgctgcaatcttcgacgccaaatgcccgtcatccctattcaaccagcattggaacacctttggcacatcgtctggacgtggagtgaaaagccatt

SEQ ID NO: 35803 - DNA, 1132 bp, Heterodera glycines
aaaaaataaaataagtttgaaaattattgcgtaaaagggttggatttcatttaaatttgacatttcatttaaattcaaaaatgttaggcgtgtccaatttaggtaattggccaccaattaacacaataaattaattttgaaacgattgcgtgaaagatttggattatctttgaaattttaaatttaaatttggcatttatattaattccaaaaatttgtttggccaatccatatttacgataattggccaccaattattattattattattatttcaaagcgaatgcgcattatttaggcgaccaaaagccgacccattgacatacaaacaatgcctgtacaaataataaattatttaaaaatgcaaaatgttgttgtctggaagcaccaacagcaggacaaatagtggtgtgcgaacaaaaattaatttgggaatttttgcattttcaaattaaattttttgtttttcgatttccaaagttttagatttattttaaatttttagttctattaaaattcatttttttactctattttacacttctctttcgaagaaaatcattccacaattatgcagacagtagagatttcttaaaacggatttgtgtggataaaaaaaccaaaaattaaaaaaggggtttgccaaatttggtgacaggctaatactttttcgcaaacctatcagggatatgtgccgacccaattcaaaaaattcaggcaatcggaaatcggcattccgacacatccctgatacctattattttttgtttgtttttaatggcaaattatttaaacataaaatttattggggcctctaaaaatgggtgaacaaaggaaaacatacatacataagtcaatttttcatcatctttttctatccccggcggggagggcacacaaaagattttttgggacaaaaaaatgatgaattaggggtgccgccggcagtaaatacgaagccaactcgccaggggggtgacacagaaggatttaggcaaaatgatgttgtcacgcgagtaaatattagcagaagggattttctagcggcagaagcaggcagcatgaaagcaaaatttaaatggcggggggggacagtaagaatgccgaatataattttaatttcgagatgaaa

SEQ ID NO: 35804 - DNA, 1082 bp, Heterodera glycines
ttgtgtataaatggtcaatttctctgttcactttctctattattttacattaattaacaaaataattttatcaacataaagcaaaaaatacatttatttttaaattaaaaaatattttagaaaatttttaatatttttaattattttttaccaatttcaaatgaatggaatttagcggtggaaaacaaaagaaagacgacagcgaactcagaacaaatgacaaacgacatcatttatcaacgaaaaaggcaaatttaatattaatttaaaaaataaaaatattaaaaaaattacattgtcagagtattgatgaaatttaaaaaagagatttagcagagagataatgtttattcgtagatctattgattataattgtgcaattagtcttcgaagacaaatttatggacataatatgaaaaacgaaaaatcaattaatattttataaaaaaaacaattcatcattgatgagtctactgaaattttttgatgattttcccggtttttggcaaaatttaaaaaaggccttacaacgtcaaaatggtaattctatgcagatttgtgaagaattttgatttttgactttttgtttgaattcgggtgcgaaattcaaaattggctaaaatgaatgtcagatttgtggtcagcgaccccaaaaacctccgacaatagtcaaagttatttttatgccttttatcggaatttttaaagaaaaaaaatgtcgggtccactaaactgtaaaagcgccaattgaatctaattaaaagattaaaataattattaatttattaaaagcatttttttttgtacatttacaatcaaaattgttagcatttgcgaatttgttgttttttctggtgttatacaaagaaaaaagaaacgagagatagtactaggcttttctgtgcacagtggagttgacccattgtgcacttttgttacttcggctcaccacgaacagcagaacaatcacatccctaattttgcacgatatgtacataaaaattgaaaaatttttaaattaaatttaaaatggcgtttgttttcaacgaacaaaatgattaggtaattagaatatttgccca

SEQ ID NO: 35805 - DNA, 1736 bp, Heterodera glycines
  unsure (1)..(1736): unsure at all n locations
tgagcaacaaaacatacattgatgggcaagtgagacaaaaaattcagtctgatttgggcaaaaccactttttttttntgaggcactctttcttcaaaaaacttttgtcataaatctgattcaaattggcgcttttgaaccaaattaagtaattttttaagaaattaaggtacttggtaaaattccaatctttgggtaaaatttaaaaaattctagattaaatttaaccaatgccaaaaatttcaaaatttattagtaatttcaataaatcagaaccaaactgtgtcactaccctccaaaatcagagcatttcttacagataagaacagatagaacccctgatataattaattacatttttatatcattatttttgtaaaaataaaatcatttaataatttatttaataatttgtcttactataaaatttccaattgacaaatttttttttattattttcgatgattggcgtcattttcggctccatgctgttcggctatttgtcagactcatacggacgtcgcaaaatcatgttgattgcgctgattttgtgcattttgtcgatggttgccacttcgttcaccttcgatttgctttcatttaccattgtccgattttttgtcaattttttcaacgctggaactatggtaaacccaaaaaaaaagaattttttctggagaaatcatgcaaatttcccatttttcaaggtcaccttggtcgtttttacatcggaacattacccaaaaaagcatcgcttctgcttggccaacttgatcacttggtaggagaaattttttaagaaattttatgacaaaatgtctctggatggattgtccattttattcaatcagacaattgatcatttgtctatggttatggttactaatttctataattcaacattcaacacaacaaagtgttaactgatcaattagtccagtaatgtgagcaattgggtacccgtcaggccgcgatagtccgaaaaaattttttatgatcaaaaatatggtaaaattgggtcggtgccgtttgttgccgccaggaaaatcttttattggaaattttaacgcactttttatgaaaaatgcttacaattttaaaaaaaaatttgcccagtttttcttaaaaatttgttacgtgcctggttggttggtacccatggcaaatgtcaatttgatcaattgtccgtgtccatccaatacagacaaatgggcaaaaccaattgatgaattcatcaaatttgcacacaggtcacccaattttgtgctgttcgccatcatggcttactttgcgcacgactggcgcacattgcaacgcgtttccgccgcttttgccaccccatgcgtgccaattctgtacttcctcagcgagtcgccccgcttcttggtccaatgccgacggatggccgaggcaaaggcggccattctccgaatgcatcgcattgacggtaaacaaaaaaattggcggaaaatgcaaaaatagagtacggtacccgaatactgtaattttttttttttttgaaattccctttctgtacacaccaagcgcagtatacaaaagaagaaatttttggcactttttgattttgtgtccaaaatttgccatttatgccagggacggtcccaggattttggcttggggggggcacctcccccgggcgacgaccttttttttttttttgcttttcacacccgttgtttatgtggcgcggtttttccaaaaaaaaatttttggggg

SEQ ID NO: 35806 - DNA, 994 bp, Heterodera glycines
  unsure (1)..(994): unsure at all n locations
tttcnggggcagtccccccgaaccgatgcgcccagatttatggggagaccgaatccttcgggaatagcttccctatagcctgtactttaattctgcgttggatttttgctccccataattgtttgagtaccccaaacggacacttgaaaaaatcgatttttttgttttcggggcagtccccccgaaccgatgcgcccagatttatggggagaccgaatccttccggaatagcttccctatagcctgtactttaattctgcgttggatttttgctccccataattgtttgagtaccccaaacggacacttgaaaaaatcgatttttttgttttcggggcagtccccccgaaccgatgcgcccagatttatggggagaccgaatccttccggaatagcttccctatagcctgtactttaattctgcgttggatttttgctccccataattgtttgagtaccccaaacggacacttgaaaaaatcgatttttttgttttcggggcagtccccccgaaccgatgcgcccagatttatggggagaccgaatccttcgggaatagcttccctatagcctgtactttaattctgcgttggatttttgctccccataattgtttgagtaccccaaacggacacttgaaaaaatcgatttttttgttttcggggcagtccccccgaaccgatgcgcccagatttatggggagaccgaatccttccggaatagcttccctatagcctgtactttaattctgcgttggatttttgctccccataattgtttgagtaccccaaacggacacttgaaaaaatcgatttttttgttttcggggcagtccccccgaaccgatgcgcccagatttatggggagaccgaatccttccggaatagcttccctatagtctgtacctaattctgcggtggattttgctcccataattgttgagtaccccaacgacacttgaaaaatcgatttttttgttttcggggcagtcccc

SEQ ID NO: 35807 - DNA, 1687 bp, Heterodera glycines
  unsure (1)..(1687): unsure at all n locations
tcagtatcaaacgcaattcgatgacgncactgaagcgactgtcgtgggtggcggagaacggaggcgacgagtatctgatgaattttgtggtgaacgagcagaaaaaaggtggggaaaggcacaaaaaaaagaaacgcgcgacatttgaggacgaactcacatttcatttggagaaatggtgccaaaaccgccggagggagtggcggaaaaagagcgaattggcacgaacgaagagaggggggaaacggaatcaacggacaatggaaataacggacaaatgcatctgaatgcatttaaagggcagagaaaagtgatcggagaaggggcgggtggaagtgatcagctggacattccgacattgagcgaaagaacggacgaattgagagaagagaagcagacggaagcggagagtcagacgacagaagagagacagacgcgtgcagagaaacatacaaaagtgccatttgaggaagagggaaagacacaaccgaaaacagcggaagaagcaaagtcgagaactgatcaaagagacacgggagtccaattagtcgacgaaggggcgagaagcagagatttggaaaagcctaaagaaacggcatcgaaagtgtcatccccaatgaaaagaatggccgtgcaagaaaatagttgggaattccataaaaagtttgcggaaagacttgtgaataaaacggcaaaagatgaggaggaaatgggcacagatgaaaagagaaaggaggaggaggaagaagagaaaagaagtgagagggaggaggaaaaggaggaagagagtgtaacaacggaagagagccaacagagagagaggagggagagacaatcgaatttaaacacaacgccagcatttggggaagtgtttaaggggagaaacgatcaacaacaattggaagaggaagaagagaaagagggagaggaggaagaaggagtatgggaagacaaacagaaagagaaatgggtgggacggagagacgaggagtcagagccgaaatgcgaggaaaggccaaaagagggacacatggcacaaatgccggcggagattgaagtggaggaggagaaccccgccgaaatgttcgattctccaccgctcgacgaaatgacaacggacgaatcgagcagttcggcgggcgaagaaacgccgattgtggtgagacgagaacggatatgagaaggggggggcatttgtttgtgagcatactgtaactgactagtcattccaaatttgcccaagttcgaagagtctctcctcggaatgccacggaatgtcaaaggcattctccgacggtctgacacggtccgggaggaaaagaagcgcagagtgatgttcgatctgatcgtcctttttctcgacgtcgcgtacgaaggacagtacgacactctcgtggaattggccgcaaaggtcggccaaaaagcgaagaaagccaaagccaacggagggcattttcacagattgaggacatttcgattgcaaacagcgaagggacgacggcacttcattacgcaatctgtgccggcaacttcgacattgtgaagtttctgatcgaaaatggggccgatgtcaatgctttggtcggtgttcgcctgcttttttgccctttccgtcgcaatgttttgctttttaggacgttgacggatggtccccgttgcattgcggtgcctttttcaattaaacatt

SEQ ID NO: 35808 - DNA, 1064 bp, Heterodera glycines
  unsure (1)..(1064): unsure at all n locations
atttttcgcaccgtgaatgttatttttattgaattctgaaccggtttgagtagattagactagaaaaaattgaaaattttgaaatcatgtttcccactcccttctcccaggggtattattttgtagtctttttttccccaataaacttttcaaaccccatttttcgcaccgtgaatgttatttttatcgaattctgaaccgttttgagtagattagactagaaaaaattaaaaattttgaaatcatgtttcccactcccttctcccaggggtattattttgtaaagtctttttttccccaataaacttgtcaaaccccatttttcgcaccgtgaatgttatttttattgaattctgaaccgttttgagtagattagactataaaaaattgaaaattttgaaatcatgtttcccactcccttctcccaggggtattattttgtaaagtcttttttccccaataaacttgtcaaaccccatttttcgcaccgtgaatgttatttttattgaattctgaaccggtttgagtagattagactagaaaaaattgaaaattttgaaatcatgtttcccactcccttctcccaggggtattattttgtaaagtcttttttccccaataaacttgtcaaaccccatttttcgcaccgtgaatgttatttttattgaattctgaaccgttttgagtagattagactagaaaaaattgaaaattttgaaatcatgtttcccactcccttctcccaggggtattattttgtaaagtcttttttccccaataaacttgtcaaaccccatttttcgcaccgtgaatgttatttttattgaattctgagccgttttgagtagattagactagaaaaaattgaaaattttgaaatcatgtttcccactcccttctcccagggntattatttttgtaagtctttttttccccataaacttttcataccccatttttcgcaccgtgaatgttatttttattgaattctgaacccgttttgagtagattagactaagaaaaaattgaaaattttgaaatcatgtttcccactcccttctccc

SEQ ID NO: 35809 - DNA, 1301 bp, Heterodera glycines
  unsure (1)..(1301): unsure at all n locations
aaaagtttaggcttatatttaaaaaagttncatcgancctagcgcactaaaatcgataaaatctctccaaatgtgcaggcccttctcccatgntaaaggactacnttaacttgaaaaaatgccaacgcttgttgttttaaaattttcgaaattctgactttttcattaattatntatttttgncaaaattaattcttaaatattttttcagaagggttctgaaacgcaccaaattttatttacatgttagtttaggcactctgatgctttttctatcaaaaagggagatgaataaaatttttaaaaatttttaattcctttttaaacaggccaaaaagtttaggcttaacttttttttcagaaactgatcagaagcgcaccaaactttgcagggatactgaaaggaagagaaataacctattttaaatattatctagtcagttcatttaaataatttttatccaaaaaatttttctttgggttttcggggcagtccccctgaaccgatgcgcccagatttatggggagaccgaatccttcgggaatagcttccctatagtctgtactttaattctgcgttggatttttgctccccataattgtttgagtaccccaaacggacacttgaaaaaatcgatttttttgttttcggggcagtacccccgaaccgatgcgcccagatttatggggagaccgaatccttcgggaatagcttccctatagcctgtactttaattctgcgttggatttttgctccccataattgtttgagtaccccaaacggacacttgaaaaaatcgatttttttgttttcggggcagtccccccgaaccgatgcgcccagatttatggggagaccgaatccttcgggaatagcttccctatttaggctgatactttaaaaagttgcatcgaacctagcgcactaaaatcgataaaatctctccaaatgttgcaggccttctccattgtaaaggactaacttaacttgaaaaaatgccaacgcttgttgtttttaaaatttttcgaaattctgactttttcattaattatttattttttgcaaaattaattcttaaatattttttcagaagggttctgaaacgcaccaaattttatttacatgttagtttaggcactctgatgctttttctatcaaaaagggagatgaataaaatttttaaaaatttttaattcctttttaaacaggccaaaaagtttaggcttaacttttttttcagaaactgatcagaagcgcaccaaactttgcagggatactgaaaggaagagaaataacctat

SEQ ID NO: 35810 - DNA, 1511 bp, Heterodera glycines
agaaaaatggtataatggaagtccggcggtgccattaggcgccgctgcgggaaattttttataattttaatgcattatgttaattgggtactagtgcatttggcacccacaaaaaacaaaaaatttgttttaaagtcgtatgtttccagggttttcttggtaaaaaagttttttgagaattgacttttcgacctagtgttcgaatttgttagttttttttgttgtctgcaggtgtcgtcctccaccaacccttccaccacccctttgtctatcggagtcccttcgtccgctcacttcggaagccttcttaattctgcacaccatcagcgcctctgcagtcctcactcccgaaaggacagagaagggcacggggcaccgactacgagcagcagcacaaacaacagcgaaaggaccacaatgtcacgatgctcttcagttcagtcaagcgggcccgagttcagctcgaatgtgtccgttgaatcagcgatttttgacgacaatgagaagatggagcaggatcagaacgagggaaaagcatcggatgacaaagacagaacgatggttgcaaacggcgaagggatggacacggcaatagtcaaggaggagggggcgacgacgagcaatgggtgagtgggacgggagacaaccaaaccggcggaataagtgcgtttaatttcagcttcaaattggagttgagacaacaacggcagaacgctcacagccaacagcagctgaacgtgccgctccacctgaattccagcgacccctctctcagtgacatggccaagccattggcaaatttgcagcatcagtccgcttttcagacgagccccgccttcccatttccgttcggccagaactcttttattcagccgcccttcaatcgcttcttttgaaggacgaaaatgagcctttttggaatactcacttctatcaattgactaaacgacacccaatttgcttttgcctatttattattctccatttcactttctttgtcaaaatattgcgggcctttcttttgagtctctttttaatttatatttccatttatcaaaagcctcagacactcacgggaacccatttctctttgtaccttctttctccatttgacctcccatttttgccagcaggtcttttcgttgttcagcttttactcatataatcaaatttgtttttatttatttattttctctatttcacttcataggcattccaaaatcttacctttaaggttgctcataacggttttttcacccgtattttttcaaaattagacgaagaacgaacataactgaatataaaactaaaaaacacaatatctttggaattcttaatccagtatgaatccaattttgggaccataatcaaattttgtacttcagttaattataaaattctcataaaatcccaccactctgctcgaaatatgcgtttgcgcttccctcaaatctaaataaatacaaatatgtggcgaaaattcacttttttcatttactattcttctactg

SEQ ID NO: 35811 - DNA, 1026 bp, Heterodera glycines
gagcaggcccaaaataggggaaaataccaagaggttaaaaaatttttgttaagcccccactgggcttcggctggccatacctcgccagagagtggagatagcccctttgtgtgatccatttggaaatgtgcgagcccgcatagcgcattggaattacacaaaatttgtttgtatttgccaccaaacaatccgcttatgacgcgccgaataaaaattcacaaaaatttggcaccggaaaaactgcattttttcatgggccagcataataaagtaaacccaaaatgtaaggaaatttaaattggtcatgagagatgtttagttttttatttgtcccatcctttttctgggaaaaaacttttcgagaaaagctgaaaaattttccacttgcatcagaagcagactcaaattcttcaacacacaatataaaaatattacgcaagaacttatttttacatcctttttagaaatgctacataaatttttattgtaaatagttacaaacaaactttttttcactgccaatttctaccagttgccaaacaaaaaggcgatagttaagcattgagatataaaaaaatcgtctagaataattatctcaacaatttgtcgggaaagctgaataaatttctgttgcaataggcatattggcacaagacataaatgtagagcaggcacaaaatagaggaaataccaaagattaaaaaattcttgtttatgccccactctgctttggctggccatacctcgccagagagtggagatagaccctttgttgatacatttggaaatgtcgaacccgccgagcgcattcgaataacacaaaatttgtttgcatttgccaccaaacaatccgcttatgacgcgccgaatgaaaattcacaaaaatttggcaccggaaaaactgcattttttcatgggccagcataataaagtaaacccaaaatgtaaggaaatttaaattggtcatgagagatgtttagttttatatttgtcccatcctttttctgggaaaaaacttttcgagaa

SEQ ID NO: 35812 - DNA, 992 bp, Heterodera glycines
  unsure (1)..(992): unsure at all n locations
atatttcaacaaaaatttttaaaaattgactagagcaatcgaacgctaacggacgacctaatgggaaaaaaatccccgaaggagagaatttaattaaatccattccttcgggggaccgtgccgggtgccgcggggtaagcagtgctggttcgtttcatcacggcaccgaaccttttggctagtcagcaatcgttgcttaacttgccagatcggacgggtgcgcatgattccactgttccaagcaccccaccaaaagcaaaacgatataaccaaaatataaggaaaaattttttctccatcttcctttttgatactaaagcatcagagtgctaaaattaagttgtaaataaaattttggtgcactttagagcactttctgaaaaaaatatttatgaaacaaaaaaatcgattttttcaagtgtccgtttggggtactcaaacatttatggggagcaaaaatccaacgcagaattaaagtacaggctatagggaagctattcccgagggattcggtctccccataaatctgggcgcatcggttcggggggaatgccccgaaaacaaaaaatcgattttttcaagtgtccgtttggggtactcaaacaattatggggagcaaaaatccaacgcagaattaaagtacaggctatagggaagctattcccgaaggattcggtctccccataaatctgggcgcatcggttcggggggactgccccgaaaacaaaaaaatcgattttttcaagtgtccgtttggggtactcaaacaattatggggagcaaaaatccaacgcagaattaaagtacaggctatagggaagctattcccgaaggattcggtctccccataaatctgggcgcatcggttcggggggactgccccgaaaacaaaaaaatcgattttttcaagtgtccgtttggggtactcaaacaattattanannaattttagatttttattcatctccnncttttgatagtgaaagcatctg

SEQ ID NO: 35813 - DNA, 675 bp, Heterodera glycines
aggacgctttttgccacctccttcaaaaagaggaattttttcgatgcgctcgcctacgccaagccctattggttcaatacaaatgagtttgacaaacgcgcacacaccaccggtggtcgcacggcgtcggcaacacttaatgctggaggctcgcaggcaattggtaagaaactgcaaacggaacggaccccaatacaaatgtatcattggtgtacagaaatcacccccggcggtcgcccatcaacgccgtcatttaatgtcggagacccgcatgaaattggtgaggaaatgtacattagacgggcccaaatataaatgcttcatttgtgtacagaaattgcgacgcaatccctttcgggtgtgccgcggtctgagcgcacggtgcgcgttttgttgaggaaaggaggcatacgaggaagcgcacagtactgaggagcgattgatcagaagaaatgatgttagaatattgattgtgaggaacaattagtaaaaattttggtttttaaaaatttaaaaaatcgacagggcagaacttattaatctaatatcgcacaatgtcaataaaatagagatggcatatataattcatttaattttctgtttgcccgtcaaatccaataaatagatcatactattaagcgacacactcattctctgtaacaccatcctttttgt

SEQ ID NO: 35814 - DNA, 973 bp, Heterodera glycines
tgatgaaacggaaggacgggaaatgcgaatgaaagacaaatggaatttgtcagaatgccaaaaaaagttgggagagacttcggcagcgaattgttcggtttgccacaaccttcgaacggcggacaaagcccaatggaaatgtttttcaatttgtttggacgaaaaaaaagggaaacggtgcaggaaggaagaaagaaacggagcatcgaaaatttagccaatttggggaagccgggctcagagtttgtgacaaaaatggccgaacaagcaaaaaacgatgacaaacaggacgagaaggcggagatcaagcagtacctggagaagggagtggccactgcggaaggaaacaaaaaggcggagaaattggcctatgtttggtactcggaactgctgtattggacaaacaaatggatcgaggtggacactcccgccgaaccccaaaaatttagcacctttttaaggcattagaaaatcgggtgatgggagtcaaacccgaactggcacaacagttcgtattctcaaaaacgggaatggccgcttacagggagctgaaggaagaggtggacaaatgcgaggcgaagttggccaaactgaaggaatggatcggcgactatttcaagtgaaaatggagatgaccaaccatcccatccacacagccgattcagcaccacccattccattttagttgtatttcggggtttagttgtttttcattttcttttcctgtatatcaatgcatttattctttttattccatttatcatttttatattgtagtgatttttgtacataaatttgactgtcgcaaacatctatttacatataacgaatcatatgttcaatgggacgttaacagcttgggagacagaaatagaaaactttttaattcagtgacggtttttgaaacgggtcaatggcaactcacacaataattttttttttaaaagtctaaagcttaggccaagccaaaaac

SEQ ID NO: 35815 - DNA, 975 bp, Heterodera glycines
tctgctcacactcaaatgaactccaaccacattttcggaataatagcgacgaccctaatttttctggattttctttctgggcgagtttggctctgaaaattttgaaaaaacgtctatctctttttctgctcaacactcaaatgaactccaaccacattttcggaataatagcgacgaccctaatttttctggattttctttctgggcgagtttggctctgaaaattttgaaaaaacgtctatctctttttctgctcaacactcaaatgaactccaaccacattttcggaataatagcgacgaccctaatttttctggattttctttctgggcgagtttggctctgaaaattttgaaaaaacgtctctctttttctgctcaacactcaaatgaactccaaccacattttcggaataatagcgacgaccctaatttttctggattttctttctgggcgagtttgtttctgaaaattttgaaaaaacgtctatctctttttctgctcaacactcaaatgaactccaaccacattttcggaataatagcgacgaccctaatttttctggattttctttctgggcgagtttggctctgaaaattttgaaaaaacgtctctctttttctgctcaacactcaaatgaactccaaccacattttcggaataatagcgacgaccctaatttttctggattttctttctgggcgagtttgtttctgaaaattttgaaaaaacgtctatctctttttctgctcaacactcaaatgaactccaaccacattttcggaataatagcgacgaccctaatttttctggattttctttctgggcgagtttggctctgaaaattttgaaaaaacgtctatctctttttctgcgtcacactcaaatgaactccaaccacattttcggaatatagcgacgaccctatttttctggatttcttttctggcgagttggctctgaaaatttgaaaaa

SEQ ID NO: 35816 - DNA, 1159 bp, Heterodera glycines
  unsure (1)..(1159): unsure at all n locations
tgtatnttgccaataaaataaaagctgcaggaaaatattacatatgtaatccgatcgatcataattaattaaattaaaaaataataataaattaatttttctcaaatgttttgaatgttcccttcctctttctgctgcttaatgcttttcccaatatctttttttccattttccgttaccgtatctctttcttctcttcactctttttccgattggctgctcatcgtccgtcattcagtcatcagtccgccgttgacactgtgcaaattaatccgctcgccaaatgatgcgcaaattgtgggatttttgtgacgggggggggggagaaatacgcccaaatgacactgttcaaacattggacggacaaaaagccaatgaatggctttgcttatgcttttccgatgtgtttactgcttgtctgggcggacggcttacaagcttaccacgggataatcatcaaatcagtggattaattgggaaattcacaatattaaatgaatcttataatttattttcattaaaaaattattaatattttttgtatctttaaatcgttaaaagctttttatccgctagaagtttataaaaatatattataattttaaaaaatatttgtacaaatttctgttgagatttccaatccgctggattaccgtaataaattctgatatctttaaaaaaaaattcccttttagtgcttttacataactttttagcaattttcgatataagccaacatcatttttgtttgtttcgaaattaaaacattcattcactcttttttgattgattttctttgctttccccccccccaaattttccccctttttccccgttcagttagcccttatatttttcaaattgatttatgcgttggaaagtgcggatgtgatgatatccgacaaaatccgattgacaaccattgccttttccatgcgcaaattgcgcgccattcattcgcttattcgttcgttttatttatttattttccaatgcgcggccaacacaaaaaaacataaaataaaattttgttttttttaaattaattcgttaaaagccattggacccgccttttcctctcccctctcttaagaagcttcactttaaaaggttaactcttttttatagttgaagcatttgagagcatttggcgccagta

SEQ ID NO: 35817 - DNA, 1150 bp, Heterodera glycines
  unsure (1)..(1150): unsure at all n locations
atcaaagccatctgtcgctaaattagaatgattatttttatatttgggttaaaccaagtaaataatgggaaaatttagtgaacttcaagtacgcacttcacattttaaattttattaataacctccagttttatattttaaataatccctttttcatttaggttatttctgtggcaattttttttaattaaatttgcttaccctcgggttcattttgagaagtcgaagcagttggattggctgattgaaattgtaagtgaccaggggcagtgattttgcagtggaaataaataccattgtggtgaaaagcagcagaattgaagagttagaaaaggtggaagacattttcttaataaaatcatattttaagcgtttataatttaaaaatattataaatttgaaaatgaaaaaggagggcattttcaaaaatatttcatttgataaatggataataatggttaaatgaagtcatttaaatggtaatttaattagagtaagacgtgtgttatttctgtaataatttccattttcgtttaatgccacaatgacacctccgggaaaaaaatattttcaaatggcacacgcaataatcaatccaaaaaatcactaataatttaaatttgtacctatttaatgaaaatctttaaggcaatattatttgtaaaattttattaattaaatttttttaaaagttttatattgaaatttttttcaacatctgtatttctttattgtttaacttttattttgtgccaaaaattgactgtgattttttttattgttaattttctgccgaaaaatacctaagaaaaactaaaaacgcgtaattctttttttataaatttcaaaaatcatttaagtgaaagtgtcatatttgtttttgcactactctttttaaaataatcaaaataggacggaaatttatttgtttttattttcagcatttgtatcttaacgaatgaatggggcaattagcaaatgccattcaacaagtgcgcacatttaaatgaactagaaaaaagtaatggcgtaagaaaggaagctgcaaaagaaagagcaaattgttatttgaaaatgataattttttattattattcaattatttaaaaaacaanaaaatatttatttattcataaaaattattttatta

SEQ ID NO: 35818 - DNA, 385 bp, Heterodera glycines
ttttttgcttatttttgacataatttattaatttttaagaaaatttaaatttattcaatattctcgagaaattttggcgaaaaaatgattttttgaaaattttttcgggttttgggctcaaaaaggctaatttagctgctgggggccgttctaatagaggtttttttgaaaaatgccaaaatatggacataaaatatggacaaaatgccaaaatatggaaatatggacataaatcgcgaaatatggaaaaatatggaaaatatggatatagaaatccttcctagaagcttcaaaccaagctaaaaacatgtttttcgtgcgtttcaggcctccaataatccaggaaaaaaatatggatttccatataattacacgccctagttat

SEQ ID NO: 35819 - DNA, 1007 bp, Heterodera glycines
agctgctctttccatggtcttatcccggtctcgatccgtgccgaactcacaaagttatggagtgaaatgtgaaatattgttttcaccacaaggcattttttctgaaaaccggattcaaaaatctggggtttggtataaccgttttagaaatagcgtagaaaacagcttcgatatcaagaaaccaagtcaagtccagaaaggaatattttaaaacgatttcgttttgttttggcattatgataccgaataactttcggaaattatggaaacaaaattggagaaattcgaataattttttgactgcaaatttttttccttttttgaatagggttcaaaaaaattttaagagaatttttgattattaatttgaagtcttgaatttatttgacaaatccaagacttaaaactgggagaagcaaggggctgtggctgggggcctaaaatttgggccacattggagaattaattctgatttctgaaaaagtcccagaaataactattttttctttccataccttcttgtagagctcgagctgctctttccaatggtcttatcccggtctcgatccgtgccgaactcacaaagttatggagtgaaatgtgaaatattgttttcaccacaaggcattttttctgaaaaccggattcaaaaatctggggtttggtataaccgttttagaaatagcgtagaaaacagcttcgatatcaagaaaccaagtcaagtccagaaaggaatattttaaaacgatttcgttttgttttggcattatgataccgaataactttcggaaattatggaaacaaaattggagaaattcgaataattttttgactgcaaatttttttccttttttgaattgggttcaaaaaaattttaagagaatttttgattattaatttgaagtcttgaatttatttgacaaatccagacttaaactgggagaagcaggggctgtggctgggggctaaatttgggcacattggagaattaatctgatttctgaaaa

SEQ ID NO: 35820 - DNA, 339 bp, Heterodera glycines
agaaaaataaggggaaaaatggcatattccttcctgtggtagaaaattctcaaatttttttcattaattttctttgatatcacccatttagaagcccttttaaaacaaaattaaaagtattgtcctggtttggcggtgccgaaaggcaaataaattataatttttgacgtaaaatttcattctttttgaatttttagggttcattttgggaatgatttgtgaagaggtcccgactatgtaaattgacgaccttttttaatttttaaaacagcttttttcgcggcgtgctttttccataaaactgggaaacatgggggggggggtcaggcggcgccgaaa

SEQ ID NO: 35821 - DNA, 1135 bp, Heterodera glycines
tttttgagcgatattttgagcgaaaagtggggtaagaagtcagcatttttcaacatcagcgggctaacattcatagtatgtttatctgttagtctttttcttcttttgacatgcttcattttgcaacataaaccaatgggggaagaccaccctgctctccatatataccaatgggggaagaccaccctgctctccatatatattcgttttcaggcgcaacaattccggactctcggggtgcatgtcgattagtaggtagccaaattgcttttcagttgcatcccggtatgcttccgtgaaatagttgcttttcgttggaaatagctgagaggcgagcgtccgcacttggagcgcgcccgccgggttacgcatcagcaccaaatagtgggagttgttgcgcgcaacccgcagttcttttgcgaacaaatgttgagtgactaacacaacgctgaccccccaattgtgcgatccccgggtgaacacagtgtcaagaaattgttggcccaatccaaccatgagatcatccaacaccatcaacagttttccatcacactcttttgcgcgccgattaacctgctcttcggttgggcttccagcatgtacaataaccctacacccgccgatgtgtccacttttctgaagctgtattatatttggattcaactccccataacagtagaaaatctccgagatgggttccgaaactagcgcattcacattcctcagcattcgtagcacccattccgattttccactccccgtgctccctgagattgtcagcgtaaacgggtgtctgagttgtaagtgtttttcatcaaatttttgaaaattgtctgccatttttttttttttgcaaaacggtttatcttatattatccatgtttaaaaaatattatatatacacaataaagctttaaagaaataataataatctcttaactattaaacaaatggacgcgattcttgcgaccgattggctccacaatgcgtacccggaacaaaagatgacaacaggaaatgaagaagaagataaagcaacacaggtattttttttatgaaaaaagtttataaataaaactatattagtaattaaataaaataaaatttcaggaaggacaaatgagtggcttaaaat

SEQ ID NO: 35822 - DNA, 898 bp, Heterodera glycines
aaatagttaaaaatcactattttggcgttttgtcactattttttcactatttcaacattttttggaaaattccttaacaaaaacgcaataaaaccaaaaaatacacccctaagaatcgacctaaaattttttttcaaaaaatacacccctaagaatcgacataaaaattttcagaaatcactcctaagaaatgaaaaatttttcacaaaattcactttctttgcaaaaatttttaattctaaaaattattttttaggaacctattttgtattttttgccctcaaaaatcccagtcctactcatttgcaactgcaaatagtgaataaaaattatttttgctcaatttttggctgaaaatttgtcactattcgtcactatttcggactttttggcactattttctcactattttggcatttttactcactattttagttaactattttgggatttttcgtcactaaaagtcgcatccctactaattagcgtcagccctgtgccggctctgcttcattctcttcctcctctgctgccgctgatccgcgccattcgtcggctgcacattttggcaccgcctctctgcaacacacttcttcccaaggtaattaagccgcctgacaaattgaatcgatttaaattggtaaaaaagatggcttttttattatcatcattaagctagaagaattgagcctgattataaagcaaacaccgagaaacttagtttgggaaatcaaaactacagcaaaaaattccgaaactcgaaaataaccctaaaatttctaatcagcctgggtcgaatatattgatttttcgcatttgaattcatcgaatcattttataatttcaaaaaattcaattacattaggacgataatcaccggtttttacaccccctacta

SEQ ID NO: 35823 - DNA, 666 bp, Heterodera glycines
agtaaaaaatttgcctttccctcatcatttgtcaccaattttatattctccgacccaaacatttattcatttatattaccaattggtggtaggcccacccagcaactgctaatgcttccatgcgtcctttttttacgagacgcatcgcttcgttcaagttggtgcagaaatcttccatcagttgtaaaacgtgcgatggtggtggcggctggtaaatggtggctttttatacatatttggtacatattttagatttttttagcatttctccctacattaaaaaatttttgtaaaaaatttaattttttgaaaatgtacctctaaaaatttaaaaaagtgataccaaaaactcgtttttataaattaaaaaacggcatgttgttgttctctgttaaaatatagaaaaatttgcttaaaaagttgttgccaaagtcgaccctcgggaacggtcccagcgagggggggggggttggggtggggagcagggatggcattccgaggcccccaaaaattctgaactccggggatcaaaaaggaactccgagggtcaaaaaattttaggaaatcggaattacgaggcccaaaaattctattgcaatttttaagattttatccaaaaaatgaccaaatttagatatcttgaccaaatatttcaagataattata

SEQ ID NO: 35824 - DNA, 1429 bp, Heterodera glycines
ataaaaaatatgtgccaaaaaatcattaaaatgctcaaaattcagagaatttttacctcatcgaggggctgctattatttatatatgttgaaaatttctttttgaattgtaattttttgaatatataaaaataaaatagcatttgtgaagttttttttttgttgcattatttaggacattattaaaaataaattatttttattttattttaaaataattcttattttatttattcatacaattaattttcaaaatacgtcatttatatggttgattaatttttgcatgagcttaatgttctagataaggaatctgccttattttaggtgagataaaatttctaatttaacgcctcaccaaaaattgtttaattgacatcattttcaacttcgtataattcgttgattcagtccatttggtttttaattgggtccaaaatattttatacccaattaattacgtaaatgttagaaatttatttaaaactattttttcaccattttaattaatagaatctattttttacatataatacaaatattttactataaatattcaaataattgaatgcaatattcataaatattttatttaaataattaatttcactaattttttttaatttttcatctaccgataactatttatgacagataatataaaatattttctcgataaatattcaaatattttaaagaattttgtttaaattttgtatttcacacaaaaaaatgaatgaatttaatttaatttaaatgtttttttattgaactaaaaatatataatgcaaattagtccaatgtaataattaaattaaattaatatgctaaacaatgggtgggagatgacattcagcataaatatgcttccgtatcaattttttttctgaattaaatgatataatgagtcggcggaagatggtcgtgtcctccaactgtttgtgccatttctttttaataaatttttattaatgccaactaaatgccaatgccaaaaaagctaaacattttttgtttgttataaattcaaactactttttaaaatattaataattatttatttatttttaaatttatagaataattgaaatccaaccaaaaaaaacagcaatttcaattaaatatatatgagtcaatgaagaaaattttgcaaaaatggcactgtttataggcggtgccgtaaaaattgaggattttatccagaaatgatgacaattttttgaatttttttttattggaattgccttcagccatcctgctgttacatggagtttaaaaaaaataaaacaaataagaattagtctcagatcaccattgaattagtaaggcacagaaaaaattttctcagattttgaccgcccttaaattcgaaattttcttaaatttgaattttaaatttttttacggtaactatctcagccacccaaata

SEQ ID NO: 35825 - DNA, 775 bp, Heterodera glycines
aaaaattaaataaataaaaaacaaaaatattaataatattgtgtgtttgctttaaatataatattatttatataaattattattaatttaaattcgtaattcaataaaattattatttttatatagattaatacttttataattatttttttgcttttaaaaaaaagaagaaataattcttttcactttgaaaagctctttgccccactgtgcaccggtcgcctttccatcgtgtttatgatcaccgccatttgagctccgtgttcgatttccggcatcattctatcaaaaattagcactttcgattgtattttaaggtaatttttttctattttttaaaaattaatttgactttttaaagtataagatttctgggaaaaatctaaaaaaagggctaaaaaaagggctaaaaatttactactctaatgaatgcccccctttcattaggatcaaaaagtcataagcataacgctattatttcataaattaaaacttttcccctcattttagacttttctcctccctgacaaaaaaaaataaaaacgaaaaataaatacctatgaagcaaaaaaaaaaaatttctaagctatgaaattgtaggacaaaacttattaaattttttaattttatgcttccataaattttagaccagcatttttgtgtctagagatttccggattttaatattaatttttttcgtttttcagggcctaataaaatgtgacaaattttatctgagaattcggaccccgaaaaattggtctcgcagcacgcg

SEQ ID NO: 35826 - DNA, 999 bp, Heterodera glycines
  unsure (1)..(999): unsure at all n locations
agaaaatccgacaccactggaaaacccgacactagcggtaaattcgacactggaaaacccgacacgacaccaactttaaatttaaaaaatattttttgattattgagttaataatatctggctatgtttatcaagttttcgaattgaatttaaaaaaaaacggttgcgccattcgatgggatattgctggcaaataataaaagggttgtcgattgttgcgagtcgcataaatctctgagattcatgtcttgcaccacgtacactttcttatgcttcatgccctttcctctgattcgatttgccgcattttttacaatttttttgagatgatcaaaaaagggcattgaaataaatataattattatatgcctaccttaaatagattttatagcaataaaatatttattttaaagaaatagtttttatagcaataaaaatattaattttaaagaacttaactttgtaacttttattacatgtattttaaatattcactgactcaaacaatcaaaaattatttttaaaatttaaagttggtgtcgggttttccaatgtcggatttactgcttgtgtcggattttccaccggtgtcggattttccgcttgtgtcggattttccagtgtcggattttccggtgtcggattttccagtgtcggattttccggctcccttcctcccccccccccaaatgagtttgatttatcgcaaatgttcattttcctccagcggcggggctacagcttccccccccccctgcggcgtttttgcattcttttggccagagggctgggaaaaataaaaatttaaaaacaaattttattttagagagacgtttttatattaatttaaaccaaaaaatttatctttttaattgaagaaagttttatgttttatagtttaaaattccgacntgaaaatttaaaaaaaaaatcattctgaatccgaacttaaaacttgaaaaatgaatttgacttgctaaattattctcatttctattg

SEQ ID NO: 35827 - DNA, 1134 bp, Heterodera glycines
ttatataaaaaacgtttaataaaaattttaaaatcaattttcttagtgacccctgtacttttgttacaatttttggcgctatattcaaatttgaattttcgcgtcaatactcggtgggtggagggacgcttgctgggggtatgggggggggggttggaaagttcttttcctaatttgaggtccccaactcaaaaaagttaaccgaaaacgacgagaaaatgcgattgtaggaattttttttcattgcctttttcatattcattttccgtcgttttaattcgattcaaaccgtttgtgagcggaagggacttcaaattaattttatatcaaataaaattaattgtagcgagaaaaaattggaagaagcgcctaaattggcgcaaataaagaatgatcacattcgccacccgagatttcgccatccaagccaaaatttccttgaaaaattttttggaattgggataggtacacaaataaactttttttaaatattttttttttcttgaaaaatgaatattttcgaatttttgttcgaatccgggtttgcgattcgaattggatgtcagaatcgagttttccaatcctgaaaaaccctaaaatcattggtaatttgattaaaaaaaccaatactacatatatattaccggtcatttgtataaaagcggctgctcctccgccacttttcttattattattcattccccattattttcgtctctttcttcgactttctctcttctggcaatgtcttccaaaatgattctgtacgttttgcgcattccttctctattttgcccctatccttctcatttttttagtctgtacggtgtgccaatgttggttggatgttgcgccattctttggatgttttgggaccgattcaaaaaaccaaaaaagaaaatgtaaaaataatgaaaaatcttaaaaaattgaaaatttaattttcagtttcatttctgccgacgcttggctttccgtgttcgaattgcttaagcgttctcaactgggccttggaatcgcacttgtcagccaccgttttgatgccatggtcgacgaacatttcaagacgcggcgctgggcgctgaaatcctttgaaatttggtgcgacgatggcgaggatggcacgacgaaaat

SEQ ID NO: 35828 - DNA, 634 bp, Heterodera glycines
cgcccgtcctaaggccacgaagctgccgaaaattccgaacaatccacaatatttagaagcgcaaagcgcccgtctgaggccgcgaagcggccgaatgtacaaaagggcgcggagcaccctttgaggccgcgaagcggccgaaagtcctccacaaaattatgaatgcgtcctcgcgatgcctgtagaccaaaatcccttatcacatccataaattcatttcaaaatcgcgcatgcactagcaacgaagtcctttgcgcgaagcgctcatgtaatgcatattcttttcagctctcacaagccaactgtctacaccgagcaactactgcgccacaacacgctagtttatattaccatagagaaaagtcgggtttcgtcttaaaaactaatttgagtcgaacggctgtcgggaggggtctgaaagtggtggaagggtcttacaactttttgaggcgcattcaggaaaactataggttttccgctccggtggccagttgagcgccggcggcgctgaaacggcgtgaaattttttttgtccgtctttggtggcctgtaactttgcgggaagaagcgggagcggaaaatgcttgctggtagaatgttaagttggaatgtttgggaaaacttggcgcttatt

SEQ ID NO: 35829 - DNA, 1178 bp, Heterodera glycines
tttttttaataaattttatccccatacaaatgcttctcgaagcatgataggggagggcgggtgcgcaatagaccttttttttttgagggaatttttaaatttatactctatcccagaaaaaatgtctatctctttttttgagaaattttatacctcacaaaagcgcttgcgtatgatagggagggcggtgcgcaatagaccttttatttttgagggaatttttaaatttatactctatcccagaaaaatggctatctctttttttgagaaattttatacctcacaaaagcgcttgcgtatgagacggagggctgtgcacaatcgccattttatttcacagaggatttttaaatttatactctatcccagaaaaatggctatctctttttttgagaaattttatacctcacaaaagcgctcgcgtatgagacggagggcggtgcgcaatcgccattttatttcagagggaatttttatatttagaggctatcccagaaaaatggctatctctttttttgataaattttatacacatacaaatgctctcgagcatgatagggagggcggtgcgcaatagaccttttatttttgagggaatttttaaatttatactctatcccagaaaaatggctatctctttttttgagaaattttatacctcacaaaagcgcttgcgtatgagacggagggctgtgcacaatcgccattttatttcacagagtatttttatatttagaggttatcccagaaaaatggctatctctttttttgataaattttatacacatacaaatgctctcgagcatgatagggagggcggtgcgcaatagaccttttatttttgagggaatttttaaatttatactctatcccagaaaaatggctatctctttttttgagaaattttatacctcacaaaagcgcttgcgtatgagacggagggctgtgcacaatcgccattttatttcacagaggatttttatatttagaggttatcccagaaaaatggctatctctttttttgataaattttatacacatacaaatgctctcgagcatgataggggaggggcggtgcgcaatagaccttttatctttgaggggttttttaaatttatactctatcccagaaaaatggctatctctttttttgagaaatttatacctcacaaaagcgc

SEQ ID NO: 35830 - DNA, 1206 bp, Heterodera glycines
tttagagttttaccatgtcctttatctcacgttctcccacacttcgcttccttctcaaaaagcattagcatgattatgcatcgtgaatattttaattcatgtttcattgaatatttgaatggaatggaaaaaagatttaaatttaaaatcttttttctcccttttttatcaaaaagacctgttaaaatattttattttatcaaaaaataatttaaaaaaataaaaatataataaaattaactcggttttaaatttttcattctttataaattcaatacattaataagtttaattaattaagatgatgagaattttatagtcgatttgtgcaatttagaggttttgcgcgtagaaaggattcaagattgagtgagcttaagctttaagaacatgaacgaacagaatgcaaaaaatttggaaatccctaaaaaggccctaaaaacccgtcttgggcttggagaaagggcactccttcacactttagcgcttctaataagctattaatcatgttcctagcttaaatttatattgagttatgctccggagtggttcaaaaatttcaaaaaatatttgccttcacaattaggggggatacgcagggattctgaggggttgttgagtaattataaagaattttttacactggaaatacttaaaatatgttgttattacgccctgcgttcattttggcattacttgtcaaatactgaccaagatacttgatgtaaaatcgtatccagaatccgaaaaaaaattttttagaaagaataaaaataatacatcagaaattcataaaacaatgtaaaacgatgtttgacgtttaaattactgatataactttaatactcaccaagatactacatgtgtatgtgaaacagtcaacttttgaataactcaggaacaactaatgaacgacttctggacaactcctatacaactcctgcactcttcttgctcaaattaaaaaatttataaataatttgggtggatacgaagggaaaagggaattttattgtaataaattaaaaaaaaattttacattggaaatactttaaataaggtattattaagccctatgttcattgcgacattacatgtccattactgaccaagagacttgatgcggaatcgtacccagaattcgaagaaattctgtttttaaaaattatgctgaggaataaaagtaatacaccagaaattcttaaa

SEQ ID NO: 35831 - DNA, 1201 bp, Heterodera glycines
  unsure (1)..(1201): unsure at all n locations
ggggaatccctgcacggcacgggacgcatccgtgtggagcagtacgtcaagcgcttgcgaggtccaatgcgcttcttcctacaaaaagtaatcagtgcatcaatttgtactgtaaataagtgggtgtttgtgctccccccccccccccgatttttaaaattaaatgatcttgattggtcttccaccnccctccccctcctcgggttccgatgcggaacagacaaaacgtcgtcgacgggtcaaagcgtcgccgcaaaaaaagagaaaaatcacataatcttttgtttttttctaggagttcagcaattttcttttcagtagcagataggtttcagaaaaactctttaaaacaaaagaaatttaaaaaaaaatttaaatttttcttgaaaatttgaagtttattttttttttgcggcgacattttgtccaggtccaggcgatttgggcggtgatgtttgggagtacatcgattccgacgacccaccggtcaacaaatcggctacaacagcgcgtcgcccggcggcaatttgggcacgtgcgcgtgacgcgtcgcgaatcgctgcacaccgttgttggctgcgagcaaacattcgccacactcgctcgtcacggagcagttcggcggagtcattgttactgctgttgcctcttgtgttgttggcgtctcgttctaatgccacaaaatacctgaataattaaaaacatacttcaacttttaaaagggttttggacaagcgaccaaaaaagtttcaacttttaaaagggttttttggacaagcgaccctctgtataattcgaattctgaaacgaaaaaagcccgctttacgtgccagtttgggtgatgatgttggttcagtgccgccggctgttccgttataatttgtttgtgttgattgttcaccaccggcgccgttattgacggtgtcacagccgctgccgtagctgtcggtgccatggccaatgccgtttctgcttctgatgacaacgggacagacgcaccattgacgctcgacggtgatgactggcattgttgcagttgttccgacagtccgccccctccgttggccacaaccacgcgccggaagtccaccaaatggttgaactgctccaacagctgtctgtacgcgttggtagtgaacatacggcgctcgcgttcctttgcgcacgcgcgcctcaacagctcgttctcgtgacgcatctg

SEQ ID NO: 35832 - DNA, 578 bp, Heterodera glycines
cgccgggggattggacaggagcggatattgttgagtcttttgtcccctccgttttcaccatgttcttcagtttcagcttatgtcgaattgggtttcaccagcaatcggggaccccctactgtttcattgtcttccaattcatttactctctccgttttgctaaatctctcccccactattccattgtctgtcaatttggcaaatctctctcccctgtcactgtttctctgtcattctctttaatcgctggccgcacactctttttcagtcaaaatatctttctttttttttctatgtctccaaatgtttcagtcgccactgatcaatgtcacgcactgatcagaatgaaattcgaatcgcaatgatacaaaataaaaagaaaatttatgccgctgctaaaaaattttaattttacatgcaacataattctcggatttttaataatttttatattttttatttatgatgcaaacaaataaaataattggcataaaaacaatgatgtattgtataaaacttgcaagcaataaaatccaagagcgtaggcagcgggcagcgggggggggggggatgtaccc

SEQ ID NO: 35833 - DNA, 1220 bp, Heterodera glycines
  unsure (1)..(1220): unsure at all n locations
gagagattttatcgattttagtgcgctaggttcgatgaaactttntaaaatataagcctaaactttttggcctgtttaaaaaggaattaaaaatttttaaaatatntattcatctcccttttgatagaaaaagcatcagagagccttaattaacctgtaaataaagttttgtgtgtttcagagcactttctgaaaaaatacttatgaattaattttgcaaaaaataaataattaatgaaaaagtcagaatttcgaaaaattttaaaagcaacaagcgttggcattttttcaagttaagttagtcctttacaatggagaaggcctgcaacatttggagagattttatcgattttagtgcgctaggttcgatgaaactttttaaaatataagcctaaatagggaagctattcccgaaggattcggtctccccataaatctgggcgcatcggttcggggggactgccccgaaaacaaaaaaatcgattttttcaagtgtccgtttggggtactcaaacaattatggggagcaaaaatccaacgcagaattaaagtattaaaaatttttagattttttattcatctccctttttgatattgaaagcatctgagtgcctaaaataacttgtaaataaaatttgatgcgttttagagcagtttctgaaaaaatatttatgaattaattttgctaaaaaaataaaatagtgaagctttaaaaattaataaaaaattttaaattcagaattactggagttagcatcatagcagttaaaaattttttgatttttattcatctccctttttgatagtgaaagcatctgagtgcctaaaataacttgcaaataaaatttggtgcgtttcagagcagtttctgaaaaaatatttatgaattaattttgctaaaaaaataaaatagtgaagctttaaaaattaataaaaaattttaaattcagaattactggagttagcatcatagcagtgcttttccttgtctttttgatgctctcgcaaaatctggttcgcttctgaccagtttataaaaaaaaagttaagcctaaaatttttcgcatatttaaaaagcaattaaaaatttttagattttttattcatctccctttttgatagtgaaagcatctgagtgcctaaaataacttgcaaataaaatttggtgcgtttcagagcagtttctgaaaaaaatatttatgaattaattatgcaaaaaa

SEQ ID NO: 35834 - DNA, 775 bp, Heterodera glycines
tttaaaagaattaaatttaataaaaaatggtatttttctttattatttttgctttgatctatcattgggtcgaaatgttttttttggggcattgaattatcttcaattcgttccatcattactcatccatcagcttcgttcttcaccagcagcagattaatgccataaaatcaacatcgtcactaaacattttaattaaaataataaatttattttgtttaaaaatttatttttatgtaagaattgttggcatttaatgcaaaaatgatttttcgcctgtcctaattattattttatttttttataattttttttcatttaattcttcaaattctatccttttttgccgaaatattttttagtttttttccccattaccaaaaagcagcaacaaattgctgctgatccaggtgaaggcggaaacagggccaagcttctcggctttgctgctgctgctgttactgtgatgactgtgcgacttgtaaatgctgttcatctgctcctcagactgatcaaggttgatcaactgatcaaagctgttgcacactttgccgtcgaccaactcgtcacaatggcgacagttaaacaaattcccacccgattcccggcagaatgtgtagaacactgtcgggcactttttctcattatctcgtgcgcatccattaacgcggaaaatgtctttaccatttccttaaaataagatgaaaacttaattaattacatttgtttttcagcaccatcctcgaaattattggaaatttaaaatttaaatatt

SEQ ID NO: 35835 - DNA, 1258 bp, Heterodera glycines
agcgactgttgaagtcaccgctgaaaatgaccgtttttcctccgaagaggagatccttgtgctggcgaattgccatctctttgcacactcggtcgatgacctcaatcaccgtgttgtgaagcatggtgatctcatcaatgatgatgagttgggcctcacgaatccgacgggcaaagaagctctccagcggaatgcttgggagtttgtctaatgacacttctctacccagacgaaacgtggaatgggctgttttcccatatggcagcaaaatggctgcacacccagtggatgccgtagcaagcactttgtaggtgtatggggcctttcgcaagcgcctaataatttggccaaacaggaatgtctttcctgtgcctccatcgccgtatatgaagaaacggcgggggacagtcgaatccctagggttcgactgtattgccaacaaaacagcatcaaagaccttctgttggtcgctgttaagtggcggaggggtatttggctgtggacgaggatttggttgccctggaggcaaattcaaatcatcatcgccaaagaaaaactcttcaattgccgcgtcagtatttttggcaattgaagttggcgggtctggcaggctaaaatgcacacagcttaagttaaagcagctgtgcagccgccaatcaatgtcggctagggcttcaagctctgctactttatgctgtgccagagtaataatgccttgcggattgtacatttggtctttgtacttgttccacaattctatggcattactcggctggccatagaccaggatgctcacaaaaagccatctcatctgatctggccagcgcgacagagctgcctccgccagagttttgtcccaaattttgtcgtcttcaagaagaccatgcattattgcagcctcagtgaatgaggtacaaagcaacccattaaccatcttaagatggtctgggtctccaggaaagtgacgcataagtgaatagagcgcgaacctttccgggtccgatgggggtacaggaacaattcgaccgattggtggtctctttgttaggttatatttccttttgttccatttgtcctttgcccatataaaatgctcagggactttttcaaaaagcatgtccttgagcttcggatcatgcttccattcattttgccattgtttccaataggcagaacattgcgtctctggcagttcgccttgctgaatttgttgagctttgctcaccagatggaaagccctgtacacaatcggttgttg

SEQ ID NO: 35836 - DNA, 843 bp, Heterodera glycines
attgacaaagacttcgtccgcaacttgctggtaagacctttttttcgttcagatagttcttccagtaagtgctttgcaccatattctccagcacgagagtgttcagattcatcgtttgcacattaccccaaaccggcaaaatgttgttcttcttcgttattttctgaaaggcattgtttctttcgtaagtcctaatccaacaacttggatgtcgggaatgctcgtatctgttgcatcgtcctcgtagaagacttcgcttcccgcattaaatcccattacatctttgaacgtactcgcttcttgaatgtccattgagaacgtttatcttatttctaaaccactttaactaatttaaatattctatgcttattattagttttaaggtcataaacacacgactcccgggattttggaatggttaatcagcgatcacgaatcaaaggccgagctcaatcaattccgaacaaggaatgggcgaaaccctcttcatactgattcacgttccttattgaacaaaacattatatttttatgacttttaaatattatttttattttaaaaacaaagccaaaatatttaatttggaattaaattacggactaaaattttttgaaaacaaaacggcccctcctttggttttcggggggccataactttaaaattcgggaaggatttcggaatttggttgagagtgaagtcagaatcgttatccgcaattatgaaaatctctgtaaacgaataaaaaaaatgttgcaaaccaaaaaatgggttaataaaattaatgtttttgggatatttaaatgtaaaagtgccaaaattttgctaatagacgaattgtttcat

SEQ ID NO: 35837 - DNA, 76 bp, Heterodera glycines
ttcctacacgaatgttatgttgattaattatttgttgacctgctgaaaaatgggaatatttcgttggcacataaaa

SEQ ID NO: 35838 - DNA, 1189 bp, Heterodera glycines
  unsure (1)..(1189): unsure at all n locations
ccgcttggtcgagtaaaaagaatatatatttaaattaacctcctcataaaaattaattttgattaaacaaaatattaattactttgactttgaaaatttaatgttgatttagtataatattaattaatttttataatttaattttgatttaccaaactattaattaattattaataattttttgatttacaaaaaattaactaatttatttagcatctgtttcataccaattgcatccaaatatggtaagatctaaagaatatacggtatgttcatcccattttaaggttgaagggctacaataattcttgtccatttnnngcgtacaaaatattcactgaatatgaagacggaaannggtagagaatttcaaaatannaatatatattttaacatttaaatataatattaataaaatagaaaattttcattttacaaattnnnaaaatcttccttnannntgactgataccngacagcatgattatgccacttttgtccaactgaaatggttaaaaataaatgcaatcagaaaaagtttggcattacttgttagaaaacctttgaaaaaaactcctgtgattttacacttatttttaaaaaccggttttttgtaatccaaaccaaaaaatttcttttgaattttttccgaaaaggggcggggaaaaaaataaaaaattctggattttttatcgggttttttttaaacgcgggtttcccccgaaaaaacaaaaaaaaccagcccccccccccgggggccctaaaaaaaataaaaattttgggccttttggaaaaaaaaataaaaaaaatttttttttttttttttttgagaaaatttttaaaaaaaaaatatttcccggggaaaaaaaataaaaaaaaaaaaaaaaaaacattttttgtggtgaaaaaaaaaaaaatcttttttttttttttttaggggggggggggaaaaaaaaaattttttataaaaaaaaacggggggggggggggggggggggggttttttttttttttttttttttttttttttttttttttttggggaaagaaaaaaaaaaaaaaaaaacagggggggggggggggggggtttttttgttttaaaaaaaaaaaaaaatactttaacccgggcggggggggggggaagggggggggggaatttttttttttttttttttttttttttttttttt

SEQ ID NO: 35839 - DNA, 1062 bp, Heterodera glycines
  unsure (1)..(1062): unsure at all n locations
tattaaacttaatttgtacgggtttatttttgttgtctttttagtttttgtaactcatgcgagcgattggtgagcaacatgtgggcagtataaaaggccataggagaaaattcattgttcacttcctcactcattggttttgatcaggtttcactttctcaatcattggacatcatttttctgatcagcgtttagccccatttctactgaccagggttcactctcaatcatttggtcccatttcttctgatcagtgtttatttcctcactcattgggtcccattaaaaaggcagttcaattgatcgctttctttccatttcttctgatcagtgctcatttcctcactcattttgaccaattttttctgttcaatcttcacttcagtcagatcactcactttcaattctttgttttctcttctttcccgctgatcactttcaattcctctgattttatcattttccaattatttggcccaatttcagtccgttccttccgctcactttcaatttcaaaatgttctccgtccgcttcttcgctttccttctgctgctggccgtcctttgtttttccctcgtcgagtgcggtctcatcggtatttcgactgtttttgcggattaataatatccaaaattcgtccaaatccgtttaggcattggtgccactcccattgaagccgcttggtgcggcgtcgtcggccaagagtccacccattgcccgggaggtgcccttcacggcggatttcccgccgtcggcggaacatacggatttggccgatagaaagcggcgcatttggatacggtaaatcatttagtaaatcgtttaaatgtattgaaatataaatttaaggattcttttggactactgacaaatcgctgatgagagtgaaataaataagttgaaataattgaataaatttggatagaatatcaagcttttcactcaaaattgttcatttatttgtggtttcattacttaaaatnatataattgtcagtaattcccagtgaaagttgaaaagaaaagagatttgtatgangtgatcggtcagcaatcaatttt

SEQ ID NO: 35840 - DNA, 721 bp, Heterodera glycines
  unsure (1)..(721): unsure at all n locations
ttttttttttcaaatttaggggcggggaacgtaatgcactcgtaaaaccattggtactacaatttgtttacncaattaaaaaaaaataaggacaatgagtggtggctacgccgttagtttcctgcttgacagagacataaatacgtcccaaaaaattatctgtcaaattttttcccttttttggtataggcaaaaatgttcgaatcacaattttgcatgggcatagtaaaataatttaaacaatttaaatttttgaaaaacgaaccgaacattgacatccgactcaattagcgcggaacagacttcctgaaaaaatggaggtaatatactttcagtttcaacaaaaaaaaacgtttaaattttttatattgtctccctgtccatggaacggagtgttttttatgaaaaactaaagaatttacgctaaatttatacaaattttgttgatttgaaagaaaaaacaggagaatgaagcgattaaaagagaaattttttgactcggctaaccccaaaggggtaaattttcaaaaaatccaccaaaattggatgaaattaattttgatttccagcggttagcaagcccaaggcctggaatgtgcaggtctcttaaactttggccagtccatccaaccttaagcatagcgttgagttcgtcctcattgatgaccgtcgcttggccaagtttgccaatggcattccgaattcgcctgcccaagtcggc

SEQ ID NO: 35841 - DNA, 926 bp, Heterodera glycines
atttttccaaaacaacggcgcagagaaacaaatttccagaacaattagtatcggcgtaattattctgagaatgcggttggaattcctattactgttgagcagaaaaagagatagccaattttccaaatttttcccaaacaaacgcgccgagaaacaaattccagaacaattagtatcggcgtaattattctgagaatgcagttggaattcctattactgttgagcagaaaaagagatagccaattttccaaatttttcacaaacaaacgcgcagagaaacaaattccagaacaattagtatcggcgtaattattctgagaatgcggttggaattcctattactgttgagcagaaaaagagatagccaattttccaaatttttccaaaacaaacgcgcagagaaacaaattccagaacaattagtatcggcgtaattattctgagaatgcggttggaattcctataactgttgagcagaaaatgagatatccaattttccaaatttttccaaaacaaacgcgcagagaaacaaattccagaacaattagtatcggcgtaattattctgagaatgcggttggaattcctattactgttgagcagaaaaagagatagccaattttctaaatttttcccaaacaaacgcgccgagaaacaaattccagaacaattagtatcggcgtaattattctgagaatgcggttggaattcctattactgttgagcagaaaaagagatagccaattttctaaatttttcccaaacaaacgcgcagagaaacaaattccagaacaattagtatcggcgtaattattctgagaatgcagttggaattcctattactgttgagcagaaaaagagatagccaattttccaaatttttcccaaacaaacgcgcagagaaacaaattccagaacaattagtat

SEQ ID NO: 35842 - DNA, 1093 bp, Heterodera glycines
gaactttttggtgatggattgcgtctctctgatgaaggaaaaggccatgaaagggatagggtggggaaaggttggaaggtgcaaattttggggtccgaaattccctccccgcggcggaaaattacctaattcattacgctcaattgacctgctgcacatttaaatcaattaattggtaatgaggaaaaactgaagttatgagaggaattgggctgaattttaattgggaaaagtggaaaaattctttattaaaaaggagagaattcgctccgtttgccccccccacgaattttccatttgtttgcttttcgatttgaattgtctgtttggtttgtgacagatttgcataattataatgtgtttgccaatttttcgatgatctgtcccttccggcgcaaagagtgcaaacgaatggcacaaatcatttgacagaaaaagccaaatgagtcccgggtttaatggtaccaaaatttctaaaaggcaatatattcgtttcttttttatgttgcaaaatgatcgataattgatgaaagatgcgttatgtaagagatgaatgaatatgataaaaatttatggggttcatcgcaaaatgaattttacagcgaaagaaccgctgagatttattaaataaatcgaaaaaaagaaaagtgactaaaacagttaaaagggacgaacattaaaacatggaagaaaaagcagaaaataggaggaggagaaggagcatcaacaaagaccagcaagaaagggaagaaaaggttggattatgacagacagaactttggatgaataatcacgacgaatgctgatgatgggaggatgaatatgaatgggatggaggatgatggatgggatggaaaaaggaggaagatgaacgaactgatggatggaagagagggagggaatcagaagaaaaacacggactaatggggagaagagaaagcaccaagaagagggaggaaaagggaaaaggagaaaaggaagagggaggaaaagaaaagagggaagaaggaaaggaaagggaggaaggagaggaggaggagaagcactgaacagagaaaaagagaagaaaaagaagcattcgatgattcccccc

SEQ ID NO: 35843 - DNA, 857 bp, Heterodera glycines
cgcgcgtacaatcgcacgcacttcctcacaataatccccttcactttcaattcgcgcgtaatccttcccgtgcaactgcctattgcccgatcgtatgatgatcatcgccatttacaaccgaccatttcccttcccttccctttcccttttcacttcattaatccgtccatttcatcccaatttgtattaaataacaataactcttttcttccattgccaatttagtgcctttgtcttcctttgcgttctttcattctctgctttttcttttgccaatgccatcgttacgtcgttttttgctccgttcgctgatcatttggccctcctttggccccatcccttcgcttttcctcctctcctccatttgcccctttcctttcccctcacttatttctttttcggcatcttcgccaaacgaacatcgcttacggccaataattttgggtcagttctttcgaccataaattgaccaaatgctcaaattatgcaatttgaaagaggcggcaaattggaaaagaaataatgcgagtcggggaaaatggcaaaaaaagaggggggattaaagaacagcacagagaacagtatcagaagaagaagcagaagaagaagcagagatatgcttatgatatggccaacgcgagggtaaaagccaaaattggctatttccgccatacgaaaacgacaaatgttgagaattggcgaaatatccaacattcaaacagagatggaaaggtcgagagtacacagaagtgacagaagacagacagctgacttaatgaattaattaatgattgaatgaccagcagatgaacgaagggcgggggaggggaaaaagggaaagaagggggggggggggg

SEQ ID NO: 35844 - DNA, 1065 bp, Heterodera glycines
ggggaagaaaattggaaatttcgatcatttatagacagtttttctctgaaaattagccaatttataggtaaaattttgaaaaattttatgggaatctaatccaattcttaggggtgtaaaagtcgcttttcgcgccaaaaagcgaaatgcgaaaagcgaaatgcgaaacgccaaaaaatgcgaataatgcgaaaggcgaaatgcgaaaagcgaaacctcggcccatccctggtgtgtatgtcacattttgaatggattattttttgaagcgaaaacattttccaaaataaaaaaaaaagaaaatgcttgctgaaaacttaaacaaaccgacataataatgtttaagaaattgtttatttctttttgatttgttttaaaagcaaataaaatttttgcttatttttaatattaaatgaatttatattaattcatttttaatacgaattctataaaatatgcttttaaggaaaaagagcgagagcgatacaaagagagaaagctagcgaagagagtgagagagaaagtgaaacgagtaagagagagaaaagaaagagagaaaataatagagagagaagagaagagagagataatagagaagagcaaagagaagagagagaaaagagaagaggaaagagagagagagaaagagagagaaaataatagagctagaaaagagagagagagataaaagaagagcaaagagaagaaagagaaaatggaagaggaaagagagagagagggagagaaagagatgtaaagaaagggagagagagaaagaaagaaagaggaaagtgagagagaaagaaagagaagagagggagaggaagggaggaagaaagagaagagagagggagagagaaaagaggaaagagatagagagggagagaaagagatgtaaagaaagagagagagaaagaaagaggaaagtgagagagaaagaaagagaagagagggagaggaagggaagacgaaagagaagagagagggagatagaaaagagaagggaaaaaagagagagagaaaaaaagagagaaagagagagagaaaaaaagagaaagagagaga

SEQ ID NO: 35845 - DNA, 446 bp, Heterodera glycines
tgttcttctccccccccccccggcgatcgtcatttccagcagccatccgttgatcgcaatcgccaaccaaagcaacgaatgagcggtcaattccaatgaaacggcggcgggagataatcagtcgatctaaatcgcttatgtcccaaaaatttgcaaaataggaacaaaagtggaaggaatgtgcggaggaaagaagagaagaaggtggagcagtacaacagcactgaagcatccatttcaaagtccggtgagaatttggtgaaaaaactgagtgggggtaaatgttattgtaaaccctaattagagaaaatgaaccattgatcacttcaccaacagacggctaacaccctattgcccattgggtcgagtttaagcaagttcgggaattgaccacccccccccccgttagctcatcctcccaactcccccccatccttccctttccg

SEQ ID NO: 35846 - DNA, 364 bp, Heterodera glycines
ttatcccctctttcctctccctccgcctttctctttttatttccccccctctctctctctctcattcattgcctcgggctgagtgggaatgagatttgagaggagtttgagattttatttgaggtgcctctgctcgggtgttggtggtcggtggatgggtttgagcggttggccataacttcttccgctctccgtcccatcattccgtcgacagcggtgccattccctccccccctttccccctcccccttttcccccgtctcttccctccctcacatataaaccttgtcgaccctctggttttgactggcgtatccgcccgccgccgttgttatccttttcattcatattctaaatagttttt

SEQ ID NO: 35847 - DNA, 838 bp, Heterodera glycines
ttatgagtgaaggtccaagtgcatgttgataaacaatctcaaagccaaatgaaaactttttgtagttttcgtcagtgtcaatcatcgtgtttctgtcacttatattttgatatctttttgtaacccttaacaattataattggcaccaagtcattaagacatattttcatttagttgcattttggcgaacaaaagaaatctagaaaaatatttttaacagaggaaattagagttccgaaaaaataaaataaattatattttattgacagaaatgttcgaaattatcttgtctctttttatttattggtctctactttttttccaacaaatcccggatgaaagtaattaatttaaaattattataaaataatttaataatattttaacattattaagacattgattaccctgatcagttggaccttcgtttcacaaaaacgggacagctccgaataccaactaccaaagaccaaggtaaataataaaattatgtaataaataaagagaaatattcactttaagattaattttaaaaaacaattaatataaattggcaaattttctttgcttttccgaataaaaaattaaattatagacaattgcgggtgctgctgggccatctcgtcgactacagttttttcgacggcggtattcgatgcacggattgggcaaaaagatcgattgttgaatttctccgagcaatacttggtcgattgtataagtgagaaaaaaaagcatttgagtggttgccaaggagtgcccattgccgactcttttgagtaaatctttgtttttttaataaaaaaattttaaacaaattttatcggtgctaaggacg

SEQ ID NO: 35848 - DNA, 985 bp, Heterodera glycines
tttttcagaaactgctctgaaacgcaccaaatgttaatcccccgttaaataaggctctccgatgctttttctatcaaaagggagatgaataaaatttttaaaaatttttaattcctttttaaacaggccaaaaagtttaggcttatattttaaaaagtttcatcgaacctagcgcactaaaatcgatataatctctccaaattttgcaggccttctccattgtaaaggactaacttaacctgaaaaaatgccaacgcttgttgtttttaaaatttttcgaaattctgactttttcattaattatttattttttgcaaaattaattcataagtattttttcagaaagtgctctgaaacacacaaaactttatttacaggttagtttaggcactctgatgctttttctatcaaaaagggagatgaataaaatttttaattcctttttaaacaggccaaaaagtttaggcttaacttttttttcagaaactgatcagaagcgcaccaaactttgcagggatactgaaaggaagagtaataacctattttaaatattatctagtcagttcatttaaataatttttatccaaaaaaatttttttttgggttttcggggcagtccccccgaaccgatgcgcccagatttatggggagaccgaatccttccggaatagcttccctatagcctgtactttaattctgcgttggatttttgctccccataattgtttgagtaccccaaacggacacttgaaaaaatcgatttttttgttttcggggcgtccccccgaaccgatgcgcccagatttatggggagaccgaatccttcgggaatagcttccctatagcctgtactttaattctgcgttggatttttgctccccataattgtttgagtaccccaacggacacttgaaaaatcgattttttggttcttaaatatttttttcagaagcgctctaaagcgcaccaaatttattttacactt

SEQ ID NO: 35849 - DNA, 73 bp, Heterodera glycines
aaaaaacgggagtcccggtcccgggtttagcccattccttaaccatgatatttggaacaaaaattatattaag

SEQ ID NO: 35850 - DNA, 1143 bp, Heterodera glycines
  unsure (1)..(1143): unsure at all n locations
atttcgaaaattttcaaaatttttcgagctaggcctaaaaancgttttcgggtttttgaatttaggaatttntaacgaatttcccagagaaacggagaccacttccaaaacatagtttttcgagctctatcgactggtatttttttcggaaaaatttcgattttttcccggaaatagaaaaaatttttggcctgagcgggacatttgagtcccgggcccataactcgtcaggggttggttttatcaaaaaaacgccttagggcaaaattgtagagctttttaagctctatcgaatggtgtgccatatggccggaaattttcaaaatttttcgagctaggccccctagaaattttcggaaattttttttcggacgaaaatgggggtgaaaaatatttttctggggtaaaataaggtgctgagtacgaatatgatgtctattttaagtttcataatttttggaattttttaaaaattctttattttttggcaattttttggcctcgggattttggcctaatatttgaaaattcataacaaatcgaagggttgatcaattttacaggaataaagccttaaaaatagagaaaaatcaggagaattttatgggatttatttgggatttctatcttaaaaagaaaacaagttattccagaatttctgaaaattttcgatttttcagaaaaaaattcatgcattttacgttatttttaatgattttaataatttaaaatattttattgagttaataaataaaaaattatatttaaattaatttttttttgatgaataaattttataagtttaaattaatttttttttaattgatagaatttcatgtatttttttaattaaatttgttaaaaaatattttcattttaatttaatgaatttactaatcactgttgtatcaatttatatttaaagatttgttgtaaattaataataaaagaatttatgtaaaaaataataattatcttttaataaagaatttcatattttttttaattgtttataaaaattaatttcatattaatttaaatattcaattattgtacatttcaaaattctctttttaattaataaaaggaataattaatttattttttaaaatttataataaattgcattcaatttttgtacct

SEQ ID NO: 35851 - DNA, 825 bp, Heterodera glycines
tattttaattttattttctaaaaattccttcccaacatccctccttttggtgctcattaaatgatagtgcagccaaatcggcatttatgccgaactttgcaaatgattattttacctttttggtacttattttaattttattttctaaaaattccttcccaacatctcttttttggtgctcattaaatgatagtgcagccaaatcggcatttatgccgaactttgcaaatgattattttacctttttggcacttattttaattttattttctaaaaattccttcccaacatctcttttttggtgctcattaaatgatagtgcagccaaatcggcatttatgccgaactttgcaaatgattattttaccttttggcacttattttaatttttcgagggtaaaataggtctttttctgataaaattagttttataaatttaagattcagttgagaactcgaaatccaataacgaattttttccaatttgtttactttcggcatttgaagaaataaaaaattttgtaatgttgtaagcaatggaaaaaaagtgatttttatggggtgtatttttcaattttttgtatcttcctagatttttctctaaaatgccaaactttggagaggaaatagatgagaggaccaactaaaagaattttttaatcctttttctgtaaatagaccaaattttattctatcatataaaatattaaaaaatattaacaaaattattaatgttaaaaatgtttaaaaatattttggataggaaaaagaacaaagcaattattttgcagggtgggggaattgactttagaaaagaaaaaagga

SEQ ID NO: 35852 - DNA, 837 bp, Heterodera glycines
ttttatttttgagggaatttttaaatttatactctatcccagaaaaatggctatctctttttttgagaaattttatacacatacaaatgctctcgagcatgatagggagggcggtgcgcaatagaccttttatttttgagggaatttttaaatttatactctatcccagaaaaatggctatctctttttttgagaaattttatacctcacaaaagcgcttgcgtatgagacggagggctgtgcacaatcgccattttatttcacagaggatttttatatttagaggttatcccagaaaaatggctatctctttttttgataaattttatacacatacaaatgctctcgagcatgatagggagggcggtgcgcaatagaccttttatttttgagggaatttttaaatttatactctatcccagaaaaatgtctatctctttttttgagaaattttatacctcacaaaagcgcttgcgtatgagacggagggctgtgcacaatcgccattttatttcacagaggatttttatatttagaggttatcccagaaaaatggctatctctttttttgataaattttatacacatacaaatgctctcgagcatgatagggagggcggtgcgcaatagaccttttatttttgagggaatttttaaatttatactctatcccagaaaaatggctatctctttttttgataaattttatacacatacaaatgctctcgagcatgatagggagggcgggcgcaatagaccttttatttttgagggaatttttaaatttatactctatcccagaaaaatgtctatctctttttttgagaaattttatac

SEQ ID NO: 35853 - DNA, 941 bp, Heterodera glycines
  unsure (1)..(941): unsure at all n locations
tatgatcaataatttttntgtttgaaaattttattatttcttcacatttttttgtgatcaaatgatcgggtacagtcacttttaatcgcttatttaaagctatttatgcgatcagtgattgaaaaaacttagttttgaaccagattttggacaaaggcgcaaatgtcgggccgcaaatgtcgggacacggtttcaaagaggaataaatttaaaaaatacaaaggaatgcaaattttcaatttgaaaattgctaaaaatgttttttcctttatattaattttggtatatatttttttgttgaataagtgccaaacatggagggcactaatcactttccgtcaaaatgatttaaaatttgagaaaccatccaaatctgcttatgttcttggccgtttggctaattttccgtgtttttctttgtttttttgtccccattctttttctatcattctcatcttttccgtgcaggtcaaatgcgtttatggttgttgtgccgactgctgacaaaataaaaaggctgagactcatccgtgccaatgcgactggtcctcccccactcagtgtttacatgctttcatttgattccctctcccaaatgtcctttcgtcggaatttgccaaaaacgatggcgtttctcgagaatgaaatgaaatctgttgtttttaatggtattttttaaaatagtccaatcaagctacagtttttcttccaggttataatattgtcggcgatggcacaccacaggcatttattccaattttgacggcacaaacggaggaggaattggttagggcattttgtcttcttttaataatttgatcattcaaaagcatttagccgttgacgaggaaacgttatcgaagtgccagtttngttgacgaagttaccctttcgcgtggcgtatttttcccgcgccgctatgccacatgtatggcgagacg

SEQ ID NO: 35854 - DNA, 876 bp, Heterodera glycines
agtggggccgaaggcccccgtacggttgagtcttagtcattgaaatgctggtgggttgagtcccagtgattgaaatgttggtgggttgagtgccagtgattgaaatgcaggagaattgagtcccagtgattggaatgctggtgggttgagtgccagtgattgaaatgcaggagaattgagtcccagtgattggaatgctggtgggttgagtcccagtgattggaatgctggtgggttgagtccgagtgattggaatgctggtggattgagtgccagtgattgaaatgcaggagaattgagtcccagtgattggaatgctggtgggttgagtcccagtgattgaaatgttggtgggttgagtgccagtgattgaaatgcaggagaattgagtcccagtaattggaatgctggtgggttgagtcccagtgattgaaatgctggtggtttgagtgccagtgattgaaatgcaggagaattgagtcccagtgattgaaatgctggtgggttcagtcctggtgattggaatgcagtcccagtgattggaatgttggtggattgagtgccagtgattgaaatgctggtagttcagtcctggtcattcgaatgctggtgggttgagtgccagtgattggaatgctggtgggttgagtcccagtgattgaaatgcaggagaattgagtcccagtgattggaatgctggtgggttgagtcccagtgattgaaatgctggtgggttgagtcccggcgattggagaaaaaaccaagaaaaggatgcgaggccgcgaagcggccgagccagtcgattttatcattcataatcctataatacaatcgtactacctagacggggggatgcgcccgagggcgctgaacccg

SEQ ID NO: 35855 - DNA, 1330 bp, Heterodera glycines
  unsure (1)..(1330): unsure at all n locations
agtgacatcaaattcagatttttttattttcttcgcctccccccgatggtttttatataacgactcagcaccgtatgaaggggtacctaattgtaccagtggtacccccttcgccctttttgaaaaaaaaaaaattaaaaaatcgcgagatacacgcattttaattgattggtaaaaagcctcataattcaaatccagcattttttgacataacaatggctttatctatatacacggaaacgttgaaaagcataatgcttcaaaaaaaaatgtctaaagccgagttcgggatcagcaaccacgaaaaccatcgtaagcatgtattcatgatttttgaaaagaaaaaaaattttttttcgaaagatgtcgaggtggacaaagtctagaaaatcaaacttttcgaaaaatgaattccgacccgaattggattttcgaattttaatcggaaaatcgggtccgatattcggaattggatcgaaatggatatcagtgaattttccatccctgcaaaaccccgaaattgactttgttacccaacctgcgcgtttggctccaacgcggtggccaagttggccaattgggcagcgaccgctgcggagtgcgccgccacccgcccgtccgtgtcgtccgccggccccgccagtgagccacgcgcgcacagcaacgccccgttgctgtccgtgcacagcacgccgcgcactgcccgttcctgctgcatactgtaactgtgggggcggaatttcaaatttaaaagaagggttgggtgaacaaatttttgtaaaattttcagaaagcaaaattgaaattttgatgaaggcctttttgaaaaaagcaaggcctggatttacgatggaactggatacctaagtcggggttgcgggcattattttggttatacaaccttttgcgaatttcattttattggttttaaccgggcttatacaatgtacataaaacccctgagttttcaaatttgtatggggggggggggtcggcattggttgaaattgatgtcggttttgcaatggcaacttctaaaagcccagggaaatggcaacattagaccaatctaatttttaaaaattcaaatgagcgtaaaaatcaaaaagtgctctcacatttcgtctgcatattcgtccatccgtttttccatgctatattataattaataacaaataatcagctaaaaaataaataaaataaattacgtaaaaaatgaaaaatgcatttaaaaaaaaagaaaagcgtaaaatgtgaacgaacaatttgctctcttcaattgataaacggacaaanatattttatattttgtaaataaaaatgcataaga

SEQ ID NO: 35856 - DNA, 1240 bp, Heterodera glycines
catctgtcggtgtttaacattatccgtatcccaccccgtcaaataattttttagtattctgtccgttattcgccgttccaatgtttccaattttggaattgccacgaataaaatgtcgaaatcgaagccagcaaaagtgaatttaagcatcattaattatccgtgactaatttttagcatttttattaaattatttcagggctcgaatttaatatttttaaggattcttatggatcttcgagcttaatagaaaatttttagcaaagaagtgtacaaaaataaattttcaaattgtgttttaaaaattttttggtaatactttggtttttacccccccccccccctccttttttgagaaaatatatttgaccagcagaaaacgaccgtaaaccaaataaatttagtttttttcgagatcgttttaatttaaacactcaaaaattccaaaaatatgtatatattcaatatttgcctaaacaaacttaaaaaattttggtaaataaatgtcccgcgtatttttgggaaatcgtttttctaattttttaaatttaaatttttgtcccttattttagtgttccacagaccgagaaataaaaaattttttgattatgaattttttttaataaattctatttatattaataaatacttagaaaatatatgtacttttcaaataatgttgtaaagattattattttttgcaaaatttaaaaattcaaaaggcgggcaaattatgtgtcattaggagtccaacaacaatggcacaaaaaatgacggcgttttcatcgcggcaaaatggcggcgggcggacgggtgatccatgccaatgcaaatgtcagttatcagagccaaatacatcatgggaatttcttttttctttgccttcattatcattatcatttgtagagattaataaagattctcttcctcttccactcctgttcctcttccccttcctttttccctctttcttttgtttgggagtgaccgttgtgaaaacagagatggacattggcattgccattggcattttctctcattttttgttccccgtcaggaggcgtcatttttggaagtaggtgtaatgcaaaatcattgcctcaacaattaggaaagtcttgtaggatcaggttttgagatatatgcaaatagaaaacaatatttttatgcaaaacaattcccaattctgtttaccatttttttgagaatgaacatgcctgctgacggttggctacatatt

SEQ ID NO: 35857 - DNA, 1595 bp, Heterodera glycines
tctgaaacgcaccaaattttatttacatgttagtttaggcactctgatgcttttactatcaaaaagggcgatgaatacaaattctaaaaatttttaattgctttttaaacgagcgaaaaactttaggcttaactttttttttataaactgatcagaagcgaaccagattttgcgagggcatcaaaaagacaaggaaaagcactgctatgatgctaactccagtaattctgaatttaaaattttttattaatttttaaagcttcactattttatttttttagcaaaattaattcataaatattttttcacaaactgctctgaaacgcaccaaattttatttacaagttattttaggcactcagatgctttcactatcaaaaagggagatgaataaaaatctaaaaatttttaattgctttttaaatatgcgaaaaattttaggcttaactttttttttataaactgatcagaagcgaaccacattttgcgagagcatcaaaaagacaaggaaaagcactgctatgatgctaactccaggaattctgaatttaaaattttttattaatttttaaagcttcactattttattttttagcaaaattaattcataaatattttttcagaaactgctctgaaacgcaccaaattttatgtacaagttattttaggcactcagatgctttcactatcaaaaagggagatgaataaaaatctaaaaatttttaataattgtttgagtaccccaaacggacacttgaaaaaatcgatttttttgttttcggggcagtccccccgaaccgatgcgcccagatttatggggaggccgaatccttcgggaatagcttccctatagcctgtactttaattctgctttggatttttgctccccataattgtttgagtaccccaaacggacacttgaaaaaatcgatttttttgttttcggggcagtccccccgaaccgatgcgcccagatttatggggagaccgaatccttcgggaatagcttccctatagcctgtactttaattctgcgttggatttttgctccccataattgtttgagtaccccaaacggacacttgaaaaaatcgattttttgttttcggggcattccccccgaaccgatgcgcccagatttatggggagaccgaatccctcgggaatagcttccctatagcctgtactttaattctgcgttggatttttgctccccataaatgtttgagtaccccaaacggacacttgaaaaaatcgatttttttgtttcataaatatttttttcagaaagtgctctaaagtgcaccaaaattttatttacaacttaattttagcactctgatgctttagtatcaaaaaggaagatggagaaaaaatttttccttatattttggttatatcgttttgcttttggtggggtgcttggaacagtggaatcatgcgcacccgtccgatctggcaagttaagcaacgattgctgactagccaaaaggttcggtgccgtgatgaaacgaaccagcactgcttaccccgcggcacccggcacggtcccccgaaggaatggatttaattaaattctctccttcggggatttt

SEQ ID NO: 35858 - DNA, 895 bp, Heterodera glycines
tccatgctgtgtagtttactataaagcaaatattcatcttccacttagttactcacctattctagcccattaaatgccatcactctttaaagatacttcgcaagaaaagcttaaataacaaaaattcgaatctgttatacaattccatgctgtgtagtttactataaagcaaatattcatccactcttaattactcacctattctagcccattaaatgccatcaccctttaaagatacttcgcaagaaaagcttaaataacaaaaaattcgaatctgttatacaattccatgctgtgtagttttctataaaacacatattcatccactcttaattactcacctattctagcccattaaatgccatcaccctttaaagatacttcgcaagaaaagcttaaataacaaaaattcgaatctgttatacaattccatgctgtgtagttttctataaagcaaatattcatccactcttaattactcacctattctagcccattaaatgccatcaccctttaaagatacttcgcaagaaaagcttaaataacaaaaaattcgaatctgttatacaattccatgctgtgtagtttactataaagcaaatattcatccactcttaattactcacctattctagcccattaaatgccatcaccctttaaagatacttcgcaagaaaagcttaaataacacaaaattcaaatctgttatacaattccatgctgtgtagttttctataaaacacatattcatccactcttaattactcacctattctagcccattaaatgccatcaccctttaaagatacttcgccagaaaagcttaaataacaaaaattcaaatctgttatacaaattccatgctgtggagtttttctataaaacaaatattcat

SEQ ID NO: 35859 - DNA, 1104 bp, Heterodera glycines
  unsure (1)..(1104): unsure at all n locations
tctagagtnnctttcaggaaccattttccccatttnncttttctgttttactcaaaccgccccgtatctgataatatatttntggtggaatggaggcccccaatataattacttgtttatatctgttttttaataacaaattcaattttaacaggcatatggcattgaactacttctttttcaacgatttgaacgaattttccaatggctaatgagcaaataaaattcattaatttaatgcatgatgaatatattaataataataaataatttgagaataaagtgtttggtggcaaaattaattgattcatattctgttacgcactcataataataataataataatgttttttttatatttgccctttatattttattctgatataaaatattgcgtatttttcttttttataaagctaaaataaattccgactttcaagtattcattaaatatagagaaaaattttttagcgcaattagtgtccatatcccgtgaaatcccatgtttttagcccgtacattacagatttgtgaactgcgaatttcagctccctaatcttttaattttttaaatattgactaaaaaattctaaagaaatcgtttaaaaaacttctttacctacaatctttaaaacttgagtatttgcttccccggtatcgcattgcatactttttaagaatacttatttcgccagtgcatgttattactagggcttatatttctagttgcaaaaaactgcaaaatagttagtttttagtttctaaaagacccaaaaaagtagttgctaaaaatgggtaaatagttgctaaaaactttcaaatttagggatgtaaaatgacaaaatttattcaaaaagtaaaaaaaattaggccaaatcagtattgagctaaatatttttaaaatcataaattcttgtcaagaaataattaataaatnaataaatattnggagattgatttttcatttgttaggggtgcatttttgaaaaatttcgggtcgattcttaaggggggggaatttttcgctttttattgcatttttcataacaaatttttattcactagtaaaaaatagttgaaaaatagttttttttcaaaaattt

SEQ ID NO: 35860 - DNA, 1017 bp, Heterodera glycines
  unsure (1)..(1017): unsure at all n locations
taatggtcgagttatccaatcaaaacaaattagcaaaaaataagcaattaatggccgataatattaaagggagagaaaagaaaagtggaggaaatgaaagtgtggtcagagaactgatcagaaagaaacgcaaagacagagaaagccaacgacactcgaagctgataaaaaggctaaatgggcagcgagcaaaaaagaaaagaaaataaagaaaaggaatgaaattgaatattgaattggcttctgttcgtcgtcctatttctttttctcttcctctttttctccttttcgccccttcttcctcttaagcttcattttcttcttcctctccttttttgtttcttttctgcctgtttctcttcctcttcttcttctgtctctttctctttttctccctcttcctcttgctcttcttcactttgctattttctttctttttcccctcccccatctcctcctcctcctcctgataatcttttcctccatctctccccctcttccatcttccattgtcttcttcncctcccttccccccccccttttcgtcatcttccagttttgcgcatcccctccatctttttaggaatttgaatttcacacaatgccaccctatggcgaggcgccggtttgagaaggcagttttataagagaaagtgatggaaggcaatgcaatggcggggggggggggagaagtgatcaaacccttcgctcattggcgccgtcggcaaaagggaaaatgacgggcaaagatccgatcagtcagaggggcgatgtgatcaatccatcgcaaattctccgactgatattccgctgaattcgtatcggagagtttggattaattggggaggcaaagtgtaggaattttgtgcaccactcggcgcataaaatcacttttcgatcgccgggaaaacgccccgccgttgggtcagaaaatcattttccgctttttcactttcatttaatttttattccattaattgtgaatttttaataaattatttataatttaaacaatta

SEQ ID NO: 35861 - DNA, 931 bp, Heterodera glycines
cctcttctttagcaaaggtatagaattccctaaatgtttctccccctgtaccgagtgaggaacggaagggagggtgcagggatggtcccaggattttgcttgaaaagggtaccaagggcgtagccaaggcggcggaggtggggctaacccctccccccccccccccccctaaagcgacaaagaaaaatacttataaatcttgctcatctttaacatttttgcttaactaattacattaatgaaaattgaaacatctctttgatatccattctcacaattcgctaagtgatctctctcattactcttatctataaatattgaaaaaatttttgcggtcctatccaatgattttttgaagaaaaaaattattgtatgtctaatgaaaaaatttattgctcacatttgtattttcttgatattatttgatagctctaatggcatttcttctggtctgcaaaattgcaaaaatttggctaagtttcataaaattatggtcaatatattctgataacctggcttcctgagtactgttgctcaaactttgtccaaacatgatcaaattttctgaaaattaccctgaagtaatagagagaacccttaggggtatcgaatgatatctagaatgtttaatttggttacttagacgaaagttatgggaagtttccgcttaccgcctttccattaaccaaacgaaaaaggcgcccacccttacactaattagcagttaaggaactcccgacaaatcccacccacaaatcataccttcctcgagcaataattcattcttctcatttctcgtcgaatttcccccgttcagcaacagtttttcacccaatacaaaaagctcccttcaccacattaattgtaaattatttttctgtgcaataaacaaaatccccaatttcttcttgctcaccctaccaagtcgaag

SEQ ID NO: 35862 - DNA, 401 bp, Heterodera glycines
cgggaccgggccgggaattcccggtcatccgaggtcccggtcccgggttttgaaaagctcaggtcccggtcccggtcccggtagggcaaccgggaaccgggaaaaacaagcactggtaagaatggggtctgagtgaaaaattagtgaagaaaattggaaaaattgaaaaaacccaattctgacaggttggttttaattttatttataatttaatatagttatgtgtatttaagtttaatagctagtgcaatatcacgcatatgtacaatattttgtttacattggcggatttaagcgattggcggttttataaaacgcgaattgttaagtggcggatttataaaacgcgactggcggttttataaaacgcgactgggtggcggtttttataaaacgctcca

SEQ ID NO: 35863 - DNA, 640 bp, Heterodera glycines
gtttgaaaacatttttttttattataaactgttcaatcttttttttttaattcaaaaaataattcattaattagatatgattaactttttattctgagatcaccaacaccaagtatgacaataggaaaatgtttcttttattggtcatgcttttatattagtcgataagttatttttaatcagacaacgtgaaaatattaaatttatttatttaattctgctagaataaaatttaatttttggattattatttaaatactaaaaaaccatataatttttagctttcctaaaattttatttacatttatttatgattttttgttatggttttttgttattactttattgaatcgataattcatacatatatataagaaaatttgtattaattataaatgcaattaattttccatgtctgcattttctcgagatattgattcatccatattgctctctttttatcgagtcaatttttatcacttaagaagaagaaacaattaaaacaattctatgaacacataagttattatattttgaatcgtatcccattactctatgatattatagagaaatttaattccatatttgttatcttggtaaatataattgaagtatgcttaggttgttataatttataaac

SEQ ID NO: 35864 - DNA, 683 bp, Heterodera glycines
  unsure (1)..(683): unsure at all n locations
atccttttttattcaattgggttattgtaaanttgtacgtcccaccacaggaaaaaaagcatgcacataatgcaaaaacatgtgacctagatgaaaagtttgtaagtcgaaaataattttcgagtttttattttttttcaaattccgttaaggaactcggaattggtcgaaatagagttaaaaccccgcaaaagtttacagacaaaaacttgtaaaaaggggtccccatttggtttttgaaaaaattaaaaatgtgttgaatactttacaaatggcgccttttgactttttgttcagttagaactagggattagaaataaattcacgataaaggaccccaaaaactaccagggatgagtttaacaaaatattatcacaaaaaaactcgcaaacaaaagggaaccgcccactttggcgcggccattttggcgcgggtattttggcgcaaggtttttttagcgcgagcttttttggcgcgggccattttggcgcggccattttggcgccctatataaaatggcttttttggcgccagagttgaaaaatctccaaaaattttcagagaatttttagcttgcttttctttttgaataattataagtcattttctttacaataagcatgctcctacaattgttagcactggtgtacaattggggaacctaacttgacttttatatttt

SEQ ID NO: 35865 - DNA, 645 bp, Heterodera glycines
taataagtagggctgggattcttaagtttttacttatttttctgcggctttaactcgacgagaaatgcacgaaaaacacattttttgttcggaaactttcgttttaacgcccctatccgaccctagaaatccctattttggatgttcgccactaaaaatccctattttgagtgttcgcccctaaaaaagtttttatccctattttggcgtttcgcccttattttcgcccctatttcgcgatttttgggaaatttattaacaaaaatgcaataaaaacgaaaaatacacccctaaaaatcgacaaaaaaatttcggaaaaatatacccctaagaatcgacctgtaaattttcaaaaaaatacactcctaagaatcgacccaaaaaatttcggaaaaatacacccctgagaatcgacccttaaatcctgaaaatttctaaatgtacttcatttctaactgtaatcagtaaataaaattgtttgacttaattttaactaatttacatagagaaaacagtaattttaataaactcacccctacatttgaaattttttcgcccctattttcgctcctatttcgcgaattttttgcccctatttaggtccctaaattggaatttttcgcccctaaaaatcccagccctagt

SEQ ID NO: 35866 - DNA, 764 bp, Heterodera glycines
tttttctcatttttttaccgcaaacttggtaccaacagttgccttctcttgtctggccctatcaaacaatcttacgatatttgaaacgcaaacaaaaaaaattcttgaccaaaaaatagctatctcttttttctcatttttttaccgcaaacttggtaccaacagttgccttctcttgtctggccctatcaaacaatcttacgatatttgaaacgcaaacaaaaaaaattcttgaccaaaaaatggctatctcttttttctcattttttttaccgcaaacttggtaccaacagttgccttctcttgtctggccctatcaaacaatcttacgatatttgaaacgcaaacaaaaaaaattcttgaccaaaaaatggctatctcttttttctcatttttttaccgcaaacttggtaccaacagttgccttctcttgtctggccctatcaaacaatcttacgatatttgaaacgcaaacaaaaaaaattcttgaccaaaaaatggctatctcttttttctcatttttttaccgcaaacttggtaccaacagttgccttctcttgtctggccatatcaaacaatcttacgatatttgaaacgcaaacaaaaaaaattcttgaccaaaaaatggctatctcttttttctcatttttttaccgcaaacttggtaccaacagttgccttctcttgtctggccctatcatacaatcttacgatatttgaaacgcaaacaaaaaaaattcttgaccaacaaatagctatctctt

SEQ ID NO: 35867 - DNA, 1126 bp, Heterodera glycines
  unsure (1)..(1126): unsure at all n locations
ggcattcccttcgccaagttccaaaagatgagcagcccattcgcagttcaaaagtagttagcccacaaatgataagcattaaggcgaacggaagtaaacccccggcactgaaaaaaaaacaaataaaggaagaaaaaaagggggtcaaacgcagcggaacattcgatggccacgcaaatgagcagaaggccgagcagtagcagacctccgatcagaaagagcagaaagccaagcacaacgatgaacttacgaacggaccaaacgcccaaataaacgggcacacaaacgccacaaaaaatgggcggtgagcgtttgtaataccacggcacatattgtgccattccgaatcgaccctaatctgacgtgtttatttgttgatctgtttggcttttgcctttgtttagggggaggggaatggcagcattgagtcagtcggtctcttctcgtcgatccgtccgttggtgaaatgattgaatgagagaggcgagagcaccgttgtctgagtcaccccccccccncccccactttctctgtttcggatattcgttcatcttctgctcctctctccttcctctccaatttggcctctttctcatttcatttcacattcttttttctttattttgttgtttccctctctctccccctctttttcttttttctcttatctctcttccattctttttcctctttcttttcctttaccctcatttcccctttctctctctctcccccatttttctagttctgatcgctttctctgcctttgccgctccctttggcttcttccgatcatttggacagggaaaggcgggctttcccctttctgaggatggtcagctgtttctttttggtccattcgattatttgactcattttaccaacaaattattattattattaaatatattttcatcaatatgtcgtattattaattatttattcacgaaaaacaacaaaaattatatgaatcaaaagaaataaaaatgggaaagggcaaagatccaaaaatgctttcaatagaaataaagtcaagaagagaacaacaaatcgtatagcaaaagtgagccggattagggagagagagagggagagagagagagagagagaagagagagagagagag

SEQ ID NO: 35868 - DNA, 968 bp, Heterodera glycines
  unsure (1)..(968): unsure at all n locations
tgggtcgatgtaccctctccgtctgctgttgtctcggcttcggtctgctttagcgctgaaaaatgcagtgttttaaaataaaattaattttggtcaattttcgtcactttttggcgtcgagccgactctgcgaccatgctcctggcgccattccttccgctttcgtcttgcttctgcagataagctgttcatttgctttgccaactcagatttgtctccggaaaagaccatttttttgtgtaaataatntaaaatatttggtatgctgaacaattttaacctatgcacagattttcttgaaattttgtataggcctatattttgaccccctttatcgaattctcttttgttttttgaaagtttcttttctaactcgagatcggctcttgcatttttacaagggaaaatctccaataaattttaagttttgcaaagttttggcgttctgattactaaataaataataaacttatttgtacttggagcccaaaattgactcgccgtgtacatcggcaccacaaacatcagatgaacaaatttcaactgctctcaaagcttattgatggaaatcatagaaaatgtcacatttttgtttttgcacttttgaatcgcccaaattttacatttttttggtgaatcgaccaaacactaaatgatcattggtattaatttgattatgggcatggctggcggcaatgagcaaattggtacattcaaattcaaaggaattggtgctgcaacaataattatttcagagaaattgtcattcttaaatgagcacggcgggaagggggttcctgcgggaaaacccgggaatttcgttcccgtcttttttacctgacgggatttttatgggaacgggtaaatgacttgagaaaacgcttggcgcccgaaaatgctgaaatgttattgtttttgctagagcccggcgggaacgggactcccgcgggatttttacgggattcccg

SEQ ID NO: 35869 - DNA, 797 bp, Heterodera glycines
  unsure (1)..(797): unsure at all n locations
ttggatttatatgtgtccaccttcttcgcatataatattttacaaaaatatatgaatataaataatgtaagagaatatcagagaaattgtgaatatttaaaagtgcaattcattgtgtttcaaaaaagatgcgctctccctattccccaaatggcatataattagaaatcattaatcagtaaaatgcctaagaatttataaagccgtattaaattataattttatttagaattaatttaaaatggataatttgctagatgttgttggacgacaaattttggaaagaatccaactaaatttatttgaacaagatgtacagtaaactcaaaaattttatatatttttaaatttttattccttcattaggttgaagcacttatcccggtctcggtagggacacctcccgcctcttttgcactgctgcgagaccgttgtctcgagcaaatgcaaaatgatgtaaattctaaaaataaaaaaataataaacaattattattattgttgttgatcttataggagacgcggctttttgaagatgccgaattcccagttgagagaattcgcctgcatttcacatgaggcgtggtgcccgtccgctggctgcggccacaccaaatttcccggcagccccagttcatcaatcagcatccgatgtctggcgatgtacgcaggggagcatgggaaattgctgggcgctggacgcggcgcggtcttggcacaatttgggcccctgttctacagggtggtgcccccgaatcagggcgtcggggaaaattatgccgntaaatttaaaattga

SEQ ID NO: 35870 - DNA, 968 bp, Heterodera glycines
agttcttagtacactccacctattattccctttcaccccaccccggattttcaaagttatgcttttgaacaaaagtgcaccccggacagtatggataggcaaaaaagctggggaaatttcaaatataaaaagaaaattatttaaaaattgttaaataacaatggaaaattgcaaaagaataaggacactgtgggtacctctgctgataatatggccaaatgagcatttattaatgtgaatttggagtgtactttttgctgccaacccaaagaaaaattgacggaacatttgggctgatgaggcgaggggatgagggcgaatcgtcgtgtgaatcgatgggcaacaaaatcgggtgacggggggggggaagaatggaagaatgaatgagtggtggtggtgttgagggatggggcgatgtattgatggaaagaatgaacaaatgggggagggacccaaaaacggggtcaaatacagctgaggaagtgttggggggggcacagaaaaggcattggacagacaaatgccaggaaaacaagcaaacaatttgaaggtaaaaatgccaaaaatagctaaaattgccaattttcagtgcaatctgttaaaaaatggtcaaaaattccaatttccccccagcggcgcttatcggtaccgccagactccaaaactttttttccttaataataactggctcaaaatcgcaaaaattagtcatttttgatgaaaatcattgcacccaaattttttaaaaatattgccggcggcgcctacgctgctatgacgttagtcaaaaaccatgaaattaaaaatattttttggtataacttttctcaaaagcaaccaaatttttatttcttgatatctttcggtagccctacaaaatttcaaaaaatttagttaagtttcaagaaagttagaccaaaaatatttcaaaaaaaacttggttttttttttgtgtttctccaggacct

SEQ ID NO: 35871 - DNA, 861 bp, Heterodera glycines
cttgaaaattcgatttttttgttttcggggccttcagcgggaaccgatgctcccagatttatggggagaccgacttcttcgggaatagcttccctatagcctgtactttaattctgcgttggatttttgctccccataattgtttgagtaccccaaacggacacttgaaaaaatcgatttttttgttttcggggcagtccccccgaaccgatgcgcccagatttatggggagaccgaatccttccggaatagcttccctatagcctgtactttaattctgcgttggatttttgctccccataattgtttgagtaccccaaacggacacttgaaaaaatcgatttttttgttttcggggcagtccccccgaaccgatgcgcccagatttatggggagaccgaatccttcgggagtagcttccctatagcctgtactttaattctgcgttggatttttgctccccataattgtttgagtaccccaaacggacacttgaaaaaatcgattttttttgttttcggggcagtccccccgaaccgatgcgcccagatttatggggagaccgaatccttcgggagtagcttccctatagcctgtactttaattctgcgttggatttttgctccccataattgtttgagtaccccaaacggacacttgaaaaaatcgatttttttgttttcggggcagtccccccgaaccgatgcgcccagatttatggggagaccgaatccttccggaatagcttccctatagcctggactttaattctgcgttggatttttgctccccataattgtttgagaaccccaacggacacttgaaaaaatcgattttttttttttcgggggaagccccccc

SEQ ID NO: 35872 - DNA, 878 bp, Heterodera glycines
ttcagccgaagcgattcaatgctgcgatcgattgcatccttctacgagaaaaatgttaaatccctcgacatttcagtggtatacgaaagcgttcaacaggtattttcggttgtttaatattgctaacttttctttgccctttcagtcgagattaaacgaaatcgatgactcacatttgtcaagtgatattcaaaatcccccctcgcgactcgagtttcagcgtacccccgaaaagtcgacgcgtagcgaaccttcggcgacttcggcagaaattagcactcacaatcagagccctttatccgaaattgtgccaactcaacagatggtacgataatttgtttactcattatctttccattgacttcagcaaccccaacctcatccaccctcgaaggaataccgtgtcaaattaatccgccccgaatattattgtaaaccatcggccgaagagttggaggagtgtttccgtgaggatggaagccttcgaattgagtgtggcctcacagttgggcgtgtggggtatggaagtgtgttttggaagggcccaattcaattggatggaccgatcgactttgatgagattgttcatttccgcaacaaagaagtggtggtttaccccgacgagaccaaacggcctgaagtcggcacgggtctgaacacagcagcggaagtgagcctggagcgagtttggcctatcgacccgaaaacaaagcagccgatcaaagtgagagttatgtgggaatctgcccactcccccccccccatttgttcattggcatgttaaaattctgcgaactaaaccttaggacgtggaagaattgcggcggctcagttttcgtgagaagttggaacgtttgtgtcaacggttggacgccgag

SEQ ID NO: 35873 - DNA, 499 bp, Heterodera glycines
aaataaggacatttaaaatttgtaagatttggaccctcaaaataaggacaaatcttacaaataaggacaaagggtaaccctgcacaagaatcagtttaaatcatttttatcctgtcctgattcaacttgaaaacccttttttcgtccagttttttttcaaaattccggcatttatatctaatgatgattaagttaatcattagccgatctctcgaattgttactgtttttttgacatttggcttgtgaaaaacaattttatttggtgtcactgtatttttttaaaacataattagctattaatgttgttgttttgttaattaatagaattcaaactgatgaaaatttaagatcatccgcaagtgttcgaacggttagcaaattggttttaattaggttcaattcatcaattaattactcacattcaaatagtcgacggaccaggacggcaaaagatgcgtaaagttggcagccaatgctccataaacgtaaatgtagaa

SEQ ID NO: 35874 - DNA, 841 bp, Heterodera glycines
gtctttttcgaatattaacaaaatgaaatattaataaattaaccttcctaggaagattatatcaatctaaaaattttgattttcactttagaaagtaattttaaaattgagctaaactattatctacatttttaaaaatacgaaaaagaatatttacgaaataaattattaatttattttatataaaaaattctataaacaataaaacctgcaattgaacaagttaaaatgatgaaattatcaattcaagtttaagttgtgtatcttaagatttttatttaccctcgaatacgatttaataattttaaatatcaaatttttaaatttttacaatcaacaatttaaaatcttgataaatattaaattaacaatataaaaaaattttgagaagcaaattaaaaatcaataatttgtaatggctgcaaaaaagtaatttcaattatctataagttttaaaatcaattgacaactcttttattagagacgcagaattcactctctaccgctcaagaagatgtgtattcaattaatgagcttttcaatagagcagctaatcatgataaaaaatcattttatggttttccatacatgctattttttaagaaaaagttaataaaaccttaaaatttaatggaaagcttccaactttgtatgcgaaacttgcactggaatactggaatatttaaatggtatggaaaaaattgtttcaaaaacttctaaaactcaattattatattttaaaagcacaaaaattcataagcaaaatcatgaaaaaattatttagttaacaaacaaaacaattattcgattgtacaaggatacttactacctttgttatcat

SEQ ID NO: 35875 - DNA, 1225 bp, Heterodera glycines
agcactaaatttattaagaaagacaaaattaatcaaattacccccctagacaaataactacaaaataaaaattggtaaattctattcgaaattgattaccaaaaatattaaaaagtataggttacttaaacaaaatttattaacagatcctaaattaaaaaataattgaaaagattatcaaaaaacaataattcattcattaattacaagctgttatcagaaatatgaggcaatcaataagtgctgcaacgagaggtaataaataatttacaaaattataatttattgaaagaaataataatttagggcatataggccaaaacttgatagtcttttagctttaattaaagacataaaaacaataaaattaaaaaatatattaattaaattctataaagaaataattaaaaactaaacattgataaaagtatgcaatgataaaaaaatcattttctaagtaaatttaacgagttttgaaggaaacagttacatatttaaaaaataattgcttaaattggagtaaaatttaaatggaaacaaaattaaatgcatatacaaaaaatataacaaatattttttaattaaacatttactatttttactattcgcattaaagggagaaagttttattttaaaacaaataaaagcaacatttaaataaaaaaaaaataaattactaaattgaacggttataaaatgtgaaatattttaaaaaattttggatatttggttggttgtaaaaatcaaacttcaattttttccgcccttcggtatgagagcattgagataccaaattaaaggattctgagctggtcatgattaaattttaaaaaaagaaaataacttttgtacaagttaagtcataataaatagatattaaccatgaataccacaataccgccgaattaaaataaaaataaatatgagaaaagtacattcattatcaaaataattttgtaataaaaatatttttatttttttaaaaaatagaattaaactttttaattgaaataaaatgttaaaattttacatttgatgcttgaaataaaaatgaaaaataatcatagaatatatacaggatgcggaaaaaattcccgtacctttttaaagttcgtttttcataaccatttataattacaaacaaattccttgaatttatgcttttttaaccatgactattttaccaaagataacattttttgattaactaaaagctgcagaaggg

SEQ ID NO: 35876 - DNA, 1038 bp, Heterodera glycines
  unsure (1)..(1038): unsure at all n locations
gcgcccagatttatggggagaccgaatccnttcccggaaatagcnttccctatagncctgtactntnaattctgcgttgggatttttgctccccataattttgttgnagtaccccaaacgggacacttgaaaaaatcgattttnttgtttncggggcagtccccccgancccgacgcgcnncagatttatggggagaccgaatcccttcgggagtagcttccctatagcctgtacttnaattctgcgttggatttttgctccccataattgtttgagtaccccaaacggacacttgaaaaaatcgatttttttgttttcggggcagtccccccgaaccgatgcgcccagatttatggggagaccgaatccttcgggagtagcttccctattgcctgtactttaattctgcgttggatttttgctccccataattgtttgagtaccccaaacggacacttgaaaaaatcgatttttttgttttcggggcagtccccccgaaccgatgcgcccagatttatggggagaccgaatccttcgggagtagcttccctatagcctgtactttaattctgcgttggatttttgctccccataaatgtttgagtaccccaaacggacacttgaaaaaatcgattttttttgttttcggggcagtccccccgaaccgatgcgcccagatttatggggagaccgaatccttcgggaatagcttccctatagcctgtactttaattctgcgttggatttttgctccccataattgtttgagtaccccaaacggacacttgaaaaaatcgatttttttgttttcggggcagtccccccgaaccgatgcgcccagatttatggggagaccgaatccttcgggaatagcttccctatagcctgtactttaattctgcgttggatttttgctccccataattgtttgagtaccccaaacggacacttgaaaaaatcgatttttttgttttcggggcagtccccccgaaccgatgcgcccagatttatggggagaccgaatnccttcgggagta

SEQ ID NO: 35877 - DNA, 1268 bp, Heterodera glycines
  unsure (1)..(1268): unsure at all n locations
tctggcgcatttttcgttttttttaatggcaaattaacatttttgcacantttttcagcataccagcgagcgcgatctcaaacagttgtttggccgttggggtgaggtggaatctgtgcagattgtttatgatcgctattcgggccgttcccgtgggtttggcttcgtctacttcaccaacaccaaggaggccgcacgtgtaagaaaatttaaatatcaaaatttatttaatacaaatttatttatccctctaattgagcccccccccccctccttttcaaatgaattacgttaatttttcaaaaagtagggaaggacctttatttacatatttccggattttcttcatattttggtccggaagccgctctgcgatttctattttttgaccttccccaaattttccgttttatattaggccaaaaattcaaaaaaatttattttttcccgaattaggaataaatattttaaaacaaatttgttcctcgagttatttgaaaatgaacaatttgatcatcaattttccaggccaaagataacatggccgatgtggtgattgatggaatgaaggtccgtatagattattcggtcacgcgaggcggcggcccatagtaagtttttatatttttcataagaatttggtgaaaaaatgaattgctggaaaatagagattcttcaacaatgttctttgaaattttatttgaaaaattttgcaataaatattttttttaaagatttatgatcataaaggatattatcagaatacgacctggacctgcattcaggcctggatttttcctggacctggattttcctggatattagttcaagaaatccaaatcaaatttgaaaacaaatccaggtccacgtcctggtaggcacgaaaaacctggatttcctagataattttttagaatttgttatcgcaagtgactattgttttatttcaaattatcaaaaaaatgattaaataccttttaaaatacgatattttttaaattatatacttttgatttttctaagcaattaatttttttaatttgtttgctttttaaaacaattaaaaaatccaagtccaggctccgagaaacctcttgtattaattacatctccaaattgtcataaatttaaatgttttaaacataagaaatttcttaatttatattttatttttttttattcaccacagtcggcacatgccaccaaatggcggcggcagttgtcaaagagaagggccaatacgctatcggagcgcaagccgttctcga

SEQ ID NO: 35878 - DNA, 392 bp, Heterodera glycines
tctctccttctctcccccattctcttctctctccttctctcccccattctcttctctctccttctctcccccattctcttctctctccttctctcccccattctcttctctctccttctctcccccattctcttctctctccttctctcccccattctcttctctctccttctctcccccattctcttctctctctttctctcccccattctcttctctctctttctctcccccattctcttctctctccttctctcccccattctcttctctctccttctctcccccattctcttctctctccttctctcccccattctcttctctctccttctctcccccattctcttctctctccttctctcccgcattcgcttctctctctttctctc

SEQ ID NO: 35879 - DNA, 128 bp, Heterodera glycines
cagtcgatttcgcatcaactccaaatgagcacagcatttttccggcatacggcggctagtaggtggggcgagactacgggctacggaagaaatccgcgcgtgatccgcaggcggctgactgattggcg

SEQ ID NO: 35880 - DNA, 1664 bp, Heterodera glycines
  unsure (1)..(1664): unsure at all n locations
taagcacgaaaaacacaatttcagcttgatttggattgtctagggatgacttttataatgcatatttttgtgcctattttctggattttcggaaaaatccttaataaaaatttaaaaaaaatgaaaagtacacccctaataaatgacccaaaaaaaattttcagaaaaagattgattccctaaaatataattttttcttgataaaaatttttggtttaaattttttttttattcgaaaaaacctttaaaattttaataacttcatttataattggaatatatgtaaaaattaagttttattgattatatttttatgtgtttggttacatanaaagtgttaattnaaaaaaaattaattttgcctattaattgcaatttncgcgatttttgtggctaaaaatggcagaatgcatttcctaatttatgaaaaaaaaattggaaaaaggaaatgaaacatggcctggaaaaaattttaaaaaaatattggatttttttttcaaaaaaaaaaaaattggaaaagggaaaagggaaaattttttatttaaaaaaggggaaaaaattggaaaaaattccgagaattttttcttttgtaaaaaaaattggaaaaaaaaaaaaaaaacttttcccccgggaaatgtttttttggggtcttttttcaaaaaaaaaatttgggggggtttttcccccccccccccaaaaaaaaaggggaaaaaaaaaaaaggggggtttttttttttttggggttttttaccacgggggggcctattataaaaagtgggggcccttgcggcccccaaaaattttttttgggggggggggggaaaaaaaaatttggggggggaaaaaaaaactttttttttttttttttttttttttttttgggggggggggggggggaaaaatatatcccccccccccccccaaaaaaaaaaaaaaaaaaccccccccccccccttttttttaaaaaaaaaaaaaaaaataaaggcgcccccccccccccccccccccgggggaaaaataaaaaaaaaaaaattttttttttttttaaaaacccccccgcgttaaaaatgggggccccccccaaaaaaggggcccccaaaaaaaattccccccccctttttttttttatttttcccaaccccccgaaaaaaaaaatccgatttgttttttccaaaattgaaccccttttttctttccccttgtcactggggcccgggaaaaggagaaatttttcgtcgcttngatctgcgggaaacagcgcatnnaataagcccaaattaaatttgattagaacattttttgtaagtctggcagaaattttggaaaaaaaaaagttagaccagcactagggtttccgagatagatgtacctttttaaacatgactcctgctggcccttccaaaattctgggaaagtacggtgcagaggatactgtcctttacaaaagtaaggccttctttctgccgctcaccgaaatcccgtgcgggatcccgtcccgcgccggtctctagtgtaaaatggtagccctgaaaaattttcaaaattttttttagaaataaaattcttttattataggtttttagggtcggagaatacgattatgtcatctagttcggttcatttcgaaccccgaactcggattcgaacatttttgaaaaattttt

SEQ ID NO: 35881 - DNA, 1267 bp, Heterodera glycines
accccccccccccccattattcaacaccgactttctccaattctttgattgcgtctcgtgccgtgccttccttttccgtgtccaatttggcacgtcggtccgcctccgcttttgcgtgtttcaccttgaaaagggtaccatttaaaatcccttttttcccatttcgcttttccatcacttcgttcgatttggccaaatcgccgcctccttcgccccttttttgcttcacgtctctgtccaacgcttccttcatcagtttggtgtgcagttggagcgcctgaaaaaattctcaagcaattttgaaagaaattttatttcctcccgctgaacttttattgtccacctgacccacatagacattggtaatactggagaattggtgtcccggcgaaaataaattaattatcacgaatctgacattaattttgagtaattttatcccggacccaaactcgaacaaagtcgaaattgaaaatgctcatacataaaaatcaatttttcgatattttgtccgagttcgggccgagattcggaattggccaaaactaaagtcatattcatgatcagcaactcccaaaaccccagaatgcatgttttcatgtttcttacataaaaatttattaaaaaaatcaagttcttgatgaaaaatcatagacaaatcaatgatttttcgaattctgagctcagatccgtaatcagcatatttttttacaccggaaaactcgaaaagaaaaattttaaatttatttttcgccgtgacaccaattctccagtattacctccaaaaattttctcatgccgccgcatttcgctttgtattctcacaatcaagcaatctccgtttaataaatatatcaaaatatttttttagagagcgaatttggcgcaataccaaaatccgaagtgactttcgacacgtaatgaatgcggtcgaagaggcgaagaagcgaaaggcggcggaagtgcttcgattaccgaaaagcaacagagaagcaattgcagcagtcgtaagcaatgaaagtgaggaaagcaaaatatcagaaaaagctgcattattgtccacggcatttttttcttttttttattttaaaaaatgtccacataatctccaataatattccttgtcagatgcccctttggctatcacagctggcgatggtgctgattttaccggcaatttaatggtcgccactgttccttcaaagcctcaacaagacaatgcgaatttgcgcgctttacttccttcccgtgccaatttgataaccaa

SEQ ID NO: 35882 - DNA, 951 bp, Heterodera glycines
caatcgcctttatacatcccattatgagcgctacaattatcagagtgccgaaaatcgcatgtgatctaagcctagcaaaaaatggtgtaagtaaaaatcgtaattacgctcaaaaagctcctcaaacaattttagcgcttccaattccttctacaatcgcctttatacatcccattatgagcgctaaaattatcagagtgccgaaaatcgcatgtgatctaagcctagcaaaaaatggtataagtaaaaatcgtaattacgctcaaaaagcttctcaaacaattttagcgcttccaattccttctacaatcgcctttatacatcccattatgagcgctaaaattatcagagtgccgaaaatcgcatgtgatctaagcctagaaaaaatggtctaagtaaaaatcgtaattacgttcaaaaagcttctcaaacaattttagcgcttccaattccttctacaatcgcctttatacatcccattatgagcgctaaaattatcagagtgccgaaaatcgcatgtgatctaagcctagaaaaaatggtctaagtaaaaatcgtaattacgctcaaaaagcttctcaaacaattttagcgcttccaattccttctacaatcgcctttatacatcccattatgagcgctaaaattatcagagtgccgaaaatcgcatgtgatctaagcctagcaaaaaatggtgtaagtaaaaatcgtaattacgctcaaaaagcttctcaaacaattttagcgcttccaattccttctacaatcgcctttatacatcccattatgagcgctaaaattatcagagtgccgaaaaatcgcatgtgatctaagcctagaaaaaaatggtcaagtaaaaatcgtaattacgctcaaaaagcttctcaaacaattttaacgcttccaattcctttctacatcgcctttatacttcccattatgagcgctaaa

SEQ ID NO: 35883 - DNA, 937 bp, Heterodera glycines
aaaatgtgtttttcgtgcatttcccttcgagttaaagccgcagaaaaaatatggaaaaacttataaatccgggccctattcatcactcaccaccacagggagttgttctcccttggtctgctacatcagcactgactactaagcaccagggatatggcattccgaaaggagcatgacaaaacgtcgtctaaactgcaaattttcaaaaatttttattcatgcacaaaaaaatctgggcaaaaaaatttaaaaaaactaggtttttgagttccttctggcgccataacttttttgaaacttaacgaaaatttttgaaattttgcaaattaataactaacacacagagctatcgaacaacaccaacaatgcttaatttgattgacaatgaacaaagttatggttcaaaaagtcttccgacgacgtttcggccgacgacgttttggggtgcaccgcattccgaggccccaaaaattttctgaaatcggaattccgagggtcaaaaatttttcggaagtcggaaatcggaatgttgagaaaggtatttgtagaaaaagtgggatttggcattctgttaaatgtcattttgattcatttgattgttcgacacactccaaagcagttgcgcatttacagcaaagtaaatttaaaatttaatttatgtaattttttaatttattaattcttatattaaaaagcagggcccggatttatatttgctaaaatacgccaaatattgaatttttattttctaaaaaagccttaaataattgcatttttaaatttaattgttcttatattattaataagattctattgcaaatatgtgtgactgacattttattattaatgatgacacttctcttctgtccggtataatttatattaaataattagttcaatattcattaatattttagtatgcagtacgacggaaaaa

SEQ ID NO: 35884 - DNA, 934 bp, Heterodera glycines
  unsure (1)..(934): unsure at all n locations
gctccggcttgaaacgccttaatncgggtttaatcccccaccattaaaaaaaagttcaacatttaatggccatacttcaaagtcacgaaattgtttttccctcgcttggccaattcgtgggcttggtatacaggctcgggcatgctcaccgcaacattgacaatctgacaatgagaatgcaaaatttaacggagaaaatagactaattgcactaaaaacggttactcttttactaataggccacacaaaatttcaatttttctcggagaatcggcatcaacattatttacctgatgcgagtaagacaacgccataatcactccttgcaattcgtccatgctgatgccaatctcatcctccaacatggcgtattctacgggtttgcccgttccctggaaacaaataaaaatttttttgtcggttaaattggatggagtgaaaaaacaaaaaaatttgcctgaatcggtgcgtggggctgaagaaagctgaaaatgcgtggattaaaaaccaaagcacaaaatgcgattaaaatttctcccttacaattccgtgatgtccgcgcgcgtcaccttctcttggattacggagcctggcgttaaattctggttgaacggacggccctcgcgtccctcctcctcgaggaagaactttttgaagtggcgcttagtaccgacaatcatcacaaactgaaaatgagtgtaattgtcataataaatatacatgctgacaatgaacagaaagtcgccccattttttatgaatttttttgttttaaataacccgaaaatttatttattgttcaaaattgctttattacatttgatataaatatatctatttattatttattatccatttattacctttggctgatagcgggagtcgtattcaacacagccctgtttcagtgcacgcaattcttccttgcatgcctg

SEQ ID NO: 35885 - DNA, 884 bp, Heterodera glycines
  unsure (1)..(884): unsure at all n locations
tatgccctttattcgttcaaaacagcatctttgctctacaagctttggattgacaagnccgatgataaatagctcgctcgcaaaacgcgtgcatgtttggaaagtatcgttcataccaataattgagggtttatttttaaatgaaattttatgataaaccttattatctcagaagctatttaattgattcgaatgtctttatcgcggttaattagagcaacgaaaattggtttgaatcgtgaagtttatcatttctaactcacttctcaaaattgttgataaattgcaaatatatattccaaaagtctgttgacactttctgaaaataaattctatactcatgtattttccacttattagattttgcaggcttattgctgcatgttctttgacacttcttcaaaataacctatgccctttattcgttcaaaacagcatctttgttgtttcgctttggattgacaagcccgatgataaatagctcgagcgcaaaacgcgtgcatgtttggaaagtatcgttcataccaataattgagggtttatttttaaatgaaattttatgataaaccttattatctcagaagctatttaattgattcgaatgtctttatcgcggttaattagagcaacgaaaattggtttgaatcgtgaagattatcatttctaactcacttctcaaaattgttgataaattgcaaatatatattccaaaagtctgttgacactttctgaaaataaattctatactcatgtattttccacttattagattttgcaggcttattgctgcatgttctttgacacttcttcaaaataacctatgccctttattcgttcaaaacagcatctttgttgtttcgctttggattgacaaagccgatgat

SEQ ID NO: 35886 - DNA, 1341 bp, Heterodera glycines
acctggattttcctggatttttgtcaaggaaattcaggtccaggtccaacatggaatccaggtccaggcttttttcgaaatgtcgagctctaatttttagttttattgcattttgttaataattttgggcaaaacgccaaaatagttgaaaatactttctttattttgttttttaggtgctaaaattaaaaaaactagaaaatagttgctaataacgcgaaaacttgctaatgtaatagttagggctgccaattttatgtaaatacatatttttttcctgacttttccatgctttaaatagcaggaaaacactttcttttttgtgtttgcgaacaaaaactgggactttacatattttggggtttttatacatatttgtacatattttggatttttttcatatatattttcatttttttttacatattttgagtattttttatggaaatttttggaaatcctcaaaaaaaaatccaaaatttcggcaaatatttttgtacatattttcattttttttacatattttgaaaatttataaagaaaaaataagtttgaaaatgttgcctaaaaataccaaaaaaaaaaaagtagtttttatgtcattttgttgctatttcatattttacggggattttctttcccaaaaaataccattaaaaaaaattttatttacatatttggggttttttgtacatattttgggatttttcttacatatttatttacattaaacagcctttgcgacaagattagatagattctataaaacaaatgaatttacaaataatataatttgaagcatttaatgaggctctctctatacgaaactccaattttttgtttttttttgtcttaatgaatgaaaaattaggaaatgctattaaattgaaaatattacttccataagttcagcccattaaaggacattaatttttaaaatttaactaaaaaaaatattgcaataattgaagtgacaaatgatattttttgtaattgatgtctttaattttgccaataaatttgtaaatataaaacaaattaaattgatcattgcttcttttcactcatctcatttatcaaatgtgccgtcgttagcattttggcgttggcgtcgattcacctccgccggcctttgctgctgatgtgcaagccgcattagctgactgaaaatgccaacataaaccatgacgtgagacccgtgagcctcggtttcgattagagaaaatttttgttttttggctattaaatctcaaccgcaaatatcgcaataaatcatttatttgacattattttgataagttgtgccaaaattcttaagataaattgttgaataatttgtga

SEQ ID NO: 35887 - DNA, 587 bp, Heterodera glycines
ttttaagggcgaaaaaagtccaaaataagggcgaaaaaatcgcgaaataagggcgaaagtaaggacgaaaaagttccaaatttaggggtataattttttaaattgctctttttatatgaaaataatttcagattatggcaaacaattttattcactgattgcaggaacaaataagctatattttagaaaatttttcatttcttatgggtctatttttgaaaaatttagtgtcgattcttaggggtatatttttctgaaaattttttggtcgattcttagggggtatattttttcaaaattttttgggtcgattcttagggggtgtatttttcgtttttattgaatttttgttaataaatcttggacaaaacgacaaaataagggcaaaaacttattttaagggcgaacatctaaaatatggatttttaagggcgaacacccaaaataaggatttctaaggtcgaataagggcgataaaatgcaaaattttcgaacaaaaaatgtgtttttcgtgcatttctcgtcgagttaaagcagaaaaaatatgtaaaaacttagaaatcctcgccctattcataagtgattta

SEQ ID NO: 35888 - DNA, 844 bp, Heterodera glycines
catttcattttgtgctctttcacctgctctgcaagtcttgcactttgtagaacattaactgtcagggcaaaaaagttaataattaaatattatataaataattaagcatcatttattagatagataaatttggattttttaacttttattaatttgtatcattaattatgaatttccgtttccatttttgattttgaattaaagtttttttttaatatttttcctttttaatttttattttcaaacaatttgcatttcttttttaatttaaattttctcttttcacctcccaattcggctgcaattgcaattggtccccaaattcgcggctccattgcgaaaagatggcacacgcgcgtgccgagtcgcgtgccatctgcgcacattcgcgcatagtgccgagaaatgcttcgatcgctttggaaattggctgaaaataaaaataaaatatttttttaaatattttttttacataaattttctccttcaaaaattggtcaaattgcaaataaatttcctccttttcagccgaaattaagcccaacgattcgaacacagcagcacatttgctattaatctgaaaaatggggaaaaaaatttaaataattaattaaattggtaaaaattaaaaatttaattgcctccatcaaacggaaactgaacggttcgtgcagcaatttgctgatttcgctgaaaatgtctgaatagtcgcgggccggcaaatgactaagcctaaataaaataatggaaatttaaaatgaaataatttaaaataaaaatggaattaattaaaataattatttaaaggattttatttaaatataattaaaaaataataaataaa

SEQ ID NO: 35889 - DNA, 976 bp, Heterodera glycines
  unsure (1)..(976): unsure at all n locations
tgaatttagaaaatattatcatgccncggtggtacagttactgcttgaaaacggcgcagacccaaacttaccgggtgaaaaataattttggttgagattttctgtaattaatttgtcagatttcaatgactcgacgccgcttttggccgcgtgtgaaaatggagacgaaaaaattttggccttccttttggaaaaggtaaaaccacagatcattttgaataaataaaatatattttttaatttttttttttttgacgggatgataatgataattaattaatgataagcggatgggaaatatttaatttttgtgtctttcgaatgaattatccatcaaattcaataagcagtagagctcgattgaacgacctggaaatgaagctttttcgctcctaacttgggcctgagttttttcattttcgacctggatttcctagacaaaaatccaggaaaagcccaggctttgatccatggccagcaggtcgtgctctaacaatgactgcttctctcatttgtggtgtttgttctctgttaagaaaggcgacccttcccgttgcaacaaacaaggccaaaacgcattcacaataaatgcggacgaaaaactgcaaattgttctgaaggtgaggtgaaaagcaattgggaaacgtttaaaagggaaggaaaagcatttccattggccagaaatatcggaaaaaggattcggagttggacaaggtgctttgccagttggaaatgcagaaatattggccgaattttgcgagggccggaatttggtaggcaaaaacaaaaatgattatacatatttgttgttttttaaatctagttttattgggaaaagagaaaaatgtgaagaaatgataattacctaaataataattatttaaatgattatttttaaacgaataattattttttttcattanaaacattaattaangncaaatgactttttgttaggactgtcgatgcgctgctg

SEQ ID NO: 35890 - DNA, 665 bp, Heterodera glycines
ctgatattcttacggcacgcaacttggaaaatattttttcgggcatcaatgttataaattaaaaaatgtttatattacactaaaaccatataacatagccaacagaatctgctctttcagatgtgattaactgctattgaaaattatttttatttcacaaaattaaaggcgattttcgaaattggtcaaatttgatagattttgaggactcaaggggtcaaatgcacaaaaaaagttactcagctgaaattctttggcgtggcataaagcctcggttcaagtggtagctcatgtcagataatgaatggcctttttgaggaaatcaggaataatattttggatgattggaatttatgactggttcaggggcaatattttggctttcttctctatgtggcgttagattaaagagcaaaaagagataattaatactttaacaattaaacaataatagacaatctatatttaaaataaaatatttattgcattaaaaatgtaatcaaattagagaataagtttttaataatttttttttggtccaaaatttgacgttccaaaacttagactttcatcagatcactccttaatggtgatatggagtgagtaaattttagcccccaaatgaatgacttgaaaaacgaaaatttctaaaagtttatacgaat

SEQ ID NO: 35891 - DNA, 1111 bp, Heterodera glycines
cccctcttccctgcctctctctctactcccctcttccctgcgtctctctctactcccctcttcccttcctctctctctactcccgtcttccctgcctctctctctactcccctcttccctgcctctctctctactcccctcttccctgcctctctctctactcccctcttccctgcctctctctctactcccctcttccctgcctctctctctactcccctctctctaccccctctctctactcccctctctctacccccccccttttcccgctttgttttgccgtgccttcgccgcataaatgaatttgctcagtcgctttccgctgcccaagtgcaccgattggattcggtcttcggatggcaattggtaaaagaatgactcgtccccctgcgttcctcccactgaatgatccgtccctcggaagggctccggcaaagtgaaaatttgcgacggaaagtccaattgggcttcacttccgtttttttttcgttcgtttttctccaaatggcgtcggtttttggcgctttcagtggattcaccgcctttgtttttcaattcaaattgaaaaacagtgtaacttaagttgaacaaatgtatttagtcataccgtacccatgccaatggccgtaggcaaaaaaaaattatggagagagaattgaattacccctccccccggttatgggcctgtgcttctgccgccagtgctgtacctaccgtacccattatcgtattcggtaaggaaccaacgattgcctctgcgcattgcggttccccgacggtgcattttgcgcgtcacgagacgcggtgcgccaaatgaactgatcggagggcaaactgtggggagggcgggggagaggtggtggtacggtgaccgcttacggtattttgccttttcgcggtttttcttccgccggtgtcccttttctttcgttgtttttctttgtttggttcggttttttttcggtgtcctcggaaaattttgccctttttttcccaattgaaaattcctttgtgaacctttcatttgaaaacttttggaaaggtattttctgctaaacgaaaatttgagttgttttttgttgccaaatttcacctaaaaaaccccacc

SEQ ID NO: 35892 - DNA, 584 bp, Heterodera glycines
caacgaaaagatattcaaaaacttgcttttttgagtttctcaggtcataactttatttaaaattaatgaatttttttgaaattttgcaggataatacaaaacacttagggctatcgaataatatcaagattataaaatttgagtcactttgggcgaagttatgaaaattttctgttaaacattttcattttgatggtttttcgtgtaacgcccattttgatagtttatgagtaacgacgaaccagcaccggcgagactcccggctacggaagaagtccgcgcgtgatccgcaggcggtttatcggttgattgattgattggcgagggcatttcgggccccctcaatcaaccgcctgtggcgttcgttcggagtgattcctccgccctccgtctcgccccacggtgctatggagaattacgaaaagtgcaagtgattaaataatagcaaaatattatttgaaatattttaaaaattacaagcaaactaattatttaaattaaatgaagaattaataaaataatcaaacatatgaaaataaagtctgtgaaacacttgtttagataaaaccaaacatctattaaaa

SEQ ID NO: 35893 - DNA, 845 bp, Heterodera glycines
tgcgattttaaccattttttataaggattttcggggccatctgaaactgtagcttttacaaatcggattttgatcaaaaaatttgtgctcataagaacattataattttattaaagcatgcgccaattgaaatgtgaagggtatgccaaaacgaccaagtccaccttgaaccagggatggagttccgaggcactaaaaattttcggaagtcggaagtcggaattccgatgccccaaaaattttcggaagtcggaagtcggaattccgatgccccaaaaattttcggaagtcggaagtcggaattccaaccccaaaaatgtcggaagtcggaactcggaagtcggaatttttcaaaaaaaaatataataaatttttaaaaatatttaataggctaaatttttaaatttttaaccatgtaaaaggtaatttcaaactgtttttagtttatttctatattttttaaaaagatcaaaatattttaagtaattttacattattttggatttttttttttttgggaaagttacaccctttttttgcggcgcgctttatccaaagagaatttgagaaactgtggggaaggaagggtccggcggtgccgatatgcgccgccgggaaaaattttgtaatttttaatgtaaattgttaacaaattttgtccaaaaaatggaaaatttagcgattttgagcaaattttcaataaaattaagttttttttgagtccggcggtgccgataggtgccgtcggagaaaaaattgaaaatttctatgcaatttattaacataaattgtacaaaaattgctaattttttgaaaaaaaaaactcagagaaattccgacttttc

SEQ ID NO: 35894 - DNA, 1021 bp, Heterodera glycines
  unsure (1)..(1021): unsure at all n locations
aaactcacatcattgacaccaatgccacaaatcctggagaaaaaatgggcaattttaaattttgaaatgccaaataaaaaagggcacccacaaaaatggcatttatctgcatcaaagagtttgttcggtggcccgcaattgtgcagacgccaaaggtggaagtgacggacagcacggggcaaaggcaaatgctggcaaaaaatggggcaattttttaatttattattaaattaatttaaattactattgtcagggaaacatttttttggtatagccgcagagccaattggtcggccggtgataattgaaaatttgtatgtatatttttctgaatttcggcctccattttttgtaactttgctcaacctgacagcgaggcaaagatcagtgagaagatcagaaatgcgatgggataagtgccgacgaaacggccaaaaatgcgggacattgtgctcagtgtgaactgctccaaaaagctgagaaatttggcctcctttggccctaaagaaatgaaatttgagccaaatatttgggaatagaaagagccctcagacttaaatttaaaagaaaaggaaattaaaattttaaggcattttctttagcgaatttttcaattggcggtgccaattttcatgctcagccccaaccattttgccacaacctgctgctccctccgttgtcattaatattgtggttctttttaatcaaatcaaagtgatcggccaatgacagtcagcgattgatcagtcgctgggccaaaaagtgatcagcaatagaagatatggccaaaagtgatcggcaatcgaaaaagagccaaaaagtgatcggtaatgaagacatgatcgataaattggtcgatcgaagtcagctaatgacggcagagccaanaatttgatcgccgntgatttcttccagtttgatcaaatttttattttgttgtctttcgggctgttgtttcgcaaattaccgcaggtgaaccaagccaaaatttggccaaaaagaaaagggggaaatttgtatg

SEQ ID NO: 35895 - DNA, 1149 bp, Heterodera glycines
agtgaaaattcgatcactcatattttttgctcctttagcagaagcgtaccaaactttgcagggatactccccggtaaaggactaacttacactgaaatgagcgccgagctagctggctcaaaaaaattttcgaaaatctgagtctttacgtttttatttgttttttgcataattaattcataaatatttttttcgcaaaatgctcatgaaacgcaccaaattttatttacatgctagtttaggcactctgatgctttttctatcaaaaagggagatgaataaatttttaaaaatttttaattcctttttaaacaggccaaaaagtttaggcttatcttttttttcacaaacttatcagaagcgccccaaactttgcagggatactgaaaggaaaagaattagcctgttttatcacattagcttgtcatcagtttttataaaaaattttcaaaattctgagtctcctattattttatttatttttcgaaattttgaagggcggggggagagggggtgtccaccaacgcatcgaaacgtggcgaaagaagtgccaatttgaggccgagttgaggacggtcaaaggatgggaaaatgtccatccaaacgtcgttgcaaatccaactgaaatgggaaaacagtttagtcaaataaacgacgaatttgtgacttttaatttaattaccgtcggttcatttttggcagcaattagcacaatttggacgagttccgaatgatgtcacacaaatagcagaagaattaattgcgttggaaactttatttttatataattagaaaagcggaaaactaaaaattctaacgaaaatcacattttatccaaacaacttttgaattttgtttgccttaaattgttgcaaatggaccagaggggttggacaatatgccaatgggagacgaaaatcattgacaaaaagcgagcagaaaaagggaatgtcagtgctttggaataagaacgaaaataatcataaaccactaaaataagtgcaaaaacttatcattaaggacgaacctctaaaataaccatttttaatcaccaaacaccaaaataatcttttaagggttcaaataagtgcattaaaacacaaaattttcgaacaaagaatgtgtttttcgtgcatttctcgtcgagtt

SEQ ID NO: 35896 - DNA, 548 bp, Heterodera glycines
  unsure (1)..(548): unsure at all n locations
agcagaagncagcggggattccagcagtgattttaggcctttgaagggaccataagaaagcgggacggagccaagttgggcggagatgccgaattgagcagtgccaagttgggcggagatgccgaattgagcagtgccaagttgggcggtggtgccgtattggtgcaggagaggagttgtggcggaggggaacagtagctcgttgttggtcgtgggcatgccgttcagcgtcaagttgttggacgagttcagcgcttgttggcacaaaaagaggttggtgggatggtcgaacggtcgacgaactgtgagaaaattcgaagcaaattaagcttcgacagtttaagagacaaatgaaatcattagcgcaaaacttacgcgtcgatgaagcagagcatgccgacgacgacgaagtggccgagtcgcgcatgccctgaaagaaaagtcatcaatcgtagtctgtccgtctccccatttccatccccggcattgatttcgcttttcgtctcaaaatggtcatttgtttcgccactgactgtgtatgtccccgt

SEQ ID NO: 35897 - DNA, 1208 bp, Heterodera glycines
  unsure (1)..(1208): unsure at all n locations
tctttccctcttccactttctactcctcttccactttctcttcctcttccactttctcttccactttcttttcctcttccactttctattcctctcttacccnttttaaaaacttggacccaaacccntctttactncacccnaaaatatccggacccanttttncccaaatacccnaattcttccaatcctaaaattaactcattttatcatttatttattatttaaatttttattaatatttntttatttttaatttttattcaattaattttaatatttaattgttactttattattctattaattaaattttaaacaaattcccaaaatttctttgttcccactcaatcctttttaatttttttttttaaaatttactaataaatataaatctttaattattttaatcaaattggccattttttctttcatttttactaatttattaattgttcctttatttaatttttttgcctgttgtttcgttgccaaattattctcatcactttcgtgtgatgctcgttttaaattctaaaatggattattttaaggcgtatatttaattttaatttttattattttgcgtttaattttacattttatttttattttcatttttgttttaattttacaattttttatttttcatttttgttttaattttacaattttttatttttcatttttgttttaattttacattttctctttactttttaccttattgctttggttggaaggccaatttaaaatgtgtgtgctttctctggggattttttcaccaaattcttttatttcaacttttatattgagatggaattatttcttctacaatacatatacaatatatgttaccatctgtaattaccctcatgtcctgtgtgatgtccgctggaactaaagatgggggtgtgtgctggcccatcgtcaggacgtcagaaggacatgtattgtcaaggagccgtcggatatcagccggtacaagctactcaagtgtcgcccgtctgatgtgagttaaaaaaatgtgtatctcttcttttacgatggacttacgcacttgtcaccagggccctcccggaccaattgtttcggagggagccaccggagcagatggagacaatggacacaacgaaaaggacgggcaccacgggagggacgcacaaaccatcccaggacctcttgaaaagccatgcatcgtatgcatt

SEQ ID NO: 35898 - DNA, 990 bp, Heterodera glycines
tttgcctccgttagatttgtggcatccgtcgcgcttccgcccgcggtgcaaagtcgcaaattctttgccgaccttcgcccgttggaccgaattttggcacgggttgtgcgtccgggtgttgccgtgctccacgtggagttggtgtgcatgttaagccgttttcggcgcactttgctcacctttatgaagggccgattggtgcgcgcttttctcttttttttgcagtttctgcgaatttttggggaattcctgcacattttgttctaactacgaagataattgaaaatctggcaacccatttgattggttgtttttcgctatatttggtttttgtgtcgagaaaataattgaaagaaacttttttttttctaatagaaagccgaagcaattttgaaggaagagaagcaatccattctaaaatagctcattttttggcttttggtcaaaaaatataacaaatacacgagcaaactggtaaaccaaaccaaaaaattgcgaacattagcttttcaaacaaaacaaaatgcccgaatttcgattattttaaaaggaaaaatgggcggcaaatgacgcctttttaagtccgtacttttcacaaatttctttaggtccccgtcccatttgaccggaccaagcgcttttacaacatcagcgactacataagcagtaagtgtttggtggtctctttcctctctcctttctgtgcgccggtgcggttgggccccaaaatttcgtttcccccacccgtttgagccaccgtcgtgtccattgcgcccgccagcgaaccatttagccgttccaaactgttgtttttcttattttatgaatattcaattttatatatttttcatggaggagagatttttccaattttagtgacactttcaagaaatacttggttttctacgtatttaatgactttttgaagccatttttggatctcattgatagtaactaattgatttttttataatataaaataactttctt

SEQ ID NO: 35899 - DNA, 1046 bp, Heterodera glycines
tcggtgagcttaggattttgttgtctcatctgactatatatcgtcgtcttttccatttcgtcagcaatcgtcagaattttgtgctgtaaatataatttcaaatttgaaaacaatggtaaagttctaaaatcgagtgaaattactcaaatttaacctcttttagcattttgtttactgcctaatgtcttggttcataattcaattgtcgtataattcacataaaaagtttgtgtaatttttgcataaaattctttgtattccttctgtgaatgttttccatttagcatgaattctttttttatttttaaatatttctccacaatttctctttttttatcatcaattttttgaaattttataaatgttcctcattgtatttttttctttcaattatgaatacttgtaatagtgatgcgcaaactttcacctactatttttgtcagtttcatccttcctcattccgatccgtcgtctgatctcgtccatacgcattcgcgacctgctcgcttactcacgcaaagtggagaaagacatgttcgaggcggccaacgacaaggaggcgtactatcacatgttggcggagaagatttacaaaatccagaaggaattgcaggtaaacaaatgcgagggaatcaacgcaatgccaaaaatgtttttcaaaagcgatttttgggaggcataaacaaacttttaagaattttatttcataaaaataaatatagaaattttttagacggagaaaaattcttttaaaaagccatccaattttattttggatccaaccttcaaaatgaccgttcgtgttgcattcatgggctgttcctatttttgcaggaaaagaaaaaccggaggctgaacgagcagcaacagttggcacaacaacaacagcttcagggcaaatcgtccgctgaccaacaacagtcgctgttcgatgacaacggcgccggcctttcccaccaactcaacgccatgggaatacccatgtcggggccgggctcatcttcccagcaacaattttggagtagtgcagcagcaaatgccgtttt

SEQ ID NO: 35900 - DNA, 934 bp, Heterodera glycines
  unsure (1)..(934): unsure at all n locations
ttgaatatttttttccgcgcatctttcgatttggcattgtattataaatcgaattcattcgaaaaatatttggaattttcattaattcataattaaatttgttcaaatgaattctttctgatgtgtttaaacaatgcatggttcttcaccattaacagaggctaatctgtgcatgaaatttgagtcttctttttcatggaaggattgggttaggtaaaagctatttttatataagccgtcaaaatcaaaatttgctcaggttacgtgacacttggaatgccgttgttacgtcgcaatcgcagattcacaggcattctgaacagctcgacaaaattgtttcggaggaaagcagttacagaaattatgtgctgcgttgcgcactgaccccaacttaattattattttaggcatctgacattcaaaatcgacaaattatgatccaaattgtggaaagaaatgtgaacaaagcgagggaattggtacgaacggcgcgatatcagttgaacgctttcaattcggcgctgagtcaaagtgaaaaaccaatttatgtgcaaaggaattgaaattttatcggtttgatttgtaaagtgagtgcaatgtttaaatcgcaggaagagagcgattcccaaactgagcacggaatattggagctgaacaaccaaaacgccgaaatgcggtcggttctgaaaatgtgtgaatgaacagtgaatggtttcggacattttattcgcaaaaatggcgatatttgttagggcaattttaaatgtggtatcattcgcgggcttaatttgaccaaaaagccgttttatcagccgatatgtgccttcggtgaattcttcgcccgttcttattgaaaaagttggaacctanaaagctcttcccgtgcccgtcctgattgtcttttttcccttcatttcagcttggagttgagccg

SEQ ID NO: 35901 - DNA, 1149 bp, Heterodera glycines
  unsure (1)..(1149): unsure at all n locations
tcggtgagcttnggatgtgtttttncatctgattatattcgtcgtctttgcattttttcagcaatgtcaaaatttttgctctaaaaataatttcaaatttgaaaaaaattttaaagtttaaaatcgagtgaaattactcaaatttaaccttttttagcattttgtttattgcctaatttcttggttcataattcaattgtcgtataattcacataaaaagtttgtttaatttttgcataaaattctttctattccttctgtgaatgttttccattttgcatgaattctttttttatttttaaatatttttccacaatttctctttttttatcatcaattttttgaaattttataaatgttccactttttatttctttcttccaattataaatacttctaatatttatgcccaaatttttagctattatttttggcattttgtcccttttccttccaatttttcatttaatttcgtttttaatttgccatatatttgatcaaattgctttaacattattcttttttcttcaactgaataatttttgttcttcatcattccaaattctcttttccatttgtaaattttcatttgatttgcacctaattttgtggcaatttttctttcaattttattccattcttttgttgaatatttctttcccatttgcttaattttctcttttattttatggaatttttcaacaatttctctcttttgtttatcatttaaaattggaatttgatcataaatttgtccactattttctgtcatttgttccaattgatcacaatttgtggacatttcttcacttttctcatctttcatttccaaattttcatcaaaaatttgattagattcttctacaaataatctttgcacaaaattttcaatatttgttggtccattttgatcattcatttgtccatttattccattttgatcagtttcattctctccatttttctcctctttttcgtcccatctttggccaaatatttcgtcaaagtttttttcttcttttattccaccagcataaattttatttagatttttcagaattaataagaaaataatattatnnttatatcattttataaaatgaaatgatatataaatccattttataattgcttttatctcattgattt

SEQ ID NO: 35902 - DNA, 974 bp, Heterodera glycines
agttgcagtcggtgtctgtccaggtaaaagtactgtagcctctaattacgataccaattttcaattcaatgaggggattattactatatgattattttctgtcaggaaggcgaacggttggaaatgaccgccattgtcgggggagagcccaagccgaacgttaaatggctgcttaatgagcaggaaatggacgccgtcgacaaaaatgtgcaggtcttttttatgaaaattcaaatgatggcattgaaacggtagaaatccaacgaagatacggtatctgacccaaaattgacctaaagatcacttccggacccggcggtcgccaaagtctgcgaattgggcagacaaacgctgcgcaacactccggccatttgatggtacgtgccgaaaacagcgaaggcgccgccgaatcgtcggccgacgtcaccgtacagccaaagccgggcccaccgtacttcagccgggaaccccaagaccacgaagtgtccgatggagtggagtccgtcaagttcagtgccattgtgcatggcaacccggtgccatcagtttactggcgagtcactctcattatttaattgccttgataatgaatgctaattaattttttgaaaaatgattttcattaatttaaaacaataatcggcaggtatctgaagggcgaatgcctcgtcagcggggacaatttgcgcgtcaaatatgacgcggtcagcggcaaaacgtccattcggctgttccacccgaacacggacgactcgggcgaggtgaaagtgatcgcccaaaatgtgcacggacaggccgaggctagcgcaaaactgaaggcaattgaaaaaacaaaattggaataaatatgggcaattaaaacgcttaattactttttcatctcataataggcacagattcacaagagataataattattaaaaagacttaattgtttattgttaattaattttcttttgaatttaattgataaa

SEQ ID NO: 35903 - DNA, 1285 bp, Heterodera glycines
  unsure (1)..(1285): unsure at all n locations
gtgtgatctttttgaataccatcgctnttcgccgtctgcgccaattggccccgtcacttctcaacgattgtccatcacttcgctttgtctctntaaaggatgccattctgcccgcttttccgcccgatgaaagtgccaatgcgtcggctggccaagcgatgaccaaatggttgttcacgccttgtccgaatggtgtgccgaagtggctccaatgttttgtgaattcaccggttggtcaatggtcgtcaatgatggaacagattaaagcggtgattatccctttttaattgcttttttctatgattttttgtcccattttaggcattttccaatgcttcttcggttacttttcgcattcactttctgctgtcttctccgattgactctgttgttccatttgttgatcggatcaacgaagtgactggggaggaattggcacttcaacaatcaaatggcttttggctcacccgttgtccaattggatgggataaccgaaattgggataatgtgtgggaagaattaagtgctcgacagaacccaattgacattgtgatcaatagggatcggattagcggattcgtgttgagtatcctattgtatatatgcatatgtatttttgtatcatgttttgtgccgcatttatgatcatctccacacatttgatgtacctattgatgtatttgtatgtgctatgtatatttcgttcacatatgtctgaatgaattgtgtttaaagaatgaaagtgttcttgtgactataaataagacgaattttgagtaaaaattgagttaaattattttctatatacagtgtgtaaatttagaatagggacgactgttttttcgggagtttgacttgtcggaaaaccgatttcgaggcccccacaaaaaagaaatgtgaaaaatgaattttcataaaaattctttcagtttttcaactttgtctgcggcgattgttggcttttggtgttcgattttcttgtgccttctcagctcggcctcgaaattgcactgatcaatcgccgttttaactgcatcgtcgacgaacacttcaaaacgcgcaaatggaaattgggcggaatacgaatttggcacaaaattggagagaatggcaccaaacaaatgcaaattgtcaattccgatggaaatccattgccaattccgcaaaatccgttgccaaacaaagtcatcggattagaaggcattacaatcgcgtaatgccaatgtttcgcgactccattgttgtgatgtttttgaataccatcgcttttcgccgtttacgccaa

SEQ ID NO: 35904 - DNA, 1006 bp, Heterodera glycines
  unsure (1)..(1006): unsure at all n locations
tccccaatgggggccccattttgggtccccagccacagccccatgcttctcccaattgtggcgaaaacaatatttcacatttcacttcataactttttgagttcggcagggatcgagaccgggataagaccattggaaagaacagctcgagctttacaagaagatatggaaagaaaaaatagacattccagggactttttcagaaatcatgtttaattccccaatggggccccattttggttcctcagccacagccccatgcttctcccaattttaagtcttggatttgtcaaataaattaacgatttcgaattaataataaaaaattctattataaattttttttgtagaggggaaaattctgaaccaaactactatttgaaaacccaatcaaaactgggaaaaatttgaagtcaaaaaattattcgaatttctccaattttgtttccataatttccgaatgttattcggtatcataatgccaaaccaaaacgaattcgttttaaaatattcttttctggacttgacttggtttctcaatatcgaagcttttttctccgcaatttctaaaacgcttataccaaaccctagatttttggttccgatgggtttcagaaaaaatcccgtgtggtgcaaacatatttcacatttcacttcataactttttgagttctgcacggatcgagaccgggataagaccattgaaaagagcagctcgagctctacaagaagctatggaaagaaaaaatcgacatttcagggactttttcagaaatcatatttaattccccaatggagccccattttgggtccccagccacagccccatgcttctcccaattgtggcgaaaacaatatttcacatttcacttcataactttttgagttcggcagggatcgagaccgggataagaccattgaaagaacagctcgagctttacaagagatatggnaaganaaaatagacattcccagggacttttcagaaatcatggttaattcccca

SEQ ID NO: 35905 - DNA, 1518 bp, Heterodera glycines
ttttttaaaattttctattaaaaaaaattaatacaaatatttgagcagaatattaactgcagccagaacttcaaatgttttagcatttttcctaaaacctttattagaacggccccaacagctaaattggcgtttttgatacagaaacaatcattttttagcagaattatcttgagactattgaatatattaaattttattaaaaattggtaaatttatgtcaaaaataagcaaaaaggcaaaaatttcgcttttggattggtattttttattaaaaattaataaattttagctttacccaatttttttttcttctaaacaaatggcaccaattaaatttttaaaaatgccaaaaaaacaatatttggtaaaaaaaaaatctaaatcagtgagaattaattaaaaatttttcacattttgctggttttcttagaattttctatcaacaaaaaaaattgcatacagtagtaacattctactaatgtacagtatagtatgctgtaacccactcactgtgttccgtatccataaaaaagtgtcttaataggtgcagaggtaccaaatggtattttggtatttctattcattttgcatacagtaacattctactaatttatattattcctattcattttacatacagtaacactacaccatgcatatacagtagtatgctgtctgtaactcactgtgttccggcgggtccggatttttgtactgttttgccacccaaatgctcatttggttacggtcccattcgtacagtttcttcttctcccaatcgtacaacaatttgcccactataccatttttgcgctctacggcattgaaaatgtgattgccaaatgaaaactcagcgcccttttcggtcttatcgaaaatgtcacttaatttggaaattgcatttttaaaattaatttcttccattgaaaatttaatttaaaaaaaaagttttgaattaattaatttaaattaagcaatcatatgtaggcatagaattcaaaaagaaaaagtttcatttagaaaagttagtttattttggccattaattaaaaaattcaaaatttaaataaatataataattagtgcttacttttttgtgtaagaaaaatcgcttattatgtataaaaaatgctaaaatatgtatgaaatatgtacaaaaacccagaaatatatacgaaaatatgtaaataaggaggccctaataaaaataactcaaaaaattttaaatttttttagactttatagttttttcttatttttaaatacttactttttaatttttcgttttatatccttaaatgctttctttttttgtttccattcctccattgcatttttattcttcgtggcccaaatcacttgaaaatattcctgtttggcgtgctcatatattttttccgcctctttctgctcattctttttttttaaatttgacgaattaatttaattaatttcggatgtaatttttctttaataaaattatttttgaattttgaatgaccattagaggatccc

SEQ ID NO: 35906 - DNA, 914 bp, Heterodera glycines
  unsure (1)..(914): unsure at all n locations
ttatgaccataactaatttcctaaagtaataaaatttttcgatattttctaggttatcactaagaatacttaaattgatataaatatttttatggaagtgcaaatattttatgaaaaaagtaaatagtttttttcattttttacaaaaaaaaattgagcttataaattgagcgaattctagcattcttttttgtctccgtgcttgcattagtccgatgaaaattaaaaactcgaagatatacaaaagctttgttaaaaccaaaaaaatgttttggttattttttaaatatgttatttaaccattgttttggttttatttttgccaaattttttcaccacagttttctcaaaaacaaaaattaattgtcttttttaacaaacagtaaagaaacattttcagcaatagatcatccatctactgagagaaaaagtcaatacgaagattatgtagaataatttaaaagactttaaatttaagaatttccacgctaaaaagatgaaatttcatgcattttccgtgaaaaaacgctatgggaagaacaacttaaaaatattattatatctataaaatccaggccatcttcatctctccttcgatcgcttatcacccatcatcatcctcaccattcatcatcttccacctcatcattcatgtcttaataattaggttgctgtccctactgaggttgctgttcctgattctgttgttgctgcagttgttcctgacggaggcgttccgcttcctcttccttacgcttctgttcttcctttctctcacgctcctcttcctcctctcgttcctttgcatggcgtgccacacgttcctcgtccgattcttcccactcgttctccttctcactcgtgcaaattcggatgtccngncgngtacggatctttgacgccgaatgccttgc

SEQ ID NO: 35907 - DNA, 963 bp, Heterodera glycines
ggaagtgaggcgatcaaaatacataatgatagagaatgtgtggtttacctgtttgaagctaagtcggggatctgacgtctaatatgagaataaagtgcagttctctctttaaacgaactgattttatggccactttctataaaggcgatggtggtcgctgtatgaccgtaaacacagttttttgtatagaaaagggttgtccaaattgcaaatggatacagtatctgatttatttcacaacgccaacacgccgtttaaaataaaaacacaagttgcatgtgatggcaaaagttgtgaaattcaaacgcattttacgcccatgaattgccgggaagtgaggcgatcaaaattcataatgatagagaatgtgtggctttacctgtttcgaagctaagtcgggtctgacggctaatatgagaataaagtgcagttctctctttaaacgaactgattttatggccactttctataaaggcgatggcggtcgctgtatgaccgtaaacccagttttttgtatagaaaagggttgtccaaattgcaaatggatacagtatctgatttatttcacaacgccaacacgccgttgaaaataaaaacacaagttgcatgtgatggcaaaagttgtgaaattcaaacgcattttacggccatgaattgccgggaagtgaggcgatcaaaattcataatgatagagaatgtgtggctttacctgttttgaagctaagtcggggatctgacggctaatatgagaataaagtgcagttctctctttaaacgaactgattttatggccactttctataaaggcgatggcggtcgctgtatgaccgtaaacccagttttttgtatagaaaagggttgtccaaattgcaaatggatacagtatctgatttatttcacaacgccaacacgccgttgaaaataaaaacacaagttgcatgtgatggcaaagagttgtgaaat

SEQ ID NO: 35908 - DNA, 1051 bp, Heterodera glycines
  unsure (1)..(1051): unsure at all n locations
acaacccttaccaaacggtggggcgaacattggcaaaatctcccacaattntggcttaatcaggtgataaaaatcatgggacgcactttggccccattcgctggccatgaccacggcatttccgtgttcggattcggcgactcgaccaccggcgattggacggtcttctcgctgaacgaagagaaagactgtgagaatttggaggaggttctcaggttagtcggcgaattgctgacaaaggaagttcgtcgcgttttcagcgtgtacaatcgcatgactccaaacatcgacctcagcggaccgaccaatttcgcgccgctgatttaccgcgccatggaaatttgccaacagcggagagacgtgacaaaagcatttataatcaaaagtaatcactttgtttttcagtatcacattttggtaattattgcggatggccaagtgaccaatgaaaaggccacggtgaaggccatcgtttccgcgtgtcaatttcctttgtcaattattgttgttggagtcggcgatgggccctgtgaaaatgatgcgggtcgatcaacaggccaattcagtccattttcaataattttttaagatttttgatgagtcattgcccaaaaggccgtgggacaactttcacttcgtggagcttcatgaactgatcaaccaaagggctgatcagccgattgagtcgcgagaattggcatttgccgtccattcacttttggaaattccggaccaagtaaaggcaaaacaacgcattgtccacggcatttttcattattcagtacgcgaccattcggaagatgggtctcttgtcatcgaccgcttttttcactcgtcctccttctcattcgcctcgtcggtcaaaatcgccaaaagcggcgcagaaaatcaatggcacaacagcagacgacgagggggcgcaggagaaggagacgaactgttgagggggaaagagatgagagagacgaactgactgatgacatgcgaggggggaagcccttttttggtgtgcattgcacccccatatccttttccttacttttttctcaat

SEQ ID NO: 35909 - DNA, 897 bp, Heterodera glycines
  unsure (1)..(897): unsure at all n locations
tgactataattttaccagtaaacttttagatattttcttcttgatggttttcaatagaaaagaacgattacaaatttctaagaaaattggtaagcaaagagacaaagggaagagattgtccaacaaaaatgtgaattggcgccttggtaaacaaaatcaatttgcttaattatctgctaattagttacattttttgtcagtaaatttggagaaacggaagcaacgcgaaaggcaaacaattgaagaatatgaagagaggaaaagcaacactaacaaggaggaagaagaacatgtggaagaggaggagcagcaacatgaaaagcagcaatccgattcgaatggcgtggcaatggaatgccaaagtgaaaaaggtgggaggagggcgacggcacagtgccaatttcagatattggatttaaataagccattaaattgtctcggcgcttgacaatgtttttttttttgggaacgacacgaatgataggatcgttgtaggaaaagagaaaatcgtggttcatcattccattttagaaggttggtattcgctgactgttgcgttgccgggcacaattttggacaatgttcagacgtctgagctcaaaacctatctgagtggagaggtaaaagcacagtttaagcgaaggtgacttaattggccactccgtgttaagctgtccagggcatgcgccattttctgcgtggacgaagtggtcgtttttgacgagacagcgcaaatgagccaaagggacgtcgacacatttcgggaatggaccggcaaagaacaaacggacgcacggagcagcgaaagtaagcgaatcggaggggcattanatggggcggtttacttgcaatccgagacgaaattgaggtgtgtttttcatggcgcgaattttggag

SEQ ID NO: 35910 - DNA, 437 bp, Heterodera glycines
ctttttcaattttttagcaaaaactatttcgaactatcattaaaaaaatttcttatttaatttaaaaatgagtttttccaatctaggtattcgttttttgttaaaaacgaatatttgctgtttattaatttttagcttgggaaaaaataagtaatcaaggacgcttatttcgtacttttgtgaaataataataaaatcaacattttgattttggcacaggaaatggtcatacttctaaaaaattatttatccttatgcgacatatgattatttccagcacaattcttgcttggcatttcttcattcttttttggtcataataactttcttttcgtggttttctgatttcacttatgtttataaataaatgtttggtctaatgatgcgtcatcgctttggctcaatgggagattttttgaaatagcaaattatttgtg

SEQ ID NO: 35911 - DNA, 1128 bp, Heterodera glycines
tgacgcatggaaggcgcgagtaccgtagacgcatgtcatattttgcgcataatactgtaccagatttgtctgctggttttggatggtgatgatcatttcgctggcgcatcggtcggtcagtccgaaaacggcgaaagtcatctgaattcgaagaaagtgaacggcggaaatcgatttcaaatacaagaatgggatatggtaaaaggattaatggcccgtgtcctactgtacagaattcggtggcaagtagacatagaatgtcaacgcgcaaaaatgccaaaaaagacaaataaaagtggcataatccttcattcgacttaatctatttaattttaatcagtgtataacattaaaataaaaaatgtttatataaaaatcgttaattatacaaaaatcagaaaaaatcgatcttttgtaattagctaattgttttgtacagataaccggctggctatggctacagtattatcaaagaaaatagaaaaatcataattacaattttttaattattaagaaattgtcaaaatttttttggtatcgcatataaaaaaaaactttggtgatcaatatgtatataattttacattacctgactttctggcaaatgcacagtttgcacagcaagacctgaaatttttggtaatttagcaattcattttttaaaatgaaaaaaatatatttaatggacatgtaaatttagcacccattcacctttgatctgtttgacgatggtccgcaccttcgcgggctgtgagaaatcattttggatgtaatcagggcgagaattgagaaatcggcaaacaaattcgataagatcaatggccgggaagaaggccgatttctttgctgaaacagaaaacaaaatatttgtggaatcttttatggtaatgttaacaaaactgaaatatcctaattcaaaaacgtcgggacgccaaccgggattagctccttaatccagattttacaagaggaaaattttgccatagattttgtgccaggatccattttgacaaatttagatatcatgggaatgttaccatctaactgaatgatggctttgctctgcaggggactgtcgccgacaaagcgcacgttcttctgcatgccctccttgcaaatgcgcgggtc

SEQ ID NO: 35912 - DNA, 1651 bp, Heterodera glycines
  unsure (1)..(1651): unsure at all n locations
tttgccttttcaattgattcgtatttctaaataaaagtaatttttgtcgaattgggtttaggcataatacnccaaccaaacccaaaaccaaataaagtaacaaatttttgaggtttttaagatcgtaaatcacaaataaaattggtgcttttgacatgacaagttaggaaaattatgtgagtgagtttaaaggaattttgttcccaataaattgttcgtttgtaattatgtcgggggattttggtggatattgacaatgaacaataattagtcgacccttttcatcaagtatgtgtgtccaaatattgctaaaaatccgttttgatttgatttcacctgttgttggactggaaaaacgtaggaagaaaagagcaggccgaggttggactcgtccattttgtttttgtcggaatgagccgacactcttttcaaatggatcagtaaacattccaaacattgcttatgcgtttcgggtatgaaatagacgagaatttgcagtgctttcaaaattcggtcgtcgctttcgcctggcgcaccgtacgaagtgaccattcctaaaatgagaaccggacaattgaactcagtgtaaaaactatgcaacagtcaaaaactgaattggtagatacagaattatcacaaattttttttatacatattctcttcgatccttttcacatctgtcagtggcataccttgtgattcctttgccaatcgaatatttcttttttcgattattaaagatggtttgccttttaaaacaaaaaatttttctgccaagagggtgtgaggaaacttggcaaaattaccgaatttttttcaaaaaaatcctaattcagcaaaaataacatggcgcccaaaccaaatgcaacaaacacaaacccagaaaggtcgagcagagcaacacgttgacagtgtgggaaaagagtgtcgggcattttacgcaaaagagttttaatgcaagacgccttatccgtggcattcaactcgtaaatgaagtaaagtttctgaaatattcggattggagccaggaatgtacgaaattgtgtttcgtccttttttgacattttttctcgctttcgtttaaagtttcgttttccgttacttggtcaattgatttttaaaatcattaaagaccaaagtcaagtattaaacaatctttttttaatctttaaatttagtcatttttgaaaataaatttttaaaatcttgacaatctttttataatgagattttgtgaggatttgagagcatagtcttattgttagctaacataattgtatgtaatttgctgagagctccaaaaataaaaaaacaaaccaattcccgtcccttggcattttcgataatattaagtgcattttgttgcgtagtcaaagacccgctcaatcggtaaagtccttgcgcgaagaattcttaaatttttttagaaaatatatcaatttcagaggaataccattttcttcaaatgaatcgatgatggtaattaaagtacgaacaatattttcagtttcccgttcatcgccaacaatttcaccgcttagtgctgcctcactatccttctttaggagattattctaaattttagaaaatgggaagatgtataaaaaatataggtatgtatttgcattcattatttgtttaccgaataacg

SEQ ID NO: 35913 - DNA, 984 bp, Heterodera glycines
ttaatactccgactacgggctccaccactttgatcactcgatgtttcagtttcatacggtatgttcagcaattgttgatgttgggacgaataagcgtcgtcaatgaacgggctgctgtaataatcggcgctatcggacacgttaagcggactctttcggtttactcgccgtagctgtttaagtatgtatgtgcacagtacaattaggaacagattgaacaggtacgatatcggcatccatgcgtccgacatgcgtagatgggcaaaaacaccgcggctaacattttggtctttgggtttatagattagataattaaagcggacatcatttgaattggttacaaaagttagcgcacgattcccttttgcatagtcgccaatgtgaaatttatagatgcgctggtctctgatcacaaacacatggttgtccgccaaagtaaagtcgcttttatctggcggaagaaaagcgacaaagttgctcttcaagatcgtatgtgcggaagattggttttttcgaagccaccaatgctccaggtattcaagctctatttcgctgatccgcctctgatacttatcgatcagaaacaatcgacccgataggtgatcaaacacaacccgtccatgtttggacagtcgttgcacaatcttatgctggtgaccacggaagatagtagtctcaccagattcgctgtcttcaaaaaaggtaaaactatgcccattgtattcaaaacaggccaatggtgacattttcaccaatgatttcatttcgaaaaacacactctgatagctgtgcaaagtgtacacattttgaagcgaaacggcccattcgctatcacgctcacatttctctattcggcacgctgtattccgactataaccaaagtgttctgctgctgtagcatcttttgaaaaggtacgatatttgccgctgtcaaaatagttttgattgtcaaccgtaaaatctacatttatcagctccgattgc

SEQ ID NO: 35914 - DNA, 875 bp, Heterodera glycines
  unsure (1)..(875): unsure at all n locations
catgaggtggtgcttcttcagtttgatcatcacgcaaaacaaagtgcctaaatgaatggattttatctggaaattggttaagaatgaaatctttttgatttgataagcggaaaagcatcggaaatgtgaattgtaacaccccccaggctnaatactagcaattattgctagaaaataatgtcccaattgcaaatcataaaattcttatatgactaaaagatataccagtggataaacagagttgtgttatacaatttataggttttgcggtttttggtaaccaaatacctaaccaattagggtactcattcagtttgggtcccggttttaggtcaaaattttcaaaagcttttggtgcctgaaacccccatttcccaatacaatttacagacaaacagtttggggtgttcgttggtaaaaaaaaataaaaaatgataaaccttcatttccgccttctccaaactggccgagtattttgagaccgttgccagaaagtcatctgtcaactgttgccgagtgacacaaaagagcacagcgaacactgacaaattgcttcgtcgttcagctgcacaaattgatttgaaacgcacaaatgagtgacaactgagcagaggaacatcgcatgtgtaatactttgtgtccaagtggagcgtgtggcatggcaaagtttcggaaccaattttcttttgctgggctccaagcccgccactttccaaaagaccaagatggtcaattatctcgcgcaacacgccatccctttggtcattcacaagcacacaataagcaggagaattttgtaaatttgacataataatataccaaatgctaaatgtatatgcatgtaaatcaatattaaacaaggggtccgtatcgtt

SEQ ID NO: 35915 - DNA, 753 bp, Heterodera glycines
gggccagaagttgacactaagttgaaattgtaaagactttgtttatacaatacatataaaaatacaaagcaagtgaaagtttttttttttgtaaaaaagtgaaacagaaagccaaaaagcatcagaaacgaaaatcgaaaaccgaagaaaaaaaatgcaaaaatccgtgcaaatcatgcaacagttacggtttatgatacaaataatgacagcattcttccgtattggtgatccagtgacaagtgtatttaccagcgttctctccttttgaaatttttttctttgctttttcaccttcacatttgtcttttgttgtgaaacccgaacaaaaagttttccaatcttcgattgtaactaaatattttaaattaaattgaacaaaaagaaagaattgatatgttaaaattattaaaaaagtaagaaaatcggatgaattgcgttgaaaattcgcaaatatttttgagtttagttatatccattttattaaatgcctgcaggagtgttaattattaaaaaattatattaaaattcacattttttcgatttaaaataaggaattttttgcaacacattcgacacaaatttttttgttttggtcactgaatttggttggttgattggctgagttcttccaggaaagttgctattaaatgtgttgaacgacgaattgcttgcttcacagaaattggcacacaatgccaaagtattcaatgccaagagcagcgcactggtggaaatttgtttcataatgat

SEQ ID NO: 35916 - DNA, 909 bp, Heterodera glycines
  unsure (1)..(909): unsure at all n locations
aaaatcgcaaaatatggaccataaaatggcaaaaatcgcaaaantatggacataaaatggcaaaaatcgcgnaaatatggacataaatggcaaaaatcgcgaaatatggacataaatggcaaaatttcgccgtgccaccacttctgtcagttaccatattaaactttatttttgggtggaacaaatgccaattgaatcatttgaattggtgaacgaacggacgaaggaaaagctgacactgaaacagaatatcgatgaattcgacgtaaatgtgtgtaattggttgttgcaacggtgcccaattggagagacggcgacggcgccagcaattaaatggggagacagcttaaatccgagtgccaatttgaaccatatcagatttgttctgtggagtttcgataaatccattgggtgagcagcagcaatagcatttgaattttatcgaaaaataaaatatttaattaattttaggccattgtcgccactagcggaagaagataaagaagaagataaagcggatcaaagcaacaaaaatgtcgtctaaaatgtacggaaatgatttcgataattatatttgagaaatgatcgatctcaatttgttgtgcttaatctcagaaaaatcgattcagaaggcaagataaagtatttcgtgcatttgaaccggttttggtgcatatttagaatttttcgaaaattgaattttcgaatttttgttcgagtccgggtcaggggttcgaaatgggccgaaatagatataagaatcgaattcttcgacccagaaaacccataaaacaactttatttcgaaaaaattttttgaaaattttctttatatcattgaaaacctaataaaaaaataaaaaatttgacagttttttactttagataatccgatgctttttctggcgct

SEQ ID NO: 35917 - DNA, 877 bp, Heterodera glycines
caatgaattttgctgtccttttaggcgcacatttatcctacccccataaacttcagtgattttcgaatccgttcgatccgacgggaacaataacccctaaattaggtttcttttttcgtccgaagtgctgccatcataaagcatgggcggtgagggacaaaagagcgccgaccaacagggtgccgacccgaggcgataactcgtttcattagttgtacaaatcgaaccaatttggtatatccgatagccctaaatgttgttcattttgtaaaactatgaaaggagttaacgcccaaaaaccgggccggcgcggccaatttcgagaattggatacttctcaattgttacctgtaacgttgataattttcgtgtctaagcccatgcttttgttgtgcattttttacaatctcaagaattctaagcacttttggtccattcgattcggttttgtcactgcttttgttctctgtgctcatctttaattaaatgtagaaatccaaaataatcataacaaaaatattaaacaaatacgaacataattatatagaaacataaatagaaaaaagacccaaatttataaaaatatgaatataaaaattaaaggaacctacaaatgtattgttagctgagatcaaaataatcaataaaaaaaattgtgtggaacatttattggtttagataggcccgatggtctaaagtaaattataattaatatattttggaagctttcagaaaatgaaaaattttcaaaagttagaattttcttttaattttttttgttatcttaacaccggaacgcccccgtcaaaatcaagcatatatattttaatctaattaattatttaataatatttttgctcttaaaggggtgggaaaa

SEQ ID NO: 35918 - DNA, 749 bp, Heterodera glycines
atgaagaagaaaacggtaaataatataataaatagggtttaatataatggctatcatccaacaaaaattcaaaaattttcaatcgtgtatattttttttaccaaatactgcatgtttgtaaaacttgaaaatttcaagacgttgatgaatttgatttttcagttttttaacatgcggatacaaaaaaaagaataaagtttggaagcctaacggagcaaaagaatatgaaaaaggctatccacttaaaaatgtcaagtttaattcagttatctctccaagcacctcctccttcatggatcattcggctgttaatgagtaccgaaatgcaacagcggcggcaacagctgatcagccgcccctttcggcacggtctccgtccccgccggtgtctccgccattcgaagatggtgctcatctcccacattccccttctcacactgctcatgatggcactgatggcggcatggacacggaaagcggcgtggccaaacgaataacggaatcgaaacggagactgagggaagtgtacacgacggaagagatcgacactttggtcaggtgagttgggggtgggggttggcacttcgccgccgccctgaaaagggacagccccaatttccaatttgccccgaattaattttgtgatgtttttgcttttgtctttccctttgcctggcattcatttttttcctaattttaattatctttataaaaacggcacaatacttctacattttgcttcttttatg

SEQ ID NO: 35919 - DNA, 1586 bp, Heterodera glycines
  unsure (1)..(1586): unsure at all n locations
gatttcatttgatgnactcataattgttccctctcatcagggcacaatgatgccgagttaagttcggccgctggttttatcgttcaacttttactcgcaattagccatattttggacattccgctcaaacatttgctccttttcaatggttctcgttccgcaatatntagtcgttcttctttggaacggtttgtcctttcatggcttttttcctcatcaaatcccctgttttgcctttagctttgacctcttttccacttcgtctgcaaagagtcaaaggaatcggctggaccaggcgatgtacatgctcaacgaagtcatcgtccaactgagggccgagtctggcgttgtgtctaaggaaaccgaccgacccattcggcttgttcaagagttgttactctcttttatcggttgccatcggttcgtttccgtagtccttcataatttgactgacaaataagcgtgggggggggaggcatttcgcatggaatttgtgttaattttattgaatttttgggaaccgctggtaatttgagaagacttcaccctgtctgatggattttttatttggggaataaaaaatgaaattttcagaaattttttagaacgttggtctttctttgttttttgagtgtttaaattgccaccctttttcttcagattccattactccgatttgctcattccttacgagaaattctcaagtgcctcccaaaatgcgttgccaaattacttaagtgttaaagccgaccaaatcattgacaattccaaactttgtagcattttaatgccatttcctacttaatgtgattaaaacagttttattaccacaaatttctaataattatttaatcggataaatttgttattttttaaatataattttttctttttggtaatttatgccatcactttactttgtatttttctccctttttctgttcctttttgattaataaaatgactgaagcttctaccgcttccaatggcatcattagccctgaggatggttccgcggaggaagaagatgaagttttggttgagccccgcttccgttattctcgggtccttggcaatttggtcagggtacgttcatttgttcgtccagattcgccaatttcactcaatttctacttaattttaggctctcgatgttgattcggcttctgcgtttgctatccatgacaagttcttggctgtcggcttccaatcggggcgcatttgtttctacgatcacatgggccacgaaacattgcattcggtgggaacaatcgtaaaaatacactcattcccattgctttatgtttttagtcgtcccgttaccacaaatgtgccgtctcctccatttccattgatcgacctggcaattattttatcagctgtgccaatgatttcaccgttaacattttcggcattggttcctccgagtttaaccaggtcatcgtgccaacaaacattcaaccattcaaatgttgttatatttcagcgcctttttcttccctattcggccaaagtggtcgaaatcgcctccgatttctctcgacttggttccaatcaccggtttttggtcggttctcgcgatttga

SEQ ID NO: 35920 - DNA, 532 bp, Heterodera glycines
aagtgaatcagtgttttgttcagctgagaaacaaaacaaccggcgagaaacgcgaaaaacggcgagtgaagtgaaaagcgaatttcgaaatttgatagtccaacctgtggatctatctttcagatttgttgtagatcaaaaaatttttagtgctcaatctgtgagtcactaatatccaatttcatttaaccttcacaattcccaattttttttttcccccaaaatccaaaaactccaaatttttcgctgaagcttacccagaactgcaggagcgccaagtgataaaaacttcgattccaccgcttcacacaaattgattctcgaagaccaacgattaagcgaggccaaaacaaacaaatttattaaaattgaagcaaataataaaaagaaaagtcggaggcgatgatgagaaacaaaattatcaaaaccaaaaatcacaaaaaaacaaccagtaccacggacagacaaaatttagaaaagatcaaaaataattaaacagaacgtcaaaattataattagttaaattaataat

SEQ ID NO: 35921 - DNA, 728 bp, Heterodera glycines
  unsure (1)..(728): unsure at all n locations
ttttgaaagttttactacgcgtatagcgaattaaaagaaattttgaaaaattatactctcaatttgaaaaatttatgtgcatatttttcactttttatgtgaatattttgccatttttggtgcatattttatcgcgcatatttgcgattttatatgcatataattctatgccctagtgatcagcacacaatcctcagtcaattcagtgattttttttgtttttctaatttaatttttttaaatttttttaaatttttgctttttttaattttatttttatttttattttaaaaagaattaccagcccaattctcagccaaatttcaatgatcagcacacatcttcagtcaattcagtgatcacaaattcttttgggtattttggccctaattagcaatcaaaaaaattaatgtccaaaaatcatccgataacgtttcgtctggcacggcattttccatgcagtttcattttgtccgttcgtcgaattaatataaaattttaacgaatgaacaaaaggtctattgaaaaatacaacaccgaccaaaagtggtcaaccaaatgngactcgatcttttaatgattatgcacttttcctttagatggcatttgttgcgtgaataaaatgaaaactataaattaacgaaaaacttttcactttatttattatcgnaacaaatnacatgtcgtgacacgattttttcattttgaaaattttagtttttcttttt

SEQ ID NO: 35922 - DNA, 1060 bp, Heterodera glycines
ttctacacctatcaatggctttttcaaatggcatatttctttctcaaggaaattagatctttgaacattatttaaaactttttgaatcttgaaattttgcaaataaaagccctcttaaaggcacatacatcttcgagaataataaaaaatataatttttttacaaaaattcttaaatcatttatcatttttgcttaaattccattacaaaagtgaaggcttgtgttattcctttatcactttccctttatcaatttgttggcggcggtgcccttcctccgttggcatttccgtctccgtcaccgccaaaagtgccaacacttgcggatgggccgaacccggcttgccttttgccgtaccatccgccgtagggataggcatatgcgtagccaccccacttaacgaaatataaatttaaattattttaaaatttctcacataagcttgggactgttcaacggccaagccaatgcaaaggacaagcagaaaaagggaaaagcttaaaaattaaatttaaaattggaaatgagtgacaaattacattttgatggttgaagaagaagccatttccaatgataagcagcgaatgattgactttttgcagaatgaatattttttgaatgtgccgaaaaaacattttggagctctttaaatactttcactttttggccaaacaaatatttgctttttatgtgccataacaattgacaaaatcagtcccaaattacgtcctattttcgagatttcttgacaataaaaggcaaataaagcgaacggatcactgggatttttagtggtgatgaatgtcatccatcccaccattctcagcacattttgcccaaaatatcagaacaatgaaacgaaaagagttgtcgcgcggtgaaaagagaactcaaaaaaaaaaacattcactcgcgcaaacaaaaaaacataaaaaaatattaatacattaaaataaaatttatttatttatactattactagggctgcaaaaaatatgtacaaaaagtggtccaaatatgtacataaatatgtaagaaaaattcctaaaatatgtacaa

SEQ ID NO: 35923 - DNA, 774 bp, Heterodera glycines
tttttggggcatagagaatatatttaaaaattccctgtagaatataatgcccatttctctccgcgcccctctgcccacactgggaacatttgtatggtaaaaaatttctcgcaaaaaagagagccatttttttggcatagagaataaatttaaaaattccctgtagaatagaatggccatttctctccgcgcccctctgcccatgctgggaacaattgtatggtacaaaatttctcgcaaaaaagagatagccatttttctggcatagagaataaatttaaaaattccctgtagaatagaatggccatttctctccgcgcccctctgcccatgctgggaaaatttgtatggtacaaatttctcgcaaaaaagagatgccatttttctggcatagagaataaatttaaaaattccctgtagaatagaatggccattgctctccgcgcccctctgcccatgctgggaacatttgtatggtgcaaaatttctcgcaaaaaagagatagccatttttctggcatagagaataaatttaaaaattccctgtagaatagaatggccattgctctccgcgcccctctgcccatgctgggtttgtaaaaatttctcgcaaaaaagagatagccatttttctggcatagagaataaatttaaaaattccctgtagaatagaatggccattgctctccgcgcccctctgcccatgctgggaacatttgtatggtacaaaatttctcgcaaaaaagagatagccatttttctggcatagagaata

SEQ ID NO: 35924 - DNA, 845 bp, Heterodera glycines
  unsure (1)..(845): unsure at all n locations
cacccttttttattaatttcccaccccccccctctttttttaccttttccgtgtcccccgaaacggttacggagtcggcaccgttgtgacaagcggcgaccactccgtctgggcagcgtttgactgcctcttcccagctgagtccaaccgcggccattgctcctcgcattcgttctttgtgtgccattatcgtttttccgcgatagtatgccaacatcatcgtctgcgcgcgtgtcagtgctccgtccgcataaccgcagcccatttctccggtggaatggccaacgattccgtcgggagtcactcccaaagcgaacagcaaatcagtcaaagcaatctatgaaaaacggcattttagagagtttgtgaatggcactctcctcgctcaattatattgctaatgccttccaatttgaaatgcaattaaatccatgcttttcccgggcgctcacctgaatggacgtgattgccaacatgcagttcagcgtgttattctcgtactgcttcggctccgcgttcgtcaacattccataaacgtcctcgccaaactcggccaatgtctgcgacgactcgcgcagcgattgatcaaacagcggaatgcgcatcagctgccgtcccatgccgacccattggctgcccatgcccgagtagacgaaccacaccggacgcggctccaaaatggccattttctgcacatcactgaccacagggacggactcggcgggcacttctccgccccgcgtttcgtcgagcaaaagaaagccgcggaacggagtgtctttcagcggcagattggcctaattctcgnattcatcagttttcctattggatgaggtgcacctgat

SEQ ID NO: 35925 - DNA, 869 bp, Heterodera glycines
ggaggaacatcggccgtgggcaccgcatcacagaagtcggcagtggcacctgctggaggagcgtcggcgctgggcaccgcgtcgcagaaatcggccgccggaggaactacgtcacagaaatcggcagcggcacctgctggaggagcgtcggcgctgggcaccgtgtcgcagaaatcggccgccggaggaaccgcgtcgcagaagtcagccgctgggggaaccgtgtcgcagaaatcggcagctggaggagccgcgtcccagaaggcctgagcaaccaccggacggcataagaacaagacgctctacaacccgcttcaatgatatttatcgacagtgatcagtaatgatgtttaaaagaccccgtattgttcccccacatacctatgcctaattgctctattgtctgtgatcacgtatatcatttgtaaaaccgttgtgtgatcattatttgtgtatatgtatgtatattgtatgtatgtgttcgcatgattatcggaatacgctcaaatatgctaaatattcatatggaaattcgtcctctaagcttcaacccaagctaaaaccatgtctatcgagcgtctcaggcctggcacagtccaggaaaaaaatatgcatgtgcatataattgggctcccttcttaatacatcgatcatgttatgaaatttttggaagccagatataaatagaaaattttaagggctagtgaatgatcctaagtatatttttttatgtttattaatcatttagagtttcaattaagaattaggtaattaattattttttagtaattttataaatatagaaattatgttattcgaaataaataaaaattatatttatcgaccatgggggataaatggagactggt

SEQ ID NO: 35926 - DNA, 322 bp, Heterodera glycines
ctttctctctcatattttctctctctctctctccgcaccaaccgctgcacagcacccgacgctgccgctcccccccccccccccacactccaacacattccaattatcccttccccgttcatcccaatcaacaatgatcgcccccatacctcgatgattcaccatccgcaaattcacgcactcaaccccccacccccccaattagttacatcccccccccaacataattaattactggccgcaaaacatcaaaggaacccccctacggaaaaatgcaaagaatcatcctaacacctgaaacggaccagaggtggaaactacc

SEQ ID NO: 35927 - DNA, 880 bp, Heterodera glycines
  unsure (1)..(880): unsure at all n locations
ctctcatcatccgtctgcttcttcttctgctgtttgccctactagataggntcccagnngngcttnnagggcttcccttttttgaggntgntgntgtggtattngatntgtgaagtcacgaactgcaccaattgttcagcctgacgatcctggaaaagaattgaaattttgtcaaacaattttttggggttgagaattctcaccacggacaatagaataatatatctatttcagctaactctttgatagagaaagaatacgatagactaattatcatgagtgtatgaacttatcagaatcttataaccatgagagatgaagctgatcctgctgatccaaaacatcttttcgatgagcctcaccagttaaatgaacaaatttgaagaaattctagtgtaatttgttctctattataatagatattatggttaaattttagaaaaatttgaaaaatgtactaaataaacttaattagaaaataaagattattccttggagatttctacaaaaaagactaattttcatcaaaaaatttgctcaaaatcatagacttacgcattttttggaaaaggtacgcagcaagaaaagcggattgtgttttggtttctttaaaatatcttttaggaatttttccagcgattaaattccgtttttctaaataaatttaaattaaaaaaatcattagaaaaaaattttttaatcaaggatcacggctctcggagtttttggggtgccgtgtttctcagattttttttaaagccccgtgatccggctcacggatttcccgtgattggaaattcaatcccggcagccccgggcgggggatttgggatatagcataaaacaagacaatcaaaggaaaataaattttatcttcaat

SEQ ID NO: 35928 - DNA, 1046 bp, Heterodera glycines
  unsure (1)..(1046): unsure at all n locations
ttccaagcgttcgcccaattccntttctcctcgcttttcaccaaattctcaatgttttccaattcgtgcctaattgttttgcctatttaatgttttgagatgggttccaatgactttgtctgttgcaattcgtccgcaatgtttgtctttttgcgttgggtgttcactgcttggtgccggtacaccactaatttgtcctccgatgattcgtctcgacggtccctttgcagtgtcaattccatgcattcgctgttcagctgctcaatctgaatgtttcccccgggggtgttgtgccgtttccgcgacctcttcctcacctgctccttcaacttatccacatcggctttgctcgcgtttttctgtgccaaaatgcgctgtaccacttccaaattacttcgctgtgtgcgtatgtcctgctccaacttctcattcagcaaatatttgtttacttccgtctctctctaaagcactgtcggtcaattaatggcctgtctttgcttcgtcgtcactttcattctctgaatggctgcccgtgggtccgcactttctccccgtctttcttcctcccacaaagtgcgttccaatctgacaatccgttgctcggcatgtttaatctgaagaaaaagtgtacgtttttagcgagtcggatggagcgtgggttcatctcccacccgctgtttactcccaccattttgcctttcctttgttttatgtccccaattccgtgcccaccgctttctgctggtcctgcccctgtatcttcaactcttcgctccgttccatctccgcacggagttgcgctgaaattggtctatcaccgctaatctgagaattgtcaaatggcacctgccaaactcagcaaagtgttcaggtcgggccttctggctgctagccgtcgcttgcatctctcaattttgcgctggagctgttcccgctcctcgtccatcgccttcaaatcgttgctgacatccatcgctcgcatatattccatccgagcatccaaaaagggtgtatgcagttcctatttataggttgggaatggtgcg

SEQ ID NO: 35929 - DNA, 752 bp, Heterodera glycines
ctcacctgggcgggaccctcgtcctccacttccctcgaattgggacatcgcatatcgccgacttctttcaacgaccaagcggctgcaatgctcccccgagcttctcgatcgctattccgccgaattgacacggcagatggacgccgacatcattgagttgaccgggcgagacaacgacgagcactttctgcctcaccacgccgtcatcaatcccaagaaactccgaatcgtcattgacgccagtgctcatgccaagggcactccaagccttaacgactgtctccaccgcgggcccgtactgcttcccgatctttgcgggatcctcattcgcttccgatcggcaacgatgcctgttctggctgacgtccaaggggctttccacgccatcgaagtcgagccggacgacagacgcttctgcaaaatgctctggctgaaagacccctcccggcccgtctcaggcgataatctcctcatttatcgctacaaacggctcgttttcggcgcaacttgctcccctttcatcctcgctgccgttcttctccaccacttcgataggcacgcccacccattcgccaaggaattggccgcgaatatgtacgtcgacaacctcctcatcgagtgcgagacggaagaggaggccatcgacaagtcgtccaccgccaaacaaatcctcaaggacgccgacatgaacctccgggagttcctcagccactccccaaacgtcatgaagcaaattcccgaggacgaccgac

SEQ ID NO: 35930 - DNA, 984 bp, Heterodera glycines
  unsure (1)..(984): unsure at all n locations
tacaaaatttaaatttgccttttgtttatgtttttaacacacacaaatatttatttaaattttaatttcatttgatttattatttcacagccgacgaacgcttttccaaattcgcccatcacaagcacaatcaatttcggcacaaatgacagcagcagatcatccgcaactattttcaacggaattggtggcattgaagcgaatgacggcacttccagcgaagcgacaaaccgccagcagcagaacaacgacgagtgatggaacacagagaaagagagggaggagagagagagtgagaaagacagagagggcgaccgtattcaatgtgaaatgcatactgtaactttgtgtattcaaaaacaataccggagaagcataccgtacaacacaattaatcgagaattttttaatttgggcatttttaaaaaataaccaaaagtctaaagggaccaaaacattatacttctattgcattctttggtttaattgtatatggtattcttataatatcttactgtctcatatattttttaattaatttccctttttacatcacatttcttccatttagacggtgcataatatgtgaatgtgttacagtgaattgaaaacttaccgtaatttacaaaaatgttttttattgttccattttttcttatatttcctcaacaataaagtacaaagagcttctttaattcaagaaaataactttatattacaatatttcttaattctgtacttatttagtttgatttatgcttttgccgttcaaaattaaaaaataaattattatgtgttaataacagaaaacaaaaaatagttaaataattaaaagaaaatgaattaaattaaaacattcatttttanaaacgaaaaaaggtgcaaaataatccacggaaaatcattctaatggaagacaaaaaaaaaaaagaataaagattanatgaagaatttgtacgagtgtattttgagatttcaatcatt

SEQ ID NO: 35931 - DNA, 1070 bp, Heterodera glycines
ttaccgaaaaatgcaattttgcgttgattagattaaaacctcccgagaggaaccgttaattaattaatggatggacagcggcggtgcattcgaagtaaaaaaaaatggtgagagatggaaagatggagagacagagaaaaaagataaaagagaaattgtcaaagatggatgagaaaaagagggctaattaacggacagacagacagacattattgattaatggagttcagaatttttcaggatcaggatttaggtcagggattcgggaactggatccgggccggatttcaggattaaatttttgtttttcgggacactaatccgggtgaatttctcaaaaattaccagggccaggattaggattttccgggaaaatcttgacagggtccggtaaacatttgttttttcatcatataactttagtaaacaagatttttttaaaatttgctggctaatatagaaaattattatagctatcgaattagatgcaaataatttaaaaatttttttggtatatgctgaatacgaatctgccgttcatttttagctatcaccagggattctttttttatgtaaatacatgtttttttctggattctccatagcctaattagtaggaaaaacactttttttttttgtgtttgcgaacaaaagttgggacttttatttgcatatttttacatatttcgggatttttctacatattacatatgtacatatttcggactttttcgcattttttcgaacatattttgaaatttttgaggattttttaaggaaattttcattaaatgtccccaaaaaaacccaaaatttcacaattttttgtacatatttttaggatttttgagaagtgatagaaatttcatatgaaaaatttaaaattttttttgaaaatatacccctaaaaatcgtttttttcaaaaaagagatagtaaaaagggtgcttctaagcctatttaggtcatttttatggcattttgtacttatttcacccctttacgaagattttttttccaaaaaacacccatttaaaaaattttattttacatatttttacgtacatattt

SEQ ID NO: 35932 - DNA, 871 bp, Heterodera glycines
gtataaaatttatcaaaaaaagagatagccatttttctgggatagagtataaatttaaaaattccctcaaaaataaaaggtaaattgcgcaccgccctccctatcatgctcgagagcatttgtatgtgtataaaatttatcaaaaaaagagatagccatttttctgggataacctctaaatataaaaatcctctgtgaaataaaatggcgattgtgcacagccctccgtctcatacgcaagcgcttttgtgaggtataaaatttctcaaaaaaagagatagccatttttctgggatagagtataaatttaaaaattccctcaaaaataaaaggtctattgcgcaccgccctccctatcatgctcgagagcatttgtatgtgtataaaatttatcaaaaaaagagatagccatttttctgggataacctctaaatataaaaatcctctgtgaaataaaatggcgattgtgcacagccctccgtctcatacgcaagcgcttttgtgaggtataaaatttctcaaaaaaaaagagatagacatttttctgggataaactctaaatttaaaaattccctcaaaaataaaaggtctattgcgcaccgccctccctatcatgctcgagagcatttgtatgtgtataaaatttatcaaaaaaagagatagccatttttctgggataacctctaaatataaaaatcctctgtgaaataaaatggcgattgtgcacagccctccgtctcatacgcaagcgcttttgtgatgtataaaatttctcaaaaaaagagatagccatttttctgggatagagtataaatttaaaaatcccctcaaaataaaaggtctattgcgcaccgccctccctatcatgctc

SEQ ID NO: 35933 - DNA, 1677 bp, Heterodera glycines
  unsure (1)..(1677): unsure at all n locations
tcaaaaaaaaaacatggagaccatttttgcatgttgaattaattgttatgtcnaaacagcagagcaaatcgttggtgttgtcctttttacacagaaaacctttagacacatttgttagtagttccgctcaactttcgtcatctccttggccactgtcctgctcttcttcgccgccgtattcagcgtcttcatctgctgggggaaaatgggggatggggttttatggaggcacatttttgattgaaattgaagttttggtaaagaaatttgtaccatttagggggtgggacaagcccaaaatcaggggaaagtggggaattcctttttaagatggaaaatccaaaccttcgctaaaactcagattcgaggtccggtattgtctggaatgaaagacatatgcataatcaatgaatgacccctaataaaaccagagggaatttaccagttttcttgacaaaaaagccagcaaattgaaacggtaaccacgggtaaaaaatttgaaaaccgaaaagtaaactaagcctttcgctgaattaaaaagaaaataatttgttttaaaatgctttttaagttattcggctgtcgccctcaccggtgtcgtcgtcctcgtagtcgtagtaatcctcgtccagctcaatcacatcgttggactcgttgccctgcactctcggcttcgctttcaccacgtattcgtcgatggtttccggcactttgatgccgtcctttttggcctcctctttggacttttccacctgttttcttaatcacacagcgttcagataaaaaaacaaacaaattagcaattttttgtatttataaacctggaaatggtaccatgattttgaccggaagatacagtggatgggataattaaaaaacgttttaaaatttcggggtttttttttaattttggggagaaacaatacaggggaactgacccggcggtgaggaaggcacccagagggggggggggggggcgaactgctcccacatgagaccagacgagagctctttttcgaaccgatgtgcagcacatccctttttgaaaacacatccaacaacgaacctgataatagtcgcatactcctggtccccgtggtctgaaataagtgcgtgtgtgtaatttggacgtattacacctttccagccatcggtgtccaagaaaaatttgtttcatttttgaagaaatttcacctttgtatttccggtacatcaccgatgcgtccacgttggccggagatgacgtgtttggctcgttgagcagcgaaatcacagacagcaacactgtgcgcacactttgtgttggattccatcgctcggaaggcatctgagaaaagggaaaggtgactgagcaattttctttttgcaattttttggggggaggttgataaaaatttacgtgcttcccagaattcggcttgaagggggcatagacctctttttctacgtatcccgctaccccttttaggaccgttcttgcatacaaccaaaaagtagtaacatgactttgttttctagtttttagaattaattacgccattacactgaacttccgtaaaggcaaaccaataaaaaaaggacggagatgcaaatctttacctcgccactgtgcgggtcatcaaccggtgggtgcaaaaaggttatgcaaatgtcgccattctaaaaaaattgaatgca

SEQ ID NO: 35934 - DNA, 1976 bp, Heterodera glycines
  unsure (1)..(1976): unsure at all n locations
aataatacatattttatttctttccatttttttgactttttctttctttttttaacttatttttaaatttaatcccaattaatatttccaaaaattgtcagaagcgcataattttccaagggtaattctaagaaatggaataagtcacccaatattttttcgaattttcagccttgaaaaaaataattttttaaattttccatttttcattaattaattaatattttgatgcatttaaggagcttcttcagtgggcagttccaattttaatccagctgattttttgtatacttttaacactgaaaatggttcagcaaatgctaaaacattacaaaacaatttaaaaaatgcggcttccaatgtgattgaaaatggaggtgctttttaaaaaaattaaatttgctaggggaaaatttttgaaaaccaattacttgttatgagaaaattttttggtttgcatccccaattcagccatgctgattttttgaattttcaatgcttacttagcctagtaaatgatgttttataaaaatttaatttagttttatttgtaggcattattttacgtcaaccattcaactaacataacaaaatttctttcgctttataaattgaaaacccatttatgttaagtctttagctaaatttttaagaatttcatacctaaaattgtaatttttttcataattatttttgaattagaaattgatttaaaaataaataaaacacacaattccagtgaaacaagttcatcaaatagtcgatataagcctgttttgtctggaaattttgccgtcaagcatcacagaatcattagaaaaaatccggcatggccattcactgcctgatggcacgttaaacgaacatattttgcagaatttaaagccagaaaacgtcataaaatgtataaaaaaattggttgttgaaaggcgaagatgccaacaaaaatgatggattaaaaccccggatagtggaattttgcattaaatccaggcttttatttgagaaaattccttttgtggttggtttgttaaaataataaaccaaaaaaaatggtttttttccaaattcaaattttattaatttttgaaaaataaaaaattaaattaacgaaaccctggttattttcccaccccaaaccccccccccccaccctttggtttccccccccccccccccttggctttttttaaattttcttaaaagggcccttttaaaatattcggatttaaggggcccgaaaatttttttagaggttttttttattaaaaaaaaaatttttttttttttaaaaaaaaaaaaaaaaaaaaaaaaaaaaaaaaaaataattttttttgtgttttttttttaaagagcccccgtttgggaccccaaaaacccccgcccccgtttttttttgaaaaaaaaaaaaaacccaaaaccatattttttaaaaatttttggggcccggtaaaaaggccccattccaaagaattttaaaaaattttcaaggggtggttcaaaaatttccccaaaaaatggaaaccaaattccaatttttttttttttaaatttggaaatttgcggaaacctgttttgtttctttttgattgaaattttttttaaaaattttctttcaacttaaaaaattttttaaatttaaaataattaaaaacataataatatgtaatattattattattattattatttttntttttcttttttntattttttgtgtntttttcnnttctnttcttatgtgttgggcctttcttnttgatgttgttctgtctttgttttttgttgttttcgttntttttgtgntggttggggcttctttggtgaagcggttgttttcttcttttttntttttccgttttcnnctcnntttcntttcctctcntcgttttctttatgagattggtgccctttcctcnntttnggctttcgccctatatcgacaaatttaataatttacttaattttttgatcat

SEQ ID NO: 35935 - DNA, 696 bp, Heterodera glycines
  unsure (1)..(696): unsure at all n locations
actgtttcagctaattttttcattccatcagcacatttttgaggatattcttcgaattgcacgtggcgggctcatctttgctcccgaatattcgcccgtttctctgctaattgtgcctttaagacggagttttgaattatatttttatggagatgaatctaagttttagaccgacccaatgtcgccgattatgagttggatttagggcacctccgaggtgatattcgcaatccaccaacaatgccacccgaagaatgccgtcgttattttacgttcgatgaatcgcgttatactgatgctattgtcatgccatggttcaacttttattgacaatttaaattcgatttcttttaaaggtacagatctgaagaccaatgtgcgttttattatgttgctgaggtttgtcattcatcggcatagtgattttacaactttttaaagatttgccgagatcaaaatccgaattcgccgttcccagacaccaaatttagcagttttattgagtattttcttgtcaaataccaactgaaaatttttaatcaaaaacaatgtttgttggatgttgatcacacttcgtcacgaatgagtatgtttttcctcgccgaatgaatgttaaattatttaagatttactccnttccgaggccgggttctgggcaagtgtcccaaggggcttttggatccatcgcaacgtcaa

SEQ ID NO: 35936 - DNA, 157 bp, Heterodera glycines
cactgtcggaatgatgttgtcttactgaataaagattagaacaatttacgtttttttctagcggcggcgggcggttgcgccactttttcggtgagcgagacgcgtggtgaagccggcggcattgcctatacttgagcctggagcaaaaacaataaaa

SEQ ID NO: 35937 - DNA, 1148 bp, Heterodera glycines
cgtgctttgcttcggattagtctaaaatttctggacttctatttacatattagccattttttattttatttgtgaccccaaatttttacatactagccattttttattttattgtgaccaagcatatctttcctcgtatttctgggatttttttcagaatgtggtcatagaataggtgggttgaattatttgtattttttatgagtattatgtaaggatattttcgacaaaacataaccaattccgagtttcatgaggcatcaacttcattcttttcttgtcctgcccaattgtctcaaatgtatacctaaaaatgcgctaaaaatgatcaaacccgtttttagccgaatatcctgtcaatatttccctattagaaacgatactgtgaattctttcgcctctttaattcattcgtgctttgcttcggattagtctaaaaatttctggacgccaattttacatattagccattttttattttatttgtgaccgcaaatttttacatacgagtttcatgaggcatcaacttcattcttttcttgtcctgcccaattgtctcaaatgtatacctaaaaatgcgctaaaaatgatcaaacccgtttttagccgaatatcctgtcaatatttccctattagaaacgatactgtgaattctttcgcctctttaattcattcgtgctttgcttcggattagtctaaaaatttctggacgccaattttacatattagccattttttattttatttgtgaccgcaaatttttacatacgagtttcatgaggcatcaacttcattcttttcttgtcctgcccaattgtctcaaatgtatacctaaaaatgcgctaaaaatgatcaaacccgtttttagccgaatatcctgtcaatatttccctattagaaacaatactgtgaattctttcgcctctttaattcattcgtgctttgcttcggattagtctaaaaatttctggacgccaattttacatattagccattttttattttatttgtgaccacaaatttttacatactagccattttttattttattgtgaccaagcatatctttcctcgtatttctgggatttttttcagaatgtggtcatagaataggtgggttgaattatttgtattttttatgagtatta

SEQ ID NO: 35938 - DNA, 1128 bp, Heterodera glycines
  unsure (1)..(1128): unsure at all n locations
atcanntgcgcaggcccatnagccgaaaaaaagaaattcacgttggcgaaaagccgacgttgttttttttttggtccctaagaattttttctctgatataatttttcagaattaggccttatggcattttttaaagtttgtccaaaaaagcgctgaaaatttttaaaatttttttttacttgtgatatcttataaaaacttttctcagattctttttcttgaaagaattcaaagtttgaaaattttttaaagttttcggcggcgaaattttgggtgcatccgttttccatctgtccaaattagtaaattgtattttttttttcaggtccgtctctttcgtatacccaaattctgcggcctcctcaaaagtgcgctgcgctgaccgaaccaacgaattgtgtgactgcaccacatgaaattcatcgtcttcgatgaacactgtcgtcatcacaaggttttttttctcgtatttttgccctattaatgggtccgtatgccataaatattgtctttggccaaaatactcttttaaattaatttaaaagtaaaaaaaaaaactaaaaaacagttttatatttggtaccattcggtgcaataatgagtttaatcaagctgaagaaaattttaattcaaatagttaaaggctaaaaaaaatttatgggtaaacataattattgattttgaatttttgacatcgggaattgtacctctgatttcctactattttgtttttaatttaaaaaaactaatttagtaaatcttttgtcaaccgtcgtgatcgctatttgctgatcgaagacggttcactgttgaccgactttttcgtcgacctgttccgcattgttggcgacaatccttccggccggcggatgaacatgtcggatttcccgccgtggtaacaatttcgccgatacatccggagacaggtaaaaaaaaatttttcatattgtttgatacaaaacaatttttttttttggaaaaaaacgcagattttcaatacacttttttcaaaaaaatttcttttactttttttcacgtttccagcaaaaaggagacgacgacaatccaccggctggagttcacgctgatgaaaggctatttcaaactgttcgaccctagccgacttca

SEQ ID NO: 35939 - DNA, 1319 bp, Heterodera glycines
  unsure (1)..(1319): unsure at all n locations
tgggatattctttgaactctgctgccttgtggattttaatttactcaaatccgtgcgggtgttttttttcacccacgccgcgcagcgccgcggaaggtcatcaatcatccacctgtcaccaaagtgagaggtgaaggaaattcaatttttctttttcgcaaatttaaatcttttgatcccaaccttttggggtattttctcaaatcctgagattttttatcataattttttacccgaaattaactcattttgaaaattgccaaaactgtgcggttttttatcataattttttacctgaaattaactcatgaaaattgccaaaaccgtgcggtttttttatcatgccccctcactcccctcccttcctgcgccgcgattccgccgccgcgcagcgccgtcatcaatcatccacctgtcacaaatgtggcaggtgaaggaaattcaattttttattttgcaaattaaatcccaaacctttttgggcggttttattttctcaaatcctgagatttttttatgatgatttttctgaattttgaaaatttgccaaaaccatgcatttcctctccgccccgccggtgcgccgcgatgccggcgccgcgcgaagtaatcgataacaaaataaatacccaacagaactataaattgggggaccgtcccaataaatgaaaaattttttatcgtctccctaacttcttttgagccattttcagatagggaagaatataatgatacatttcatcaatttcagaattgtttttagttcccgtaattacgactttaccggtccagaaaattaacgctgtcatgcttttaccccgcttgaaatttaaaccgcaaaatatttcgggttcataaaaggcacgacgattttttcgaaactcgttcaattcaatttcacgtccgaatttaaaggtcgaaacaatattttcaaccgtgtgtccggtgtaagaagcccccggacaccccgagcccttaattatttctatgaaaatttttatcgcattttcacagtctatcagacttttcgtccccagacatatcattttcccggattcccataataatgccgtggctttgatggaagctgtgcattttataactgcggcattgaattttctagggttatacttaaattcgcattcggtgatcgtcagagagtttagtttaattccggtaccgagattagcgagagcaattatatttacgattatcggtttttgcatttttgatancatgtaccaatcaaaatgttctttcactccctttatataccccctctataaatagcaaccaaaaataaaattaattngaaaaaa

SEQ ID NO: 35940 - DNA, 457 bp, Heterodera glycines
gttgaagaggcgccatgacatcatctgttactgcagcgctccatccgacaacgcaaactagttgctgatgctgctcaagttggtcatgtgccttatatacacacataacccggcaaagttttgtcgagcgccgatgcgtattcctttcaggcgaggggtgcatgttcgtgacgaggtcgaaggtggcggggttgagcgatggagaacagacgacagagagcatgtgacgcaggaacagagcctggcttgggatttgcgactctcgacgacagtagcaggaaggcgagctcgccagtggagcagcaaatccgaaagggcgcgacactagtcgtcgatgctcgagagaagcgcgatgtggtgtgctcatcgcaggtgcatgagtttgaaagagcaagagaggtacgacaacatcatccagaccacgccaatcaggatcgttgagccgttcggtcggcgc

SEQ ID NO: 35941 - DNA, 385 bp, Heterodera glycines
  unsure (1)..(385): unsure at all n locations
acctcctccccctcnccccttcccctttaccccccccccctttttttttttttgctccattggcctactcccatttgtagcaacagagaagccagagggcacataaaaagtgttagggaaacgaagagagtgtgtaaagagtgtggtggtgagggggagacgcaatcgccgttggagtgaaagtgggagagattgtgtggggatgggttaaggataaatggggctggggagggcggggggggggaaagggtggcggcggtttttgaaaagggactccgttggaggtgtagtggggtgcatttgccacgcctctgaaggttggcgacataacaaggtcaagttaataaacaattcatcctaaccataattgcactaacgggctttg

SEQ ID NO: 35942 - DNA, 930 bp, Heterodera glycines
attaattggtccgcttttcgctcactttgctctcctaattgctcactttaatcgatgggtgtgggttgcccgtcacgtaacatttgaaccgtttcgattcgccgggttggccgttccacactttcggctcgacacgtgccgtcggtggctcttcctctgaatattttaattaacaaataaactaaaaatttagtgaatgggaggggggggagctacgccattctttgtccctccacgtgaaaactcgccacaaaacaacgcagggcaaccatgggcgacccccttacctggagaaggtccctcgcatccaaactctccgtacaaccaaccaggacaaaacggatacttccctcctgctccaaatgccatgcccgcagaaccagggtatccaaactactatggtccatcgccgtccaacgcaggtagttcatccggctacggcgcaccaaactctccaccgccattccaacaacaaggagacgcaaagaatccgtacaactatgagcccccaccaccaacgtcgccagcaccgacgtcggcttacatggcagccacgtccgaagtctcgtatacccaaatgtccgacgtgacccagtcgagtagtgggtacaagccgcccatcgacacaaaggcttcacccttttccaagggtgcagtgaacccaaacgccacgcctgtccatcgtgcggatggtccaagtggtggcgcccaggctccgccacaatacgatgcaccattctgagactcggatttgttatcacgacaggtaatttatggacttatctgggctctcgtatccgctccttttcgccgggtatcctactcttgatcgttacaatgcgatgttcgcacccatgacgccaacccatactgtagtgtacattgaaaacaggacatctattgcacactcgcacacaatgatcgtacatg

SEQ ID NO: 35943 - DNA, 1405 bp, Heterodera glycines
attcagaaaggaaaaaagcaaagtgggccaaaatcctaaggctttttttggctcttcgcctaaaaattaaaaatttattattttccaaattaggggccaccaaagagaggcaatttttgtccatttattactgcttttaacctcaaatatccgatttgatacttgttgttcaaactttatgaaatttgaggtccctaaggtgtccccggcttgaaataattactgtgcctttttttcattgtatcagcagacattcgtaattcggcataaaaaacatcaaacaatttgtctgtcactctcttccccctccccttttccattctctcgcctttctcccaatatttgctaatactcttttccatctcactgttctctctctctttctctctctctcccgtttttctactttcctatgtttttgacacatctaaaactttcctgctgctgctgcttttttttatattggtgtctaaataattgggggaatttaaacggatatacaaatgtgtgatggatgtgaatgttgtatcctcctcttccaccgttccccattaaacaaacaaactctcctctttttcactctctctctctctctttcacacgcacaaaaaaagtttgccccttcccccgggggtcgtccgattcagcgtttgtttagtctgtcatttcatttccatctccgtcccgtcgctcgtttggtgttattgcgcgaatcgctgctgctccttcctctcacatctgtccaccaattttattggcgaccgaaacgatagctaaggggggggggcgacagcgacataaacgaatatgtaattggcgggaggacatggcggggcggggggcagttgaacggacacacccgaccaaccaacaaacactccgaggatcaattcccaactcaaattttcccttttccgcctccgttcgttttcgccgtgtcgccgcttccttccattttttgccttcatcttaccgctttttgctcgctcgattttcgatcccatttttctgttgcttcatttttcatgaacaaattgcatacacaatttcatgtcgcaatatttttgcttttttatgctccatgtggttttttttattaccaatcgccttttttgggattttttcttcatggattcattcaaatctgctgttgactttctttaccaatcccacctacaattacaacaaacaaagtggtgccttcagcaacggtccatgacacacaaacattcgcttgaccattaaaaattgcaaacattcacctacccctcgggggggggggggcatcggtgtcagtcacttttgctgagggggctttctttgctcgcccacttttatggtaccaccattcttcgccgtgatgtctgtttggttttctgttgttttgttttctctgtttgccctt

SEQ ID NO: 35944 - DNA, 927 bp, Heterodera glycines
tcttttccttcatttcttccggtcttttttccgtctgtcgttcgcttcttctccttccgctgactcagttccttttttaaatgccactgaaataattccgttttccgccacttccgttgagtcactgattttcgacagcgtaaacattacaaaaatttcgtccttcattcttcccattcttcatggcctcattattgcgtaaattgttcggttatcgacgcaaaaaagtgacaaaaaaggactcaatcaccggacggaacaattcatttgtgagtctttgaaatgccctcaggcatttctaaccgaagtgaatttattcattcgtcagccagtgccgtatttgtccaaattggaaggcaatcagttgcaaccggggcaatccctaattgtacgtggcattatcatttgtatgtcgagtgcttttgttttttattctcgataacttcttattgttcagcttccgatgagtttgtcatcaatttaaccaatggtccgcggtaattaaaatttcaaaaatttacgccttttaatttgtatcctcttaaccctacaaaataaaaaatatttttaattaattattttgagaattaatgttgaaattaattccgtatttcttgaaaaagagctctcgagggctctgtttttcaaccccctctcaaaaatatgggggttttttagggggggggggctatattataggaaataaggtataaattttccatttcaaatttatgttggttttttcagtgtcgaattggacgacgaagtgcggacactcgacgatcggttgctgtgcatgcgcgtggaaatggggcagaagaggcggaaagtgcatttgaacgcgtgcataaacggcgaatggggccgcgaggcactcatcaaacacaaatggcgaaacggtgggggcgggaatgaacaaaatgaata

SEQ ID NO: 35945 - DNA, 1159 bp, Heterodera glycines
  unsure (1)..(1159): unsure at all n locations
tcctcaaaatacaccgttttctttgcttccgcaatctgtgaatganccgtcgacgagtaccaaaaatntattttccagaataattgtcatatttattagctttgttttggcttctcttggattcaagtcgaatttttgtcgaagatttggaaatgccaaattgtgtgaaattcgatactcaaagagttttggaagttagttaattctcatattttaaattaaaaaaattaatagtaaatagtaataattctactttcagctattgaatttttgtgttcgaaagaattcgaatgggattgagcagttcgacgtcttttatctgcaccttttgctgaacagcgaaataaattgcataatgaacaccgaaattggacttatcaaaaaggtttgtggatgttcccgaattggctcaccattgaatgaatttgctcctaaggaagcggctgccatcctcgattactgtatgctgcgaaatgcccgcaatttgcttgaaggagcctgtgtccgtctgcttgagggttggctttcggtgatgaatgttctgtccgtgcactgtcccttgcctttcatcgatgcccgtcgctttccctttgcaataaattcaagatttaccctataattcagaaacacaccaatgtcttctggtcgatgcgctttttcttctccgttcctattgcaattgcgtcgaaatgagttccgaattggcctcttctgttgcgttgtgcatttcgcgaactgtgcgggcaatttgtggcattttccatagaatccgcgaggtccagccaaatctttcgcccattcggcgttctctactgcccattctccatctcctacttcaaatcattgttcttcctggtaaaaccaaacattcatgattcaataattgtaaattcaggctacagcaaatcaatcgctttcaaaatggagctttattcaagttgtctacgtgttttagacgtttgtagcgcaccgccaaaaagtgaaacagaaaaagttacgacgcctgtatcaaaagacacaacaacggagttcaaaaatctatgtgatttccttctttcaaaaactaaaagcgaactttttggtggaagaatggaacaaaacgacgaaaggcacgacggaagcagcgaccctttggcggaaatgttacagaaaaggggca

SEQ ID NO: 35946 - DNA, 803 bp, Heterodera glycines
gacaaatctggcatttgccaaacaataaaatgcagattcagcgccatcagaaaacagcaatttgcacgggtccgggtgtttccgggcccacaaaagccggatccgggtccaagtttttcaacaaggtcaaccgggtcctgaaaaaatattcaaattttgaaaaaaaattcacgaaagaatttgtgctttacaattattaaaataaatattttcgatagattaatataaaatcaagtaatattttttgaaaaaactcaaaagacacaaaaaattaaaaaaataaatttttaaaatttcaaaagatttctccaaattacttgagtttttagtttcttaaaattaattattttcatgaaatgagaggtcatgttaaaaatttataaaattccttctaaataaatgaattataaaatccatttaataagagatcatcttttgaaaaatgtcaaccctttaatctcattcacagttgtcaacatttttgcaacagctccatcggatgttggcactttttccgaattgtgccaatgtcccttcctttctcatttttccgttccgtctctttttccaagttttttccttctcttttttctcttccctttttttctccgacgaacgaattaatttttttgttacaattgaattgcgaatgaatgctttgcctttccacttctgctgatggtttgtttgctgatgaccttgtccctatttttcctatttatttcgtccatttttttttggtaacgcctttcgactgtcaaaaagtgcctttatttttccctattttcccttgttttgctccc

SEQ ID NO: 35947 - DNA, 697 bp, Heterodera glycines
  unsure (1)..(697): unsure at all n locations
ctccatggattattgaccaatggccgtcttgaagaattccttccggtgagaattgagaatacaattttgttttttttgcgtttacattttctaatgtaatggctaatcatttaaaattcagtctgtcgctcttacacgcctggaaatgatctcaccgagcattgcgaagcaaattgcaaaaaaacttacgaaaatccaccaacagaaggacatgcctttggaaataaatgtgaccaattactttttttcttcatttcaattttcctcttcagcctaacatttgcgacaccattgaagggtggatccttattttgttgtgttcatttttcaattttatttaagttggctgagtctgttgagaagttcgtccgcgtcgggatctgaattttacgtggaaaatgcagatggaaaatgtgttggcataaattgtgaacatttacagcaagaagtggagcatctgaagtgggtttcttcgtgccgtcccacccgtccaattatctaattaagggaccgaattcgacgaactcaaagtgtgacagcattttgccacaacgacctgcaacccggaaatttcttgcgttgtcaaactaataaattgacgctgaatgccaatccattgaggaacaccgatgcaactcttatgatcattgactatgaatatgncagctacaattacagttgagtgatatcgattcac

SEQ ID NO: 35948 - DNA, 1799 bp, Heterodera glycines
  unsure (1)..(1799): unsure at all n locations
agtaaaaaattaaattaaattaaaaaaacaaaataaacgcgatttttaagaaattaaccaaagtgttagccgaagcaagcaaaggttagccaatttaacacttcttttttaatagctcaaataattttaaagggagtcactcaatcgcctcattattcggttcaaacaaaacggacaaaaagtgatcggtggctcgaaaactaaccaacgattgttactatcttttggcccctttttattttgtttttttttaaatattctatttttaaacaattgctttttgcatttattgtaattattatttttattaattatataaatttattggtttatttcacataagtccattttgaccattttttagcaaatgtcgaagagaaaaaacgcctctgacaaaagcgaatcggtggcggaggggtcgcccagtcccaaattgggtttctccgcttccaattcgatggcattttgttcggtttactttaagcgtccattttcgtcaacccttctcagaggctgaatgggctgtggaaagtgatccccgatcagctgctcatttactccgtcgatggcactgaaaatcgaccgaaaattgcggcatttgatttgggtaaatgggggttttgggaaaacaaatgtgtgattgccttgcacagatggcactttgatcagaacaaagtccggcaacacttttgccaaaaactgcgacgattggcaattttggtcgggcaaagtgatcggcgcattgcgaaagtgcacnttccgaggggttcaaagtgtgcattttcaccaaccaaaagggcattttgggtgggaattggcatcgaaactcgaaaaaaatgaacgcaatttccatccgcagaaaggacacgtcgacgcgggtcattcaaacgaaaagtgcaaaccatgtcacgcaaaattggagtgcccctccaggccacaacactttttgccattgtttgacttttttccccattttaaggttttttgttcgctnngganctccaacacttccgaaaaccttcngtcggtcagtgctaatggcataagcaattagtccaacaattgcccactgcgggacaaagagcgacagtccgtttttatgtcttttggtgttcgacccccgccggcntttcggatggtatcccaaattcattcaaatcggaaagtgtgaaaggagttatagccaaaaacggactgtctctcagttggccatcgctcagttgtcccttccgttaattgtcccgtaacttttgcaatttttcaaaaggaatgtggcaaaagatggaaggcgaagagaacggcgaagtccgagtcatccgagaagactcattttacgtcggagatgtgagaaaagggggaaacccattaacaaaatcactagtcatgtcataagaaacactttaggctgctggtcgccttaaatcatcggtttttcgtttttttcatttttccgaaaaattcgccgttttattttctcagatccgtcccaaaaacgaccattcgtgcgccgaccgactcttcgccctcaatctttcgctgacctttcaaacgcccgaacagtttttctccaaagtctctgccgaagagccgttccgtctgcccgagttcaatccgtcccaattccttcgcgaacattccgcccaatccgtcccaagtcccttcccccgccccccaatttccaactctaattagtcgttaattaacttttcagatgatttccaaatgcccggcccttctctccccgaacttttgctgcaaaacggttcgcccgcctccggcaaaagcactttagcgcgtcg

SEQ ID NO: 35949 - DNA, 601 bp, Heterodera glycines
tgatttgggggaggggaggaaataaaatcattcatttgttggtgtcctttctcctcccacgacaaacgcacttcatcatcatcatgcccagcagtaacaccaccaccgcacaatcactcatcagcagcaacaaacagcacacggaaatcggtgctgttcaacgcgagcagagaatgacaaattgcgccggaggggcgaagggaggaaaaatgcgaggcaaaggcgggggaaaggcgagggggggggagaggagaccgggggcaggggacccacgcggacacccaccgaaaagtgattagcaaaatttggggaaactcttcttcgaatgtaactgatcaaaaaacagtgggggctcaggggcatttcactcagtcattttcagtcaactccaattaacttttgctttgtaccctcaggctattatcactaattgccccccccccatttgtttgacatttgtttttgaaaagatatgccatttccctcgttacccttttgtgcccgcccagtcatgacatgtcgaattacctgcccaccctctgctgatcacagcaacacaacccccacccatgcccccccccctctttagtcaccccttttc

SEQ ID NO: 35950 - DNA, 750 bp, Heterodera glycines
  unsure (1)..(750): unsure at all n locations
tttgatcaaaaaatccatcgaattacaactgaaaagtaatttggtcgcgtaacagcaaaactgatcacaaatttcaactgaaaagcaatttgatcgcgcaaaagcaaaactgatcacaaatttcaactgaaaagcaatttgatcgcgcaaaacaaaaatgatcacaatttgatcaaaaaatccatcgaattacaactgaaaagcaatttggtcgcgtaacagcaaaactgatcacaaatttcaactgaaaagcaatttgatcgcgcaaaagcaaaactgatcacaaatttcaactgaaaatgatcgcgcaaaacaaaaatgatcacaatttgatcaaaaaatccatcgaatttcaactgaaaagcaatttgatcgcgcaaaagcaaaactgatcacaaatttcaactgaaaagcaatttgatcgcgcaaaacaaaaatgatcacaatttgatcaaaaaatccatcgaattacaactgaaaagtaatttggtcgcgcaaaagcaaaactgatcacaaatttcaactgaaaagcaatttgatcgcgcaaaacaaaaatgatcacaatttgatcaaaaaatccatcgaattacaactgaaaagcaattttggtcgcgcaaaagctaaactgatcacaaatttcaaactgaaaagcaatnttgatcgcgccaaacaaaaatgatcacnatttgatccaaaaatccatccaattaccactgaaaagtaatttggtcgcgcaaaagcaaaactgat

SEQ ID NO: 35951 - DNA, 1273 bp, Heterodera glycines
taccatcaccaacaccacggctactatcactggtgttcatggcacaggtaaattcaccatcgggcattacgccaaccgatttctgctgttgggacattgtgggaatgtccatcatctcctctttgatcagcttttgtgtttcaccacccgccgaagcagcagcagcagaagcagtgcctccttaacaaaagagaaggggtaaatttgaatttaaaatatgatacctaattttgttctaggaattatgacaaaaatagatggagccttttttagggatggaaagaaagttcaaatcgggatcccgacaaaatcggaacttgagtcccggtgtcaggacgcaaatcccggcaaaatcaagacttgaattccattccgggcctgatataattctgaactcaggtcccacatctttttcaaaattccgggttttctactcatatcacagggactcaattggccacctgtccccgctgctggcggcgctcttttctcttttgcccccgccggcgtttttgttgttgtcgtctccttcatttcaccatattcatttagctcggattccatttccgacaatttgatgcgctttatttggtcttgggcctcgagcagcggcactttgtgctgggacattcggtgccgcttcacattctttcggcacgaatacctgacgaaaaggaaaggaagggttggggtacggtagaatctttgcttctttttttttgccaactcagcttcaataaaatttctcgaagtttgaaccaagaaaattgacataaaaatttgaagaaaatttatatgagaagctttctaaaaaaaatcttagaaaaaaacttttataagaaaatttcaagaaaaaaataaaataaatttctctaaccattttttctaattttcaaaattctttccaacaaatagatgaaattaaaaaaaattgtttcttgaaactttcttaatttttcagaggcaggaggaggagggggggggcataatttttgtcgaacctctaaccctatgaaaaaaaaacggacggttttctgcactctggacaaaggtagcgataaacatttcggcctgacgctgttgttgtcaatgctgccgttgtctgttggctttttgaaggtgccgaggacgacgcgctgccatcaacacaacaatcagctgcatcagcaccaccaccgccacttttcttaacacaaatgggggtgtgagaattgagtgaaaaacgattttattttctaaccaaaaacaaattcaataaatacaaacgaaacat

SEQ ID NO: 35952 - DNA, 1280 bp, Heterodera glycines
  unsure (1)..(1280): unsure at all n locations
aatggatagtaattaacaagacaaaaggatcaaaagcgaantttacaattcggaccgatgatgactatcacaaatttgaggaatttccgttgccggaccatgcgctgcccaacaaaatccgctttagagaccttcggattgagtaaatttatacttttgttcattcatgcacaaaaggtgtatcaggactcgggaccgaagaattctcatacaaaggcccaacaaattttttccatcgcgactttttttgtgactttccacattgcttttgtgcggggcgctctttcaaaaaaaattttttttttttttgaagaatgggatgggagtagagaatggcaaatcaacctttttattgctttttgcggggtatcaatttaaatgtgcgtgtatgctgactgatcatttttccaggtacattgaccattccgtgatcacatttctccgttccaacaagcaaatttttgaccgaaatgtcacctatttggggttggatatatttacagacataattgaaaatgatgaccatccgatttggccaattttggcccgtcaaatttggccaatttttgcgacaaacattcacattttggactgtgccgatgacaatcatttggacattttggcgtaccaaatttcaccgacaattctcaccgatgttgatcaattgaatgtaatcgcttttgatattatgttccttgatggaattgatgatgaaatttctactggccaattgttgtccgaatggttgcacattccgagaaaaaatggtaaaccgaagaaattgtattgcggcaaaggatttaatgttgaacgacacttagattggatcaacagtttcaaggaggtgcgtttggtcacattctcataaaatttgggttaccgtacttacttactgcattagtacccccctctgtattaaaaccgccctttcgagagagggaataaatagtctgtggtttgttccccccttattcaaaaaaaaaaaattaaattttcaaaaatcttgttaaacaactttttattgggctttcgaggttgctgaccacgaatctgatacccatttcgacctatttcggaacccggacctgaattcagttcagattcaaacataaaagtgaattttgatgaaaaattgattttcgatttttgttcgaatttggatcatgggttcgaaattggtcgaaatgggtattagaatcgtgatcagcgacctctaaaactcataaaaagtgtattacacgattntttataaattttatttttgaaaggggggggggggg

SEQ ID NO: 35953 - DNA, 926 bp, Heterodera glycines
tgaattttatataatattaatttgttttttttaaattttcacctttattttaattttattttttgtggttttataataatttttaaattatcaaaataaattaatttttagaattttagttttatattttctttagatgattagatgtgaatataattacaatgtaacattagtgatgaagtttaaatttaggatggtgggaattatgttcattttttgatggttaaagagggctctatgatataaaaaaatgcttaaattactaaaaatttttttttgcaatttctaatcattgactttctaatttttaatttttccctataaatttcataataatcgttcatcatggctgttaagccttttcctgcaaattagctgcttttcatttctgcacacaaacactgctacgaatctgccccgtccaatcggcataaattggatagcaaatcactctaattataggcaattggcaatttttggcacccaaaccgatcatcactgtcagttttgacaaccaaattcccatttattcgaaaatgccgtcgttatttgaaagggtctgtttgcgacaaaactcgctgtaactttatatgagggcttgacttttttaaaattaaatttctacagagtgagggagagaataatgcttgtgacccacttattttcagcatttttcaatttgtaaaaagttactttcggttatcattttacataatctccaaaaaaaattaattattttccttttttaatcaattgagtagaaaaaagaaattatttaataaaaaaaaattcttttaaataaatggccagtagggaagaaaatataattttattttttatttttttccaatcatttttttaccggagatcagaagagacttgtgattttttcatgtgaataaaaaagctctttattgactaaaatg

SEQ ID NO: 35954 - DNA, 1001 bp, Heterodera glycines
tttttgctccccataattgtttgagtaccccaaacggacatttgaaaaaatcgatttatttttgttttcggggcagtccccccgaaccgatgcgcccagatttatggggagaccgaatccttccggaatagcttccctatagcctgtactttaattctgcgttggatttttgctccccataattgtttgagtaccccaaacggacacttgaaaaaatcgatttatttttgttttcgggcagtccccctgaaccgatgcgcccagatttatggggagaccgaatccttcgggaatagcttccctatagcctgtactttaattctgcgttggatttttgctccccataattgtttgagtaccccaaacggacacctgaaaaaatcgattttttttgttttcggggcagtccccccgaaccgatgcgcccagatttatggggagaccgaatccttcgggagtagcttccctatagcctgtactttaattctgcgttggatttttgctccccataattgtttgagtaccccaaacggacacttgaaaaaatcgatttttttgttttcggggcagtccccccgaaccgatgcgcccagatttaattcgatcactcatattttttgctaattgagcagaagcgtaccaaactttgcagggatactccccggtaaaggactaacttacactgaaatgagcgccgagctagctggctcaaaaaaattttcgaaaatctgagtctttcgtttttatttattttttgcaaaattaattcttaaatattttttcagaaagggttctgaaacgcaccaaattttatttacatgttagtttaggcactctgatgctttttctatcaaaaagggagatgaataaaatttttaaaaatttttaattcctttttaaacaggccaaaaagtttaggcttaacttttttttcagaaactgatcagaagcgcaccaaactaaggagggatactgaaaggaagagaaataacctattttaa

SEQ ID NO: 35955 - DNA, 1268 bp, Heterodera glycines
  unsure (1)..(1268): unsure at all n locations
taaattttcacgccggatgaacagataaggaaagaaaaggttttgctgttgcactttcagcgttcaatccaaatgtgcgtggcagtgcatccaattcacagaaaaagtagttcagcgagtctntaaagatcacgtgtcgttgatggttccctttcaaagtcatcgaaaaaatttttagtcccgttgtgcaaatacgctttggtggcaaattgcgccggtgaagtgcctccagtattaaatgaatgtcgtattttccgccattgtgtgataaacaaattgttttcacaccatgtggaccacttccggtgagaaagttgataaaatcgtccaccgggtcattgttggtagcgtcgtcaaaactatggaaaaacagtcttcgtgggttgtagtggacattggctgatagagcattgtcatccccaggtgcattcagaaacggaggagaacaccagcgacgcccccttggtcccgcaggaggaccacacacacacccatttgcgtattgtccaacaccagaatgaaccgaaattccttcatttatacacgcttcgcagataatttcggcaataatgagcattggaacatgtttctgtacaacctttgtacgcagttgaagtggtaaatcttgggacgtttcagcgtcgaaaaagcaaagtctgaccgaccgatttgttccaacttcttcttcttcctcattatcagcatcatgaccgtgatcgtcgtctccctcctcgttaccatcattatcatcatcatcgtcttcgtcatcgttattattattttgttgttgttgttgctgttgccctcttcttctccttctcctcctcattggttcatctttgagaggctgaataaaacaagggtctccactttgatggggtccagagcatcgtgcacagcgcacccattccgtttggccaatttgggctggacatttatgtggataattcgcataggttatggctccacattgtcggcatgctcttctccattcacatattgngcgaaaagtgcgtcctccctgattatacatgcttataggtgcccgattgctcagatgataggcgaagcagtcgtcatttggaaaaacgattgacaatcacggcaaagacgattgccangtgacccatctgctcgggattgctgttnngttgtgtgttgtttacatggataccctgcgccaaaacgtaaacacagacggcagacgactttgcattccctgcggtgggaccagcgtgtcacgcgacgttcacaatcaatacaatatc

SEQ ID NO: 35956 - DNA, 725 bp, Heterodera glycines
ctaaatcatatcaatggttgatgacttattgaagtttgcatacttttttcatgcatttaaacgaccttactttcttgtatgaccctaaaattatgacaattttaattttctttataagtttaagctcaaagatttctctattttcagttaaatttcaatacattttattgagtttcaaaaagttggggacgaaattattgagtctaaatttttacgaaattttttagttaaaatttttcttagattttttaggtacatatgattgaagatgatacatagagctatcgcccaatgccaagtttcactaatttgactaagtttgagctaaagtatgatttttaattctgtaaataatgttggcgctatttaaaaagagtaaacttttgaaattttttcacttttgtttggtcaattttttttgtttattttaatgcagaatttgcttttttaccagatggtacgcatttcacgctatttaataattgatttacaacaaataaaagtatattcacgattttttataaaaaaaaaaaattttcaaaacaaacgggaccccctatggtttttgataaaattcaaaaatccaaagtctaaaaagtatctttttgaaatttttttcactttgttttcaattattaaatagcgtgaaatgcgtaccatctgataaaaacgatttacataaaaataaagagaaaaaaaaattagaccaaaaaaagtggaaaaaa

SEQ ID NO: 35957 - DNA, 1332 bp, Heterodera glycines
tatgagattgtagttcatgccaatgcgtttgataagttcggtttttcaattggcgtcaattcaaaaagtttgttcagcagatgctcctaattgacgacataagcgagtcccgaggtaataatcatcacttctaattagcgggggctcaaatttgaattggtaaaaattatttcattcgaaaaagataaattgtgtatgcacaaccgcgcaaatgaaaattttcatgttaaaagtcggaatgatttccaataaacgtcaattattggaagcagggaacggcacttctgtgaaaataaaatttgcaattgggctatgtttttcacctgacaaattggaatatgagactgaccgagaataaaaaaggattaattttgaataaaaattgaaaactttttgtaattttctaattattttttaatttaaaaaattttcattgttaataaaatttaatttttctagcttaagtcccggtcattcattcacctgtttctcacgtgctaattcccttaataatcattttaagattcaaaaaagcattttcttttttcagtttcctatttctcagtatggctcgacttctgcttttagtttttggcttggccttcgttttcgccgttttggcctttggcactgcgcagcccccgccgcccttccaagggagcggttcgttcagagaaggtgaagccatcaatttaaatatttaatttgttatttttggcattttaaggccaattcggcgcccctccgtttggtggcaattcggcggacgtttcagtctcggcgagtgattcgtcggaatgcagcggagaaggaggaaatggagtgcaaggaggtgaaaaaaacgcgcatttttactttataatttatttttaattcaggtggggaatacggtaatggcaatggcggctttggcggaggcggtgccgaaggtggccaagggatggacatcgatgtggatgttgaacaatcatccgagaagtgaatgattttaaccacggttttttattgaatgtgatttgttttcttggtgtatttagaattcggaaatggacattcagcaacgataaaattattaccaaattttatggctttaagttccgcattagagccgtgaaaaattatcatttacaataaaacctcattatgaaatccatttgcaataattcaatcattaatgatcaagaactagttaaaattcgaaagtttgaactaattatcaaccaatttcgtgaaacctataataaattttaccagatttacacaatttttcctctattttccctcctccaatgcaaggagtcacttcacaaaccaaagccttgccaaaatata

SEQ ID NO: 35958 - DNA, 875 bp, Heterodera glycines
  unsure (1)..(875): unsure at all n locations
tcattaagcatcattngatcttcgctactaatgaggcaaacgtcggaaatgaaaccttttcaagaaaagacngcatcttatataaaaacatattagtaaagaataaatttgtaaaaatttatcgcatcaaaaatcaaaatgatttacattntattttctgaaataaaatatattaataaattctatacccgccggaaggaacaaactcgcgcagaatttttacttgaattgttctttcatgcatttttgtgggaaaagcaggaaaaggagtcattcagcaagagcagtggatttatttaaaattggagatttttgcaagaaatttttaaaaattaattagattttagagtttgaaccgaaaactgtgggtgattcaacaaactcacaattataccacttcgtttgaaaagaaaaaatattattttaagtctaaaaaaatctcacgtgtttttagggaaagaaaaattttaattttaaacgataccaccaaaatttaaataataaacattttttataataaaaagaaattgcaaacaagttggcaaatatttcacacattttactgtatttaagaatcagcagacatccatctattttaatcaaaatttatcctaaatttgaacaggagatactaaaatttaaatttcgtttgttcgagttcccgtttatgattaggaatttcaagattgattcagatttgtaatttgcgtccctgaaaaactctgtaacaattagggggagtttgtaaatagggccgattgttttcccctgttttcctgttttcaaccctttcttagcgaactataataaattaccactgggtcattaaaaagattaattttttttaatcaacgggctgcgcaaaagtttttttt

SEQ ID NO: 35959 - DNA, 658 bp, Heterodera glycines
  unsure (1)..(658): unsure at all n locations
aggtgttttcgacagtgattgatttcgacagtactttttaattgattttctacataatttattgtacatataattaatattataatatacgcttccatatacaaaatttataaaattaggacttgtatgattatttttgtgaaatggtttatcacttcactttttctatacaaacatcacttgatgactgtagtcaagaatacaaaaatttcttatatatttaagattttcgaatcgtgtgggaaaacctgccaatgaatgccgggtttgagtgccaagatgcaaatctgcaggctcaagcagaattcgaaaatcgcaaacccctctgcaatgtagaagagcatatgcttatccttttaataacagcaccgagcagggatgttgcgaatagaaaaataaaatacgagacacgagaaaaacgagacaataataagacacgagaatacgagacgagacaagatcgagacaaaatttttttaccaaaaaaaatcaaaatttttgattattcatttttancgagaaanntgtcggnncggaatctatctnaagataaacagtttttaaaatttggttcattttgngcgaagtatgaaataattctgtcaaaaatttttttatttttatggnnttttgatctatttatgtacatcgtgacgct

SEQ ID NO: 35960 - DNA, 777 bp, Heterodera glycines
ttaattgccatgaatttttgagggcattgccatccatatgcacatgtcagcattttgggaaagtaatttaatagaaaagcatttatttgtttataaagaaattttttattattttaaataaatatttattattagagaccggatttttatgtgctaaaaatcctgaaatatgtaataaaatatgtgttaaaaaaacccaaaatatgtgctaaaaacccgaaaaatgccaaaatatgtgttaaaaatgtcaaaatatgtggtaaaaattttgaaaaatcaagtgttttaagcaaaaaaaaaatcccagtaagtctaattctttattcatttcgccagcacaattgcaaattaaatacatttcaaggtgttctggggtaaaattgcctttttttgataaatcatttctataaattgaaagttccagcagagaacttcgaaatccaatgacgaattaatgaattcgattttgttactttctacattcgaaaaaaaattttaaaaatttgaaaattctataagaattgtgaacaaaagttgatttttaggggtgtatttttcaattttcttgtatttttattgctaatttttctcaaaaatgccaaaatatgtgccaaaccccaaaatatgtgctaacatattttatgtgccaaaacgccaaaatatgtgtttttatgtttttataagtcgctctaaatcaaaaattgttcggagataatgctatttttgggcttctctcgccataactaagccgcaaaaaaaatatgtaaaaacataaaa

SEQ ID NO: 35961 - DNA, 751 bp, Heterodera glycines
attaccatagcataaattgggttggggtgacaaaacaaaactgctacatcaatattcctacgtgaatggcataatacattgtgataattttttgtgtaggaaaaaaaccgaaaagtaccggtttctcttcatcccttactgtcttttcatttcctcgggaaatttaaaatatattttcaaaaaaatcttattaatatttccgtcccggtttttaaatcccgaacttttttggatatatagctttaacaatttgattttttattttgagatgtcaacactgtgtcgcgctttgtggatgaatgtcttggccaggatgggtatttgatgttgcattttgtgtcgcaaaatgcagggaaactcatcgcttctgagctgaccacccttttgtttgaccttatgacggcctctgactgattggacgccatttacatttttatgcattttcaatacatgttaattttgtcaggtccaattttggtttcattactttttcgcttgacattttctcctttgactcagacttcgatctcttttattgttttttttaatttgcttttgtttaataaatattatgacaattgggtgggtcttgaaaatccgatttacctatttaaatgaatcgactacggcggccgcagtgagtggggcgctgctcactcggcgcccactactgtatttgttcctcacattcccctttttgcaaattattattttccctccgttatttttgtggtacttaaatatctatttt

SEQ ID NO: 35962 - DNA, 628 bp, Heterodera glycines
  unsure (1)..(628): unsure at all n locations
cttttttgacatacacattgtagatctttggtaattggattaattaattttctataaatggaaattttaccagatgcatttcttccttttcgactgctccggttgcccgattgtaaatatccattgagtgccgtgccaatccatgctcttcctccagttttgcgtaaagcagataaatatctaaaattggaaatttacaatcaatgtagtattaagtaacaacatttacttttggcatatttgggtgggcatttgtccaagcattgctcaaacaaatcgcgagctctttccagctttttgccaccctataaattgaaaatttatagtttaaatagaccaaaaacacagcacatatcgttggatgaatttggtcagataaacgttccaaatgtcaaatacgagcggccaccggaaaagcccaattcccttctcgaacgccttgaaagcatcctcaaagtattggttgtcctccaaaaacagtgcataatttatcacgatttgtggtgttgctgaaattactccgggtaaatcccattggatgcttttcaagattcccagtttggtctaaccaatttcgcactccaacatccgctcatnaattgcttgcacttttcagtgagccatcgac

SEQ ID NO: 35963 - DNA, 1104 bp, Heterodera glycines
cgaaaaacaaattcctttaaaaaccgaaattagtgcgaaaatttgcttcatgaaaggttgaagttgaagacgagcaatggaaacgaattttgaaaattgacgaagaaaaaaaccacgcaattcgggcttgcaattttccattgttccaatcaaagtgggaagtaactaaagataaataaatttaaaaaaataaaattactaataaatacatggtgaacgtattgaacagttctcggtccaagagttgcaaaaatttggagcaacgcattcacaatttccttatgcaaagaagagagcagttgcggctcacgcatcatttgaacgaggttggagatggccaatgccgggtaatattccgccaaagtgcaccgctcgtaatttatccattggattatatcggtgccatcttcaaaaataaatcaaagccgtttatgggaattgcaatgctttattaatgcgatcgcatgcgtacaaagtgtcgtccaatttacccttcgctgcgactctccctcccctcccccgttattgtccctcttcgactggggagtgagggggggggggggggggatcggctggccgacctcttgtcttgtacaccagggatgggccaaattgaaaaataaaaagcgaaatgcgaaaagcgaaatttgcgaaactgaaaaatgcgaaatgagaaaaaaagcgaaatgcgaaacgccaaaatatgcgaaaatgcgaaatgcgaaaagcgaaattttttctacaactttttaatagttaaaattagagatcgacattttgaaaaatgcctggacctgaattccatgttggacctggatttcctggacaaaaatccaggaaaatccaggtccaggaaaaatccaggctcctcgagacctggatccaggcctggacctggatttttttaaactcattttaaaaatcaaaaaaatgtttgaaaaattcaattaattgcttgggaacatctaaaaatatctaatttacaataataatttgtttttaaatatatttaatcattttttgaacacttgaaaaaatatcggtcacttgaaataataaattctataatttttgccaggaaaatccaggttctttcctgttttg

SEQ ID NO: 35964 - DNA, 1099 bp, Heterodera glycines
tccaatcactgggactcaacccaccagcattccaatcactggcactcaactcaccagcattccaatcactgggactcaattctcctgcatttcaataactggcactcaactcaccagcattccaatcactgggactcaacccaccagcattccaatcactgtgattcaacccaccagcattccaatcactgggactcaacccaccagcattccaatcactgggactcaacccaacagcattccaatcactgggactcaacccaccagcatcgaacattttcctcgtcttttcttatttcttgtggcatttccttatggcacaacattcttggcattttcatcatctcttcttgttcttatcttttcttatttcttgtggcatttccttatggcacaacattcttggcattttcatcatctcttcttgtttcttgtggcatttccttatggcacaacattctttgcattttcatcatctcttcttgttttttggcatttccttatggcacaacacgacacacattagtgtctcacactaaggtcacacaaaccactaatgttttttcaaaagcatgacacacattagtgtctcacactaaggtcacagaacaaaccactaatgttttatcaaaagcatgacacacattagtgtctcacactaaagtcacagaacaaaccaaagatatgcatttctattcattaaaagttcaaataacattaagcataagcataattatttcacgtaaagaacacaaaaacaaaataaacaaacaaacaaacaaacaaacaacaaccactaaatcaaactcaaacaatatactgataaattttttcgtttacaaaaaacaaatttatatgacaaataacttaataaactatgaacatacataaaaaagcaaataaataggtataattttaagaatgtttattgcaaaacaaattgaaaaatcaaaaccaaacattttcatttttcaaatgcttttttaacgcaaaacaaaacaaaaacattttcattttcaaatcattttttaacgcaaaataataacaaaacgccacacaaattcaaaaatccgtacatacatacagacactcaacttta

SEQ ID NO: 35965 - DNA, 710 bp, Heterodera glycines
atttccggaacttcatatcattgaagaaatgtgaaatttacattcttaaggatcattgataactttgttggttacgccttttagtgtatatttatttcctagcacagaatcctatttcgttctttaatacagggtcagcttcataaattgaacaagaaagaaacaaacagttcgcttaatcggtccaagttttgaaaagtttgcagaggaggcgccgtcggaatgactcgacccttcggcggtaagaagaaaaagttcgaattggccgttgcaggatttgaacagaagttgctggtcatctcggagttcaaccttcacttcactgaagaaataaataatttgttacttattaaatttaaaggttcttttaacataccctttcaaattccaatatgtacttaattatcggggtcgctgatcgcaaaaactcaaaagtttgcccctgttcgggtccaggcttcccaatacttttacatagaaaaataaaaacaaataaactgactgaccctccaacttcggggtcattcgctttgcaataaaatttgaaatttgttcgattcagcaccgatttaaaagcagctaaaaacaaattataaatgaaatcaaaaatagttatctgttaacccaatgtgattttgtcagccgaggcgggaacatccgtacagtagaggagtcggttcatcatcgatgtgatagtaaacctggacaga

SEQ ID NO: 35966 - DNA, 880 bp, Heterodera glycines
ttcataaagtgccaccacgtccgtgtttttgctccaatttcatttcatcatacacaaaatttacgggctggggctgaggtaaattattcaaatttttgcggatggggacacctaagtaggtgtactaaatttttcaaattttaggacagtggttttttggctgtaaaaatttgtattttggtttttcaggtgaaactttcattgccgccacacaacgggctgatggtaaatttccaaattgttttgcttttttctaattttagaattgtaagtagcgagaaaccctccacatttggggaaaaatggagaattctttcgtcgggtcaaagccgtcggacgcataatttcaccttcatttttagaaaatttgtcaacttacagaaaactcaaatccaaaaaaatttgaaaaatcattttttataatctttcccctctggctaacgaattttgccaaattttttatagatgtagtgttttccagggactttccgagttttcgtgcatggggagaggcatagtgccacaaccacaccaggatggggctgtcatgtcgatgaattttcggaattaaaaaaaagttttttaaattccatcaaatttgaggcagttggcgcaaaccgcgccgggtgaaggccggctacgtgccgcaggacgagcagccgcgtttcgagtgccgggcgcaggcggagctgcgccagcgcagcggcggcgccgaggacagtggcgccaaagtgccgttgggctgggacccggtggcaatggtcaaaggcacgccgacaaagcaagagcaaatgccatcgaaacagcaacagaaacaaccgcagcaaagggtaaagggacggtgaaggcacttttaacgagtccaaccaaatccatttgt

SEQ ID NO: 35967 - DNA, 603 bp, Heterodera glycines
aggaatgatagaggaagagaacgagaaatatgaagagaacgagaatgaggaagaaaagaggaaggaaaaggggaacagcaaatggaagaggaacagaaagcggaagagaagaagagcaacagaaagtggaagagaaagtggaagaggaacagaaagtggaagagaaacagaaagtggaagagaacgagaaataggaagagaacgagaaagaggaagataagaggaaggaaaaggggaacagcaaatggaagaggtacagaaagtgtaagagaagaagatcaatagatagtggaagaggtgcataaagtggaatatgatcagaaagtgttagagaaagtggaagaggaacagaaagtgtaagagaaagtggaagaagaacagaaagtggaagaggaaggaaagaggaagagaacgagaaatatgaagagaacgagaaagaggatgaaaagaggaaggaaaaggggaacagcaaatggaagaggaacagaaagcggaagagaataagagcaacagaaagtggtataggagcagaaagtggaagaggaacagattgtgtaatagaaagtggtataggtacagatagcgtaacagaaagtggtagag

SEQ ID NO: 35968 - DNA, 595 bp, Heterodera glycines
gtacaaaaaatataatacgaacgtggtagttattaataattttgaccagctatgaaagtgccgcggattgagcagggagggctctgcctttgactcaacaacgggcgcagcggtccaaatggggttttcctccccagcgccaagggggaattccgggggtgaaacaatgtcccgaaactcggcgggccattcccgctccgagagcttgagccaattaggcccaaagtgccataaatcgaggccactaatttctctgggagaagcccctcgtgtgcctaaatccgcgggattatcattggacctaacgtacttaaaaattgcttccttttctctccgaatttcgttaaggcgattggcaataaatggcggttggggggtgtcgttagccacccaagataaaacaatttgtgaatcggcccaaaagaaaattttttcaaaaatatagtcgaaattagcgacgacaaaattttttgccctgaccgcggcaagcaatcccaaaagctcaagccggggtatggttagcccatcgttcttaaaccttttcggtctcaaacggaagaagcgaagaggaggtaagtcccaacccggccattat

SEQ ID NO: 35969 - DNA, 1076 bp, Heterodera glycines
  unsure (1)..(1076): unsure at all n locations
aatcaacacagcaaaagggatttgactttgggggccccggtaatttaattccaaaaattgcttaattaagtataaaatatttaaaaaagacccttaaacattttttctcacattgttattgcccattttgtttctcaatttcgtggatttttgttcgcaaagataacacttcgtcgatcaaaataatctgaaaataaaaattctataaaaagttatttcaaataaggttaaaataaaatgtaactaaaacactcaccagttgaattcttgctgatctgcagggcatttgccattagtgtggtcccattattcactattaaataattaatttttttaaataagaaatttttaatcataaaaatcactgcttgattttttggcgacgcgagtatttgttggctgaaaatattcaatcgtttttaaattaagtaatttaatgtgctgcacttgataatgatggctcattggttgcgtattgttcaatttcgttgccgatcgctgctgctgtaaattaaattttaatgtattacaatttcaaggatgaggaaatattcataattaccactacagcaattggtaagggcgggaaaagcacgtgcaagtaatcacctgttcattaaaaagtctaattaattttttttgtttttgtcgatcaaacactgactacaatgtttaaaatatttgacaaggatttgaaaagctcatcggattaaaaagattgcccaccaattgataaaaaaaataaaacgtaaataggtataacactcaccatcagttgtatttttgctagttacaaggacattggtgcgcgatgtaacattattttctgataaatatttttttaaattaaaatacgcaatttttattcataaaatcactgcttgaattattggcgacgctgatatttgttggctgaaaaatatccaatcgtttttaaattatgtaattaaagtgctgcactttatcatgatgtcccatggcttgcgtatggttcaatttcttcgccagtcgctgctgttcttttttctctaattcgacattttttgacgacgantgtattctaaaatatcanaaaa

SEQ ID NO: 35970 - DNA, 949 bp, Heterodera glycines
tgtaatggcattttttgtagtgggatgtgttcgctcgaccctggcacggtctaaatcatgtcgaacagcatccagatttaggtcacccgtgttggacatggaggtgagaccacgataaatttcttgcgggacaagtaaaaatttatttgccatctctgttaaatgaataatggaattcacaaaattcaacaatgatgagaggtatttatgcgtttttgttcacaaaggatttttgccacttccattagaacgggtgtcaatagggcagcgtacaatccgccaaatcctgcgtctttctggacaagcactcgcttggcaccccgttcacttctcgctctgctgattcggcgtacagtatccacataaggcattagtcgcttcttctgtctggttgtcagttggaagcgcgaagcgacgagattcaaacaaatttcgaccagcgatagtagttgttcagtgtttgcatttcgtataagtttcctgcatttttttccggattttgtcctgaccaaggcacagagccaaccgcgattctcttttatcagctctccaatctttactggttgctgtttatgccgctccatttttgggaatgaatacaactgttccttcgtcttcaccctgctgctcgtccttaaatatgttggttcgcagccgtaacgatggatctgatgcagcgtgcatatcaatcatcaaatagccatagggacgggcggtcgctttgcggtaagcatcaaggaaaaagtcgagctgacgcggaaagagttggataccaatgttgcgaatggacaacagggaattaggggcccgcatcagcaccaggtactgagcggacaggcgggccactttgattttccgctcaaacggtgggactcccgaatacacatcgactcccgccttttgaagcggcggcactgtcgaattcatttcaccaaaacatagagcattg

SEQ ID NO: 35971 - DNA, 838 bp, Heterodera glycines
ctgttattggtcaatttcgtgcggctgaacaccgaacatccctctaagaagttgtgcccacagaagcaatgagccaactatttagtaggctagagtctcgctcgttatcggaataaaccagacaaatcgctccacgaactaagaacggccatgcaccaccatccaccgaatcatgaaaaagctatcaatctgtcaatccttacggtgtccgggccgggtgagtttccccgtgttgagtcaaattaagccgcaggctccactcctggtggtgcccttccgtcaattcctttaagtttcagctttgcaaccatacttcccccggaaccggaagactttcgtttccgggaagctccccaccagggcgaataaatccgccggcggatcgctagttggcatcgtttacggtcagaactagggcggtatctgatcgccttcgaacctctgactttcgttcttgattaatgaagacattcttgccaaatgctttcgctgtagtccgtcttgctacggtccaagaatttcacctctcacgtagcaatacgaatggccccgtttgtctctgttaaccattatctcggtcagcaaaaccaataaaatcggaccgaaatcctcttctattattccatgcacgaacattcaagcgaaacgcctgtttgaagcactctgatttgttcaaagtaaactcgccagcccaccgacgccgaccggtaaaggccaacgccggggagagaccggcagaaaagccaaccaaaccagtaacacaccaagtgtgcaccggacggctagcacagatcccactacgagctttttaaccgcagcaataattctatgcattttg

SEQ ID NO: 35972 - DNA, 1338 bp, Heterodera glycines
  unsure (1)..(1338): unsure at all n locations
ctttcagataggcatcggtgtcgaaatgctcgtggaaatggcgccggtcaaaaagttcgccgggcattcgtcgctcagcggcagcggtcccccgcttctctccctttgtgctgctacagctttcctccccttccgaactgtccattggagttgctgttggggcggaacaaaagagaacaaattgaacccccttttttaggctagcaaatgaaagccggaaaatgaaaaggacgacggacggacagaagggaggcggtggggggaagttgggatctttggacgaagtttggacaccaagcaaaagtcaacacagacggaggaaagagaggggagagagagtggaggagatgaaaggagagacagagaaagagagacaaatgttgaaggtggagagaatgaacgattggcgagggggggggggggaaagcagacttgagtaaatgatgagtgatgaatgatggaggaaaagccgggggaggggtgacggcagagacgggggggggggacgattccgcggaagcgaccgatcgacgaacgaataccaccatctcagcagagaaagggtaatttatttccaaattatagacaaatcccatggaaataatccatcgattgagctaggcttactgaaacaaaaaggtccaaaaattgcaaaaaaattcaatttgagaggggaagcacagatcgaacagcgaaaggcgtgcagaattgttatgactcgtccaaattgttcttccgtttccctttcacttctgcgtattcatacggtctcgccacgaagccatcgccttcggtgccgtttcgggttttgttttctccaatggtgccgtcgttttcggtgcaacggcgttcggtgccgtttcgggcctagtcttctctaatggtgccgtcgttttcggtgccgttgatttcagtgccgtttcgggttttgttttctccaatgatgccgtcgttttcgatgtcgtcgttttcggtgccgttgattttggtgccgtttcaggcctcgtcttctccgtccttgccgttgcacccctttctcccgtggcgccctcctccttcggctttgcttttttcggcactttctgtgccgttgtgtctttgctttccttccgctgctctgtctcttttttaggcgtcgcatccgcttttgttgttctatttttgctgctactgctgttgcttttgactgttgcagtttctgccaattccttcgcttttgcgtctctgtccgccagtttctctcgccaactcggaacaacttaatccaaggctcattaactccgtaattgcgttacaatttgttaatggtccctnaattaccccttcgccatttgtccc

SEQ ID NO: 35973 - DNA, 1077 bp, Heterodera glycines
tgtttagtcactttcattaaacgatcttagtattaaaattgtttttcatttttttaataattttatttatacaataattcttttaaattttagatatgttcaaatataacacacggcagtttaatttttatccaattataaagagtacgagttttggaccggccttgggttgagaggcctatattgctttggcgactgctgtacttttgtatctaacataaagagtcttaaatttaaagttttgtcacttatttccactttatttttatatattaaatttttaataaataatcattttgtttcattaccttttgggtaattaaatctttcaggtaattttttgtgttggatatttgtgaccttttcattatttaaattagtttggcgttttgttggcgtctttcctttattgttttgttaatttattttccctcagttcgtaattattgttagttttattgtcttaataaataattgtgctcgttctcctccgactattttgtgttctttgaattgtgtttgagttcgatcttagttagtgtggtccaacaatcccagtcctgtcccaaagccccccttttatttccaacatttgattaatttattatttaattaaaaaagctttatttaatgaatagcaaaatactagtattttgaacaaatgtttttcaaatatgacgccttatcgcagtttataattaataatttaaggcattttaacgaaatattatcaatttttataaaggttcttaggataaattttctaatgtatcaaagatattgaaaaatataccaaaaagagaatttgaaatacaagtataattaaataacttataaaatattaattatcaaagcgtattaaattaattgtttatttattttttttaatgagaagaaaaatggttaaagaaatgactaagaatttatttcatatattgttccataaaagaagaaacaacataactcatacgtgcaacaaagatagaatataaaatgtatataaatgtaatgggaaaagcaatatttaaatttaagaagttatttttttgttgaaaataaatgtttcgacatattgat

SEQ ID NO: 35974 - DNA, 530 bp, Heterodera glycines
ttaaaaaggaattaaaaatttttaaaaattttattcatctccctttttgatagaaaaagcatcagagtgcctaaactaacatgtaaataaaatttggtgcgtttcagaaccctttctgaaaaaatatttaagaattaattttgcaaaaaataaataaaaacgaaagactcagattttcgaaaatttttttgagccagctagctcggcgctcatttcagtgtaagttagtcctttaccggggagtatccctgcaaagtttggtacgcttctgctcaattagcaaaaaatatgagtgatcgaattttcactaaaaagttaagcctaaactttttggcctgtttaaaaaggaattaaaaatttttaaaaattttattcatctccctttttgatagaaaaagcatcagagtgcctaaactaacatgtaaataaaatttggtgcgtttcagaaccctttctgaaaaaatatttaagaattaattttgcacaaaataaataaaaacgaaagactcagattttccgaaatttttttg

SEQ ID NO: 35975 - DNA, 1140 bp, Heterodera glycines
ataacactgtgcccgcaacgccgaccatggtttcgtgaaagcgatcacatacaatcggaggaaacaacaacagttgccacaacaacagtcggcatggcaagtgccacaacaaactgtacgccaacatatgccacaagcactccaacgagtgccacaacagtcggcacgacaccgagcgtcacaacgactggcacaccggtacttaccaccaccacgagaccaccaacaaatggcgtactgtgcagatgcacacgaaaagagtaccgtatgctcaccgcagacgaacggacaagatatgtaagtggcggaggaagaaaaaaatagagatagaaaagaattcaaaatttaacaatgatagtatttttatttttgtgggattttaggagaaacgctaaaatggaacaaaatatttttaattttttttcttgtttaggaccaaaaataaattataaaaatggatttaatacccgaaaaatagcataacaaaagcatatgaatgtgcttttttcgtatattttaaccaagggaagctcagtaagtcctattgtagaattaaccgatataaattataatgacaaaaaatacttaaattcacagaaaattgattatttcttctgtccatggttaatttgtcgtgtgggtttttgtctgtggctcttttgtcacaacgctaattggaccatgtcaatttttcttggcaattaaattatagaattttggcgtaatattcataatgtttcattgtttattatttaatggtaattagtagggcttccttttttaggcacaaaaaatcgcgaaataggcattaaataggcacaaaaatcctcaaatgggcactaaaataggcaaataaaattttttattaacgtttttaggtaacaaaacacgttaaaacttaaatatttcaattgtaaatgaaattataaaatattttaaagtttttttcgaatatgaacaaatttttaaaccaaaaaatttttattaagaaaaaatatttaattttgggaacaattttttgaaaaattttttcaattcttaagggtgtattttctgaaattttttttgggtcatttcttaggggtgtgtttttcgtttttattgcatttttgttaaggattttttcgaaaatccttaaat

SEQ ID NO: 35976 - DNA, 861 bp, Heterodera glycines
  unsure (1)..(861): unsure at all n locations
aaaatcttagaaaaagggacattttagctttctaagacccggcccctccaaaaaaggacaaatcttagaaaaaaggacacttggccaatctgattttgtccaaaaattaccaaattttgcctcaatcttattattcttggtaaaatagtgagtgatattatgacataattttccataaatctcttgctttttacaaaaacaagtacttatttatttttaaataatattaaacataaaaaataatcgcttcgataaataatttttttttaattggtccaaaattgccgcggagtcccaaatgtcgcgcatcgcggatcgtgcaaaataaaaaaccgcggccgcgcacaacgcattcaaattgccacgggcgcgaccggggatcgagcaaaaaaaaaaaaaaccgcggccgcgcaccgcgcattcaaattgccgcggccgcgaccgaggatcgcgcaaaaaaacgccgcggatcgcacatcgcgcatcgcggcgcggtcccagccctgtctttgactccatattgatttttccacagtcaaattccctttccttcgttcctccgacaatatttgttttatttatttttgcatttgtctttaataaatattttggtgtatgactttccacaaataattgtttgagcaattaactggctcaacatatttcatcaaaaaaaatcatcgcccaattcggcaagcaattaattagcccaatcgtaaatcaattcccgttatttgataaactanattgagtgaacaaacctttaattaaagaacaaataatatgtatagacattttcttttaattgctttacagcaataaatttattttctcaattccgtccgccaacatgacatttaa

SEQ ID NO: 35977 - DNA, 1332 bp, Heterodera glycines
  unsure (1)..(1332): unsure at all n locations
ttctgtttataaaagccgcttttccctcttttagcctcctcggcgatggtgccaagccccgtggtggtgcccgatgttgaggcggatgcattcaggacgatgttgggcttcatttacacggacgatttgagtgggatggacggagacaatttgttcgacgttctttacgcgggtaaaactttatttttgggttttcccgttcagtttaatccccaattttagctaaaaagtacaacattgtcggcctggtcaacgcctgcttggactttcccatcccttcgctgcccaacgttttcttcgcctttgcccaggcgcgttttctcgaagaaaaggttggcatttatttatttacaattagtcgataattaggggattggaaaataaatgacataccatttgtaaaataagcagcgatgctgaaaacatactaggattaattttcaaaaaaatggaagcctaaagcctctccccaaatcaaaaacaaaaaaattcaacgaaaaatataaaaaaagaaaagttggaataagtaaataaacgtttaaacatataaatttttgatttttaaattatgctaaaaatctaaatccggaatttctaaaaaagaaaaacacacctaaaaaccaaatttttgaattcccccccccacaaaaagaaaaaatctcgggagtttaccagagaagagaacttttatngtcatttgtattacgaatttttttgacctttggaatttcatagtttatttggttcctanaaagcccctcaaatttttaaatttccttttaattttaatttgatttttcaaatttattttgggattttgctcgccgttgcatggaatacattgaacaaaacatggacactttgcaccaatcggacgcctttttggaaatcggccaaagtttgctgtgcgaagttttggaccgagaaaagctggcaattgaagaagaacttacgatttggcggatggtaatgccaattcaaaccaaataattgggtcaattgttttaattgggcctaattaataaagtaatttgttaattttttggcactccattgggcggacggacagtgccgccaaaagggcctcgaatgttcggcagagaatcggcgcaaaatgcttggcccggcacttttcaaaattcgttttccacgcatttcgaaggaggacttcaccgagcacattggtaatggacagttcaaactcaagcgatttatttatgccaactaaaaaacactaataaaccaataatagagggcaggaccaacttttttaaaaataattttgttaaaattttaaaaccttttcccggcggcgcctttaggcaccgccgg

SEQ ID NO: 35978 - DNA, 807 bp, Heterodera glycines
cttcctcttctctttttcctctgttgcttttcttccttttttcctctccatcatcgcttccaattcgctctcttttctcttcaatttgctctctttcgaatggtattccaagcttttcaagcagttctttcatttgttcttcttccataaaccatcccaaccttctcttttctatatagcagctttccaatcctaagttttatttcgtttattttttaatttttaattaattcattacccttttttaattcattaataagactttctcccgggtgaacaaagaacgcgttttctgtttctcttcccagccgtttatcagcatattttttgaattttgccgcgtgtaattccttcacccattttggcgttgcgtccatcaaattattccaattcgtccgttttggcatttcgtccgccctccgtttcgtttctttgtctgcttttttcgccattttgtcccattcctctgccaatttcttttctatgccggcgtttctgttagccgctaaaaattccttcatccctttgatcgtttcttcgaatgccaatgcgattttcgtcatttcgacttccaattccacgtcaaacagtccgtcgtacattctatgcatttcgattgtccgctttttctgccaaaatttgtccatttttgccccctttggttccgagtcggaccaatggacgaaaacggacagatcagcagccaatttgttggtcattcgactgatttccgtttctccaataagcaaagcaatcaaataatgatccatcaacacgacttctttgtcaaatgctaaaatgcttaat

SEQ ID NO: 35979 - DNA, 1064 bp, Heterodera glycines
ttttctttttttttttttttttttcttcaaaagggtccagaatctaaaaaaaaaaccctcccgggggaaaaaagggggtttgaaaattttttggggaaaaaaaaaccctttcaaaataatcccctgggagaaggggggggggagacatgatttcaaaaatttcatatttttttagtttaatctactcaaaacggttcagaattcaataaaaataacattcaccggtgcgaaaaatggggtatgaaaagtttattggggaaaaaaagactttacaaaataatacccctgggagaagggagtgggaaacatgatttcaaaattttcaattttttctagtctaatctactcaaaacggctcagaattcaataaaaataacattcacggtgcgaaaaatggggtttgacaagtttattggggaaaaaagactttacaaaataatacccctgggagaagggagtgggaaacatgatttcaaaattttcaattttttctagtctaatctactcaaaccggttcagaattcaataaaaataacattcacggtgcgaaaaatggggtttgacaagtttattggggaaaaaagactttacaaaataatacccctgggagaagggagtgggaaacatgatttcaaaattttcaattttttatagtctaatctactcaaaacggttcagaattcaataaaaataacattcacggtgcgaaaaatggggtttgacaagtttattggggaaaaaaagactttacaaaataatacccctgggagaagggagtgggaaacatgatttcaaaattttcaattttttctagtctaatctactcaaaccggttcagaattcaataaaaataacattcacggtgcgaaaaatggggtttgaaaagtttattttgaaaaaaagactttacaaaataatacccctgggagaagggagtgggaaacatgatttcaaaattttcaattttttctagtctaatctactcaaaacggttcagaattcgataaaaataacattcacggtgcgaaaaatggggtttgaaaagtttattggggaaaaaaaga

SEQ ID NO: 35980 - DNA, 1349 bp, Heterodera glycines
tgaaaaacctgtaaaagcattgtcttttttatttgcccctatcccaaaaattagtctaggtaactaatgtcgctgggcaggcaggatgaggattttcgaaaagcaattagatcacttccagccttagcaaacaaattcaattaatctaataaattgttacaataattttgaggcggtttaattttgtgccgcaaatgtcattctttagcgaaaaaacttatgaaaattttgtttcatacacaagataaatctttacaaattgataattttttttgggtttaagctacagagacctttccagcagtctgtttttttgaagtgtcaattttatgtaatgctctaacatggcaattttcctttgctcacaacgtcagaaaaaatgcacctgccaattttgccaatgaaatttttcccttaattttctttaatcaaaatcgtttgtcaaatgaatagatgaatttgtgattcacaataatgagttccaactcgaaaatattatcgcaaaattaaaggaatatcattcactaattacattttgccgtatggccatatttctgccaatttaatttcatttaatgccaaaatggcaattcgcctatttacccacttattaaatgcatgcacctgtcaattccgttaattaatgcatttgtctgaagttctcactattaattaaaaaaaaattgtctacagatgaaattaaatagcatgttgaagagtaacacaattttcgatataagaatgtgtaaaatattacgttgatgcttatgcccctaataaccgtcaaataaacgcgcattttgttaaataattattttatttcttaatagtcttgcccattagtttgaaataatttaataagcattttagagtgaagtgaacacaaaaggttttgttcattcatttaaaagaaaattcgcctttataaacgcattttctctaatagtttttttaaaataaattttcatttacttttattttgcttttatttttgccaaaaaatttcaacgataatataatgagagtcattcatgcaaaacaaagttaatgaaacaattaacaaattgtcatgcaataattaccgtagtccgtcccgacttttaaatgtgtgactcgtcccaatgttttcccattaacaaaagaatgactgtaaattaagactaattgtaccaaaagacacttgaaaaatacaataattgaaaaatttgtacataaaaacaaacgaccgtttcaatgaattagcattaatttgttaattttaaaaaaaataaaatatattttaaattctgtgaataagaattaagtatatatttcgccacaaatgaagttgcttttgttccggttcgacc

SEQ ID NO: 35981 - DNA, 802 bp, Heterodera glycines
  unsure (1)..(802): unsure at all n locations
tcatgttaataaataaatataaanagggtggggctttggtaaatccaaaaacaacaaaatgaggtaaaaaaagccttgaacaaacagttttaaacctcgaaaataaactgtggatttggcatagcacaatggtaaaaattgccggaggcttgggttcaaatcagggctggccgtgattgaatttccaatcatgcaaatccgtgatccatgatcatcggacttacaaaaaaaatccgtgacccgtgatccgtgataataaaaaaatttctgaatgattttcttgagtgtgattgttaacagcaggttttgtccaaaaaagtcaaatatttgttaatttatgggtctactgctgttttaaaaaatgaagaaaaagatctttaatgtaagaaaattttcttttcaattaaatttcaattaaaagtaatttattcctatgcctctcaaatttgtatatctgctactgtgtttaaccattgaacccacagaaattcatcacttccggatacatttgctccaactgaatcagtcccatctccccaattaacgtaattagcttctctttgctttgtaccagccgatcgctatccattttgcagaaaaatattcgcatattaatgaacctttcaattagcatgccaatacaatataaattaattgttttgcccctttctccttgtgccataattgactcataaatttgcattgcttccattttgtcaaattttggaatgtcccaattcccgatctgctgatgatcgtcgcatatgcccttctcaaattccttaattgcatatatgaaaat

SEQ ID NO: 35982 - DNA, 1228 bp, Heterodera glycines
agtgatcagaaacagtgatcattcgaaattggtccgttttgatcattcccgatctttttgataaaataaaaaactcaaaatgttgattcattcatcctcctggtttctctctcattgatcagtcccgaatattactcactctctccctctctatctctctctctttctctctctctctttatctctctcctcgcttagtgcattcaataaatcattactactttgatcactttatcactgcgatttctcaaagaccctcattttccgatcacactttcctcttccggatcgcttcccttctccacccatattgatcactctgatcacttaaatgaaaacttttgttggcatgccaattcgatcggcacattggtgcccattccccgggcaagcaccacctccgccactttttggctggcccgccaacgacggagcgccggcgctgtcccctgccggtggtgccgttgatgaatcggatttttttgccaacttttttgtgccacggcgcactcgtcgcgagaagcggttggcacgttgcagtgagaaacgcagcgtggcaggaaacattttgacagtttagcagaaggaatgtctcagtttgggaaaggcaaacttgggcgcaatgccaatgttcaaaataatttttaaaaatggagaaacaataaaaaaataatagaaaaaatttgaaattaatagaaaatttaaaaatttcatttcgtttttttttgcaacaaatttttgaaccgatttaaaatacaattggattagggctaattcgtaagtctctattaaaaaaaaactcggaatttcggcttcatcttaaaagcttggtgcaatatttaaattttgggctcaacactcgaccgcgtctcttaaaaattaacgataaccagcccttgccagcgggggaaggggtggggaattccgtccccccccccccctccggaaataaaaattacgagaaaaatggcaaatttttgaaaaatttaagttttaccccaaaattgcaaaaattaggccctgacgataaccaaagatattaggagaggtttaaaatgaattaagtgtcgacttagcgacaaattaagagcactaaaagtgccgcaggccggcagaaaatgcgcatttcgctcgagagtctcgagagaatgaacggccgccgtcgcggcgaaagtgccacccgacccttggggtttcaaatttgttggcatttgggaataaaaatgga

SEQ ID NO: 35983 - DNA, 1356 bp, Heterodera glycines
tttcctgacagcaattcgtttgaactgagcagttttcggagggtaacgcgttaattgtgtcaaaggcaaaattttcgactgcttttcgtttacttacgaaaaaataaaacaccgaattgcctataagcattgctttttttctcaattgtgtgtctacataagggccgaaacacactgattaaatttaacccaaattatgatagtcttccggaagagatgtactgatgaggcccctcttccgtaggatggatttgtctaaaaaagctaactattttttaatagatagtgccattggccatcccgttgtacggtcgcggtcgtcattttcagaaccgttcggcttagctaatgtgataaaacaggttaattcttttcctttcagtatccctgcaaagtttggggcgcttctgataagtttctgaaaaaaaagttaagcctaaacttttttgcctgtttaaaaaggaattaaaaatttttattcttcaccatttttcataatatacgcctaagagggcctttaacacgtaaataaaataaaatgaatgaatgatttgaagaggtaaacggaatggtcaagactttggcaaacatttttatcagcaaaaatgctctcatttctcatcactttggttttatgggtcactccacatttacttttgcatatttatttatttatggttgtatggatcacttatctttaattattatttattttattgtacttttgttaccagcataccaaactaactttttttaatttggtaacaaatttaagctaaattgatttgattgagatatttttaggaaataatccgttctaatgacttgaaaatatttttttaaatagaaatttactgtaggattgtccactgtcggattgtccactgtcggattgtccacttctgtcggattgtcctcactgtcggattgtccgggagccctttttccccatatcttcccttccccttccccaccctctacctctctttcctctccttccactctcatttctcttccctctattcctccactttttcatcttctcttccttccttccttccttcctctctctttctgttctttgtgtgcttttgctgaatcaggctcgtaaatcagcgttagcgatcatttccgtttaatctgagtgagatgacttatgcgatatttgaattcaaaattaattctttcttcgttttttcttttgatttgtctcttttctttgctcgtttgtcctttaattgatggccgattagcgattaataattaagattaaaagtcgaccaactaacactcgttgtcggctcactcacccacgtttatcgcacattcattcgtgcaccccccccccatggcgac

SEQ ID NO: 35984 - DNA, 892 bp, Heterodera glycines
ttttgcctaattacgacaaacgcaataattaacaacaatattagggatttattaaaaagtcgcaagaaaggggaaaagaaggggaaaaagtgacaattaaaaggaacggatgggggggggagcgaatgatggcaacgaatcggaaaagcgaaaaaaagaataattgagcaaaagccaaaaacagtgagtcagtgcctttcagggacagaagcgacaaaacgaaatgaaaaaatattcattctgatcattcaaaaattatcaattcgtaaatcaatttaatcaatcaatcgtcggtggggtgaccatttccaattcttcggatgaggaaaaacactgagacgaaagcaaaggcgaaacagtacgagcgagcgccttcggcacctccgactgcggcgaagcgtccagaaaaagatcggtgacaacggacgacgacggcggtcgaagagtgtcggactcgcagacagccgaaacggtcgttttgtccacgggttggaagagcgtcgatggggaggacgaagacgaagagacggcgacacaatgctgaggaagaggaggaggaacagtgcgagaggaagcggaggaaacggagcagcagccggaggaggagggggaagaacgacgggccaactgaacggacacaacaaatggcaccattgaaagaagaaaagggaaggggagagagagaaagaaaaagggggagaaaaagaaagagagaaaggagcaaaaggtaagggaaagaaatgattagggaggggaaaggggaacaggacaaaatcacgccgggacaaaatccagccgctagaaatttttaaaaaatttttccaaccctagtatttttcaagaaaaaatcttacaaaatttttttataagaaaattttaaacaacaaaaaaa

SEQ ID NO: 35985 - DNA, 912 bp, Heterodera glycines
ctggaaacataagtacaaacaattaattaactcattgatacggagttctaaggatttgagatattttagttttttaaatttgctataaaaattgaaatcgaaatacgtcgcaacattttcataaaaaatcaataatcaataaaaattaattaacgtatttcttccattaagctccttcagccgaagggaattgaaaaattgagccctcccccgcccattaatgcaccctaagaaggtggttgaaaaacactcccccccccctccattaaagccaccctccaccccgtggtggtgttgaaattcgaagaatatacaaacgtaaattttttttttcgcagttcatttgccgtctcattgtatgggcgtgacgatggatttgagcacaaacggttgcgcaaacaagcggccaaaacgctgaaacaatttgagtctgatccggcacgtacagccgatgaccaggagaagatgaagcacatggtgatggccaatttgccatcggaccaagaaatgtccatgtacaaagacagcattgggctgtacgcggattattatgcggcaaaaagtggcaattttgttggcatcgcggaatgccaagcattgtccatacatttaaatgtgggttatatgtacattttaatttaaacatttttttagtaaaaattatactagacaaattaacatgtcaaacagcatgagaatgtaaaaaaaattatcatatctatgcgctaattaaggggcgctaatggaaaaagcataattaagattcaatgtacaaataaattttaattaccatgctttttaaaatagagccccccccccctttttagcaccttcaaaagggaactttattcagaaggggctttaatttaaggggggggactaaatccggagaggaacgataagggggggggg

SEQ ID NO: 35986 - DNA, 107 bp, Heterodera glycines
ctttggcttgtaactgtgggtcgggaacattgtcgactcgaacatctttggcaccgtgataggttaatgcgcgcatgggtatgactcctagttattgttttgctgtt

SEQ ID NO: 35987 - DNA, 75 bp, Heterodera glycines
cctacagcgcatctaccgttcacagtcgagcaccagtggcaccacgctgtacctgattgccgagcgtgccgcgtc

SEQ ID NO: 35988 - DNA, 294 bp, Heterodera glycines
aaaaaaaaaaaaaaaaaaaaaatttttttttttttttttttttttttttgggggggggggggggggggggtctcgcaaaaaaaaaaaaaaaaaaatattttttttttttttgttgtgggggttgcaaaaaaagaagggggggggggaggccaccccccccccccccctccaaaaaaaaaaaaaaaaaaaaaaaaaaattttttttttggaggggggggggggggggggggggtttttttttttttttttttttttttctcccctcccccccccccccccccccccccccccccc

SEQ ID NO: 35989 - DNA, 1173 bp, Heterodera glycines
  unsure (1)..(1173): unsure at all n locations
aataactatacgtatncaccggtgtctctaaaaataatgatttgttagcgattgggcaccgggaacagaaaattgaggttaaggactttctgatgggggattttccccaataatatgcaaatccaaatgaaattggaaatcgctcgcagcggtcaaaagattgttcgccatttcgttcagtagctgagcacgcgcattttgctgggattcgattgcatgctgaatcttctgtcgctccaacagatcagctgcgattttttccaaaaattcatttttggcgaccaaaagtttttggattgtttccaatccggcttctttttcgtccagcaaaaaagccattcgttgaagctggatagcaatttgggaattgtcggacattgggctacaaagtttaaattataattataatcaaacgaaaaataattgactgtttggctacaaaattgaaatgataaggggttatttttaaatttatcaatcatatcaaaaacagtttttaatatctaagggttccaataataccaatttaaaagattaattaattggaacttcgatactacattcagtcggagaaagatttctttagattcgatctgatattttcaacgttttaattttaccgaatttttcattatttaattacgatctccgttcgtccaattacatgctttatgagctgtaatcaggtgagtcggggctgtaattgaatgaagaagaattcggatcagttaaagcgtcggagttgtcagaacgtatcttatgaattccttgctctgaactcgtgtaaaaatcaacacattcgccacgctcaatgcgcgagcgaaggtccgtgtactgatcgcgcaaaattcgtaacatgcttttcttttcgttcttttcgcgttgcatctttcgtttttgctcgcggcgctcagttttttgctccgcatcggccaaaatttgctctcgcgtgcgccgcggcttaaatgttgcgcgcatttttttgccgcaattttgacattcagagcggggagcagcagaaaaaaggcatcccgaccattttgatttcggctccaccattttgtacagtttattctcgaggctctttttgaattctataattgttaaaaatttccaagggaaaaacaaagctgaacgaaaattatgaatttatatttgttaattgtggaaaga

SEQ ID NO: 35990 - DNA, 727 bp, Heterodera glycines
gtttttttagatctttgatcattgcaactgtccttgacccccgttttaaattgaagttgtttgaacaaatgaaggaacaaattcgggaatggatgagagcggatttacaaaaaatgttttccgggtttttaaacacgacgttggttcgccaatcaagtacatcgagtagttgttccacggaaaaacctggccttttagaagttttaattttaatattttccataaagattttaatgattttagtcatccagtgggtcatccaatctcaattaccgatgatcaatcgaaatcacaaaatgaattttacgatgcgcttcaccaaatggacaaatatttgagagagccgcgagtaaaatacaatgttgatctttttcaatggtggaaaaagaatgaagcggaatttccaagcttgggacggcttatgagaaagtatcatagtgcgccgccgggaagtgttgagtcggaacgcctgttcagctgcgcaggatttattttgaatgacctccgaaaaagtctctcgcatgaaaatctcgaacggcttatttttcttcatcataatattatcctttacaattttgattattgataatatgggaattttctaattatgcttttacaaatgtgcgatccgcggcgttttttgcgcgatccgcggcgttttttgcgcgatccgcgatccgcgaccgcggcaaattgaatccgcgatccgcgaccgcgggatttttct

SEQ ID NO: 35991 - DNA, 703 bp, Heterodera glycines
aaaagttaaatcgggagggcttatatggggccagtcatttctggcacctgctaaaaattaaatgattagtcgggtatttttccgttatgccgcatttccccccccccccccaaaaaaaaacactagaaaataacaataggcgaaatttattcgatctgttcatggcgcataaaattttttatggccgaacaaatttgaaattattttctatttttaatccgtcaacatgctttaattaacatcattttttatagatttaacacaaaatataaaataagcaaaaaattcattccctttgctgggagggcaacaaaattgtggaatcaactcgataaaatacaaactcttttaagcaattcaaaataaaattaaaaataagcggacttttcccttcagtgaattatttttttttttgacaaataaatagggttataaattatattgactaaaaaactccaaatatggacttaaaaagcccgaaacatggattaaaatgctcaaaaaatgccaaatatggataaaaatatggactaaaaactgccaaaataaatctttaaaaccttaaaaattccgaaaaatgtatttatattcagtatttgccaaaacagatttaaaaatacgctaaaaactgccaaaaaatggatttaaattttaaaaaataccaattttcttaaattctagcttcacaattgcaaatcaaata

SEQ ID NO: 35992 - DNA, 581 bp, Heterodera glycines
agagcgcggggggagagggagggggagagagagaggagagagagcggaggggatggggacatgggacggactattaaaatgatgatgggaaagtaaacataaaaagggtggggaaggaaggggggggggaaatgggaaaaatggggggcggggagccctcctaaagaaagatgggatggaagaggagggacatatacactttccattcatcaaaaaaaagttggttgaatggggggagggaggcggatgatagtggaaatggtggtcaaattccacaccacggcagcgcccgagggggggggggggagccgaaaaagaaacaaaaggccaacaatatgtgggtattcgtggaaataggggagacaaaagggagaaggggggggggtgaaatcaaccaaccattatttattacaatatggggacgaaaatgaaggcgagaagtaagccaagagtcatcacatcatccatctgctggtgcttaggtgctgttgctaaaagtgacaaaaaaaagtaggggataaagcgggaatttatgggggttggaaaaagtgaaattagcgggggatgaaggggggggggga

SEQ ID NO: 35993 - DNA, 1543 bp, Heterodera glycines
gatggctatctctttttttgataaattttatacacatacaaatgctctcgagcatgatagggagggcggtgcgcaatcgaccttttatttttgagggaatttttaaatttatactctatcccagaaaaatggctatctctttttttgataaattttatacacatacaaatgctctcgagcatgagacggagggctgtgcacaatcgccattttatttcacagaggatttttatatttagaggttatcccagaaaaatggctatctctttttttgagaaattttatacctcacaaaagcgcttgcgtatgagacggagggctgtgcacaatcgccattttatttcacagaggatttttatatttagaggttatcccagaaaaatggctatatctttttttgataaattttatacacatacaaatgctctcgagcatgatagggagggcggtgcgcaatagaccttttatttttgagggaatttttaaatttatactctatcccagaaaaatggctatctctttttttgataaattttatacacatacaaatgctctcgagcatgatagggagggcggtgcgcaatcgaccttttatttttgagggaatttttaaatttatactctatcccagaaaaatggctatctctttttttgataaattttatacacatacaaatgctctcgataataggaattccaaccgcattctcagaataattacgccgatactaattgttctggaatttgtttctcggcgcgtttgttttggaaaaatttggaaaattggctatctcattttctgctcaacagtaataggaattccaaccgcattctcagaataattacgccgatactaattgttctggaatttgtttctcggcgcgtttgtttgggaaaaatttggaaaattggctatctctttttctgctcaacagtaataggaattccaaccgcattctcagaataattacgccgatactaattgttctggaatttgtttctcggcgcgtttgtttgggaaacatttggaaaattggctatctcattttctgctcaacagtaataggaattccaaccgcattctcagaataattacgccgatactaattgttctggaatttgtttctcggcgcgtttgtttgggaaaaatttggaaaattggatatctctttttctgctcaacagtaataggaattccaaccgcattctcagaataattacgcgatactaattgttctggaatttgtttctcggcgcgtttgtttgggaaaaatttggaaaattggctatctctttttctgctcaacagtaataggaattccaaccgcattctcagaataattacgccgatactaattgttctggaatttgtttctcagcgcgtttgtttgggaaaaatttggaaaattggctatctctttttctgctcaacagtaataggaattccaactgcattctcagaataattacgccgatactaattgttctggaatttgtttctcggcgcgtttgtttgggaaaatttggaaaattggctatctct

SEQ ID NO: 35994 - DNA, 1230 bp, Heterodera glycines
  unsure (1)..(1230): unsure at all n locations
atatttggcactgatgaattttatttcccaatttacatttttttaaagttttgctatttgtaaattttatttaaaaatttttaaaatatttcttagattgcacaatacactttctttaatttgaaaaaatgtcatcatccatcggttcgccagatacatttttccgttcagaaactgatcagggtaatagaaaaattttaaaagaattacgaaaaataaaaaaataattatttaaaataaaatacaaaatctctaaattttatcacaatcagaagcagcagcaggagcagaagaagtgggcaaatacgaagtgttcagttggcacggaaatttgagtgatcaattgtcagccgaattgttcgtcactgatcagcagntgctgaaggtgngcccttttgaatggacaaatgatcaaacagcgggaggggaggggaggccaaaaacagagaaagatttatggaaaatttagttcgaaatttccaatccgttttaaaagttttggaatgaataaaaataaaaaaaaaaaggggccgacccattcctaaagaaatttgagggatttttgccaaaacccttcaatttttaaatttaaaaaaatttccaaatttttttttggaaaggaaaaattttgtttatttttagggaaggcccagaaaaaaatggcccactccccaatttgggggaaaaaaaaaatttgtgggggaaaacggggggggttttttggttgaatgtggggaaaaaaaaaaaaaaagtggaatttttttaaaaagggggattttttggggggggggggggggggaaaaaaaaaaaaatttaattttttttttttttttaggggggtccctccccaagggggggggggaaaaaaaaaaaaaagaggggggggggcgcccccttcttttttttttggggggggggggggctttttctttttttttggggggggggagagaaaaaaaaaaaaccttcaaaaaaaaaaaaaaaaaaagggggggggggggttggtttttttattttattattttattttttttttttctcccccccccccccccccccccccccccccccccgcggggggagaaaaaaaaaaaaacaaaaaaaaaaaaaaaaaaataatttttttttttttttttttttttttttttttttttctttgcccccccccccccccacacatttttttttttttttggggaagaaaaaaaaaaaaaaaaaaaaaaaaaaaaa

SEQ ID NO: 35995 - DNA, 232 bp, Heterodera glycines
  unsure (1)..(232): unsure at all n locations
atttgtgttaaattcgagatttttttgggtgcccttatagttttttttggtaaattaaccgagcacagattaccttacaggtctcatgaccatctgttcaactatacattttaaaataaagcctaagcataggcctaggcccaagcaagcttaagcctaaagatagcctaggccttttacctggagtagaagcggatatgtttccantataaatattccccatatttttcta

SEQ ID NO: 35996 - DNA, 919 bp, Heterodera glycines
atttgagtcacagagattgaaatgctggtgggtttagtttcagtgattggaatgtcattgaaagttggtgggttgagtcccagtgattgtaatgccggagatttgagtcccagagattgaaatgctggtgggtttagtttcagtgattggaatgtcattgaaagttggtgggttgagtcccagtgtttagaatgccgcagatgagtcccagagattgtaatgccggagatttgagtcccagagattgaaatgctggtgggtttagtttcagtgattggaatgtcattgaaagttggtgggttgagtcccagtgtttagaatgccgcagatttgagtcccagagattgaaatgctggtgggtttagtttcagtgattggaatgtcattgaaagttggtgggttgagtcccagagattggaatgccggagaattgagtcccagagattgaattactggtgggtttagtttcagtgattggaatgtcattgaaagttggtgggttgagtcccaatgtttagtgtttaaagtaatgccggagatttgagtcccagagattgaaatgctggtgggtttagtttcagtgattggaatgtcattgaaagttggtgggttgagtcccagtgtttagaatgccgcagatttgagtcccagagattggaatgccggagaattgagtcccagagattgaaatgctggtgggtttagtttcagtgattggaatgtcattgaaagttggtgggttgagtcccagtgtttagaatgccgcagatttgagtcccagagattgggatgccggagaattgagtcccatagattgaaatgctggtgggtttagtttcagtgattggaatgtcattgaaagttggtgggttgagtcccagtgatttagaatgccgcagatttgagtcccagagatgaa

SEQ ID NO: 35997 - DNA, 1819 bp, Heterodera glycines
  unsure (1)..(1819): unsure at all n locations
aaaatatgtaataaaaaatgctaaaaatatgtatgaaatatgtacaaaaatcctcaaaatatgtaggaaaatatgtaaataaaatttttttaatggttattttttggaaaaaaattcttcgtaaaaagtgaaataggcacaaaatgccataaaaatgaccaaaataggcttagaatcacatttgaatattttacaaattaatttttgatatatcattttttgaaaaaaatcgattttttaaggatacattttcaaaaaaaaaatttttaatttttttacaaaaaatttctataaattctcaaaaatcctcaaanatatgtaaaaaaaatgaaaaatatttacgaaaaattgcgaaatatgtacgaaaaagtccaaaatatgtataaaaatatgtacatatttaatatgtagaaaaatcccaaaatatgtaaataaaagtcccggtttttgttcgcaaacacaaaaaagaaagtgttttttctgctatttagagcatggagaaaccaggaaaaaaatatgtatttacataaattagcagccttttctttcattcattatttggctatagactctttttctattaataaaatatttgtccgaattcgtaccctttaattaatttctttaagcgactatcaatgagctccatcattcttttctgtcctaattgtccttcttaaatcatccaatttcatcccaatttagcatatccggcacctaattaacgcctttgactttttggcctcggttgggaaaacgcccattcttatgcgcatcgcctccccctcctcaaccattcgggcaatttgttactttttgaagagagcagcaaatgcttgagtgccaatccctaggcgtccaaacatttctgggtattgttaagtaaaaaaaatgtcattcccacaatttgtctacttgtgccacagaggaatggataaataaatggatgtgtgtgtgtgtggcgtgccgttgtcgtgcaaaaatgaatgtgtgtccctgagtattttttggcaaatgaatgtcaacatcataatgaatgaggaatgatggaggatgtctttgtacttttaatgacattggcgccgtaaggccataatcaattttttttaaataaagaattataaactcaattttaaaatataaatatttatttacttttatgagttcaactccaaaattgaaattttttatcgtaattgaatattttattaaattgcttattttattttttaacggaaaattcggggtcaataatcctctccattctttaaaaataaaaacaataacattaaataccgagaaataataataaaaaacttcctgaatggcgcccagcaacgcaaacgcgtaaaaattataattataaatgacaccgcgagaaaaatagccccaagcagattgcctgagggcattttgtaaaaataaaattaattacatgtttgttttcttgctttccaggcaaatcttaatgttgcgcataaacagtgtgtgatatttattaacagttttttcatattttccggcacaattaaatcgatttcaaaaattatttttcgaggcaggcgaaagtgtcattgagacagtcaaagaaagataaacgatttttttttggtcttgtaatggttaagtaatgatttctggccttttaatcacaatcgagaattttttcgagaagaaaaattctgaactccggccgggcctaaggctgaaactatttgaatctctcgtgaattctcgaatttgatctccaccactttattaaatggattaanntgatgaattttttttccccaaaacttaagtttttaaatgttcattt

SEQ ID NO: 35998 - DNA, 881 bp, Heterodera glycines
tgccaaattgaaggatttttgaactattaaaaggatttttctgaattttcattaaaaaatccgaaatcctggccaaaactagggtccccgctgctcgtccgtcacccacccgtcactgttcgccgccgcttctcctcccctccactccatttcgggcccatttgttgtcggcatttgccaatgaccagcattgccctgctgctgcactacggcattttgttgtgccaccattagtggtggtgttggcttttgatgttgccgccatggtcgaccaccgtcagctgcagcagaagtgccaccaccgacagaaaagggaccaccgtcataaccggagacggcaccattgaagcttaagtgaaatgcgatggaggggcaggggtcattaaggtggattaaggctcaaagcgcaaggctaattggtttaatgcactaaatccatgcctcagcgcagggcagcgatgcggacggaaaagtgccgaaagacgcggaaaaaggggagggcggtatggcaaaaagtgatggcacgaaaggacactcgcgaacacaattacaatcagctggtgaaaatggaccgcagagaaatgagacgcgacgcgccatttttggttaacgaattttttgaaataggataacagagaatatttagagctattgaatgagaaattttgggaatgattgactcggattcgaaaaggatcaaaatggatgccagaatcggattctccgaccctgaaaccccataaaaataaaaaaaatttcgaaaagggtggctaccatcagaatattaccaaaaaatgaaatcgaaaataataagcccattcgttttttgttttgttcaagtatttcaggagtttagcggtttatgcgaacggagggcgtag

SEQ ID NO: 35999 - DNA, 758 bp, Heterodera glycines
aaccaaaaattggtctcaaaaaaattcaacgattttaaagagatttttaagcaaataagaaaaatttttgaaaaaagtctcgggttttttgggtctcggggtcaagtctcggtctcgagtcttgggaccatggcattttaattctaataaaagtgattttattttatatttcatattttaaaaatcttttctaaattttgcatccgtataaaatgacatcaaatgggttgtacagaatttgtagagaataaaagatttcggatcttctgccattctttcacaaatgcttggcgatattcgctactaaacatttattgctaaattaaaattttaaatttaaaggctttcctcgtccaaaaaagaatctgctcatttgaaatgcaactaatgtttaacaaaatgccaaaaatttgattttggttccaaatttcattaatatcacgagcggttgggcgatatttttggatatatcgttttgtttttgaaggtgtgcttggaacagtgcaatcatgcgcacccgtccgatctggcaagttctgcaacgattgctgactagccaacaggttcggcgccgtgatgaacccaaccatcactgcttaccccgcggcacccggtacggccccccgaaggaatgtatctaattatattctcaccttagggtatttattttcgcattaggtcggccgttagcgattcgatcgctctagtcaatttttaaaaatttttgctgaaatatttgtcgtgctctgaaggaacgg

SEQ ID NO: 36000 - DNA, 616 bp, Heterodera glycines
ccgctcccgactcccgcatttttcggtgaacgggatttttaacaggagcgggatttttacgggattcccgttcgggactcccgtcccggaaatttttacccaaaaaacgggagtaaaaatgcactggtaagaattgagtttttttgataaatataatgatttttcattgaaaatctgttaaatatagtcaaatttcaaaaaaattttcccggcggcgcctatcggcaccgccggcctccctcttccaccctggtcaccaaaaagttttttcaaaaaatacgtcgcaaaaagttgttaaaattaataaagggagtcaacaaataaattataaaaaaatttatttgaagcaatttgaaaaaatttctgattttcgacccaaaaataagattttttatttcaaatttctccttactaaatatttctgtatatttttaatttaataaaaggattgtccttcaaatttatgcattaaaatatttttgttagtttttaattaaattttcgaattactcccgctcccgcccgggactcccgtaaaatttctgcgggattttaacgggagcgcgattttcacccgattcccgatcccgctcccggaaattttttttatcggact

SEQ ID NO: 36001 - DNA, 835 bp, Heterodera glycines
ataggactttaaaaattaaaaaatttttaaatttaaatcactgccattctttcgggttggtctatccgacaaaagtttttgtgtttctgattcggtccggctgatgaccggtcaattggacaatggcaatcccaatggggcctcaatccgacataacgcgggttcgtaattctcgagtgtatagattggacgatacgattggatgaacccctttttccttctgttccacattcatcccgtaactgccattttcccaaaattttagcgataagagcaggggaggggcgggggagggagggaatggacgacgactgagggggggggggggtcggcacttctcctcgggcgggtcccaatgggacttgaggggcattgatggcgatgaatgggacccattcgggtcaattatctcctcacaccaattgcagcagcagaagaagcctcgggggagggcggaggaagaaaatgaaaatgagtttggggttatttattcattttgatgaaaaggaacaattgacggggaaataggagggcaggcaaattaaatgattaaataacacttaaattctttaatatttaaattttggcaattagaccactgaattgagtgaatgcaaagcgttggcctttttttcctccaatggccaatctttgccgaagtccgccgtttgttgtcaaagtgaactctccgcctctgctggccaatcgtcgtcaacagctgttgctgacctttgtttaaagcgccgaacaaagagacaaagccaaaaataaagtcatttctcaaatttattgggttttatagtgatattttttatatttaatataaattggaaat

SEQ ID NO: 36002 - DNA, 1137 bp, Heterodera glycines
cagaagcgtaccaaactttgcagggatactccccggtaaaggactaacttacactgaaatgagcgccgagctagctggctcaaaaaaattttcgaaaatctgagtctttcgtttttatttattttttgcaaaattaattcttaaatattttttcagaaagggttctgaaacgcaccaaattttatttacatgttagtttaggcactctgatgctttttctatcaaaaagggagatgaataaaatttttaaaaatttttaattcctttttaaacaggccaaaaagtttaggcttaacttttttttcagaaactgatcagaagcgcaccaaactttgcagggatactgaaaggaagagaaataacctattttaaatattatctagtcagttcatttaaataatttttatccaaaaaattttttttgggttttcggggcagtccccctgaaccgatgcgcccagatttatggggagaccgaatccttccggaatagcttcactatagcctgtactttaattctgcgttggatttttgctccccataattgtttgagtaccccaaacggacacttgaaaaaatcgatttatttttgttttcggggcagtccccccgaaccgatgcgcccagatttatggggagaccgaatccttcgggaatagcttccctatagcctgtactttaattctgcgttggatttttgctccccataattgtttgagtaccccaaacggacacttgaaaaaatcgatttatttttgttttcggggcagtccccccgaaccgatgcgcccagatatatggggagaccgaatccttcgggaatagcttccctatagcctgtactttaattctgcggtggatttttgctccccataattgtttgagtaccccaaacggacacttgaaaaaatcgatttttttgttttcggggcagtccccccgaaccgatgcgcccagatttatggggagaccgaatcccttcgggaatagcttccctatagcctgtactttaattctgcgggggatttttgctccccataagtgtttgagtaccccaaacggacacttgaaaaaattgttttttttgttttggaggagtcccccccgacccgatgcgcccagatttatgggggagac

SEQ ID NO: 36003 - DNA, 930 bp, Heterodera glycines
  unsure (1)..(930): unsure at all n locations
atatgaacaatatttttccgaaagaaagatttttattaataaatgaggtactcatttaaaattatttattatttacgaattttttttttttgatataagttataatgcgcgaaacattgtttatttttaagcgcaatttatattcttgcacattgtctgtgtaattttttgcagtattgcttttatcgagctatttttattatatttatttaaccatcaagtgaacgttaattaatttagtatttgagtgtttacattgaattaattaaagttgctttattttcacaaataattcgagtctccgatggttgaaaatggttggataatctattatttaaatatattttatttattttttaagaaaactataaattgttatttatttcataaaggaaattttattttattttgtctatacaatatattgtttttaggtttatgtcgtgcagatgcggatgactttgaatttttaactgcgttagttgtttggaggattaaatttgagctttagttcatttaataatatttgccacctaatcgatggcttgtgatgacgcaagaatctgacgttggcagggctgtaggcacgtttttgaattttgggaaattaccttgattttcttttttgtttcttttcccaaacctttttattttccttcgaaaaaattcgtctattaaacatttatatctaatcaacaaattcgagactgttttttgatcataatatttatgaaaatacattcgtacattatttcctttattgattttaatatttagtatgttctgtttatactatcattttcatgcaaaaacccaaaaaatgcattnttcatttctgattaagatatttcttctacttatgtagttatacagaatttttttattatttattgnttaaaaaaagggntagcttnattgcatcttttctca

SEQ ID NO: 36004 - DNA, 958 bp, Heterodera glycines
  unsure (1)..(958): unsure at all n locations
tttncaatttggcccatccctggttcgccaccccgccaaaatcaaccaactaactgattcacttccgcctctttcctgtcctatggaatgaatgatttatcattaaacggttttctcacctcttctttttcctctttttcctccttttcctcttttcttctctttttattttttcaataaaaatacataaaacaatcatttgattcggaattcgaacccaaattggccgactaacggcaatttgcaccttttagcggctccttttcagcttatttaggagtttttctgttctttggctttatttgcctttgttagtttttattttttcaaaaagaaagccgttcgatcaattaattagtgattcattcagtcaaaaaacaaattttacgactcttcaaaaataattaatgttcggttatgcaagagaagagtctgtctttgtttctaacatttaagtgctgaatttatactttttatgtcatcccttccccccccccccaattttctccccttttccgtccattttacccctccggcgggggtgagactgaccttcgccaccccttccccctccctctcccgtttcacccaccctttcctccatggcattgggtgccgaattggccatggggacacaaacattggctgaattatgtggagcgggccgccatcaatttgccaccctccgccgaggggaagcgatcaatgcgaaagcgaagtgaagtgaatgtctctccccgcaaattgccccgagggcgaaggacaaatggccaaaggaaagggcagaagcaaaggacagaaggaagagcaataaataaattaatccttgcgcttggaagaggaggaaagtgcgggccaatcccttcctcccgttcccctctttcctcttcgttttcagtgaaacctcaaatgccccccttcgtccccaattgtcaattttaaacatatttaaaaaata

SEQ ID NO: 36005 - DNA, 963 bp, Heterodera glycines
  unsure (1)..(963): unsure at all n locations
ctgactcggccgccctctggtactgtaactgatcgaggtcttcatttgctgggacaaaagttcgttagttggtgacgtaatgtccattgaacgcttctagaatcaaattaatatgtgtttccaattttttttttcttgataaatcaccttctgaagctggtgcatacgcttattgacagccgaagcgtaaattaatgccattttgttttttaagtgttttcttttaaaatgttaaaataagcatccaatttctcctaaattcttttgacaattaattttgctatacaaataaaaacaataaaaaaaatgtttcacatttgtacttattattagactttttggtccaattcccccacttttataggtcaaattgttaaattttatgactaacaaatgaatgatcttcaaactcccaaatcccctcaggagacaattaaacgcattccattaatgggacattttaaatttgattaaattgccagaggtactacagcgtatattctttttttgaacaaatgacttttgcgctaatgcggtctgctctttaggagaagttcacgtgaaattcttacaacaaacaaattgccgaaaatcccctgagggcaaatgggacaaaaaaatggcacaaaatgtagccgtacggacggcgagtagaaaaggcggaaacggcgacggctaagtggccccggaattaattgagcatgtgggtggaagaggttggacacaacagacagcaattttctggtccatagggtttgtgagcaaaaaattggcacttttaaaccgagcgggggaagggatttaagaaaactttttgattttcgatttctttttggaaaaatttaaaaaaaaaagatttttttatttttgggatttaaaaaatgaaacccattaagaataaagagaaattgtttaatttacaagatctaatgttattttaaaaaanatattttgaaatgtttt

SEQ ID NO: 36006 - DNA, 1026 bp, Heterodera glycines
  unsure (1)..(1026): unsure at all n locations
ttatttattttttgcaaattaattcataaatattttttacaaagtgctctgaaacgcaccaaatgttaattaaaagttaaataaggctctctgatgctttttctatcaaaaagggagatgaataaaatttttaaaaatttttaattcctttttaaacaggccaaaaagtttaggcgtatattttaaaaagtttcatcgaacctagcgcactaaaatcgatataatctctccaaattttgcaggccttctccattgtaaaggactaacttaacctgaaaaaatgccaacgcttgttgtttttaaaatttttcgaaattctgactttttcattaattatttattattttgcaaaattaattcataaatattttttcagaaagtgctctgaaacgcaccaaatgttaattaaaagttaaataaggctctctgatgctttttctatcaaaagggatatgaataaaatttttaaaaatttttaattcctttttaaacaagccaaaaagtttaggcttatattttaaaaagtttcatcgaacccagcgcactaaaatcgatataatctctccaaattttgcaggccttctccattgtaaaggactaacttaacctgaaaaaatgccaacgcttgttgtttttaaaatttttcgaaattctgactttttcattaattatttattttttgcaaaattaattcataagtattttttcagaacgtgctctgaaacacacaaaactttaattaaaagttaaataaggcactctgatgctttttctatcaaaaagggagatgaataaaatttttaaaaatttttaattcctttttaaacaggccaaaaagtttaggcgtaactttttcaaaagtttcatcgatcctagcgcactanactttgcatcgatataatctctccanattttgcaggccttctccatttgtaaggactaacttaaccnntgaaaatgccaacgcttngttgttttaaaattttcgaattctgacttttcattattatttataatttgcaaaat

SEQ ID NO: 36007 - DNA, 1388 bp, Heterodera glycines
cctcttataatcactgttcttcctcttttaatcactcttttacctcttttaatcacttttgtacctcttctcatcactgttgtgccttttctcatcattttttgacctcttctaatcactgttcttcctcttttaatcactattgtacctcttctaatcacttttgtacctcttataatatcagttgtacctcttctaatcaatcacagttatacctcttctaatcacagttgtacctcttctaatcaatcacagttatacctcttctaatcacagttgtacctcttctaatcaatcacagttatacctcttctaatcacagttgtacctcttctatttacttttgtacctcttataatcactgttcttcctcttttaatcactattgtacctcttttaatcacttttgtacctcttctcatcaccgttgtacctcttctgaccaatgttgtacctcttctaatcacttttgtatctgttctaaaatttaaaaaacggccgcgaagcggccaaaaagaacaacaaaaattagaaacgggcgtgaagcgcccgtctgagtcgatcaaaatttaataacggccgcgaagcggccgtcaaagcccaacaaagtttaaaaacgggcgcgaagcgcccgtccaaggccaacaaatttgaaaaacgggcgcgaagcgcccgtccaaggccaacaaaaattgaaaaacgggcgcgaagcgcctaacaagctaaaaaacgggcgctaagcgcccggataagttcaacagatttaaaaacgggagccccggggacgaaatgagcccacaacaaacggagaacttgtttgtcatcggatagcgagcttccaacgggtttttgtcgcgtccaaatccagccgtttcttgttcaacacgctgcgttccttctgtaaaggaaaagggagggatttggattaaaaattgtcgaaaattgagtgaaaaattgcaaatccacgcctggacggtgcgcagttcgttctccaggaggtgccggaggcttgccaaggtttgcgtggtgaccgattggatgagttggcgttcccctgctgccattttggactccgtctgtgacaccttcagcagaatagctgaaaagaacagaaaatgcaattagtggggttaattaaattgagcatttccgattcaaattctctcacctccgaaggtcgactcggcgcccaccgctttcgatgctgcttccttaaattttggtgggcattaaaatgtgttgtgaatgccaaaaaccacaccttcatcgcctccccaagaccgtccagcgtattctgtcggacggatttgtcctttcgcgtgtccagcgctcggactgctgaaaattgagggaaaatttactgttttcctccaaaaattgcaaattcc

SEQ ID NO: 36008 - DNA, 1254 bp, Heterodera glycines
gtcatattttttcatgacagcctccttttttttgccaagtatcgcccctcagttgtttgacggttttctccttgaatcggagatgtcccaattccgcgcactcttcggcaacttcgcgccaacagtcctcaacaattttgcgaaaattgggccccactgctgtgttgaaaagagtttcatgtcttttctcaaccgcctaaagtcatcatactttatatttatgcttcgaccgaattggcacaccttaacaaaggctaataattcatccgagctcaaggcagggccatgggcagtcatttaatagcagttcggagagaattgaccaataatttttggaggaaaaacaatgatggcttagtcaatatatgcaatttttaataaatctacaagctcattgatcactctttgttggccgcacacttttctttgttcccccaaaatttgcccaaaagttttgacaaacatatttattatttacttccatcaaaattgagaacaaacgacaaattactctgaaaaatttggtaattctgattggacgacaattcggacgacagagacaaacgacaaatggcaaaacgataaatttggacgacaaacgatatatttttttgtcgtaacgacttattaggagacaaacgacaaatttgtcgtttgtcggtcgatttgtcgttcgtaattctgaaaggcccctgaaccaacacaaaaaatattttgtcattgttctcattcacccattctctccaccgcttctccgttagcccaattgtgacgttcgaaagttgcatgctcagctgtttcctcctcaagctgacccctctctgtgcctgtttctgttgcggctgtttgcattcggtcaatgtgcccattgtgagcagttggcaaacgcaaatgtcggtgaagtaacggacaaactcatgccatggcatctgaatggcttaatagccaatcaaatgcccattaagcaaagtctctttacaccaccgccatttgcctaattattgaattggtccgcgacaaacccaaaactctccgtcctcgtcaacggtgatgccaagtcgccatttctgctcttcagtcacctaaaggtgttgttttgtgtgggcatggattggccagtgtttgtgccatttcatttcgcgcccttttccctcttaaatgggtcgacctgctcccattcgggcgacccgtccgaccacggtccgttccattctttcattcccccagggctaaagtgcaatttcattgggaaaa

SEQ ID NO: 36009 - DNA, 891 bp, Heterodera glycines
  unsure (1)..(891): unsure at all n locations
ttctgagagttgttaaaaaaatattttttttaataaaccccccttaggataggaaatattatntggctccaacgcaaacttggttttttttggatggcatttattttaaataatactggttttttaaatgttttttttggatggcatttattttaaataatactggttttttaaataagaaattccaaaatgtcaaatctccaaatgtcccacaaaaatcaaatccccaaatttcgtgtactcctcaaaaagaccccccggcgcggcttttacccccgccaaataggggtttaacactttcatatgcttcatcacacacaaccacccaccggtgtatctgttgtccaggatcagatgctcctccagcagtgcgcccaaatcctccactttcttcagcttggcccgctgtgctttgatgtcctgcgcattgcgacgtattgtgtccaattgttgctcttaaacattctattttcccagcggaaggcattcatcagaattgaaaaatttatgtgctttaaattttgggcggaataaaaaaacgattgattacccctccaaatcttttatcgttacgacggccctacaaaattaggcatccactcgggataattggtttgccatactcacccaatgatccgcttgcttccatcatttcgccacgtgtgtccgccaaccattggtggaattcattggcctgtcgtgcaaattctcgtctcagtttgtcgttgtcctcctggcgcctgtgctccttttgcagctccaactcgcgctctttgattatctgttggcatggaaaattaatttaaaaaaatattttttaacaagtctataaaaattatttgattcatttctgatgatgaaatattaatcaattacaaaacactgatgatg

SEQ ID NO: 36010 - DNA, 882 bp, Heterodera glycines
gggggggctcccccgaaaacaaaaaaaaacgattttttcaaaggcccgttggggggtctcaaacatttatggggagcaaaatcccaacccagattaaagtacaggctatagggaagctattcccgaagggattcggtctccccataaatctgggcgcatcggttcggggggactcccccgaaaacaaaaaaatcgattttttcaagtgtccgtttggggtactccaacatttatgggagcaaaaatccaacgcagaattaaagtacaggctatagggaagctactccggaaggattcggtctccccataaatctgggcgcatcggttcggggggactgccccgaaaacaaaaaaatcgattttttcaagtgtccgtttggggtactcaaacaattatggggagcaaaaatccaacgcagaattaaagtacaggctatagggaagctattccggaaggattcggtctccccataaatctgggcgcatcggttcggggggactgccccgaaaacaaaaaaatcgattttttcaagtgtccgtttggggtactcaaacaattatggggagcaaaaatccaacgcagaattaaagtacaggctatagggaagctattccggaaggattcggtctccccataaatctgggcgcatcggttcggggggactgccccgaaaacaaaaaaatcgattttttcaagtgtccgtttggggtactcaaacaattatggggagcaaaaatccaacgcagaattaaagtacaggctatagggaagctattcccgaaggattcggtctccccataaatctgggcgcatcggttcggggggactgccccgaaaacaaaaaaatcgattttttcaagtgtccgtttggggtactcaaa

SEQ ID NO: 36011 - DNA, 1303 bp, Heterodera glycines
  unsure (1)..(1303): unsure at all n locations
ttaatatttttgtgataccaatgtttaagtgcgtactgttgntgaaaatagggtacgaaaaactgtgataccccattcagagactagcaaaaaaatcagaataggatggatttgcgtaccaattattatttttataatgggttggttaaatgcgaaacagatgacaaaagttgttataactcaattcagagatgagatagaaaaaaacaacaataggcttggagagcccttgaagagctgcaccggatgcaagtgccgccgttgctgtacgcttagcggttgctgtgcaatgacggaaaattgctaaatcagaaaaaaccaaatattatcaggaatacactctaccatctcacccgtagacaaaccgaatggtatatgttcgaacggcaagttgactaccgtaactaattaatatttttgtgataccaattgttaagtgcgtaactgttgtgaaaaaagggtacgaaaaactgtgataaccccattcagagactagcaaaaaaaatcagaataggattggatttgcgtaccaattattatttttataatgggtttgttaaatgcgaaacagttgacaaaagttgttataactcaattcagagatgagatagaaaaaaacaacaataggcttggagagcccttgaagagctgcaccggatgcaagtgccgccgttgctgtacgcttagcggttgctctgcaatgacggaaaattgcaaaatcagaaaagaccaaatattatcaggaatacactctcccatctcacccgtagacaaaccgaatggtatatgttcgaacggcaagttgactaccgtaactaattaatatttttgtgataccaattgttaagtgcgtaactgttgtgaaaaaagggtacgaaaaactgtgataaccccattcagagactagctaaaaaaatcagaataggattggatttgcgtaccaattattatttttataatgggtttgttaaatgcgaaacagttgacaaaagttgttataactcaattcagagatgagatagaaaaaaacaacaataggcttggagagcccttgaagagctgcaccggatgcaagtgccgccgttgctgtacgctttagcgttgctgtgcaatgnnacgaaatttgcaaatcagaananacccaatattatcaggaatacactctnccatctcacccgtagacaaaccgaatggtatatgttcgaactgcaagttgactaccgtactaattaatatttttgtgataccattttgtagtgcgtaactgttgtgaaaaaagggtacgaaaaactgtgataacccc

SEQ ID NO: 36012 - DNA, 937 bp, Heterodera glycines
  unsure (1)..(937): unsure at all n locations
tttttccattgattgaaattttgaaaagaagaaattctgacggacggcacaatggcttcatgtgcatatgtaatttgattgatgatttttgactactcactgcttcttctgctccttttttggctgtttgagatgacaaatgagtccatgagagagggcagatgttttttgggggacggcttttgcccaaaataaagcttcatagttccaaatttttttttgttttttttgtccatgagagagagcagatgttttttaggggggggggggcggcttttcctcaaataaagatttaaaatttacaattttttcaacaagtttttaaccactggggaagaatgtgtcccgagaaagcagtaatggttacgcaggccctcaaaatttccgaaattccagcctctcaaaaatcgccagtcccggataaacagaattaaaaattctggccggaagcatcaaaaacctacgaatatcattttaaatttcaaattaattcttttcttaatttataattaaattgttaattaatttgagattgaataagcttacaaatttggaggaaaggacttaatttccattaaaaaacaatttgttactaattgcgaaaagcccatttatctgtaaaaaagggatgtcacgacacttaaaaagcctgaagccaactggtttttttcatttccccacttttgccttttgttttttgttgtttttacggttggctgtgtgcttgcgtttcctttctgctgatgataaaactgctgctgctgctggactggttgttgttgttttgtttggacaaaaaccgatcgaaaaacggtgctgagagcgagataaaagctgtattttttgctacagatataatctacatatacattttccccaccctctaataaaattanttagtttttttaaatcccaattttgtttgggccttaaagct

SEQ ID NO: 36013 - DNA, 999 bp, Heterodera glycines
  unsure (1)..(999): unsure at all n locations
agaagcattcttcatcaaagcattttttcgttatgtttcttaaataattgtagaacgattcctaaaaacgccagcaatttacccaaatcaattaaatgcattgaaacattacggaacaacattgcttgattaccttctcacgaatggtgaaagcaatttgtcgcaaaaattggtccaaatcgatggcatgccaaatttagtcaaacatttttgccaatttttgggctatggtttaatgaaagatgcagacccaagcgaaaatgatatcaaaattgagctgccagcagaatggaaaatattctgcaaaaaatacatggaaaagattagcaggaaaatcagtggttattccgaacaactcaaatccaattgtaactgatcagtgatcactagtgatgcaaattatatggaaattattccatttttcctggactgatgcaaggcatgaaacgaacgaaaaacattttttaagcttggtttgaagcttctagcatgggtttctgtaaacatatttttccatatttcgcgatttatttcgtaaaatttggtaaatttagaaaaagttgtatgaaataagtactatttctgccatagcttatgttaaatttgatagttttattaagttttctaggctaatagagaaaaggcttgcttattgaatggtaccaagaatgtaaaatttaattgcctttaagcaaagttatataccatgttttgccgaaaaattcgctaaaatggcggatttcacgaacgacccagcacggttataaactcttttgtggtttgtctatactattatgggttctatcctccattgtccatgtttttcgcttttttaaaatttattttttatctacaattaatttattttaattcaaaaatatataaattaaaaaaataaacagcgcatatccggtacactccaaaaaatgtctcctgaagactntctggaccatatgtttttcgattgnccgacatttgcgccgtgacactggaggcgca

SEQ ID NO: 36014 - DNA, 997 bp, Heterodera glycines
gaaaattcaaaatattttaattcctgtagaggtattgaaccaggggaaagaaaaagacaaaagtaaaggggactagccactaggccatttgcacaatttgttctaacacttttaaagaatatttttaataattttttttctaattttttcctttgactccaattttcatcactaattttccactcagacccccattcttaacagtgcttgtttgaccgggaccttcaaaatccgggaccgggaaccgggaccgagatttcggcccaactaagccggtctttaggactaagtcaaaacagaaacaagtacatgtttaactctgtttaaacagctgtaaaaattgaccaaataataagattaccaggcttttcattttcaagaaaatatcaattttcaagacacgagagttgtttaatttactaaattttaatgatttatattgtaaagcgcaattaattcacacacatttaactggaggtgctacatttgcgcccctacatttgcgccccgcacatttgcgcccctacatttgcgcccctacatttgcgcccctacatttgcgcccctacatttgcgcccctacatttgcgccccgcacatttgcgcccctacatttgcgcccctacatttgcgcccctacatttgcgcccctacatttgcgcccctacatttgcgccccgcacatttgcgcccctacatttgcgcccctacatttgcgcccctacatttgcgccccgcacatttgcgccccgcacatttgcgccccaattgtgaataaaaaatatattcataaaattgcctttcccaagggctaacgggagtgattatattattaaaaaatcatcatgcacatccgaatagctcttgttttccttctcctttgactgcgtacagcatcagtaggccaagatcggcccttgaatttttcacttttcgtctcgccattgtctttgctttagtagaggagtaaaatttacattttaatttattaacaaac

SEQ ID NO: 36015 - DNA, 779 bp, Heterodera glycines
taaaaaatatttatgaaaatgtttaattacattgcttttaagtttaaaatacaaattttcttaataatttttatttatgaaagcccaaaacatttgacgttaaaatgaatgggtaaaaatggtctttttttgtgcatttctcatcaaaataaagctgcaggaaaaatatttatccaatgtaaatcctaccaatcctactaattaattggtaattatttaattaattatccattcgttttgcatttgtttctgtttttcttccgctaattgattcgttcgtctattattttgttaagccatgtacgccattgtgctcatttgcttgggtctgaccttcgtccatttgtttctctcagcagcgatgctttacggttgtgtaaaggtggaaaaattataaaattttttaaaaatttatttgacataatacctcttgagctcgggtataatcgggatttcccagagttcgccgggattcctgtcctgtttacgctttcccgatgccttccaatttgctgaaatggtgcccttttcatttggccattattttatcgctctttatcccccccctgttggattaacgatggattagtcactcttttttaataatttcttttaattctttccccagcgtctcccccaatggcttttcccctggtttttctctgcccttccgctgattgttctttccaccgcttattccgtgctgtggtggagtggcgacgtgttcaatgagcagttgaccttctcagttgcgcagttcgccatgtctttggcggtga

SEQ ID NO: 36016 - DNA, 858 bp, Heterodera glycines
aaaaaaagagagatacccatttttcggggatagagtataaatttaaaaattccctcaaaaataaaaggtttgttgcgcgccgccctccctatcatgctcgagaccatttggtagggtgtataaaatttctcaaaaaaagagatacccatttttctgggatagagtataaatttaaaaattccctcaaaaataaaaggtctattgcgccccgccctccctatcatgctcgagacctttggtatggtgtataaattttatcaaaaaaggagatacccttttttggggaataacctaaaaatataaaattcctctgagaaataaaatggtgttcgcgcccaccctccgttccattctgcaagccctttggaggggtataaaatttatcaaaaaaagagatagccatttttctgggataacctctaaatataaaaatcctctgtgaaataaaatggcgattgtgcacagccctccgtctcatacgcaagcgcttttgtgaggtataaaatttctcaaaaaaagagatagccatttttctgggatagagtataaatttaaaaattccctcaaaaataaaaggtctattgcgcaccgccctccctatcatgctcgagagcatttgtatgtgtataaaatttatcaaaaaaagagatagccatttttctgggataacctctaaatataaaaatcctctgtgaaataaaatggcgattgtgcacagccctccgtctctacgcaagcgcttttgtgaggtataaaatttctcaaaaaaagagatagacatttttctgggatagagtataaatttaaaaattccctcaaaaagaaaaggtctattgcgcaccgccctccctatcatgc

SEQ ID NO: 36017 - DNA, 898 bp, Heterodera glycines
  unsure (1)..(898): unsure at all n locations
tcgttgtttgaagttgttggaccacttcttccactccctcctcttctccgcccactttcgtcttttgctgccgttcggtttcctcaatttttcgtccaatttgaatttgatcattttgctctttttctgcttcttcctcttcgtccctttcctcctcatttccgctttctattatttcttcttttttcgcctctttcgcggggtgtggcgccgttgggggtgcaattgcccaagaaaagtgtcgaaatgttttggcggcaactggcgaagatgcttcttgtctatcaaagccagcaacattctcatcaacttcaacatcgagttgctaaaaattgtgtcaaaataagaaaagaaagacaaaaattgttgtaaatatgtaactataaatgttaaattgcctgcgcaaagaagcagataaacgaaccttcctctttcgctttttgagaggtgttgttggttctgaggcgggcgatggatcgaattttgacacaaatcctcctgcaagtctaacatattcttggagacgaaaagccaaatcagctgcactgccttttgtatccagccctgaaagtttaatggtaaggtccattaactaattaataacagaaagaatgcgcaccgcgagcttctaattctttcttgactcttgccattgggagtaaatgaatcgttgatgggttcagcccacccgaatccacaattcccgaacgtcgcgaacgcgttgacgacatactgaattaggtatattgtacctaaatagaaaataaactaaagtgacaaaaccgaaagcacaaaaaggaggaaataaaaataacaaaattaattaattaaggaacgaaaagtaacattaaggcacggcacgcgaccaaaacgaataanaggcgcgacgcgaataatg

SEQ ID NO: 36018 - DNA, 1030 bp, Heterodera glycines
ttgggcacggagttcggcatttggtggaatgccagcgctgctgagcaaattttggtcggacaacgacgagccctggccctcgacgaagccgttggtcgccgcattttgcaaccacgacggaacggattgtgacaaaagattcagtccctaaacaaaatttaaatttgaaaggtatttttagttaaaagaactcaaaatgactaaaagtagaatttgcttggtgttttttacctcgacgagaagtgcagcaagatccatgtcagtggccgggtcgaagaatgtggtggacattccctgttggattcgcccggtacgtccgatacgctgcacatatttgtagtaggcatcctccgcactgtcagcacaaggcaaatccaaattgatcacctgaaatggtttgcacaaatgattgaccatccgataattcgtttagtcttggactctccccctccaccctcttaataaatggtagattaacagacgcgctccaaatttttgatgtcgtggccacgggcacaaacgtccgtcgtgacgataatttggaattcgcccgttcggaagtcccacaccgccttctcacgcgttggttggtcacgtcgactaaaagtatttgcagcgaacttcagagaatgagagaacgcacccattaattgtcgtcgctgagaatccgcgagaattcaaaaaattacacacaatttcagcatcgttgcgtgtgttgacgaaaaccatcgtgctgagaagtttttttgaacctgaaaaatcggcctttttaacatgtactgtttcaaaatccacatacggtccaattgttcgttctgttccttctcgagttgcaacagtcggacgagtgtgtgccgtttctcggcactttcggcaaggacaaatgtttgtctgatgcgtctgttcggtgttatttttcctctggagactaacacggggttggggcgcatgaattcgtcggcccatttcagcacatcggatgaaaaagtggcggtgaaaaaaagagtctggcgcaactcagtctaaagga

SEQ ID NO: 36019 - DNA, 915 bp, Heterodera glycines
  unsure (1)..(915): unsure at all n locations
cctgcannggtcaaaattaaagttgaattttcgccggtggtccgaaaatccccccccatgtgttcaaaaaatggccagagccaaagctgctaaatgccgaagaattgaaacaggaaaaaggcattggcaaacaaattattgaattttttaaagggaaaagcccaaaaaaaggaaaaggaaagggagagagctcaacagaatcaattggtagcaaagaaaatgcatatcgtttacatgaaaattttaaaaactttttgaatgaaatgtccaaaactgcgaaaagaacgatttcaaaaaatgggacggacgaagaaaaactcaaatggacatggctattttcaaggataaaggtattaaagctgggatgaatgtactttaaataaattccaattacgatcaacctatttcgtatttaccgaggtctttaaaaataccgtaacaaaatccgtcgtggtatccaaaaaaccccacttaatttccgtgtttcagcttgacgacgagctgtttcttacttttatcaaagaacaaacaaaatttgaggaaatttgtagagaagaaggagaagaattatggacgaaaattggcttgttatcaaagcgaaaaggcaagggcacatacgatattggggatacggtagaatatttgacgaaacagtacgaaggttatcttggtattttgtatttattgaaagagaaatggcaatgtgacggaatcacggagaagcaaaaaagagagaaatgtgaaaagtttcagaaatatgttgagattatttttattattaataaaattattagctaaaaactggcggctggcacaacaaatttccgcttcggttccaaactttcatcttggcaaagaaacacagagtgccattttgattgatgttttggacagtctgattcacatttgggcatt

SEQ ID NO: 36020 - DNA, 566 bp, Heterodera glycines
  unsure (1)..(566): unsure at all n locations
aataattaattttaaaaaaagatgctatgtaanttggaatgatacaatacntctgaagaaaactcaaaatattcatcatttatcgagcgtacccaaacccacgacaatggggcgctaaaatttacgagaaaatttgtcaaaaactttacatttttcgtttttcatttcagccggactatgaccgattgcttgatctgctgcagatgatcagtgtgttttcgccggagttcaacaacaatgccaaattgatcaccagtgtcaccgtgcctttgatagtatcagcaccgccaacacgaacgcgtggagcagaaaaaatgccatcatcggtctcgacatcattggcacaatttagcggggcaccgatgtgctgccaaatgcctgcgacagcggaaaaaatgacacaggtcgaaaaaatgaatattttaattgacatttcaatgtttaatacctgttcaacctattatttccttcaaaaaactgaaatttctgatgtctcaggtcgattttgaatctacaaaaattgacgaaaatggggtgcaggagcaggatgatcagcagaagatgaa

SEQ ID NO: 36021 - DNA, 1392 bp, Heterodera glycines
  unsure (1)..(1392): unsure at all n locations
ggcatttgcgcttgttgtgccaccgcctccgcaaatggctgcgacgaaaccgttgccggcgatgacggacgacgagtgcggcggcggcagcggtggggcgaaggaaagcggcgccggtgggcgcgtgcgctgtttgcccggcttcaccgcactgctcaaaccgttggcggcggacaacggtcagcctcagcagaacatcatgaacatgatggcgaacaacagcgggggcgtcgcaatacaagcacaacagcaaaaagcacgcttttcagtttatgggtcttcaaaatgggggattttccaaaaaatatattgttttgacatctcgattaaaaaaagtctttaagttagttaaaagtgaacgaaatttaaatttttctccttttcagaccgattctttgcttaaagtgtacgagagtgacgggaacgaaagtgacggggccagcttggccagtttcaactcctcactgctcaacatacaaacgggtgcattttaaaggcattgtaaaacgtgggacactcgcgacacataaaaaaacctattaaagttttgttttaaaattcttttgagaattcttaaacaagaaaaaatgtttattctatggtattctttcgaaatttttttaattttaatttttcattcaaaaaaggtcggatttttagttccgtttttattcgggggggggggggggagtgcgcccgtattggtaaaacgacggaggcgcattttattattattttttataaggcttttcctccgatagccgtcaactgcaacaaaaacagacgccgcaccaccagcaacatttgcagctgaagcggcgcggacggcccaaaaaggcggacatggcggacacgggccgcagcggaacgccggtgatgaacgggcgacagccgatcagtgtggcggaggcgatgaaggttggagttggcggcgatgggatgggattggcaaaaaaaatcattatgaaactggcacttactgttaaccctgcttatcgtttaaatttctaattgtttcctttccagtggagtccctcccgtttcaccagcgagtcgcgctttgtgatcgcttccaaagtgaatcggctgctcggcttcagcagtcgtggaggtgagcgacaggccgaaatcagaattattaacagcaaacagattggaccggggttagtcatgccaggaaacggatcgttttttaaattttcgagtggtttatctgaaaaatccgaatggaaaacccaaattgcccggtgtccagacatttgcgccaatgtcctaaatcggattcaaatttaagtttttcattccctgatcatacataaaaaaggggngggggggggtcggctgccgacgacccttttttttgcaaacttttcggcgcggtttttcccaaaa

SEQ ID NO: 36022 - DNA, 1073 bp, Heterodera glycines
cgaccccccttcgctttttccgacccacccccctttttatgtatggagggattacatagttcacatacttttaccacaagacaaagagactgttcatggtacagagtaataaaggcgccgattaatccaacaattcgattttaggtaacaattgacgatgaaatggctaatcaacgaggaatgggcgatttttacgattcggatgatgaaactccgcccgaaaataaatcggaattgaatgacagacagcacaattttggagatgaattgggcggagggcagtgggacggcaattccgaagggaatggcgaaagggaaacccgcgcgcacgaagcggccaatggttacgcatggactgtggtgcgactggcgattgtgcgacatatccaacacaaattgcgcaattttgtcgagatggtcggcttcgacttacagggcaagcaaataaccgaccgaaaaaaaaaatatttcggaaaacgcacttaccgcacaacttattgttagtgttgcagcaccaaaatgactcttgataatgttacaagtggaaataactgtgtattttcagaacaaagtcaaatggcacaaaaatttaaagaattccttgggtaataaacacaaataaaagcgctaaaacagcttcaaattgccaaatggctttcgtggttttttttttgtttgcttacaactagaaaacagccaattccgttctctattgcggtcatttcaaaccccaatttataatttgcgtttcagagattgcgcacctttcccctaaacttaacctcacaatgaagcggttcaattcatgggcctcccaattggagaacgaactcgagggatggaaggacggatgtccctgcgactttcttccgaatatgtcgccaatttcggttttccgcagggcctttatgctaatgtccaatgtcttaaggatgcaaatgactcctcttccctctcctcttcttcctcctggtcttcgccactccttcacaaatatcgcttgctaattgagcgtacgttttattttatttggtttttttgattcgctcactttcgtttgtttatttcatttc

SEQ ID NO: 36023 - DNA, 608 bp, Heterodera glycines
  unsure (1)..(608): unsure at all n locations
gttgcggaaagatcgggcggtacggtaatgcacggtaacaccatggcaagcggacggacaagcataatgtaaacatcacgacgaacagttttgttgaacgccaagtagatgctgggtggaattcctgttttaaaaattaaaaatttaatttttaattaagatttattaaaatttaatttcttttaccatgcgccaaaatccaataaaattggccagcgaccaacagaaattcgcttaacgggacaaattgcatgaccacataaattcctgaagcaattgcatttacgctgctgatcaaaacaacttggacaaaaatctgaatttttttttaattaattttaaattaaaaatttttaattggataaaaagtttaggaggtatcctttacttaaaatttcaattttaattcattttacacgcctttttctgtgaaccattggtggtggtccgtccttgattatgcgactcttcatgaacagaatcaatgcaaaaagcaaatagatgccgggaagtacagtaaccacaaggacgtcatgtaccgattngaaatcatttacgtactaaaaaatatttctttttgtctactgtattntatgagttcaaatttc

SEQ ID NO: 36024 - DNA, 811 bp, Heterodera glycines
agttcgaaatacaaattttcaaatgcaaacaatttttaaacttaaataactttcttaaagttgaattttaacctgtttgtcttgaatttatattgcgaatgttgtaaaaaaataaactaaaattttttataaatcaaacaaccattaaagaataatataaaattctataattattttctgttttctaaatcattttaaatatattgaattaaaaaataaattaataaattaattcgagataaacctcgtacaccattgggttttcgaggtcattttccaaatttcgttttcatttttgcactcacttatttttgaaaaagaatggacagattgaataatataaaaatatatttaaaagtagcaatatttatattctaagataaaagtaataataatagagcaaaagttaaattataaaatattttaacaaacttggtccaagcatttggtgttcagttcgtaaaacaaattttcaaatgtaaacaaactaattttttacatcaattttgagaattattatgaaatttataataattattttaattatttcaattttttgtaacatatgaaatagttgtttttgttgcttaataatgattttattacctcattagagcagggtttcgatctcagaattttgaaaatcctcatttcagccataaaaaatcatcattttttaaaacataaaaaatgcaaacaaaataattaaaattcatattttccgtttgaaaacaatcacggcgcctattaacgccgccggaccccaataattcctattttttcttaaaaattggaccagaaatcgcaaatt

SEQ ID NO: 36025 - DNA, 1331 bp, Heterodera glycines
  unsure (1)..(1331): unsure at all n locations
tggcaggtctcatcagaacggtacggatcgagcataagggaccaatccaatcccgacaaattaatagtcagtcactaagtgccgtggcatcttcatcggatgccattgccttccctgccccaatttcgattttcagggatggtacccgttgaaaaaccacctcagagcgctttccggcacgagtgccatccgttggaaaagggaaactcccaaaagtgctcgcaatgcttttgctgtcacttcgcccgcgaggcgtccgttttttgcggagaaaattatcctttggacgacgttgaataacttcagcaattgttcctcaaattcatcgcctaattcttttgaattgtgcactttcactgcccaatgctgacgatcgatgtgcaaacgatgccaacggggaatgccctgggaaaggaaggactcttagagtgatcagactgatcagcaggtgaacactaatcattaatcaaagtgatcggcagggaatgatcagcatttgattagataattgatgatcaaaaagggaaactgtttttcaattagtatgtctaagctcagttaatgaagaaatctacttgagatttatttaatataagaaattatctatcggagtgatcggatttctctttgccttttccaaatgttcccaaaatgccgtcagaaattgctgcaaacttcgcacagtgtataaatcattttccgagtagaaatttcgaactgattgaagagaaaagaacaatttcattgctttgaaataatcggaaggaatttttctgaatttattttaaaagatttattaagacttattaaaaataaatgacctttgtgtcgaaataagttgaaaaagcattcttacaaagaccaaattaaacaatttttcgacattttcccttggtaaaagtaaaggctaaacaaaaaaaataaaaaataattaaaaaggaaagtgtttaaattaatggtggattactttaagtgtggcaaattgttgaaacaaatcagagagaagagaaagaatgaaaaccaattcatcagctgacggagaatgtccgccagtggaagaggcgaaaaattcaaattcgaccaaagcatcgacgatgggctgtcgatcgccctcattttgcaaattgaaaagcacggaaaacaaattttgaaagaaaggacgacgaatgtgccattcggcaccaatctgttgnggggggggggtaaatttggggaaaagggtcggtcgttaggaataatatcaatttagcaataattaccnatgcaaaaatgtccaaaattgcatgtttctccaaacgaacagtcccaagcagatttgctggaaaaactct

SEQ ID NO: 36026 - DNA, 1304 bp, Heterodera glycines
cacacacacacacacacacttcaggtttaatgcgttttgaaccggtggaatgcgggacgctgaactgctcggcgatgtgttttgcacccgagggatgggaggagccgaaaatttgcgcttccgtcgctcccgtctgtgacgtgccaaaaacacccaaaatcgactggtctttgctcaccgacgcggtttcggctctcatgttgctcgccaacattttcttcacagtttggctcatttgccgcgtccaacgcttgccgaaggaagcgcctccaaaggacccggcttattgtgatcagtgccatcgtctcctgcttccgcgggtccttcctcatcgccgcgtcagcgtttttgaggacgtctcactggtgtccgccgtttaaaagcacaatcagaaataaaatcacttcaaacacaaacacacgtgcatttgatttttgttaattaattttatttgaataaataagcacttaaattgtccagtaaaacgagagagtgaggggaaaatatattagagaaaagctaaaaaattttgggtgaagtcttacggtaggaaattatggaaatgaatggtcaaagaatttaaattttaaacaaaatggtgaatggcaagcaaatttaagtgaggaaattaaataattaggaaatttaccaaattaatgaattataatggggagataacggggcagggatttgaaaattttaaggaaaatgaaggaaatttatggaaagaaattttaaatttgaagggggagaaatatgtaaaaacaatggggaattttgtttacgcaaaattaataaacgaacggggaaataatggcagcgcaaaatggggcaaactaaaattgttaatttttaccaatgcttgagaaatattaatgctaatatggggaaaagcaaatgtgaaatttaagggatgcattggggaaaacgagggaaagaagtgttcgcatccacccaggagcaccatgacaaagccctactctggagactgttgggactcggggacacccaaaatggggcccctcgtcgcagctccgggcgggccaaaaatggcccaaaacaccaagcccccaaatccgcttttcgctgtcctctttatttgctgagtggaaaaaccaagccaagccgaaacaaaggtgaaccaattaacagaaatgaatgaacgaaccgggccaggggaaattgagggtgggcaaaaaaggggagggggcagttggtccatttgaggggacaaaaagtgatgagaggggttgacacaaaggaagggggaaggaactcccaagcctcagccaaaggggaacccc

SEQ ID NO: 36027 - DNA, 854 bp, Heterodera glycines
gagacagcaattttcaaaccgacattttgtagggctcaaccgcagatagtaatgcgtttttggggaaaccccacatgtacaacggtgtagaaaaaaagagatagccattttctgagaatatctattcttctgagacagcaattttcaaaccgaccttttgtagggctcaaccgcagatagtaatgcgtttttggggaaaccccacatgtacaacggtgtagaaaaaaagagatagccattttctgagaatatctattcttctgagacagcaattttcaaaccgaccttttgtagggctcaaccgcagatagtaatgcgtttttggggaaaccccacatgtacaacggtgtagaaaaaaagagatagccattttctgagaatatctattcttctgagacagcaattttcaaaccgaccttttgtagggctcaaccgcagatagtaatgcgtttttggggaaaccccacatgtacaacggtgtagaaaaaaagagatagccattttctgagaatatctattcttctgagaaagcaattttcaacccgacattttgtagggctcaaccgcagatagttatgcgtttttggggaaaccccacatgtacaacggtgtagaaaaaaagagatagccatttttctgagaatatctattcttctgagaaagcaattttcaacccgacattttgtagggctcaaccgcagatagtaatgcgtttttggggaaaccccacatgtacaacggtgtagaaaaaaagagatagccattttctgagaatatctattcttctgagaaagcaattttcaacccgacattttgtagggctcaaccgcagatagtaatgcgtttttggggaa

SEQ ID NO: 36028 - DNA, 865 bp, Heterodera glycines
aaaaattgatttttttttttggggcagtccccccgacccgatgccccaagtttatggggagccgattccttcgggatacctccctatagcctgtacttaattttgcgtggatttttgctccccataattgtttggagtaccccaaacggacacttgaaaaaatcgatttttttgttttcggggcagtccccccgaaccgatgcgcccagatttatggggagaccgaatccttcgggaatagcttccctatagcctgtactttaattctgcgttggatttttgctccccataattgtttgagtaccccaaacggacacttgaaaaaatcgatttttttgttttcggggcagtccccccgaaccgatgcgcccagatttatggggagaccgaatccttcgggaatagcttccctatagcctgtactttaattctgcgttggatttttgctccccataattgtttgagtaccccaaacggacacttgaaaaaatcgatttttttgttttcggggcagtccccccgaaccgatgcgcccagatttatggggagaccgaatccttcgggaatagcttccctatagcctgtactttaattctgcgttggatttttgctccccataattgtttgagtaccccaaacggacacttgaaaaaatcgatttttttgttttcggggcagtccccccgaaccgatgcgcccagatttatggggagaccgaatccttccggagtagcttccctatagcctgtactttaattctgcgttggatttttgctccccataaatgtttgagtaccccaaacggacacttgaaaaaatcgatttttttgttttcggggcagtccccccgaaccgatgcgcccag

SEQ ID NO: 36029 - DNA, 1232 bp, Heterodera glycines
cccccccgccgcccttcagagcacgacaaatatttcaacaaaaattttgaaaaattgactagagcaatcgaacgctaacggacgacctaatggaaaaaaatccccgaaggagagaatttaattaaatccattccttcgggggaccgtgccgggtgccgcggggtaagcagtgctggttcgtttcagcacggcaccgaaccttttggctagtcagcaatcgttgcttaacttgccagatcggacgggtgcgcatgattccactgttccaagcaccccaccaaaagcaaaacgatataaccaaaatataaggaaaaatttttaaaaaaatttttctccatctccctttttgatagaaaaagcatcagagtgcctaaactaacatgtaaataaaatttggtgcgctttagagcactttctgaaaaaatatttatgaaataaaaaaatcgatttattcaagtgtccgtttggggtactcaaacaattatggggagcaaaaaatccaacgcagaattaaagtacagactatagggaagctaatcccgaaggattcggtctccccataaatctgggcgcatcggttcggggggactgccccgaaaacaaaaaaatcgatttttcaagtgtccgtttggggtactcaaacaattatggggagcaaaaatccaacgcagaattaaagtacaggctatagggaagctattccggaaggattcggtctccccataaatctgggcgcatcggttcggggggactgccccgaaaacaaaaaaatcgattttttcaagtgtccgtttggggtactcaaacaattatggggagcaaaaatccaacgcagaattaaagtacaggctatagggaagctattcccgaaggattcggtctccacataaatctgggcgcatcggttcggggggactgccccgaaaacaaaaaaatcgattttttcaagtgtccgtttggggtactcaaacatttatggggagcaaaactccaacgcagaattaaagtacagactatagggaagctattcccgaaggattcggtctccccataaatctgggcgcatcggttcagggggactgccccgaaaacccaaaaaaaaattttttggataaaaattatttaaatgaactgactagataatatttaaaataggttatttctcttcctttcagtatccctgcaaagtttggtgcgcttctgatcagtttctgaaaaaaaagttaagccta

SEQ ID NO: 36030 - DNA, 780 bp, Heterodera glycines
tttttgaaaaaataatttctttaaaattttaataaaaattattaattcaaaatcgaaatgcatttaaatgtttactaaacatgaaaaataataccgaaaaatcatttacttcaccgggatccgaacctgaccccccccccccccctcagaatgatgcctaagaccccatttatgcagggattctgaggccttaacggagtcctaaccaaaagcttatttcagattctttatcagcgccctaaaatacacctaaagacatatttttggaggattttgggcaaaaaaattttacactcaaaaaacatatgcaacccccccccccccaccccattggtcccgaatcacaaaatgagtttttaatgttaaaactttctttaaaaaagagataaaaatataaaataatatacctcttgttagagatcggaccggtcggtttttttcggtatttttcgattttcggtttcggtttttaaccgaaaaaaccgaccgagaaatttttgagtttttcggtttttttcggtttcggtttttttttcggtttttaaccgaaaccgaccgaccgaccctcttgtccggtctctatctcttgtaatgcaaaaaattacagatttttctttattttttaagctagctttatccactaatattgtccaaccctgaaagcgagttattaatttctaaaaattagcgtaaatttccctggctcaaaaaatgaaaaatttaaaacaaattcagaattttctgaaaggttcaattcgtatttgaatattttcgggggtt

SEQ ID NO: 36031 - DNA, 766 bp, Heterodera glycines
  unsure (1)..(766): unsure at all n locations
tacatattattattccataaaaagggggggggaatggaatgaaaatgaacttattatgcatcaccaccatcaccacagcagtagtgctgttcgagaccaaaaatttcccgagactcgagactcgagaccgagactcgactccgagaccgagaccgagaccgaaaaccccgagaccgagacccaaaaaacccgagactcgaacttttttcaaaaaatttccctattcgcttaaaaatcgttaaaaacattttttttgactctattcttaactaatttttgcttttttttaattttgattcaatttggtacaatacttatcatttcaaaaacgcactacacagcagtagtgaagaatgcgggcggaggggggagttaagtggggttttgtggtatagaaaatggatttgngggggnggggagaatggaattgatcatcacgggagaatgtttggggatttaatggagtggggttgagggcgggaaatcgcccaaatcggcgctcgcctaaaacgggactgataatgtgattgatcggaactgatatgtacaatcaatttgggagttgagaattacattttcagaaaaatggtgcccgattaacgcgagggattggcaaattggaagatacgaggaaatcatcctcgacgatatcacattgtaattgcatatcatttaggaacgaatgcaaattcgtgatcagaaaccttgagaacatctctataaacttatatttacgtattttaaaatctcaaaaaaagtttgaaaa

SEQ ID NO: 36032 - DNA, 1133 bp, Heterodera glycines
ttgcggctcaaagtcggtacacctaatggtgttagtcaaaaatcatcaaaaaggcattaatcaaaaaaccatcaatcatagtgggttgcttttgaactgttttaatgtatttttggccacagcttttaaaatattaaattttttttaaatttctgaggctaataaagataaacaatcaatggccggccacagaattacaccaacagaattacaccaaagtagattcatatatatatatatatatatatatatatatatatatatatatatatatatatatatatatatatatatatatatatatatttttttttttttttaatcataacctcctccgttttgatagacaagatgggcggcataaccgaatggaacagcaagagttaggtcaatggccgtgaagatgcgcgggtccatccacttaagagaggagcttccctaataaacgaaattatagtattggtcacataggagggatatactgaagtgtcggggtcggttttggcacggaaattattttaatccattccttaagccataccgatttaaagtttttaggtgttttaggcatattttcaaattttttgaaatcgctgaaaaatatattggaaaattcctcaaaatgacgaaacaacacaaaaaagcactaaaatgccaaaagcacgaaaaattaaaaaattgagaaagcaacaatataagcaggaaaaatataggtttaaaagcacgcgtttttcatgccgcttagctcgaccgaaattagcattacctatttttctacctattttgagatttttttatacttaattaatagggcttccttttttaggcaaatgcctaaaattttgcgcacttgatatgcaaaaataagcacgaaagacgcgttttccgcttggttagagatatctacaatgacctttataattcctaacttttcctatttcggggttttttgtgcctaatgtgcctattttaaggtttttgaaaaaatctttaacaaaaatgcaataaaaacgaaaaacactcccccaagaaaaacccaaaaaaattttcagaaaatacatccctaagaattgaaaaaaattttcacaaaattatcgcaaaatttattaattactttcttcataaaaattttt

SEQ ID NO: 36033 - DNA, 1410 bp, Heterodera glycines
  unsure (1)..(1410): unsure at all n locations
aaatcaatgggtacgaaaaaaatgaaaattactttaaaagcttaaaaaattttattttgacattcttacccatttctaatgttgtaatggtgccttaaattgggccagaaaccccaactgaaacttttttaccatgaaatgcgtgggccaaaaaagcnattgttaaaatgatagacttatttaaatttgcggagtaagtttcggaaacatttttaaaaaattaataaaacatttattgccaattttaggggtgatatttttacagtcaaattttcttttaaacaaatattacaagtgacaaagccaaacgcaaatttgcgtacggaaggaagctatgggccggaaagaaggtttaacaaaagccaaagatatttggactctttagaaaactcatttaggaaaatgaaagcaatcgcattattataaacactcaaaaaatgtattaaaaaattgttccgaaaaagtaaataaattaaattaatagaaatgaaaagaagtatattaatttttttaattgtgaaaaactaaacaaaatcaatttttttaaaattactaaataataggaaaggtgtgaatatttgaatttttagaatttgtcggaacactaaataaaattcacttaaaaataagtacccaattaataggaaagttttgcttattttttttaatttacaaaaaccgattaaaaaataattactcaaattaatttaaaaaaaaatacttattaaatcaaatgaacaattttgcaattaatatattagtgtatatatagcgcgagaattaaatggtgtgattgggttggtggaacaaacgttcaaacacttcgtcattatcattatcattatcaccgaaatcgccggcagtgggacgactaatgagtgagtgcacgacgacctcgtacagcactcactctccaatcggcgtaacaaaaatttgttggttattgaaggaatcaattaattaactaattaattagcagcagcaacagcgccgctcattaattttgtgtcgtcactaattagtgcggggaaatgggacgatttgcccgcaaaaccatttaccaatcaccccttctgtttggtgctactactcgccaaattctgtaatcacgaaaatgtcttcttctttttgggtaacacgatgggggtacaccacaagaattagttaaatattataaaagaattattaatgtgaaaaatgcagggcagatgacattcactagccacaaacaaggagcaattaaaaatagttggaggttggaaaatgatattttttgttttcagatccccctgaaaaatatatttttgaaatgtataataatttataaataaaataaaagtttttgataaattctaatgaacgacatttaatacactaattgtaaattttgtcaggaattaatttacctta

SEQ ID NO: 36034 - DNA, 1093 bp, Heterodera glycines
  unsure (1)..(1093): unsure at all n locations
cgctcagcttgtcgttttgacatgggatgtacgggagcggagaatagatgatntatgncatttcggtcacaatttcctaatttctttgaaacgaattgtgtgccgttgtccgtgactaaaatttcgggaaggccgtaactggcacaaagtgagcgcaaattgtccatcgtagtggcggaattcgatgaaacttttgatcacctatcgtttgccgcggccttggccaaatcattgtgcccaacggaagagtctttgaaacaaagttcagaactcctgtttcattgctttcacgaatgtttgcaatgattacttcgttgtccagcactggagtcttcgcgataaggcgagacaaaatatccgcttgaccaaaatcagcagtattttggtattcgatttcgaagtcatagcccagcaatgtgattgcccatctctgcaattgattcgcagtgcatgccttaattccctttttgttgccaaaaatggacaacagtggtttgtggttcgtatgcagaatgaaatatctcccgaagaagatacttgtggtatttctgaacggcaaagacaatcgctaagccttccttctcgatttgagaataattcgtttgctatggacaatgacgatgctgttgtgcgatggcttttagacttccatccgaaaagcgatgagagatcacggctcctattccatgctcagaagcaccagccgatacactgatctcttgtgccgggtcgtagtttgtcagcaattgatcagatttcaaaattttaatcaccttctcaaaggcattttgacaatcagccgaccattgccacactttgtcctgcttcaacaattcgtccaacggctgttggatgaaccttatgttcttcacgaatcgttggtaatggttgatcatgcccaaaaatcgaagctcggacacgtttgtcggaacaggcatttcagaaatagcctgactctttgtttggtccggtcgcttccgtcctgatcaatgataaatccgagatttttgatctcttactttgacgaaagaggcatttctctggcttgacacggaacccaaaattttcaaattgaagacctcttcaatgtgcg

SEQ ID NO: 36035 - DNA, 353 bp, Heterodera glycines
ttttgaaaaaacgtctatctctttttctgctcaacactcaaatgaactccaaccacattttcggaataatagcgacgaccctaatttttctggattttctttctgggcgagtttggctctgaaaattttgaaaaaacgtctatctctttttctgctcaacgctcaaatgaactccaaccacattttcggaataatagcgacgaccctaatttttctggattttctttctgggcgagtttggctctgaaaattttgaaaaaacgtctatctctttttctgctcaacactcaaatgaactccaaccacattttcggaataatagcgacgaccctaatttttctggattttcttct

SEQ ID NO: 36036 - DNA, 975 bp, Heterodera glycines
ccccgctccccgctccccctcccctatttccactcacccctcttccccactgctcccacccttgtgtctgctaacataccatttttaagctgaacaacgcagttttgtgttcctttttggaaaagtattgtcaacgcgccgtgccagaccagtcaactcttcgaaaaaattatttggtccaacttttttctgaggttccaaaattgttcaaaaaattttttcaattttgatttttagacaatgacaaaaattaaggaagacattggtgaagcatttgtctggatttcagtggacgagactacggataaaatggggcgaatgatcgccaatttgttgttaggcaaattgtatggcaaaaaatggcaccccccgcatttaatttctgtgaaagcgcttgaaaaggtggacagtggagcaatggcgcgttttgttaatgaaggccttggtagtcgtttagcttttattcctagatattttttaattttagacagttttctgctaatattaagaaagagcgagtgctgtttttggttacggacggggctgcgtacatgaaaaaggccggaagacaattaaaagttagaaaaaagaaaattcaaataaattttttctctttttcaggttttttacaccaatttgttgcatgtgacatgtttgtgtcacgcattgcaccgcgtggccgaaaaagttcgtgacgagtttgcgcaagtggacaaattgataagcaaaacaaagcaaatatttctgaaagcaccgcatcgcctttctgtatatcgtgagatgtgccctgaattgtccatcccccctcggccagttttgactcgttggactacctggataacggcagtgtccttttattgagagcattttgaggcattaaaagcggtaatttatataattttattttttgtagtaaaggtttgtattttttaggtagtgaatcattcatgcaaatgatgctgtgtgtgttaagga

SEQ ID NO: 36037 - DNA, 976 bp, Heterodera glycines
tgtgtttttttgaatggagttcatttataaattatgacgccgtatgtgtgcgttttaaaaggtcatcgttggcattggcacaatatttttttgcgttcttttatcgttttgccattcgagcactcatttatttttttgaatgggctcaattttaataattttgctgcaacttacagtcggacgacgacaacatcggcaacagaagcggagggagagacagacaaactcacataaatttggccataaaatatgaacaaaaagccatcaaaaaatatcggcaacaattggaagaaaatgaacgaaatgatgcggctttatgacaaatattttttttatttcttgccaaatgacatgaaacataattaaaaaataaaaaggaaaattgaaatagaaacgtgtgaaaaaaataataagaaaatatttttaaaggaaataatttttgaaaatacccaagtaaagtttggtcggaattatttagctttcaaaattaaaaattgacaaggtacaaaaatggatattgccaaaactaaaataaattctgccgcaatgcttaaacgatgctcagttctaaaaaaagagttgaaatttggaataaaaatttaaaaaaaaattaaattttatattttactttaaattttaattcaccttaattttttcttaaaaatgtaaatataacaaaatattattaaacatttttttcgccttttatcgaaaaattcagcaacaaaaaaataaaaccatttaagggccttttttggactttttcgcgcttaaaaatcctcaccctactaatcagtgatcatttaaattttttattttacgaatttattttaatttttttctgtctttctgtctctatctctgtgtcactccctagagtggtgcagtctctctcctcctcccccgtttctcgtccacctgtgtgtgccctaaagggcacatttgaatgttgtccctggggggggggggggggggg

SEQ ID NO: 36038 - DNA, 1022 bp, Heterodera glycines
ctagtcgatagaataatgtaggtaagggaagtcggcaaattagattcgtaacttggaaaagaattggctctaaaggtcgggtcagccgggctcgttgcgtgaaacaggcggcttttgcccgtggctgcgtgctgttctttcggggatggtgcgtggactagtggtgagagctgcttgtggagcgcttcagctgcgtgtatgctcgtcagggtatgcacttcggttggcgctgaacgaccagtttagaactggcacgaactcggggaatccgactgtctaattaaaacagaggagacggatggtccttgtggacgttgaccgtgtctgatttctgcccagtgctctgaatgttaagccaaggaaacttgattaagcgcgggtaaacggcgggagtaactatgactctcttaaggtagccaaatgcctcgtcggctaactaccgacgcgcacgaatggatcaacgagattcccactgtccctatctactatctagcgaaaccacagccaagggaacgggcttggcaaatttagcggggaaagaagaccctgttgagcttgactctagtctgactttgtgaagaatcatgagaggtgtagcataagtgggagccgcaaggcgccagtgaaataccactactttcatcgattccttacttaatcggtaaaacgggagtgcgcccgaaagggtgtccattttggtgttaagtcgggccacccggtggcccggcgacccgcgccgatgacagtgtcaggcggggagtttgactggggcggtacatctgtcaaagcgtaacgcaggtgtcctaaggcgagctcagagaggacggaaacctctcgtagagcaaaaaggcaaatgcttacttgatcctgattttcagtacgaatacggaccgcgaaagcgtggcttatcgatccttttgaatgtgtaaagtttccagcaagaggtgtcagaaaagttaccacagggataactggcttgtggaggccaagcgtccatagcgacgtcgctttttgatccttcg

SEQ ID NO: 36039 - DNA, 963 bp, Heterodera glycines
aaatactttttcagaatggagttaggaatttttttctgattaatcgaaaatttccagattttctggaataacttttttattttggaagatagaaattagaaataaatcgcataaaattctcctatttttttggtatttttcaaactttattacactaaatttgatcaaaaatgaagaaagttatgaattttctaaatttcactggattttccggggctcaaattttgacgatttttcaaaaaatttttaccaccttccaaaaaatctgaaacgcaaaataaagcgtatatacgtattcagcaccaaaaattaggccataaaaatgcattttggctaatttaggagcaaaaaaattttcatgaaatgcaaaaccatggggtcccccctttggttttgagtttcaaaatcacaattaattttataactttttttaaattcaagataaaaacatgagataaagcacattatattgggctttaaattctctacaaaaaagctcttagacaattttttgataaaatcaactcctgacgagttattgagccagaactgaaattgaggcctagcaaccaaaattttctatttccaaaaaaattttaaaaaatttttctgaaaatgacaccaatcgatagagcgcgaaaaacggttgcttgaaagtggtcttggttttcccgagaaaaatctgcaaaaaataataaaattcaaaaacggaaaattttcgagggggcctagctcgaaaatttctgaaaattttcaaaatccgaaaacatggatggatgcagctcgtcgagctgcacaaaaaagtaattatcagcatcccgctcagatcaaaacacagcgagttattcgcgaaattcaaaaaatgccaaaatggttttcaaaattgccgagtggacagggcaggctttgatccaaggctttcggcaagaaaaaaaaaatttcccaaaattccaattagggccc

SEQ ID NO: 36040 - DNA, 795 bp, Heterodera glycines
  unsure (1)..(795): unsure at all n locations
cggtcaacacgggcgtgtccaggaaggaggaacgactcaatgcacgaggcaatcccctggggaggaaatgagggaatgatcagtggacgaatatgacaaatggagggtcattaatagtcaaattagggaaggggggtaaattgaggtaaccaacaagggaatagccgcaatttgtttggctttagaattttttttacggattattgatttaaaaaaaggaattggtgagaggaagttttgggtatttaaaactcgattatgttttttttgctatcttttgctatcatccgtcctttgttgacatttttaaatttgaaaattaggcccagaacggaaaatgccgaaatagtgaaacggggacggtgggggaattgatccaaaacaagaaagaagaattattggcccagaaagctttgtaagaaaaaaagtcacgttgcgtcaccaccgccgagggagggaaaaacggtgggaaaatgagataaaaaagtgattattattatcggaatgacatttccaatcaatggatgaagatgatgatgtgatgatgggatggatgggtaaggcgatatttgtcgtcgtcgtcgtcgccgcggggggcggcggacaaacgacggaaaacggaaagaaaatgcattctcgtgaacggcgggcggcggaagagcagccaaggcaaagcaaagcacccactcaaaacggggggggggggggggacggggcaacacaacagcagcaacagatgtgtgtgatgggatgggatgggatgggcgaattgngagccgaagtgggggggggggg

SEQ ID NO: 36041 - DNA, 877 bp, Heterodera glycines
tttcctggggcctattcaaattagcatcgtatcaacgatgcgatgatacgatgatcatatgcgtgttcaaattaaagactttcgccatatgatgagctgtcgtttgcagctcatcatacgatgagatcgtacgatgatccaatcgtacgttctcatcatacgatcgtatggctgttcaaattaattttatggataagatgtgatgatatgatacgatgaatgcatacgatgtttaccacaaatcattttatgaatatttccattggcaattttaaaataattttaaattcgacaaaaatttaataaaaataattacttttaatattcgctgttattttctccaaataatttatacaaacctaataaggtagctgctgatcctttttttgtgtttgtttttgtttaaaagaagtgttaatatgagacgaaataactcatgtgatgatgtgatggaaatgaaacaaatatttttattcaacgccagagtcagcagcagttagtaacattctcagcagcagaaatattccaaattttttctatcaacagcgggcaatgcaaataaactatcttttgcccatttacacccaatttatttaaaatttttgtagataaaatgaataaagccgaaaaaaaatttgcgaattcttatgaaatgattgggagagtttttcaattatttaaaactgttaataatatttgatttgtaaatcagcggcattaacaacagtcactacaagaagcagcagttaattagttttcaaattaaaggaaaaatgcgttcttttgaatgttttatgtttttaataatttgactggcttttattggtactaaaaatttaaaatttatatgaaaaaatagctgagactttaatctata

SEQ ID NO: 36042 - DNA, 924 bp, Heterodera glycines
agaaaaatggctctcttttttgcgagaaattttgtaccatacaaatgttcccagcgtgggcagaggggcgcggagagcaatggccattctattctacagggaatttttaaatttattctctatgccagaaaaatggctctcttttttgcgagaaattttgtaccatacaaatgttcccagcgtgggcagaggggcgcggagagcaatggccattctattctacagggaatttttaaatttattctctatgccagaaaaatggctatctcttttttgcgagaaattttgtaccatacaaatgttcccagcatgggcagaggggcgcggagagcaatggccattctattctacagggaatttttaaatttattctctatgccagaaaaatggctatctcttttttgcgagaaattttgtaccatacaaatgttcccagcatgggcagaggggcgcggagagcaatggccattctattctacagggaatttttaaatttattctctatgccagaaaaatggctatctcttttttgcgagaaattttgtaccatacaaatgttcccagcgtgggcagaggggcgcggagagcaatggccattctattctacagggaatttttaaatttattctctatgccagaaaaatggctatctcttttttgcgagaaattttgtaccatacaaatgttcccagcatgggcagaggggcgcggagagcaatggccattctattctacagggaatttttaaatttattctctatgccagaaaaatggctctcttttttgcgagaaattttgtaccatacaaatgttcccagcatggcagaggggcgcggagagcaatgtccattctattctacagggaatttttatatttattctctatgccagaaaaatggctatctcttttttgcgagaaatttt

SEQ ID NO: 36043 - DNA, 851 bp, Heterodera glycines
gatgcccgagccgggggcccggtgcggcggtgtggggggaattggaagtatgcatattacaaatgcaacatctacaacgtacacttattatgtgtgtgttattaacggctgacaattccaatcgtaagttaaaacattgggcattcattttttgaggattgtatgaacattgtttttggttttaaccggattccgttggcggcaaaaacggaagacaattggttagggaaagactcaagggggcgaacggcccaccgttagcaatcaagaattcaaattaccacccccccccgcactcgcaaaacctgcctaatccaaatccaacgttgatgctatcattcgaacattctttccacgcattattacccatacaaaaagcaaaaagattttttggcttctgaaaaagaaacattgaaaaaatctcaaaatttcgactttttcacaattttcatgtatgacttttttggtattgtgtgaataatttttaattttgtggatgaaatcattattaattttgaaaatttttcgttggaattcgagttgtctcaacaacccctttgccgcttttttaaaagcatttgtatttgtgaggcgccaacaaataaaacaaaaaacaaacaaagtgtaaaaacaaaatcgacgcacaaagtgaaataacggttgtgaacaaaatgggcaaaatgatatgatgatgaattctaattttctaagcgcttctcttcacacacattttttgatcaccgccaccaccggcggccgccactccgttacgttttctccccgtcgttcgtctcgtcctccatcgtcatggcgtcgaaaaccaatatttcttcttcgcaacggctcccctc

SEQ ID NO: 36044 - DNA, 1309 bp, Heterodera glycines
  unsure (1)..(1309): unsure at all n locations
cttcactcggtttcgcccaatgtgcttttgtccgacatatttccgctggtttctcatcggagggatgcgtccggtaattngngcgatgngaaaggggcacttttttgataattcatttacttagtatgtgaactgtcaaattccnnanntatccctctncccnatctnnttcagntggngctttccntttnntgcttttgataaacgcaggttttggacaattccgccccttgtcggtttgttattttggggcattaaagggggaaaaaaaagcaaacgaattggaaaaaaaaaatccaaaaagcaaaaacccggttttccttttttacgaaaatataaaacagaaaacccgggttttttggaatttaccttttaaaaaacccccttattggtttttgctttttttttttaaaaaaaacctttaaaagggggggtatttttttttttttaaaaaagggggttttttccttttttaaaaaattaaaacaaaaaatttaaaaaagggggccaaaaaacggggggggggtgtgggggggaaattttttttggggggggggaaaaaaaaaataattttccgccccccaaaaaaaaggggggggtttttttggggggggaatatttttaaaaaagggggttttttttagaagaagtggggggaggaagagaaaatatttttttttttttaaagaaatttttttcccaacaaagagaaaaaaagggggggggggccccccaaaaaaagggggggggggggggagaaaaaattcctccccggcggggggattttttttttttcttcaaaaaaacaaaaaaaaaaaaaaaaggaggggcgcccccccacaaatttttttttttttttaaaaaaaaaaaaaaaaaaaaaaaaaaaaaccccctttttttttgtgtgggggaacaatatttgtggtggggggggggggccccccccccccccccccccccccccccccccccccccttcttctttttttaaaaaaaaaaaagaaaaaaacacacccccctttttttttttttttttttttcccccccccccccccccccccccccccttttttcttttttttttttttcttttctccccctctcttcctccttttttttttttttttttttttgacttttttggggagggaaaaaaaagaaaaaaacaaccccccccaccccccccccccccccccccccgcgcgggggggggggggggggggggggtggggggggtttttttcttcccccccccccccccccccccccacccaacaaaaaaaaaaaaaaaaaaaaaaaaaaaaaaaaa

SEQ ID NO: 36045 - DNA, 523 bp, Heterodera glycines
taaaagacaatacgccaaactcacatcggcaaatgtttgtcctccatcacccccaaacggtacacaaattgataatccagctcatcaattcgaatttgaacatcgttagccctgaaaaacgtgaaaagaaatcaagtgtatatttttaagccatgccttcgaaaaaaatttttttctaatttaaacacgtttagaagaaatagtaatttttaaaacaaagtctttcttccaacaaattctaaaaaaaatcttatgaattttttttatgacgaactactgtttttcaaaaaattcaagaaatccctgaaacggacgaccccctcataaaaaaaaaacaaatgatggtgttttttgtccaccactcaccagccaagcactttggcacctccaaaaatcggcacataaattgtctcgcaattggaacggtcaatgttgcccaaaaggttggccttccgcgcgaaagattcagaaatgaatgaggtggcacaacctgtaaaatagcggggaaaatcaaaaaaaacag

SEQ ID NO: 36046 - DNA, 1578 bp, Heterodera glycines
  unsure (1)..(1578): unsure at all n locations
attaaatgtaattaaacaaatccaaatgcaatttgatttaattaacacgccctccgccgtttgggaacgggaaaggcaaacgaattccccccccccccctcaattcattaacaagtggcaaggattcgtgactaaatatgcttaaaatatgtattgtataatatttgaaaagcgcatataaaaggctgaatccctccttctcattgtttaattgatggcattcctcattattaattaattaattaattaattaactgaatcacatttattatttatttaaaattctatttcttattcgagcatttgctttatgaaaaaatatgcccattttagtgttctgttgagctctctatctctccattttagtgtaacatcacaacactttgtggataacaaatcatttcaaaatatttttcaaacctttgaatttaaatttacataataaatcgatcgccccccacaaggacatttggctgccaatcgctgcgctttttgttgggatgggacggtcgatttgcttcattctcaagcgggggggctcccccccccccttctcccgcttcatttgttccccgtccccgcacggttcgttcgatttcggcccgtccctccgccattcctttgccttctttttctccattcatttttcactatttttgcctccttttcaccttccgacaatcgtcgtccgttcgtccttcatcgtctcccccattttttcaattttgacaaatttggctgtacatggacagagagaccgtctcatcaacaaaaatcaacccattttcacatcgtttcccgttaaaactttccctcaaattctaaaatttcgaagacaactccaaaattttcttaatttttggggcattttcattaatttaaactttatgtataattgccttttataaaccaatcattgagtttttgatgccaaaattagagtttactgaagtagaactcggccaacaaattttttttaaatcgaaggaacataaatttgaaaaatttgaataaattaaataattgttaaaattccaaaagaagatggactaacttcgtaattgtacaaatttaaataaataaggaagggtccctgtgagctttctgatttaaaaagcacatttaaattaattcctctgtccattcattccgtcccccgtttcgttttgcccctccccgttttctgtcccctcccccccnccccccctccgatggtttgcttttcagcagcagttggcaatcgccattttccagtttatgatgcttcttcttcgtgttggttgggctgtgtgtcatcacttctgggaaagtgtcgttcattttgtactgtttgaggggggggggggggataataaagtaataaaaatgcataattatttttgtttttatgaaattgaaataactttttttttctacatttatcatcagcatttttcttctgcttttccgtccgcttttttgttttttcttcacgaatcagagaactgtttttccgccattatctctccgcttcatctccgccatcccccgggggcactgactgtccctattttcatggacatttcaaaaaatgaacgg

SEQ ID NO: 36047 - DNA, 1233 bp, Heterodera glycines
attacggcgcctccagcgcaactaaaaagtccgacagcatttcaactcaaacctcaacagccttctaaacctcaagctccgccgtcaggctctccaccccgttttgaagaaacagaacatcaacagccaccaccaccaccaccaccaacatcagcagctcaaatagatccatcgcgtttgattcacacgctcgacccaccaaaaatattttttagaactcctccagctaatcaaaaccctctgacatatgtgcccaattcagtgtttattctgtatgaaaccaatatggaacgattcaaggtggtgttcaatgaggagatcatcagccatttgtccttctcaccacagctcgggtatgtgcttggctttgaaaaccctcagcatgtggtgtcaaatgaagttgccaaatatgggtttgatctacgaggtggcatatcaagttttgcagtctactcaaaaggactaactgaaaatatgataattggcaattcattgagctccttgctccgggttgtgtctatcagcggtgctatccccggggagtataatgagaagatttacgactcgccaatatttgcgcgagtgttgccacgtgagatcaacgagattgagattgaactgcgcacaatggacaaaggtcgtctcgtgccattcgcctatgggacaacgatggctgtgttgatatttaagaaagtgataaatttttgatttcattcattttgtgttttatttgtcatacgttaataaaatggttcatattgtgtttgacccaagcattgcgcagtacgacgagtctgtgcagtacggtagcggattagaaaaggacgattttgactacttcagggggtcaagcccctttcagagggggtacggtattcaacgaggggcgggcgttggagatgtgtttcgtggactgtggcgctttttcctacccattcttcgccgcgttggcaccacggtagggtcggaggcgctaagcactgggcaacgcgtgctggagcgagtcgggaatgagggggtgccgtttaaagaggcgcttgtcggtgagggaaagcgaggaattgataccgtacttgacgaaggaggactaccgaaacggtttggaagcggaaaacggagtataaaaagaaagagaacacatctacctagtcatcagacactaattggacgaccttttgtaaaacaggcaaaaaagcgtattcgatcggacgcttttggactttattaattaaa

SEQ ID NO: 36048 - DNA, 1041 bp, Heterodera glycines
gaccaattcatacaaattgcaacttttttgtcatccgatcgcctttacgggttaggcgagaatacgcaccacgaattaaaggtaattacagtacgcacccgaattttaaaactaactacagtacgcaacaaacatatttcgaccaatgaaattaaatagttaaataaaatatgggttataataataatttttaaatttgaaatttagcatcgatttttccatctataaaacgtggagtgcattttcacgcgatcaaggaaatgaatattatgtaccgggctcatacaatggatacggtaatgtttttttttgtaaatttcttgaatctacaaaatttaggggtacatcccttttacgttggtttggagccaagcggaaaagcccatggtgttctgattttgaattcaaatgcacaagaatatgtcactgggccgggaccgcattttgtttacaggtgttttttttgtaattatgaaaaaatattttctgttttttgaattgcctttttcaataaaatttggaaaaattgattaacattaagaaaacatgaattattttggctgacattatatgtattattaaggaaatgccgattttctattctcctgttcattgagttaggcacgaaaaaaatacaaaatatgcacattaatttttaaaacattttttaaaacaaatttttttaatgaatatttttttttgcaatagaattgaaaaaaaaatctgtctttaaaaatttatgccaattttcatttttgtgcctatttaattccctatcgcgcggtatccgtgttcatccctgccttataaattatttatttaattgatttcctttaaaatatcttttttagaaaaattaaaaaatttacaacaaaggaaaactatctataaatttgcttagttttttttagcactatattatttttattaattgattttttagaacaatcggtggccaacttgagctgttcttttttcccggcccaacggcggaggaagtgatacgccaataccagcaaattatcggcacgcccctatttg

SEQ ID NO: 36049 - DNA, 1100 bp, Heterodera glycines
  unsure (1)..(1100): unsure at all n locations
gggcttttaaactttaaaaacaccgtcctcttctggtccccannttttttgggaaaaatcctaaccgatttgccggcgaaattaggctttaaaagcagaatctgagcttcgagctttgggcaatcaaaaaaaaaatttacctttaaagatttgtgggtttgggaaaaatttatttaacttgaaagtttggtcaattttttaaaatcacttctcacaaaaaagcattaaattaaaggatttaaaacccttttaatacgaaataaaggttgggcaaaattgtagacctgtgagggaaccgaaccctcgacgggggtgcagccagcgatcagcttctcacccaaaccagtgctctcttaccgtctgagcggatccggacatttggacagaagcggacaattggacactgatgtattatgacagtgaatggaattttttaattattttaaattgtttttacattgaattaaaatttttagattataggtatattgaattttcttaaatacgaacatgtaataaaatagctaaatgattgagtgtttcgtgactttaaaagtgctttttgcattttgctatttgatgcggctttattaatcaacaaatgtttgcgcatccaccagcagcagaattattttcattcagctttaagcgatccgactactgtagagactctcgggactgtagtcggaactacggtaagacgcgcgaaagaaggcactgtagaaacggtcgttttgcaaatggtaatgattcgggaaggaataagtgccggtgcgagtgaaatatggcgaggaataattggggccaaattcgggaaaagggccaaaaagacacttttctggattttttagaaaataaaaattcatataactaaaaattttgcagttttgacaacagattctaggttaggccctaaaattaagaaaaaggtttggtttgtcggaagggaccatgacatttttagggggttcggcaaagcagaagagtaccagttttaatttctcttttcaaggacagataaagctaaaacatatttccgtttcaaaatttcacacatgggaagcatttgtcaactgaacaaattgggggattaacgaaaa

SEQ ID NO: 36050 - DNA, 1679 bp, Heterodera glycines
  unsure (1)..(1679): unsure at all n locations
cgcgggggtncattcatgttcacgccacaatatccaatgtgggttatggaaaagcatcatttctatgacaattaagcttctattattggaattttttaccgattttccggaaaaaatgttttttcgaaaatttttgacataaatgatccaactttcggtgatttttaggaccaaattacgagtttcacttatcgaaagaatttttttgtaggcgacgcattacaaaaattgccattttttttggcgaagatttttttataccattagcaagatttttggtactttataagttcatgggaatgaacttttatttgtggtttttgcgaattttttaggaaattctgtgcacaaaatttttaaattcaaattgattttgccttaagaggaaagaaaatgttttccatttttaaggtatacggaatcgccatcacggctgcctcagcaattggaagcgaccaaagagacagtggccgaattggcgccagccgaccatcaattaccgccaaatgggacagcaattgtcagcgatgatggtggcggcattgtggtgccaaccgtgtccgaactcaccgaaacaacagtcacaacaaccaccgtacaccacacgcaacaacggcatgcggtagagacgacggaacaacaacagcaattagtgcccaacggtgcaaagccgtaccagcaccaacagcagcatcaacaggaggaaaacgaacaaaatcacgatgagcgtcaacagcaacaacaacagcctactgtattgacagatggtgagtgaatttgcatttaatgcatggtactgtaaagccataaattttgagatgttctaattgagaaattttaaattatacaattttgcgacctgaattttttttattttattttgtcaaatacaattttgcttgaatttcatttgaaatttttccgataatttttttcttaaatttaactgttaaatgtaattagaataatttttttttaatttaaatatattatacaaaaaactttttgtagaaatgcctcaacacaatgcgatcactcaaaatgggcatgcagaaccagcattaaatggagaactaaatggcgacatgcatcatccaaatgaacaggcacaaatatttttaaaaacccatacatattaaccaaaagtttaaattttctcgcaggaacatcacattctcgaggaaacgtatgagattgtcgagaatgaggacggcacaaagacaacaattcacaagagcatagaacggaattttcccataaatgacggaccaacagcggaggatgaggaggaggacaagacggatcagcaacaacagttgctgcacaatcaacagatggacgcatcaatgagtggataaacatgacatatttaatgatcattttctattaaaaaacccattctattgataagtttttggtgactttccgagcatcactttttcggcacgacattttttggatgttttgatttgaagatgatcaaattggaatgagttttgactgaatttttttcgatcaaaacgaatcagtaaagttcatttgatctaaaaaaattcgtctattttattagcatttgtcatttatatataagtattaccagatttatcacaattatatattgaattcattcattttcttgaactttcagttcatgtttggccttatacattaatctataa

SEQ ID NO: 36051 - DNA, 1046 bp, Heterodera glycines
gcgaacaccgtaagcacaaaagggggcgttgtgccaaggatgcaaattgcgtacagttgcattcgttcgcgcgaataattgtccaatgacggagaaaatgatggtggtaccacccgaagctgatcgttttcttgctgattttgttgatgaggtgtatcatgttgatgaccatttacagatacagtagcagttgtacggccaaacactgtcaaatttgacggataaggtcaaataaaaaacttgttcattcttagccaatttatcttttttttgcctccaaactgatatttctagattaacctggattcaaaccaaggttttttttttgatcgagagattatagtaaaaccatttcctggtttcgaatattccttttcaaattcataattcgaaactttttctgtctttcgatttccaataccttccagcacttttttgacaattagccaaataaaacaaattgcgtataatacggttggagtgtatgaagtcgttgtgagatttattaagttgactgcatcaattaatttaaaatgcaaattgttctccttaataggcgtcataaaaatgtattccaaataaataaataattatataaattgttttttatacctttattatagctggaggatatatggagactaatgagtaaatgcatgagtaaatacgcaaattcggcttccaattgacgaccactgaaaagacaatgccacaaaaccagcacatggcaaggcacagtctcgtaaagctattaacaaattgctttggtatttaagggacaaaggcactaattaggcaacccaccgtatggtaaagagatgacaatagaaaattggggccattattgcgatgatcctatttaatgctaacaaattataagcaacagcaaccgccatggcacaaatttggtacataatggcatccaaatcaagcggcaccgcaattcggtggccgacaaaatagccacacatagagctccatagtccaaaacataatcaaaatgtgcatgatattctgaaaaaataaacaattaaatataaatgcaa

SEQ ID NO: 36052 - DNA, 763 bp, Heterodera glycines
aatttattaaatagtatgcaatacgttccatgttaaaaaatcaattctgcataaaaaaaaattatgcaaaaaaaagtgaaaaaattttcaaaagagggcttctttaaactagcgcccaaaagttttaaattactcaatccaaagatccctaaaacgaattttggtgggcagcggacggtccggcaacggaaattccacaaaattgccatcgatccgttcagacagtttcggtgttggtccttcgtcctttttaattgatatttctttccaaattgtcaattccgtttttccatcgaaatgcgcgtccaccaaaacatcgaaacggtcggaaagcaatgccattttgaggccgagctgagcatggtcaaaagatggcagaatgtccatccacacgtcgctacaaatccaactgaaatgcgaacgtaaaactaattataaaaacaaaacaaaatggggagggagcaaatttttaaaaattttcaaatcaaaagccgaataactcgactcgtagagacaaatctctgattttttgacattacgagttggaaaaattagtaagagttggtgtaacagtacgagttgggtttttaccaaaaaaaagccctccttcaccccttgtgatttttttttctcgtaagggctcatgaaaatgcaaaagtgccgaaaaacatttcattttaaaatttctcacatttttttccttaaacgtcggttcattttgcggtaattagcagcacacaattattgtcgtaagttgtgattg

SEQ ID NO: 36053 - DNA, 1597 bp, Heterodera glycines
gaatttttaaaaaagcgtgtcacaaaaaaatgtggcgtgaaaggcaaaaaaagaggggtcatagccggggacggtgctccctccaagccgaaattctgggactgtccctggaatgacccagcaggtcgggagtcccgactcgaggcggaattataatttccaatttaaatttggattaaaaaagtaaattaattaaaagcaaaattttcaatcaactcttattctctcatataacgcgtgaccaatgttggtgtgggggcagagacgagataattacgtgggaaaagagtgtgtgtttgagagagactgtcgagagcagtgggaggaatgagaaatagttcatcattttctcttgtttccctttcccgttttgtaccccagtgcaaattatgcattaaaaattgctgcttctatttaagcaaattggctaacaccaagcaaatgtgggcgatttcacgggtcgacgccgtttctcgccacaacggtgcggcatgaaaggcgccgtcgaatcaagacggcaaaaggccgaaaaaatgtgccggcgggggaattcccgcgatgcctggccaaggcacaacgccaatgggcgattgcaaacggtcggagtgggcaagagaaatcgtcgctttttaaaccgggaaatcccggtatgttctcgtttaaatttggtagggacaggcttcaattttttaaaaacggtcaaaaacaaaagttgcttcatcataatggtttttcaatttttgacccttttgaggcgctttttcaaaaaattttttaacaattttgaatcgaaatttttcagaaaaatactattttccattaaaaaaattttgggttttgaggagtcttaggggtgagcagtaaaaagagaaaaataacaaaggtgtggtgcacccaaaattggcgttttgtttacggattttttaccaaaaaaaaaaatggcgtcatcgggaaaattcgtttctatttgtagaaggattgtccacataaattatagcaactattttgcggatttttttcgtattttaattagatttatgaattttcaaatagtgccgccctgccgttttttatttgttttgttgtgcaaattttgaccgatttccatgaaaatttacaccacccattcattcatcgccaccacctgcaggatgggtcggtgcggaagccgcatttgtggaaaaatgccagggaagggccattgaaggcgaacacggtggccatcaacagttccatctgtgtactgtacaaggaggggggggggatttaaaaaaaaaagattaatgcactataatagggaccaaataagtgaaaaaatgcatgaaaaggcacgaaaatcccgaaaaaggcataaaaataggcatttaaatttttttgattttttttacccttccgccaatcgttccaactgttcaatgagtcgtgctccgatgcccttctgctgatagtccggctccacctggatctcgtagcagtacagcacgggtcggccttcgtcctccacaaatctgcgatttttgaatttgtttttctatttttcttaaaaggaaatgaaaattaaatgttcgggagacaatcattttttttagactttcaa

SEQ ID NO: 36054 - DNA, 714 bp, Heterodera glycines
taattgatcaggggctcaccaaattttgcagggatacgtatcaggaacactacaaatgcttactaattttcctagattttttaaacccggtgaaaattttttgcagacaccaccacttttgcacttaaaaaaatttgaaaaaactttaaaaattcatagaaaatttaaattcataggtactactgctaaatcaacgctgagacgcctttccttgacctttttaggcccctgcaaaatctggtgcgcttctgatcactactcgaaaaatgagtgattgaattttcactaaaaagttaagcctaaactttttggcctgtttaaaaaggaattaaaaatttttaaaaattttattcatctccctttttgatagaaaaagcatcagagtgcctaaactaacatgtaaataaaatttggtgcgtttcagaaccctttctgaaaaaatatttaagaattaattttgcaaaaaataaataaaaacgaaagactcagattttcgaaaatttttttgagccagctagctcggcgctcatttcagtgtaagttagtcctttaccggggagtatccctgcaaagtttggtacgcttctgctcaattagcaaaaaatatgagtgatcgaattttcactaaaaaagttaagcctacattttttggcatatttaaaaagcaattaaaaaatttttaaaatttaataattttcctgcaccgaaggtact

SEQ ID NO: 36055 - DNA, 866 bp, Heterodera glycines
tttaagtcatttttgaagggatttttcccttttggcagagttgagatgtccggtactccttttggcacttttatgagtctctcgattgggactttgattggttctgcctcctttttatcgattggcaccaattttgcggaagaatcaccaatttcagtgatcaaatacggaccaaaatttgaccaaagaagctttttgtggggagaacgacggtgcattcctgggaagattaccataactctttcaccagtagcaaatttttttgacgtgactttaggcagcgaatcgaaccaaagtttgctttcttttctggctgcttccgaatttgctcgtgcttcttccaacatattcaggaggttttcccggaaaagttggatgtagctttcacaatccacagtgtaaattgggtttttagggaaaatttctatgttttccgctgggaatcgggctggtcttccaaacataagtgaaaatggagaaaatcctgtcgagttggacggagttatgttgtaggcaaacactgcatatgccaaacgttcgtcccaagtccaattacttgccgtggattttttcaaaattttaatgagaattccattcactctttcagccaatccattcgcctgggggtcataaccagcagtgaatgaccttttaatgtctaacattttcgaaacttcagccaatgtcgaattcatgaattctttccctcggtcagaatggaactgtttcggggtgccataaaccaaaaccaatttttcaacaacaattttagcaactgaatctgctgattttttgagaattggctccgcaatcaagtatctgctgaagtggtcgacagttacgcagatgtacttaggatttgactg

SEQ ID NO: 36056 - DNA, 763 bp, Heterodera glycines
caacaattttttaatgtaaatcaataacatatgtacaagtatttagtgattttggcgttttcatataaatttatcaaactgattttggcattttcataagccgggcttgatcaaattgattttggcattttcatagaaatttaatttacattgcggcgatcaagggcagcctggcggcggtcaaagtgtgccaaattgggcactaattagggctatttatattaagtaattctcttaataagttatattaaaatttccaaacaattttctctgcggtgcctaacggcatcgccgtttcgggatttctaaaaatatacaccacctaaattttattttttaattcagcccccccccccccccgaagcagggctggacatatgatggataatgagggacactgtaggaagatatgtatttaaggcagaattattttaaaaattgcagaaatttaatcaaaatgaattggacatggtgattcatgagtttgagaattattagttgttttttttacaaatttcttttgtgctctaaaggaattgatgatgatcgacaaagcgatggttatccaagccaaaacgaaggtgaacttataaaaaaataaaatgaaataatttaataattaaattaatttaatttacgcattttaattttaatagtgcctcgaggcgacgacactgcacatgaccgccggtggtggtcacgaaaaaaattgtgaaaattcttttggaaaatggtgtcaacccggaggatgagaatgctgttg

SEQ ID NO: 36057 - DNA, 847 bp, Heterodera glycines
taaattaacagatattttttcaaaattcaatcagtcgaacttttttggatgaagtgagctaagttatgcatttatatatataattttttgttttcggacacattggcggatttaagaaacgctacagcacaccctcccttcacatggatattgtctaattacagtagtaatttgcactttctccctctcacttggacattgggtaatactgtgctttgtcccccccccttttttcgaaaaattttttatgttaccaaaagtcatgaaaacatgtttcgaagtcgggtctagaattcggaattgtcccaaaagaatgccggattcatgatcagcaactccgaaaaccttggaaacatgatttcatgacttttggaaacataaaaattttttcaaaaaaagggggataaagcacagtattaccggacattgaactacagtagtaattttcaccccctcctcctcacttgaacattgtattctccgcctctgcccggcctggctgcatccgctgaaatcttttcccacattttcttcccacaatttttgttgttctggtaaagtttgtaattggcggacacccacttttgagccaattcaaatgcttttcctttcattctaaatttttgtagttgttttttaaattaaattcatttccaaatattttttaaaacaataaaaaacttgctttttagtgcctgaccggcgcagaccctcaataagcatgtgttgtaaaggctgaagaaaattttgagattttttaaattcatgactaacactcatttggcatgaatactgtccaactttgtataaaaaaaatgtttaatatttttttattttcatgcttccc

SEQ ID NO: 36058 - DNA, 709 bp, Heterodera glycines
tttatttttgagggaatttttaaatttataccccaccccccggaaaatgtctatctctttttttgagaaatttctcccacaacaaaagcgcttgcgtatgagacggagggctgtgcacaatcgccattttatttcacagaggatttttatatttatactctatcccagaaaaatggctatctctttttttgagaaattttatacacatacaaatgctctcgagcatgatagggagggcggtgcgcaatagaccttttatttttgagggaatttttaaatttatactctatcccagaaaaatggctatctctttttttgataaattttatacacatacaaatgctctcgagcatgatagggagggcggtgcgcaatagaccttttatttttgagggaatttttaaatttatactctatcccagaaaaatggctatctctttttttgagaaattttatacctcacaaaagcgcttgcgtatgagacggagggctgtgcacaatcgccattttatttcacagaggatttttatatttagaggttatcccagaaaaatggctatctctttttttgataaattttatacacatacaaatgctctcgagcatgatagggagggcggtgcgcaatagaccttttatttttgagggaattttttaatttatactctatcccagaaaaatggctatctctttttttgagaaattttat

SEQ ID NO: 36059 - DNA, 979 bp, Heterodera glycines
attcaccgatcggatgctcaaccgattggcttttgacgaagtgatcaacgcgcgcataacactgccgctgaattatgtgctggacgaagagcgaaatttgttggccaaaatcaccaaatacaagttggccatgaaatagttggagggcatctttttggtgattatgcagacaaatcttcgacctgcccgtctcaatttccatccttcccgaccttttgccggcacttcttcggctgatggagcagcgtttctcgggccctctgaatttgatcagtccggaaccgatcagtctggccaaaatcctccgcctctacaaagaagtgatgattcattcatatttgatatgctccttaattcattcatttgtccttatttttgccagcatttcgacccgaatctgtcggattttgaggcgattacagccgaatcggagaagggaaaacagctgatggccaccaaagggaactgcgcactgagcaccgatctgttgacgaaactgtgccccgaggtgaagcgaagcagcgacgatttggtggccaatttcaaacggatgaaagagacgaaatgaaaggggggcaattaagaaaaacaaaaagacaatcgaattgggattggtaattatttatattcaaagtaaataaccaaggaaaaaatatattttaaatttcaatttttaattatttgaaataaaatagcggtcgctgcgaagaagaaaaaaactattagtcattcattattgtaatattcactacccaattgtccaattctgtccaaatgtccggtcgagtgacagacaaaattcaatttattattgcctttttttatcaagacacattgacatttgaattgaaaatctattgtacctgggacctgatcgggtacatattttatccggtgaatgatttgagctggtgcccatttttccggtgtccaccaattcgaacgataccccccccccccttcccccccctccccctca

SEQ ID NO: 36060 - DNA, 1259 bp, Heterodera glycines
  unsure (1)..(1259): unsure at all n locations
aagatggaaaaattaaaaataaaacatggaatatgaaggaaatatgcaacacttttgntaagttttcaattttaaacgggcctgcttcggttgccataaaataatagtcaaaatttaaatcagtttaataacatcaaaatattttatataattccgagtaaatgagaaaaattcaattaataaaaatttgaaaaaaattataatcacccttacataataattattttttcatttcctttcttcattaatagggttcgaagttgtatgcactaaaaaatgccaaatatgcactgaaatatgccctaaaattttaacgtagaaatgaatataaaaattcgtcacttataatgttattttaaaaactaaaaattttaatcttcatttttgtcgtactattatacctaatcaaaaattttttgcaaatgatcagaaattataaataattgctcatttttgtagtccaaaaagcatttctatttggaaagaatatatttcagaaatgagaccaattgaaaaaatgcaaaaatttaatagatgagattaaagcagattaaaaattaattttataaatcaaaaaagttgactaataaatgatcttaaacaaaattaattaaattatttgtcgaaattttaagaactccaaatcagaaattaattgttaatttcgcttaaaaagaattccacaaataaggtacataaaattctttaagttttatttagtaaactaatatgcaaaaaaccctatcagttgttctaaatatttattatcgtttggttcaaaatttcaccattcgaaaattaataaaaaataaaaaagtgaaaaaacagaaaaatttaaaattgagaatatgtaatcttcttttactttgaaaagaaaattttcatttcgttgtgaagtggacatgataaaaactatggagaagaaattaaattttaaaagttaaatataaaaaacaagtggcctgcctacccaaacacaatttataaaattataataaataaatttttcttaaattcagtttctgttttatactaaatgtatttgctaatttatataattcatataatttataccacataaaaaaagaaaaaaagttaatttgtttggttttattanatatcctatcattttcttttagctgcttcatgataattatattctattaatattaagattactattttattanaaaatatattcatgaaaatgtataaattatagaaatttttcaaactggtaacatttatcaaaaaatttc

SEQ ID NO: 36061 - DNA, 393 bp, Heterodera glycines
caactgtcaaagtgtcggagaggggggggggtgggcacgacgacggacaaactgtcaaaagtgtcagggagggggggggggcacgacgacggacaaactgtcaaaagtgtcggggagggggaagaacgacggacaaactgtctaaagtgtcggggaggggaaagaacgatggacaaactgtcaaaagtgtcggggggaagaacaatggacaaactgtcaaaagtgtcggggagggggaagaacgacggacaaactgtctaaagtgtcggggagggggaagaacgatggacaaactgtcaaaagtgtcggggggaagaacaatggacaaactgtcaaaagtgtcgggggaagaacaatggacaaactgtcaaaagtgtcggagagggggggggg

SEQ ID NO: 36062 - DNA, 337 bp, Heterodera glycines
  unsure (1)..(337): unsure at all n locations
caacccaccaacatttcaatcactgggactcaacccaacagcattctaatcactgggactcaacccaccagcatttcaatcactgggactcaacccaccagcattccaatcactggcactcaacccaccagcatttcaatcactgggactcaattctcctgcatttcaatcactgggactcaatccaccaacattccaatcactgggactgcattccaatcaccaggactgaacccaccagcatttcaatcactgggactcaattctcctncatttcaatcactaccactcaaaccaccaccatttcaatcactnnnactcanccctccancattcc

SEQ ID NO: 36063 - DNA, 511 bp, Heterodera glycines
ccccttctgtctccccattcgcttcccgcctcccccgtttttttctccagttcatccatcttcttctacatcattcctctttttgtttataaaaatcacttcttttcttctcccttcctatcacttctgcctattccatttctccgtcctctttcacttcctcttccgccccatcgtccgtttcttcttcttccatctctctcccttttcttttccccttcatttcctcctacctctgttcttcctcttcctcctccaattccttttcatcctttcttcactcccccccccttttcagttgaacaacgttcttccgtcctctccctgtggatgatcgtcctcatcttctgttccgtcgcttttctctccttcttccttctgctcacccttttgtgctgtcgtcgacgcgttcaacaaaagatcaacgccactgtaaggcgatcagcgacagcgaacggaataatcaggccgacaaagaagaagctgaatctgaacgggggagtggtggtgg

SEQ ID NO: 36064 - DNA, 1298 bp, Heterodera glycines
  unsure (1)..(1298): unsure at all n locations
taaataaanatttggtgcgtttcagaaccctttctgaaaatatatttatgaattaattatgcaaaaaacaaataaataatgaactctcttccttaataattttcctgcaccgaaggtactcactcggccgcttcgcggcctcgtggtgggccttcccccccgcccttcagagcacgacaaatatttcaacaaaaattttgaaaaattgactagagcaatcgaacgctaacggacgacctaatggaaaaaaatccccgaaggagagaatttaattaaatccattccttcgggggaccgtgccgggtgccgcggggtaagcagtgctggttcgtttcatcacggcaccgaaccttttggctagtcagcaatcgttgcttaacttgccagatcggacgggtgcgcatgattcccactgttccaagcaccccaccaaaagcaaaacgatataaccaaaatataaggaaaaatttttaaaaaaattttttctccctcccccttttttgaaaaaaaaagcatcaaagggcctaaactacatggtaaaaaaaatttgggggcctttaaagccactttctgaaaaaaattttatgaaaaaaaaaatccatttttcaaggggccgttggggggaccccaacaaattttggggggaaaaatcccaacccaaaattaaaaaaggggttatagggaagttttttccggaaggttttggccccccccaaaattgggggccactggtcggggggggcggccccaaaaaaaaaaaaaaaacatttttttatgggggccttttggggggcccccaaaattttggggggggaaaaaacccccccccaaaaaaaaaaagcgcggggttaaggggaaattttttctccagaggatggttcgccccaccaaaaaaattggggggcgaaagcggggggggggggggcgggccccaaaaaaaaaaaaaaaaaaaaattttttttttttgggggggggtgggggggggcgcccccacttttttttgggggggggagaacaacccccccccccacaaaaaaaaaaaaaaaaaaaacaaaaaggaggaaatatttcttccccccggggggggggggcccccccccccaccaaaaaataggggggggggggcggggggggggggggggggggcgggcccccccccccaaaaaaaaaaaaaaaaaaaaattaattttttttttttgtgtttggtgggaaaagaagcccccccccccccccccccccctccccccatcacaggggggggggggggggggggggccccgccccccccccaccccccc

SEQ ID NO: 36065 - DNA, 849 bp, Heterodera glycines
gccgtgggcaggtgccaaatcgtagcaggttaaagactgcaagaaaagaagggattcattcagctgcagaagaaggtgctttctatttgacccatcgctaattgcgttaattacccccccccgccaataattaaaaccgcgacagtaaatggttgctgtttacctgcaaaaaatggcgatatgcttcggaatggaagcgatctgtggggaaaatggagttttcgcggcaaagggacgaaaagcattacggaatgctccgaccacctcaaaccgatccacacttttgcgcaatatggcatagttctgcaaatggacaaaattaaccccacaaaaattcgaaatcttctcagccattcgtcacctacagtaattatacgtgtacggtatttttctcctcgtgtactgtattgtttacaatttcccccccccccccaattgtttctctccccaaacgcaccgcactgagcagtgaccgttccgggaaggagagtcgtcgtccgtccccgctgctcagtaccatcgcggacagtgcctcctccgccgccgccgctgccgcactgctcgccgaccgttcctccgccgagtgtctttggtggcccatcgacagtttgcgcagtgccctttggggacggcggtaaatttgcgggtggtggtgcgtctgcggatgctcactgcttctgacgccgttgccattggttgggaactgaaaaagggagcggcgatcattgatgctttgctaattggccaattagcaattagtctatcgataagtggctaattaattactcgcttgacttgttactttttgactaatttagttgacgggtccctttcccttacttttttttg

SEQ ID NO: 36066 - DNA, 1047 bp, Heterodera glycines
tattcaactgtggaaaattaaaaaaaccttttacgctcaggaaatttgcatcaattagagaaaaataaaaaacaaagaacatagagaagtaatggaacaaagcgagtaaatgatgctcactcatatgctgcgaaaattcttcctatttttgcaacaaaataaagaaatatttgctcaaaaatattagttactggaacgatataaataaaaatgctataatatgcaataaataaatatatttgtaataaagaaaaagtttgaaaaacaaacaacactgttatgacaatttatcaaaaagaatacgccaactttgtgaccatgtgccataaaatcggcaattcagttgatacattattatgtaatataattttaaaacatttaaactaatttagcttaatatttaacataatcgctaaatgaagctgcacgtttgtatgacttggtttgcgattaaaccaaccacaaatttataaccaataaaaacaaattttttcccatttaaaatgaaaatgaacaactagcgaaaataatcaacaagtttccaaaatcactattaagaaatcaaatttgtatgctaaaaattcacaaaaattaatccaaaaatcatatgtatttatgttttacaatatttattcacacaaagaaatgccaacaataattttctaatataaaacaaattcaacaaataattatagtaaattgcaagtgaaatcaaatcgtaaaatgttaagaattttatagcaagtcaaatcattcatacaaaatctatgaatggaccataccatcgccaggagataagaaaatttatagctttcatacatcaataacatgtagcttaattaaaaaagcagacaaaaaatttaaatgaagctaaaatgcattaattctataaattaaaagcagttttttgttagcctaattaataaaaatatatcttattactttacaattaacaaattaaaagtttatttcaaaatagcatcagaatggacgttatttaaaaatttcattattggtaaaaaataattttctagcaacatgttacaa

SEQ ID NO: 36067 - DNA, 866 bp, Heterodera glycines
tctgcccagaaattttccaatataattttttaagaataaagcgccgcaaattttccattatagcctttctccaaacaaaaatggtttcgcaatggtgtcaagtcaatacgaacttttgaaaccaaatattatggggtatattcacaatgtctcatcaatcacatttttttaaacgggggaaacgacggacgacccatgccgaataatataaaaaaaccacgtacggatgaaaactgatgggcgccacaagcacattgtccaccattttcatggcaatgccctcctccgccgttttcccgtcattcctccgccgtttcacatcccggcagccctcattttcgtcttccatttgttttcctccctcctcctcctccgtccattgaccatgcctggtggtggtggtggtgctgttgttgccgccgctagtgtccacatcccaaatgttgtaaatttgacggactgttgacgcagagacagtgagacgaccgcgcggatcaaattcctgacattttttacagggaaatcctgcggttgtcattgttgtaggaaacgcggaacaggacaaactttcgccgccaaataataagaaatttttaaactttcattaaagcaattttttgtgaaaaattttcaaacgatgagtaatataattctcataaaaaatttcgaaaaacgctgctattaaaatttttcaattttttcttgaaatctttaaaaaattttctaacaataaaattttttcttgaaatttccttttaaattttttccaatattttttttcttaaaaacttgcagtttgaaatttttttaaaaagaaatttcggtggcgaaattttggggtgtacccagctaatggcaggtattac

SEQ ID NO: 36068 - DNA, 833 bp, Heterodera glycines
gagttagagccatttttcgtggtttttcaaaaaaaattgggcaaagttgggggaacccggaacattttagaccagtttccaaaccaaacactcatagtaaaaatttattttgttggaattcggaggaataaatttgaaacgaaacactggttactaattggcatatatctctgggaaaaattccagatccaaaaaaatcagctataccattcgaaagctgctttcaggcgctctcagaaaacagtaaaaacgctcctattcatgcactaggcgctgagatatatgcacttgactttctgcatataattgccattctccgcagcaaacttcgcgttctcaagcgtgaatagttaatttttttgtgctgaactgtgttagggttctccttgcagtgcgctcaactaagtctcttggagttagagcatttttcatggtattttcaagaaaattgtgcaatgtgggcgacccggaacattttagacagtttccaaaccaaacactcatagtaaaaaattatttcgttagaatacgagaaataatttgaaacgaaacactggttactaatttgcatatatctctgcgaaaattccagatccaaaaaaatcagctataccattcgaaagctgctttcaggcgctctcagaaaacagtaaaaacgctcctattcatgcactaggcgctgagatatatgcacttgactttctgcatataattgccattctccgcagcaaacttcgcgttctcaagcgtgaatagttaatttttttgtgctgaactgtgttagggttctccttgcagtgcgctcaactaagtctcttggagttagagcattt

SEQ ID NO: 36069 - DNA, 537 bp, Heterodera glycines
atattcattaaattaaattaatttttatattctagaaaaatgtttattcgaaatatgtaaaagtgttgtaatgtattcgttaaatatctgtatgtctaattattgcaagttttttgtgtatgtatgatatgggggctaattgttgtgacaatttatgaaccaattatttttgattgaagtgttttatatagggattttttatagtatgtgtgatgtttttaaaacttatgtgattaattatttcaaattaccgagaatgacttgtaatatttttattagttgtaaaagaattttaattaataatgagtcgtaaattattttttgtgtaatatagctaaaaatcaattaattatttcaaaggcggaacaatgtttggtgagatgcttttacaattatttagtatggttaagtattatgataaattactaagattttctggtagtgtatgtatggtatctgtattaattgtaattttagacctaattgttccttaattttttaccaattgaagattttatgcagaaagaagggttataa

SEQ ID NO: 36070 - DNA, 551 bp, Heterodera glycines
  unsure (1)..(551): unsure at all n locations
catcacaattttgcttagggggcacagaaatgggaatttctggtgatgtttgcttagtcttgttgcgatgaactcaaaaagaccgataacgttcaatttcgttacttctacgacaaatggcgaccagttgaatattcaggattttttggttcacaaaaacaggtactttcaccatttggtgaatagggcccagaaatgacaattcttggtgtttttggcttaatcccatcaagacgagcttaatggtaccaaatatatttagttctgcttactattggtcaaactgtgatcatgtcaaagttcggattttttcggattttcaccaaaattggtaccaatacaattttgcttagtgggcacagaaatgggaatttcttgtgtttttagcttagtcttgttgctatgaacttaaaaagaccgacaacgttcagtttcgttacttctacgacaaatggcgaccagntgaatattcangattttttggntcacaanaacaggtactttcaccatttggtgaatagggcccagaaatgacaattcttggtgttttt

SEQ ID NO: 36071 - DNA, 438 bp, Heterodera glycines
gcggaaatggacagcgggaggaaaagcgtcctaaaaaggggcaaataataattagtataatttgtaaatttgtaccaatttcgggtagcttttgtttggggcgagaaattgctttgtgacggcctccacttcagcgggatttctaaaaatgaaaaaattttgtcgatttggacactgtttatatgatgcatctaaaacgcaaaattcttctgatgaaatctaccggaatcagcggttacattagaatttacggctctaatgcactttatgagtccaatcgacttttatgagtccaatcgacctttatgagtccaatcaattgacaatcccgcgtttttatacaataactttgttcatgttcgaacaaaccctatctttttggtatcattcgaaagcgcaaagtctgaataatgtaataatacgagaaaacaagagaat

SEQ ID NO: 36072 - DNA, 261 bp, Heterodera glycines
tcaataaaattccaatgcctactttcttacatttctttgagaaaagtgtttaatggtgtacgaagaaaacgaaattggctgttgattgtctttccacacccttcagtactaatggcacattgtttgatttttagggtaattacaaaaaatcatcaatttatttgcctattttgctttttttgatacggcacaatcggtcccttcggcgacgccattttattatcttttagtgtaatttactgacggattgtccactgtccg

SEQ ID NO: 36073 - DNA, 798 bp, Heterodera glycines
atatgcagttaggcaaccattatttccaaaactatattcccatagctattataataaattttctaaacccatgctgatatatttttatatacctgatatccataaaaaatatatatgcagttaggcaaccattatttccaaaactatattcccatacctattataataatttttccaaacccatggtgatatatttttatattcctgatatccatcaaaaaatatatatgcagttaggcaaccattatttccaaaactatattcccatagctattataataaattttctaaacccatgctgatatatttttatattcctgatatccataaaaaatatatatgcagttaggcaaccattatttccaaaactatattcccataccctattattataatttttccaaacccatggtgatatatttttatattcctgatatccatcaaaaaatatatatgcagttaggcaaccattatttccaaaactatattcccatagctattataataaattttctaaacccatgctgatatatttttatattcctgatatccataaaaaatatatatgcaggtaggcaaccattatttccaaaactatatttccatacctattataataattttgcaaacccatggtgatatatttttatattcctgatatccatcaaaaaatatatatgcagttaggcaaccattattttccaaaactatattcccatagctattataataaatttttctaaacccattgctgatatatttttatatttcctgatatccataaaaaatatatatgca

SEQ ID NO: 36074 - DNA, 736 bp, Heterodera glycines
tgatgctgaattggaaagcgccgcctttgtaaaggcccacgttcggcttaaccgtcagctccatttcgttgcagcgccgacgttgaggggaaaatcaatttgcaagtgggcaaatcgcgaaggttctgttccaactctttggtctctgaaaaaacaacattaaatgggcaacgcttagaaagtgagttgtcgagtttctattaataataattgccttggctgagcaatttgtcccgaattgaaatgcgagtcgcgtggtaatcgcggtcctggtcaacgcccttacaacggtcttgcaggttaaacataatattgaatatcgaaccgggaggacaaagtggaattaaatggcaaaaggaaataaagcgactgacttttttgaaattgtaaaaattaatgaaattttacgaaatcaaaagtaatgagagaatatgaattatctaatcgtttataaatatatttaaaaatgtgggcaatcgtaaagaatggtggtccccaatttcacttttttttattttaggtttaaaatcagtttccggggtttttcgagggtgctgattacgaatttggtctcgaatttgcccaattccgaacctcggacccgaattcgaacaaaaaatttgaatttttttttcaaaatacgcattaaaatcgatctaatttggcgtaaattgcatgttttttatgcaattaatagatgaagcattatttgtaccaaaataaatagttattaaat

SEQ ID NO: 36075 - DNA, 416 bp, Heterodera glycines
tgaatttaccacaaaaaaataaaatgcagcatccgtcaaggggagtcgaacccatgacaaaaaaaaaaaaaaaaaaaattcagccgtgaaaactcgcaaaaaacagggcatgggttcgggcactaatggcgacggatggcgatatttgtttatttttttttcattccagggatgtgtcggcatgccgatttccgacattttttggctcggaattcctaatttttttgagtgcgtcggcacagacctgacccactcacaaaaaaaaatttgttttttttagtaaaaattgcatttttttttttgccgcccggtgccaccccccttggtgggttcgtttgttcgttacccatctattctatcggagcccaactcactggcaaatgttccaatcgccatagttggccgaactatggatc

SEQ ID NO: 36076 - DNA, 574 bp, Heterodera glycines
caccagcacggcagcaccgccggggacgaggcggacgggggcgggcagaatcagtccctggccagcgcggaatcggacagtttccgtcccgacctctgttaaggcagaggtttggcggtggacaaaatattacacctctttgcgagagggggaggggatgaaacaattttaaacggcccagggttaaaacatggacatggccgagttggcggcaacccatacatatatttgttggcactggaagaaaccagaaattggccgagactcgagaccaaggccctaggaacgtacggatttccgccccattgccagaaggaaattccgcttaaaatttgagctaaattttctgctttcagcaagaggggaaggggcaaggggttgtgcgcgcttccaaataacaacaacatatttattggtgggacaaaagcggcgtcccgccggccggcgggggatggaaccgcctgcgcaattcgcccgaccgacggcgccaccggtggcggtgctgactaacttgctcactaatgtgtgtttcagcctgatgatgatgatggtaatgatgatgctgatcagggat

SEQ ID NO: 36077 - DNA, 968 bp, Heterodera glycines
atgcaaagaaaaaaagaactgaacattatgggcagtctgcatatttaatcaacaaaagatacattgagaatatttaaattagtaattggactattcccaaggattataattctccaaaaaatcttataattaaattaattttttaaaggaaattaattaaagttgataaacgaccggaaataaattgagtgtccaaaagcaaaaaaacatctcggtcgtttacaaataatttctttcatttgtttatcagttaaaaaattaaaatccggtagaaaaataaaaaataaagtttcatccgcaatcaaagaataatcaaaaaaaatttccaatatccttttacgtatattaaatctaaattctacattgatgtaaaaaatttattttaaataattataaagatcatcaataaaattttgaataattcgaaaaacagaaattttcataatataattattcttttagtgtgtgtattgggctacgtatatatggtaataagccccaaaaatttttcgcattaatgtaattgcgcgaataaatataattggagaccgatggaaaatttacacttaaaactttaatgactatgatcacatttgtctaattcacgaaaggaagcgagctaaaaataaattaattcttttataaaaatctaatcagggtgcgagcgtactcttctgctcctgtaccgtaacagctatacaaattaaaaatatctgatgaaacaaacgcatttatttctaatagttttaaattttaaattgtaaaagaaaaaacattaaaaattttaaaaatataaattttaaaaatcatcaaagtccctactcgagatttgggtttttataaaaaaaatatttccgaatgttagataaaaaattattgaaattgattaaaattttcccaattcataattccccgaaaaaaataataaagatcaatggaaaatttacaaaaaatatatatattaaaaa

SEQ ID NO: 36078 - DNA, 969 bp, Heterodera glycines
gccgacaataaattgtcattgtgctgttcacgagatgcagtgggtcggatgattggatgacgaattgctcttcagctgacgttggtttttgacatcgttgagctaaaattaaatgaattttaaataattcaaaagaaagagtttacttatgcaggaatatgcggagagaagcgattggcgggagggaatgaccaattgcttaattaaccagaggcaaacagtttagtaatttagcttcctttttacactttctgttgcttttttgtcgtcgtacaaagtgtgagtgccctcggggcaaaggcactcaaaagggggaaaagcccccgggggatgggccgttcttttgcaagtgccagccgaacaaggccaaaggtcagcggagcataagtcaatttctaattgaaaataaaattaatatttattattatttattttttgacgttcccttttcatttaattcgcttttttgtcataaattttatttttgccattttttcttatttaaaagttggaccttcgcattgttggccaaaaatggcttttctgttgaaccgatatgttggcgttgtacaattgcatgtgtaagttccattcagcggaatacaaattccattgcttccgcacggattttcgtcaaattgttcgcataagttttcaactataatttatataattcgtttaatttatttttgggctttcatttgtaaaatctcacattggcatttaatcccttccgatgggattccgtcccattttgccatgccatttccatccaaaatgcattttggcaaagttttagtcgccatttttgcgccttgcacacaatcaatttctgcaaaattgcctagaggtgcccaaaaatgagaaaaattgcccatttccacactcatcgaataacagccgatttctataaataaattaattatatatatttaagaatggtttttaggtttgttcagaggcatgttt

SEQ ID NO: 36079 - DNA, 1283 bp, Heterodera glycines
  unsure (1)..(1283): unsure at all n locations
aaaatacatcgattttgaacttcgccgtctaagcaccgattttccggttgtacgagaccaattaaggatttcatttgcaacgagatttgaaggcaaaactgctaattatttcattcgttctaaatatactttaagggtgcgaatacagcgaaaaattattaatcgcaacactgcttgaccctgcgtacaagggagcgtttttcaaagatgctgtcatttttgagcgtgccaaagacatgttgcttaatgaagcggaaagaattgccataaaatgtgttgaggtaacataacaaacaattttttattttgatttttactattaagtttgatacgagtgaattattagcgatgcctgaaattgaagcgtcggaagatccatttttggcttttggaaatcacacaacagaaaatgacaatagttttatgcttccaatcactccaacaccatcaccatcattagctagcgccaaggctatggcagctggggtgaatattttttgttttattttaaatattttttcatattttagcaagtggctgattatttaaatagccaaactgtcgactgtgaatcacacaatttttgggcaaatcaaattcaaacagccaaatatccattacttattccattagtcaaaaaatatcattcggctccatgtacatcagccgagagtgaacggatgttttctgcggctaaacttattgtgacagatttgagaaaaaatttagcaggagaaacgttgaaagaactcctttttcttcaacagaatttgcctctttatggatttaaattcgaaatttaattttttactatctggataaattttttggattaaaaaattgaaaaacttcgtgcttcgagcttcgaaagcttcgaaacttcgcggtttttgggcttcgaacttcgaacttcgtgcttcgaaaaaaattgggcttcgccttcggcttcgagtgccgagccgagcttcgcccgtccctggttctgatgtaaattttttacaaatgtgatcatagtcattaaagtttttaagtgtaattttttatatatatatttttttgtaaattttccattgatctttaattatatttttcgcggaattactgaatgcgaaaatttttaatcaatttcaattaattttttatcttanaattccgaaatattttttcttataaaacccaaatctcgagtagggactttaatgattttaaaatttatatttttanaattttaatgttttttcttttacaattanatttanaactattagaaatannatgcgttt

SEQ ID NO: 36080 - DNA, 1507 bp, Heterodera glycines
ctcatcatcctttcactcaaaacatctttgtttcctgcccgaaggcttgggatgtaccaaaggggaactcatttgacgagccccctgatgtagacattcgaagtcgttcagttcgtaataagatttttgttttattttgctaaaaaaaaaaaaatttatttggtaatcccattatgcattaattgagagggaagaaaaaaaaattaatgaatgatagcgggtaatcgaatggatgcgaacgccttccaggaatgggcttatctgctccatctccgtttaaacttcgcctaacaagaacaattaacaattctcaggcgccgcaaaaatgtgtaaagtgaatgatctcgcccaatgaaaaatgcggcggcacgtgattacgtgaatattcttatggcgtgaaaacgagagaaaacaaagagataaaatgaactttggaacttgtaaaaactgtaacttgatagggcctaattttcatttttattggtccctctttttaattagctaaaatagtgcccctttgattggttatcagcccgggcctttttgctctcctcaaaaaaaattgttctattttttttgtcccacttcttccctctctctctttttttttttttttgcttcacattcgttcaaatatttttataaattagtccttattcgtttgttaccaggactttttttttggctatttttggcttccttcactctctttccttattctctctctctcctacaaataattgtcaaatttgtcaattttcgatgcagtcagcccctttagcatttagactagcccgggcaaatttcgttcttctttttttgcatttttaaaatccctttagcttttcgctagcccggacaaatgatctcacctcttttctcttcgtcattaatgtccctttagttttctactagtccggacagatattctcacctcttctcttttaagtgtacctataatcttctactacacacgacggaattgtgatatgggaaagttcttaactagcgcgtacacttcatcagatgcggaaccgccatttttaaatgccaacccaatctaatttgcaacgaaataatgctttaaactgccattcgcacttttttatttgcctgtttttttcttcttgatatatggcacaatcggtcccttttggcgatggcattttattatctttttgtgtaggttactgaccgtgagaataacaactagtattaaatcccccatatcaaaattattatagcacttctacataagttattaaaaaaacttaaatttgatttttatatagaactgattaggaaataattataataccaattaatataattaatatttttaaaatataatattccatgaaaattatatttcaaatgttaaacaaagaaataataaatttctataaatttatagatagaaattattattattataatgatttctaaaaatgaacatttactataattcctgaagatgtttgaaaaccctttatatattaataaaaaa

SEQ ID NO: 36081 - DNA, 1336 bp, Heterodera glycines
ttatgaattcgaattttattgccagaattctcgctgaaactatcaagaaaacgcattcaaaaaccataatttatgtaggagtattcctttgagtaaaaaggtttcttacattgttagcttaaaaaataaaccaaagaaaatcacttcatatgggtgctgtaattttatgaagaaaaatgttccaaaaaaaatctttctttataaaaacctagcaaattcaggaaaaaattattcaaagcaaacctttgtttcttagaatggaactggaattttattactaaaaccctcgctgcaattttcaaggaaatctgctaaatacgaatacattcaacacgcatatttaaaaaatcatataataatctattttattatctttagagaaagagggtgtaaaaataaattttatagtaatgtttgaattttctacagaaaaaagttaagaaaacacaattgttcataaaagccaggccaaattaaaaaatagcaaacctttgtaaacctttacttctcttttctcgtttcacaagttattgccagaatcctcctgaggttgccaaggaaatgcatttgatttaccaaaatacgaccgtgttttctcaaaatgtatttcgtatttttttatttctttcttcagaacagaagtttaaatgataaattttttaaattttctgctagttattaaacataaaatattttaataaaaagaattatttaatgcaaaccctacttttcaacaagttctcttctaaaagtgtttcgtcctgtctgggattgagaaattataaccgaaattctgcaatgtcttttttaactattctttgtttttccgaaaaccatgacgggctacagccaacgtgttgttgcggaatgctgaaaagtttaaaataatttttttattgttggccgtctgatactgataaaaagtatttcttattattcgttgtcgcctgaatatcgtttttcttgtaaaagcatgctaatgaacgaaatttgttcgtttttattaatttaatgaagagattcatgttgtttaaggttcaaataacggctccgaaataaattttgtaataggactgtttttctcagaaagaaaaatgtgagaaaaaatgatttcgttagaaaggatcggctaatttagaaataaactactcaatgcaaacattcttttctcaattatgaattcgaattttattgccagaattctcgctgaaactatcaagaaaacgcattcaaaaaccataatttatgtaggagtattcctttgagtaaaaaggtttcttacattgttagcttaaaaagtaaaccaaagaaaatcacttcatatgggtgctgtaat

SEQ ID NO: 36082 - DNA, 791 bp, Heterodera glycines
atcacatttttgcccattttgtagcatcacactgtacgctttggtcattggcaatgtcccattttgggataaatatgtgatcggtaaagcaaaaaaggcataaatgggcattttttgatgcttaacattttaagcattgcacaaaaagaccaaaacacagaaaattgttttctcggaaagtgccgaaatcagtgaaaagctcaaagaattaattctcgggtaagcaaaaatgtttaaaattcaaaatccgtgccatttttacagaatgctaatgaaagaccccggcttgcgcttcgacatcactcaggtgaaatgccacaaaatataccctcttaattagtgccctctttttgaggggtttgaaaatataaacccctcgggctcccggaaaatgcgtcggttaaattttaaaaaagtactaaaagatccataaaatacaaccatactgtaattgggtttattgtaaatatgttctcctatattttgttcacatacctattgaactttacaatctcaatcatcacaatattctgtattttatttcgtttttctgtttcactgacgcatttttccgccgatcacacccctcgggcgattaatagggaaaacagaattataatttaatttaaaaatgacacgaagaaaataatatatatatatatatattttcagccatttggtggaggtgacggagcaggaagtgaccgagtccattcgcatgatgccgcacctcggcacgctgatcctcgtaaaagcgatgggccgcaaaaaacatttggcaatccgtaaaa

SEQ ID NO: 36083 - DNA, 1172 bp, Heterodera glycines
atatgcaaatgtgaaacttatatactgaactaaataacaaatgaaaagccatttttccgaaacagtacaaaacaagaaattttaaatttcataagatccgacacacccatattctttaacctaccaaaatattattacaataatcatttctcttaatactttttaattttattataaattaatttttaaatgaatattttgtgaatttttcaattatataatctatttttgtatttagcatagacaatattcattattccatttattttgatttttaaaaataacggccctgaactcggaggatcgtttgcgctttttaagccatttgaattaccttttatttaatagtagttcataattaataaataagtaaaatataaatccaaagactcaccaattataaaaaattgcttttatataatgcattctgtaaataattttttcttattttaattgtttgcttaatattcaagaataagctttaattactactgtctacgattaaactaaaaattagatgatgtcaaaaatagaaaaacgattaatttgtataagaatttgaaaatctatcctgaacacttaataaaactacggaagaaaaataaaattttgtaaatacttgggaattatgtcatataaaataattttttaactgaaaaattttaaaacataaattattttaatgataaaataattcataaacaatgcatgataagagacaattgttctatttctaggcttcaattctctatgtctgttctcgatgattttttcaaattaaataaaatgtaatatagcaatttaatatttgtttttaacatacgttcctctaatggttgcctttgtacgaggtaccttttgtacgagttaccatgacacaatttttttattagattttacaaaaattcgttttcttcaaatatttcacttttatcgtttattatgtttgtattaattaatatatttgtttaataattatcaaatgttttgcatgtggtaattttgtatattatttattgattttgtactattttaaacgattttaatatcgatattactttaatgaagtgagaaatatctaaaatcattttactttttgctaaggtttgaattaacggatcgtctagcaaaattcaacaaaagccaggtaggctcgacaagttcttcaaaag

SEQ ID NO: 36084 - DNA, 138 bp, Heterodera glycines
taggcaaaatttacgcaacaaacaggcagtgcctactttctctgggattcaccccactcaccacgcactgtatatttgggaaaagaaaaagatgtgggaaactaatggaaaaatagtagaaaaaattaaatataggag

SEQ ID NO: 36085 - DNA, 861 bp, Heterodera glycines
aacatgttaagctttcgattgataccaagattgctggatttggttaacaacaaaaaaagttataacccaaaaacttgggctggcgccaaaacgtcggcgccaaaacgatacggaccccaactgggtactatattatgcgttgggtcatcattaatattctggcataaattcttaggcagtaaatttcggaaatttgaaaagctgattttcttgctcagtagttgtcaaaatgatttgaaataatttgttcggtctggagtgtagtccacttggccgtcagtttcaaggaaaatatttaaaacaaaattttatataaaaataattgaaaaaatttactaatttcacatttattcaattatatccttttaaataaattttgatcatcaaagattaaataaaaagacggccggtttctgagttttcgagttggttcaaagttttattcctgggaaagcctgcacctagattctttattggaagttgatttttggacaaaaactcggaaaagtccaggccaagaaaaatccaggttcctctaggcttgaaccaggcctggatctggatttttgcaaaaatttgtagaaaaataaattagaaagttgaaaagaaaatttattgtttaaagaaaatttaaaaaacgtgggttctgaatacattttgctaaaagaatttccaccaaaaatggtcaaattttttgggtttgcccaatttttgaaaaattttgagaattttttgcctgttgtgcccttatgcggcggcattaatgtatttcgagtctttgatcgcaaaaattatttgatgcagtggtaacatttatactttatgttcagaatgtgtgcaaagaataagaatatgttatta

SEQ ID NO: 36086 - DNA, 914 bp, Heterodera glycines
aaaagacatttgaaaatggcatttttggggacactgtgatcagagaatggcgcaatgagatcaatggcacgccgtttcaaaatgcttttcagttttttttcataaatcgaagtccccccccccctcacaaactttgtttgtttttgcattcttcatcatacatactttataacacggtacatttggaaaccaaacaattatactgttttttagtactgtaaatttattggcatctgtaatgaattcaaaattgggcaaaaaaatgccaacaattacaaattccaattgttttacataagttacctatcttaggatttaagaactttactttccattcaattttgatttctgttaattgtcatttggctacacattttacgggtttttctcataatcgctgaatcccatcagtcgaaataaaaagttaattatttcaatttaaaaatttattacgtgttttaccatatgctaattaagcatggggtggacgggtccacttaatagttacaaggaggcataagcgcttaatattgcggattgagtaattgctttatcttatacaagtaataagtatggatggcactttccagcacaaaaaccgcaaaagaaaaacactaaaaattacaaactagcaagatctggagatggttcgattttttgttggaaccgaagaaacatccccgtccaaaacgtagttggggaaaacattgtcgaggtatacaatgacgtcgctgagaaaactcaactaatcaaagttacaaattttgttttaagaaaaattttttgaaattttctgactggaataatttttaaccggcgatgtttatctcgaatacgttttggatgacgatgttttgggtcacaccatgttaaaataaactatctctcgtttttaaattacaggacattaaaac

SEQ ID NO: 36087 - DNA, 880 bp, Heterodera glycines
ttattgcaaatgcgaagcattaggcttgtgcttatgatttggcaccaaaatacttgacaagattttttggaatgctccctactggcaaaatgtttgatccagatgctgctagtcttggcaattcattgggcggcggaattggcctgtcgttgggtatttaacaaagtgaagaatgaagacgatttgggcaaattcagcccgacggaaaaaataaatttataaaaagaaatatcaattaatcggtcttcgaaatttttttgagagatcttcttaatcggaccgagtcagtttagtctggccggtttagtctgggggtcgttttagtctggttagctgttttcacccacaaattaattacttttataaaatatcattttttgtcgagcatatacatacatataactttaaaatttctgttcacctacaaagaagtgtttgcgttgtgagtttttcggacctaataacaaatgcaaaggtgtatgcaaaaataaaacaaagaatatttttttaaattcagcctacacattgacattaatagggacgtgaattttagtgaagaaaaatcccgaaatagttaactaaaatagtgagtaaaaatgccaaaatagtgagaaaatagtgaaaaaaagtccgaaatagtgacgaatagtgacataattttcagccaaaaattaagcaaaaataatttttattcactgattgcattgcaaatgagtagggctgggatttgtaagggcaaaaaaacacaataggtacataaaaaaataatttttaaaattaaaattcttgccacgaaaatacctttttgagaaaatttttttcatttcttaggagtgctttttgaaattttttttgtcgattcttaggggcgtattttttg

SEQ ID NO: 36088 - DNA, 125 bp, Heterodera glycines
tttttgtagagggattgaaccaggggaaagaagaacggaaaagtcaaggagactagccactaaagtcgtgaaaactcgttttatgggtttttagggttgatgctcaccaatatgacgtccttttc

SEQ ID NO: 36089 - DNA, 221 bp, Heterodera glycines
aaatccgcttaaactttattcccccactcaaaaaatgctaaaaaattcaaaaatttatacttgaggcgactgttgcaacggtggttgttcaggcgaatgttcgcccgacgacgaaaccatcggaggcggcggccaatgctgcggggaccatccgccaccgccgcccgcgttacagtcgatgaactgaacgccgccgccgcccatgggaccagcgccgcccg

SEQ ID NO: 36090 - DNA, 791 bp, Heterodera glycines
tctgatttcgaattcagattgagcactttccaatggtccgtgccgacttcgtcaccaaaatggtgcgccattttgaaggtgccattgtaccaactgcaatcgcttgtttctttgtggagaacagttttggggacaagttgcagaaaagtgagtcggtcgcgttgactttgtactttatttttgcactttccaattcgacagttgctccttcgtttaatcagtcattttggtacaaaatggcgattcccattcaatgccgaggccgtcgtctgaagcaggcttatgtttctgagcagttgcgtgagcacttcaaactgtacaacgaactgatgtgtcagtaccagagccaatacccggaactgcttaccggactcaaactcacccaggtctttttgttagcatttggtgtcctgtttcaaaaacaacccctttttccagcaagctcgccatattctgttggaacgttctgagcaggaacagctcgtcgagtgccttgtctgctttgaacgggtcgcattacgtcggatggtctgttgcaccgcacccatcgaaagtccatcaacgggcggtgcctctcaccagcacatcgcccaggagagtgagggtgaagtgctgctgattgaattgccttccgattcgtcacgggtccaattgctatcgaatgaacgagaaagtacgactattcttctgcaatttgcacttacaagggaaccacccgaactgtaagtcggaaaatgcatatatatatatatatatattatatatatatatatatatatatatatattatc

SEQ ID NO: 36091 - DNA, 169 bp, Heterodera glycines
aagaaatttaaaattcatcgccacagggtgaaaaaacggctgtccactgccgctaaacgcggggagggggggggggggggggcgtaggacaacggacggatgggaaaggggggggggcggaggggcggaaggggggggggggaatgtacatccccacaggggccaaatg

SEQ ID NO: 36092 - DNA, 571 bp, Heterodera glycines
ttttgataattaatacttctaactttgctctatccattgatctaaaatttatttaaaaatttttatgtttcacgtaattatgaaatgttaaaaatttgtacttttttttgcatggctttgattcctttcgtcagttaatgaatagaaaaattcaaataaattttattatttaaaaataccattaaatttaataaaaactaattttaatgctacccgcagaaaaagaaccgggtaaacgggtaaccttacccgcagcttggggttggctaatggagaaccgggtaacattcatttgctacgaatttacccgcagctgggggtaaggttacccgggtaagggtacctgggtaacagggatgtgcctaggtttcgcttttcccatttcgcattttttggcatttcgcatttcgcctttcgcattattcgcattttttggcgtttcgcatttcgcctttcgcattttttggcgagtcgcaaatttcgcttttcgcatttcgctttttattttttcaatttggcccatccctgctgagaaaccttacccgggtagacttacctcggttctttttct

SEQ ID NO: 36093 - DNA, 704 bp, Heterodera glycines
caattaaatgccccttttgggaggggttgaacaatacagtgcccgggcattcaaatagcggatttacggtatgttttttatgtgctaaaagtaactaatgttatttttttctaataataaaagatataaatatttgaatttaatagtaattttgttccagaaaattttaaagaaattgggagggatgagaggaagtaaaaacaaaaaatagaatttttataaacgattataaattttaaatatttaaattacttagacctaggaaagttataatttataatgactaattttgaaaatttttataagcttagaacaaaatattaattaaatataaatttaaataattaatgaaaaaaggtaaaagtaaagaattaataatttaatgtgttgcaaatttttaggacaacttgccattccgataaaaaaatttttataaatttttccttattgctttacattattacaaagataatccaagtaataaaataaaataattcagatttaaaattttattatatcataatataaatgtaaaatataattttaaaattctaaaataataaaataattatatactttgttaaattaaataataaaaataatttaaagaataattataattttttattagaataaaatcgaaaaataaatagtatagtaaaatattttttcttaaatgtttttttattatttaatatcaatta

SEQ ID NO: 36094 - DNA, 1228 bp, Heterodera glycines
agagaaatgagaagcaaaaaacaatagggggaccaacacaagggaaggcctgcctagcgcttttcacagctccgaaataagcattgaaggggggaccaacacgagggaaggcctgcccatcaacacccagatattaggaaatgtgaaagagagagagagagagaaatgagaagcaaaaacaatagggggaccaacacaagggaaggcctgcctaccgcttttcacagctccgaaataagcattgaaggggggaccaacacgagggaaggcctgcccatcaacacccagactttatgaaatgcgagagagaaagagagtgagatagagaaatgagaaagaccaatccacctttgccctttgcgctggtgtgacgtcgacagaagatgagaacacaaatggcaattgttgcttgaccacttgcagaccattttgctgctgctgacgcactaattaataaaaatttcaaaaattttaaatttagaaaaattttttattacgttgatgaaaaagtgggcgagcattaagccgttgttgtagaaatggcgccaccggtcggcccacaatggcatgaagcgtggagtccatgggcgagtcaatgtcgtggaagtgcgtcagctccagggcatcgcttttcgttgataaacaccaatcctcttgcccttgataatctgaaaatttaaaaattaaatcgaaatttaaattgatattttaaatgtaaaaattcaaaaaaatttggtcgggttccgggcggcgtggacggaccttctttggcgttttgcccttaggaatgcggattgatgggggcggcggctgtaaaaaaaaatctttggaagatatgataaaaataattaaaacaatttttataataatttaaaaagacagtgaaaggttaatatttttaattatttaaatgctatgaaatttaaactttttattaaagcttgcctgttttttgttgaatttgtttttgttgtttttgtcccttttttttgtcgtgcgattgcttcggcggaaagtgacgaaaacgacggttgacggacatttgctgctgttgatgatgatgagcagccggcattttgggtggcgacgacttttgcagctgttgttgatgggcagaccttttgtcgtgcggtgaatttgacttttgttgttgtggcatttggttcgacgacgacttcggcatttgatggtggcattggcaacggcaaaccatcttcaatttgtggtg

SEQ ID NO: 36095 - DNA, 906 bp, Heterodera glycines
gggcttcttctccaaccttcgaggagaaaagtcggggataggggaaaaaattctccgaaaatgtgtcgaggatggctagagaaattttagaaaaagtccgggaacgataccctagtcagaaaggaagatttcataaaaacttgaaaaaataacagaaagttcttggaaaattccttttaagacatctattccaatttggaatgtaattgaggacattcgtaattcccgaatcgcgtcggctaggaaccctaactgaaacttcagcacaatttggtaaagtctaaactaatggggatcagttaatgccacgaatagtaaggccttaatattttaacataatccaatttatacgtaaattttctgcaaaatacataagattatgcagtctagacatctcgtagatagtgcagtcgttggcggaggggggggggagtgagagatgccccggaaaatcgacaaaatgccacccaattcaaactttcaaaaagtttcccagataagaaatccccatcctccgtcaacccatctttggagcacacacatattcaaataactgtgtgcccatttccattggattttgccctcctttgtctccccctccccctcaaaaaatgtcatttttgcccgtttgataaaattacgaaaaatttttagtgcggcataaattcaaatatgccaccatcatttccatcaatcaactgagtgagtcacatttctgcatcctctgctgaatggggacaatagaagataagtgaatttgttgtactaaattggggcatataaaagtccaccataaattagtcatattcattaatatttcattttcttacaaaaaaaaatattaaaattcccacaaattcttaaatctattaaaatttgactttttaattcctgtcatgaaccgcc

SEQ ID NO: 36096 - DNA, 798 bp, Heterodera glycines
ctcagaataattacgccgatactaattgttctggaatttttttctctgcgcgaatgattgggaaaaatttggaaaattgtctatctctttttctgctcaacagtaataggaattccaaccgcattctcagaataattacgccgatactaattgttctggaatttgtttctcggcgcgtttgtttgggaaaaatttggaaaattggctatctctttttctgctcaacagtaataggaattccaaccgcattctcagaataattacgccgatactaattgttctggaatttgtttctcggcgcgtttgtttgggaaaaatttggaaaattggctatctctttttctgctcaacagtaataggaattccaaccgcattctatctcattttctgctcaacagtaataggaattccaaccgcattctcagaataattacgccgatactaattgttctggaatttgtttctcggcgcgtttgtttgggaaaaatttggaaaattggctatctctttttctgctcaacagtaataggaattccaaccgcattctatctctttttctgctcaacagtaataggaattccaaccgtcttctcccaataattacgccggatactaattgatctggaatttgtttctcggcgcgtttgtttgggaaaaatttggaaaattggctatctctttttctgctgaacaggaataggaattcccactgcattctcagaataaataacgcgaatactaattggtttgggaattgtttctccgcgcgtttgttttgggaaaaatttggaaaattgg

SEQ ID NO: 36097 - DNA, 146 bp, Heterodera glycines
ttttcaaggtacttttagttatgattaaaattataagtactttcatttttcatgaaaatttcaagaattaaaaattaaaaatttttttagcgattttttttgcggcgcgcttttttcaaaaaattttggggacaggagggttcggc

SEQ ID NO: 36098 - DNA, 781 bp, Heterodera glycines
aaaggaattaaaaatttttaaaaattttattcatctccctttttgatagaaaaagcatcagagtgcctaaactaacatgtaaataaaatctggtgcgtttcagaaccctttctgaaaaaatatttaagaattaattttgcaaaaaataaataaaaacgaaagactcagattttcgaaaatttttttgagccagctagctcggcgctcatttcagtgtaagttagtcctttaccggggagtatccctgcaaagtttggtacgcttctgctcaattagcaaaaaatatgagtgatcgaattttcactaaaaaagttaagcctacattttttggcatatttaaaaagcaattaaaaaatttttaaaatttaataattttcctgcaccgaaggtactcactcggcctcttcgcggcctcgtggtgggccttcgccccccccccgcccttcaaaattttgaaaaaaaaataaaataataggagacgcagaattttgaaaattttttataaaaactgatgacaagctaatgtgataaaacaggttaattcttttcctttcagtatccctacaaagtttggggcgcttctgatcagtttctgaaaaaaaagttaagcctaaactttttggcctgtttaaaaaggaattaaaaatttttaaaaattttattcatctcccttttcgatagaaaaagcatcagagtgcctaaactaacatgtaaataaaattttggtgcgtttcagagcatttttctgaaaaatatttatgaaataaaaaaatcgattttt

SEQ ID NO: 36099 - DNA, 880 bp, Heterodera glycines
cgaatttccgaaaatgagcagcaaaatggcgcagaaagcggcgaagaggaatttgtagagaacggcacggaccggcgaaggcattgaaaaggatgaaacaccgccgggggaacggcggcgtttgtttttgttggcattgtttaatttggcgtcggaagattcactttccccattggcatcaaccttttgcgaaataaattaacaaaagtccaagaaatacccacctttttcaacgctttgctaaagttttctccgctgacaaattccataaattccgagtaaaaaaccattggccccgtgagaaccgtttggaattggaaagtgtacgccaaaaagttgagaattggcggcactttgctgaacaattagtgtttttggctgttccgagtgaatcaccgcacctcaatgattctttggacagaattcggctgagttcctccgacttttttgatccgtcatgaagtgaaaaggcgagaacggtcactttttggaccataatcatcattggaccctgaaattgaagagagttgaaaccgacccgtggcacaaataaaattgggaaattcgaattttgacagaaacttacagtgacatcgaggtgataatcgcgaagaataaaccaacggtacctaagaagaaagtcacaattgtaatgatcagcaacgaataccaatttatttatttatttttgggtggcgcccagattctccagttttatcatttttaagcatcaaaatatccagatgtgaatttgtcctacaatcctctgtttcaatatcttctttcgtaaatctttaaaatctcgaaaaatggaaattctaaatatccaaaacgatttattaatttggagataataaattataatttgtcattctgctag

SEQ ID NO: 36100 - DNA, 215 bp, Heterodera glycines
ccccccgggcaatggcggcgatgagtaaaaacgctataaatgtggcgatgaaaaatgggtagcgatggggctgacgaggcggtgggtgaagaaatttttgccaccgctcgaccacctcctcctcatcatcatcatcatcatcagcagcaggaggaggaggaggacgaggacggaagaggacgagaagagaacgacctcttgaggggggggggggg

SEQ ID NO: 36101 - DNA, 541 bp, Heterodera glycines
cttttcgagggcgctgaccacgaatctgtaactcggatttgcccaattccggacacccgacctgaattcgaatgcttcaagtattagaataaaaaatacgcaattgcgcgaaatttgttcgattttaactcgtattttggaagaaaatttcaacttttttgctcgaattcgggtacggaattcggaattgggaaaatccaagttcatattcgtgatcagcaccctcgaaaaccccggaaactgattttgagccccaaaaaaagttaaattagaaaccccaattcttcaggagtgccaaaatttcctacaattaattatttatattacagataaaattcccatatttatgacacttgacgataaattaacttttcctccattagaagaacaaactgctcgcaagaggtgcgaacgaaaacatcaaaaagttatttcgtcaggccgtttaaatggattatttacatattataaaaaggcgaaatgagaggaccagcttcactcctttcttttctcggtgcctatactgcaaaaacagtttttg

SEQ ID NO: 36102 - DNA, 1506 bp, Heterodera glycines
  unsure (1)..(1506): unsure at all n locations
ttgctgctgatcagagacaaattgccgaagagatttgagaggagaggaaaagtttagtgccgacgtcgacaattctaaaacgagtaaaaaatatttaaaaatatatctatttaataaaaaacgaaaatagaataagaattaattaaaaacaagaaaaggtcaaaaaaacatttttaaaaagcgattcaaaaactttaaataccattttattcaacaaaatcaattttctgtggcatatttgtttcgccagcaattttctactagaaattttaaaatgaaaatatcctgataatttttaaaaaatccacaaagaaaacaattctcagttgtgacaatacttatacaatatccttatatgagatcttccccgagaggaagattaatggatcaataatgcctacggtaacgatgcttgttcattgtgtgctgtgtctgtcttaatgtattcccgtgcccttccaccgtacttggctgtctttgctgcttcattttagtcatatttcgctgctccttccattctttgagccagtccgtttcgagttcgctcaacggcaccgaatggttgtgggccgatcggtagaaaatcgaattctgtccccggacgaacacggcacggaatcggcagctggagaaaggcacaaaaacggaaggacaattaatatttttcaaaatttaaatacccaccgaaaaggcggctgatatcttttgcagacgtaattgtactgaattgtgccgtccttacaattcttaatcgtctgacgagtgatcgaccattgcaaacaaatggagcccaaattggactcattctcatcaacatgggccaaaaagtgccattctttggttgacttttgggaggaagtgccaaaagaaattgtctctaaattattttaaaattggccaaataattcaaaggggttctttggtcaccgtttttgccaacacctgaagagacggaagagactgggccagaaacattgatgataattgggcaagcctttccaattaatgtactgataggaagttgagaatggcactttaattggaaatggagagagattggagcaaaacgacattataggagaaacacaccgattgatcagtgatctgagaagagacgtcgattgacctttgaggggacagaagaggatgagagcggtcgggagtgatcggagcgttttgaacggtcaatccctggggagataacagcggggagtgggcgtggccttggctttgataaacggccgaacgctcgcgcacccaaacggcacggaagggacagagcttatcaatggcacagtcgaagaacagtctcttcagaaagcaaaggtaaaacatgggatattttgccaaacaaacgaacttcctccgattcgttgccgatcaatcgcttctcatggccatcggtcgcctgcttttcgtttttggcggcgtgcaaccaatgccaaggcacggaatgttcgtcgacataaatgggaaacacccgttcgggtagttcaangcagtgcg

SEQ ID NO: 36103 - DNA, 930 bp, Heterodera glycines
  unsure (1)..(930): unsure at all n locations
gtgaaattaaataacgattgcgcaccgcacttcctatcatgctcgagagcatttgtaacgtataaaatttctcaaaataacagatagtcatttttcttggatataagataaatttaaaaattctctgagaaattaaatggcgattgcgcaccgccctccctctcacgctcgagcgcttttgtaacgtataaaatttctcaaaataagagatagtcatttttcttggatataagataaatttaaaaattctctgtgaaattaaatggcgattgcgcaccgcacttcctatcatgctcgagagcatttgtaacgtataaaatttctcaaaataagagatagtcatttttcttggatataagataaatttaaaaattctctgtgaaattaaataacgattgcgcaccgcacttcctatcatgctcgagagcatttgtaacgtataaaatttctcaaaataacagatagtcatttttcttggatataagataaatttaaaaattctctgagaaattaaatggcgattgcgcaccgccctccctctcacgctcgagcgcttttgtaacgtataaaatttctcaaaataagagatagtcatttttcttggatataagataaatttaaaaattctctgtgaaattaaatggcgattgcgcaccgcacttcctatcatgctcgagagcatttgtaacgtataaaatttctcaaaataagagatagtcatttttcttggatataagataaatttaaaaattctctgtgaaattagatggcgattgcgcaccgcacttcctatcatgctcgagagcatttgtaacgtataaaatttctcaaaataagagatagtcatttttcttggatataaagataatttanaaattctctgagaaataaaatggcgattgcgcaccgccctccctctcacgctcgagc

SEQ ID NO: 36104 - DNA, 1065 bp, Heterodera glycines
cggtgatcacaaattgtattatatatatgtgtgggtatatgcctttaggataaattagagatttcctgaaatcccaggctcattcttttgatctaatgataaagtcggtagtcactgttccttcggtttttattttattttttgttatggtaatttttggtgctgaaaacgaatctgagattattttaagctaatatccattttatgttgagttacatgaaagtttacgtattagcggtaacgggagaagcggctcaaaatcggtggcattttactaaaaatgaaaaacaatgccatgtcaacagtaaaataaatgtcaccgagtttcaagtacgtacttgacattcaagtactaatccccccgtccctggtttaagcatttaatcgttaagaataatttttattgttaattgatggctacggatttctcaattgatgagccaaccgtagaacagccgaaagcagtgaaatgttcagtttaatacatttaatgatcacgtcaaaaccgaatttcatcttccaattttacactgcaattgatcgatcacttcttaacaaatcattcattgctacttttcgagttattaatgcctattttctaggcttttatttttagcgcctaaaaagcctaaaaaaattttgaaagagcctatttttgcctattttggcgttttgcccaaaatttgtttacaaaaatgcaataaaaacaaaaaaatacacccctaagaatcgattttttggaattttaaaaatacacccctaagaatcaactcgaaaattttcaaaaatacacccctaagaaatgaaaaatttttcaaaaattcttctccaaaatttatttatttttgacaagaatttgtgattttgaaaatattatcttaatactagagactaaaaaaaattttccgggagcgggagtcccgaacgggaatcccgtaaaaatcccgctcccgttaaaatcccgtccaattttaacgggagtcccgggcgggagtaattcgaaaatttaattaaatactcactaaaatattttaatgcacgaaatttgaaggacaatccttttat

SEQ ID NO: 36105 - DNA, 1058 bp, Heterodera glycines
ttttttgagccagctagctcggcgctcatttcagtgtaagttagtcctttaccggggagtatccctgcatagtttggtacgcttctgctcaattagcaaaaaatatgagtgatcgaattttcactaaaaaagttaagcctacattttttggcatatttaaaaagcaattaaaaaattttaaaatttaataattttcctgcaccgaaggtactcactcggcctcttcgcggcctcgtggtgggccttcgccccccccctcccacgcccttcagagcacgacaaatatttcaacaaaaattttgaaatcatgtttcccactcccttctcccaggggtattattttgtaaagtctttttttccccaataaacttttcaaaccccatttttcgcaccgtgaatgttatttttattgaattctgaaccgttttgagtagattagactagaaaatattgaaaattttgaaatcatgtttcccactcccttctcccaggggtattattttgtaaagtctttttttccccaataaacttttcaaaccccatttttcgcaccgtgaatgttatttttattgaattctgaaccgttttgagtagattagactagaaaaaattgaaaattttgaaatcatgtttcccactcccttctcccaggggtattattttgtaaagtctttttttcaaaataaacttttcaaaccccatttttcgcaccgtgaatgttatttttattgaattctgaaccgctttgagtagattagactagaaaaaattgaaaattttgaaatcatgtttcccactcccttctcccaggggtattattttgtaaagtctttttttccccaataaacttttcataccccatttttcgcaccgtgaatgttatttttattgaattctgaaccgttttgagtagattagactagaaaaaattgaaaattttgaaatcatgtttcccactcccttctcccaggggtattattttgtaaagtcgttttttcccccaataaacttttcaaacgccatttttcgcagcatgaatgttatttttattgaattct

SEQ ID NO: 36106 - DNA, 777 bp, Heterodera glycines
tgcgctaaaattgtttgagaagctttttgagcgtaattacgattttacttacaccattttttgctaggcttagatcacatgcgattttcggcactctgataattttagcgctcataatgggatgtataaaggcgattgtagaaggaattggatgcgctaaattgtttgagaagctttttgagcgtaattacgatttttacttacaccattttttgctaggcttagatcacatgcgattttcggcactctgataattttagcgctcataatgggatgtataaaggcgattgtagaaggaattggaagcgctaaaattgtttgagaagctttttgagcgtaattacgatttttacttacaccattttttgctaggcttagatcacatgcgattttcggcactctgataattttagcgctcataatgggatgtataaaggcgattgtagaaggaattggatgcgctaaaattgtttgagaagctttttgagcgtaattacgatttttacttacaccattttttgctaggcttagatcacatgcgattttcggcactctgataattttagcgctcataatgggatgtataaaggcgattgtagaaggaattggaagcgctaaaattgtttgaggagctttttgagcgtaattacgatttttacttacaccattttttgctaggcttagatcacatgcgattttcggcactctgataattttagcgttcataatgggatgtataaaagcgattgtagaaggaattggaaagcgctaaaattg

SEQ ID NO: 36107 - DNA, 1285 bp, Heterodera glycines
  unsure (1)..(1285): unsure at all n locations
tgagctcaaaacttggtgagcaaaaaaaaacgaacggactgacaataaacaatgcgcacgaagagacaaaaatggagccgattgaagaagcgaatttgaaaataattgacacggacatcggatattgtcgctacggaaagggcccagtcaattttctgttcatttgcggtggcgtcggtccgttttcgcgtcctcaaattttaaattccccccccccccctcctcactttggcaggctgttacaaaaaagattatccggagtgtgtactgcgtgcctttgaccccaactttgccaccataatttgcatcgacccgccaggatacggcaccagtcgtccgcccgatcggaagcaggaggtgaaccgttgcaaaatggacgccaaatactgcttgaaactgatggaggtcagtcagtttggaagtatacatccgtaccgttttaatgtgccacttcccccgttaatccnataaattccgtttattgtggtacttttgccttgctgcaattccctcatttcagaccctcaaattgacgccgtttgttgtgttgggatggagcgaagggggcagaacatcgatacacgtggcaggccaagggaagggcctggtcagccacatggtactgctttcgtccggctcccaagtggacatgcggggagacttggcattcaaaggtgttggaattcccatttaaaggaaacgtattcttgactttaactcattgaaaggcatgcgaaacacggaccaatggatgcccgcggcaaaggcaccctatttggagcattattccaacgaatttctcaaggaacaatgggccggactttgcgatgttgtagcaaagtgtgtgcacatgaatttttgaaattcgacctaatagtcaattaatttatcaaattcctttttatttttgaattaaaagggaagaaataatcgaaacaaaaaagcggttaaatctttttaaatctgctcatttagagtgtacaaggacctcggaggaagttttccatgcgaccgcgttctaaacacactgaagatccccgttttgatcgtcaacggtaacatggaccggttcgtccttgacccgagcttgatgagcaagaaattggaaaatgccaggttttcgccatttcatttcttacaattagcaggaatgtaatttttaggattgaaatacatgcccagggagggcacgaccttcacatcaaatacccacgttggtttgctttaaaagtgactagttttgtgaaggaatcggcgaaaagtgatgtgaaagcgaataggaaat

SEQ ID NO: 36108 - DNA, 1364 bp, Heterodera glycines
tcttgtcggcacaccactccaaaacatccataacccatagttcccaaacgtttcgccaaatcattttttggaaaaagtatccgcgaaaaaagtggtttaaaaagcaaaaaaaaaaaccatttaaaatcagggctcctaagttttttttcaaaaaaaggacaaacgatacccgacccaaagacccttttttaaagaaaatggagctctggtggtgccgataggcgccgccaagaaaaagaaaaaattttgaaattgggagttttgttagcatttatatcagcgaaataaatcattaagcacaaaaaatttaaaaagtttggggaagcctaaaataaaggacaatcttagaaaaaaggacactcgggagccctgtttaaaatgattgacaaacattcgaccggtcggtcacctttattgtccgatcaccgctggccgacacaatgtatttgtgatcaaagtccaccacgttgaccgccgcccggtggccaacgagcacccgacgcacttcaatgtcacgaggcgatgccatgtcccaaaccgcgatggaccggtccttggagctaaattcgccagtaataaatttattttaaaaagacaaaaattatttcaaatttaatttgtgagaacgggggtacgtacccttcagctaaaaattttacgagaaaattacaagaaaaaacttgaaaattttaatttttaagtttgaaaatatattttttaaatttgtgatggaaaataaataaatatgtgaaatggcggcaccatgtgaccagcatgccgtcctgaaatctcaggtggagaacagcttcacaatggtggaccagcgtcttcagttgctcacccgtgttcacgtcccatattctggaaaaattggaaaataaaaataatatttggttttttttaaaataaacaaagcgttttttcgccagcccccaaaatttagcattttgggcgaaatttgttaattaatggcgtaaaaactgtgttcggtaaatgcatttgctcccaaaactcggattttcgcggtcagattttcctagaaaaatcctttctttggaatcacatggcccctcggcttcccttttggtcccattttggcatgccattgaaaattgagtttcatcctccacctgactgtcgcgtcactgctgccactggcgatcatctggttgtcgtactgcaggcacagcacggagccggtgtgcccgctcaatgtttgcacacagccgaggctgggccgggaccaaatctgaggggggaatttttaaagttagaggtttaaatagaatttacagcataatttggctaccttggctcattttttggctgaataaacccatagattagagacgtttttaataaaa

SEQ ID NO: 36109 - DNA, 656 bp, Heterodera glycines
gagagatcgaaaagaggaacgagacagagcgatagaaaagaggcgagagagagcgaaagaaaaaaggagagagagagaaaagaggagggagagaagaggagagagagagaaagaaaaaaggagagagaggaagagagagagaaaacgagaagagggagaaagaaagaaaaaaggagagagagagaaagaaaaaaggagagagagagagagaaagaggagggaaagaagagagagaaagagagaaaggaaaagagagagagaggaagagagagagagaaagagagaagagggagaaagaaagagagaaaaagagaagagggagaaagaaagagaggagagaagggagagagagagagagagaagaggagggagagaagaggagatagatagaaaagaggagagagagagaaagaaaaaaggaaagagaggaagagagagagagaaaaagaggagagaggagagagagaaagagaagagggagaaagaaagagaggagagaagaggagagagatagaaaagaggaaagagagagagagagagatagaaaagaggagagagagagagaaagaaaaaaggagagagagagagaaaagaggagggagagaagaggagagagagagaaagaaaaaaggagagagaggaagagagagagaaaa

SEQ ID NO: 36110 - DNA, 2051 bp, Heterodera glycines
cgtttttataattattgataaattagcagattcaatttttaacagttattcagtgttataacagcagacagcagtttattgttttatttcagtttattttgaatttttcatggacagaaggccagttatgaaacatggtgcatggcaagaatcgtttcaattgtttttatgtcaagacactttaaacatagttttctttccttcgaaattaataattttgttaaattagcaaaattctttttaatctattgatttatcgaatatattttttctaatctttaaatgtcatttacccggtgagaaattagtcccacacaaccacgcatttattatttttttaattaaaaattacatttattttagtggaaatcttttttttaatttaaataattctttgtcagaagatgtatcaatgaaatttataaatttttcgaaaaggagtaaatgaatttgcgaacatcaaatattttgaaatttaaaaaggtttacccttttttcatcccccatttttctttaaaaaaaaatttcctttttttttcttaaaaattaccgggataaatgggtaattttggcaagaattttaaacccgaattttttattcccattttcaaattttttccctttattttggcctttttcatttaaaattttgtttttaaatgggaaaaatttttttgtgcccttttttttcaaaaaaaaccacaaaacaaaaaattttttcccaaatttttttttttggggacccttaaaaatttttgggaaaatttttcttttttgtttttttaaaaaaaccccccccaaaaaaaaaaaaaaaaaaaatttttttttttcttttaaaaaaagaaaaaaacttttttttccccccccaaaatttttttttttttttttttttaaaaatttttttttttttttccccccccccccggggggggttttttttttttttttccccccagggggggagtttttttttacaaaaaaaaaaaaagaggggggaggaaagaagaagttttttttttttttctcccccccacaccaaaacaaacacccaaaaacaaaaaattatttatttttttttttttttttttttttttttttttttttttttttatttaaaaaaaaaaaaaaaaaaaaaaaaaaaaaaaaaaaaaaaacccccccccccccccgcggggttgtgtttttgttttttttttttttttttttttattaaaaaaaaaaacaaacttttcttttttttttttggacaaaaaaaaaaaaaaaaaattcttttttttttttttttaaaaaaaaaactctaaaaaaaaagaaaaaaaaaattttttttttttttgggaaaaatttttttgccaagaataaaataaaacacttaaggctattgaatgaaataaaattttaaaatttggttgtttttgagcaatatatatcaaaaaaaatattctcatttgatggttttttgactaacttccagggctgggacgcgaccgcaatttgcggcgttttttttccgcgatccgcgaccgcggcaatttgaatccgcgatgcgcgatccgcgactcacaaaataggtcattttttacaaactcttttaccaaattgcactcaaattttcaaaaaattttccggcggcgcctatcggcccagagcagaaaacaatgatattcttcatgaaataaacagccaaaaacttttaaattaaactaaaaatgtcattttctttcgttttttgaaaaagaaaattgcataaatattttaaaaaatgtaatttttaaggaaaaactgttttattttaaaaaaaactttaaaaaccatctttatttcaaaaaagtttttgtttatttatttattcatttaaattaaactcaaaattatttgttttttggcttagtgtttaatcgtcactttcttttctccacagacgcgagggctacggcggctacaacagctccgacgggcgagaatgaaaatgaagtgagtaaatgactcgacggtgctgggaagttgcagggttggggcgcgcacagaaaaaccccgcggatcgcgcatttaaa

SEQ ID NO: 36111 - DNA, 628 bp, Heterodera glycines
  unsure (1)..(628): unsure at all n locations
ttctgtcctcccaattggttgctgctgatcatcatccgcttattcttccggcactgattaccttcgtcattttgctggtctcttctgtcttcttttttatttaccgcagattccgacagaagccaaatattattttgttcgttgggttgtcgggttcaggaaaaacgacactgttcaccaagttgataaactcgagtcagtttatattccattttctcggttttaataattcgtttttcaaagccgatttcgggaatttatgaaaaatttttaaacaatttctaaaaatgtttgtttggcggtgcctacaaaaactcactaatttttctttaaaaaaattgctcattgttagattcgcaaaatttggtcattttttggacgacatctgttaacaaaccacataaaaaattacaacattnttctccggcgtcgcctatctgcaccgcccggaccctttataccccaagtttaaaaaaaaacacacgcgggagtaaagtctcgaaaacagactaaaaactcgagaccgagactctcgagagtcactcacataggccatttcggttaggctttcgacacgcatgtcaagaatgttaaaaatgaattctgtgtaaattgtccagtctgattt

SEQ ID NO: 36112 - DNA, 1054 bp, Heterodera glycines
attgaagtttgttcacagaatttgtgcaaaataaattccgatatatttttatgttttgagacttgatcatgatccgattacatgaatttgtggcccggaattttttgcggcaactgccacttctgctgtcaattttattattgtttttacggtggctcttggtgtcactgtgccgccttttgaaattgttacgaacggacaagggaaaaatgatcctttcaagaatcgaaaaatggcgaatgaagcctgttggttctcctcgcagaatgctcattatctgctgcccgattaggtaagcataatcagaacaaatgtgaattggcaaaaggaggcgttgactggcaaattaatgagatggaacaaaatttttcaatgaaatgagctagacgacgcttaaattctattgaattttgggtgctttacataattgaatattttgatgcttcaaattttatacacagcggcccaattttgggctccaagtacaaatatgctggatttttcgtcttagtggtctgtgagttagtcaccaaaaggggggtctcaagttcaattcctccttgtgtttgtgtataaatttcaattttttaaagcaaataaataaaataataataaatacagaacgccaaaagaacaaatacaaacagtaaaaggtacacactatattttacccttgattttatgaaatttttttagcttataacttggtgaatactagagcaaataaaaccattttatgctcattttgaagggaaaattctggagaatatttctaagttagtcaaaagtttaaaaaaattgtttattggcaaataaatgattcatgtgttattttatatgtcagagacatggaaatagtatgcccaaatgagagaaaaagaaaaaactttgccctgcgaaaaaattttttcctgtgggtaactttttttgaaattttgcataggcccatattttgaccccctctatcgaatcccctgttattttttccaagttatgttttttactcgagatcggctcctccatttttgcaagggaaaatctcccgaaaatttta

SEQ ID NO: 36113 - DNA, 1069 bp, Heterodera glycines
  unsure (1)..(1069): unsure at all n locations
ccctcccatacgcaatctgttccttctttccttctctctctcatagtgccaagagtggcgatttggagggacacattccgcaaggcctccgcccccccccccattatcccttccttcggatgacccctctcgggacagtgcgacaggtcatttcccctcctccctgtgttctccactcgccctttcattcattcattcgtccataccctcactcgcattatcggacggataatgggcaatgggaggggataaaaggaccattttatccctttaatttacaacatttcgcgacaaaaggacaaaaaacgacagaatttggaaaaggtgacattttgagggatttgaggcgtactttttgagtattgtgagcaaaaatgggaaattaaagcaagttcaaaaagagacaatgagaaggaaagaattaggggaagtcacaatgacacaatgatgagaatggcatggcataatggaggagagagagagagagggggcgagagagagagggggagaaagagagggggaagagagagggaagagagagaggggagagagagagagagaagaggagcgtgggggagagaaggaggaaaaagaaagaaaccgttgaccggaagggataaaacacagtaagacacaatgaacaatgttttagcattttgatttgccaaaatatttttggattagggagttattcgattataggacggtgcatattacgaacgccgtcgcaagaacaatgacgcggcaaaacgttcgcgtgacacgcgccggcagaaggaggaacagacggcacagagggcggcatatctcgaacaggtgccaaagtgaagagcaaagacgggaatggcaccgaagggattggcattttcaggagaatatccaactgcggaagcgcgtggacatgctcaatgccgaattggcaaggcacagggccattctcttctcattagccgctcccacggncaacgcgtcacttttgccgaacactccgccgccacaggcatcggccgaagagcgacggcacagccacgtgttggcatcgccaacttncacgacgacagcgaacggc

SEQ ID NO: 36114 - DNA, 1481 bp, Heterodera glycines
ttaataattttcctgcgccgaaggcccaccacgaggccgcgaagcggccgagtgagtaccttcggtgcaggaaaattattaaggaagagagttcattatttatttgttttttgcataattaatttataaatatttttttcagaaagggttctgaaacgcaccaaattttatttacatgttagtttaggcactctgatgctttttctatcaaattgggagatgaataaaatttttaaaaatttttaattcctttttaaacaggccaaaaagtttaggcttaactttttagtgaaaattcaatcactcatttttcgagtagtgatcagaagcgcaccagattttgcaggggcctaaaaaggtcaaggaaaggcgtctctgcgttgatttagcagtagtacctatgaatttaaattttctatgaatttttaaagttttttgaaatttttttaagtgcaaaatggtggtgtctgcaaaaaattttcaccgggtttaaaaaatctaggaaaattagtaagcatttgtagtgttccgatacgtatccctgcaaaatttggtgagcccctgatcaattacaaattatttatggacgatcaaattttaaacgcaccaaaattttatttacaagttattttaggcattcagatgctttctctatcaaaaagggagatgataaaaaatctaaaaatttttaattcctttttaaacaggccaaaaagtttaggcttaactttttttttcagaaactgatcagaagcgcaccaaactttgcagggaaactccccggtaaaggactaacttacactgaaatgagcgccgagctagctgggtttaaaaattttttcaaaaatcaaagtctttcgtttttatttaattatttattattttttgcaaaattaattcataattattttttcagaaagtgctctgaaacgcaccaaattttatttacaagctattttaggcactctgatgctttttctatcaaaaagggagatgaataaatttttaaaaatttttaattcctttttaaacaggccaaaaagtttaggcttaactttttttttcagaaactgatcagaagcgcaccaaactttgcagggaaactccccggtaaaggactaacttacactgaaatgagcgccgagctagctgggtttaaaaattttttcaaaaatcaaagtctttcgtttttatttaattatttattattttttgcaaaattaattcataattattttttcagaaagtgctctgaaacgcaccaaattttatttacaagctattttaggcactctgatgctttttctatcaaaaagggagatgaataaatttttaaaaatttttaattcctttttaaacaggccaaaaagtttaggcttaactttttttttcagaaactgatcagaagcgcaccaaactttgcagggaaactccccggtaaaggactaacttacactgaaatgagcgccgagctagctggg

SEQ ID NO: 36115 - DNA, 256 bp, Heterodera glycines
cccgagccccccgacccgacccgagacgttttttggacctattccccgacccgacccccgacatgtcgtcccccgaggtccccgactttttgccctcgaccccccgacactaattcgggggattgtggactccgagcgttttaaaaaattcatccatgaaggcgggaaatattgaaaatttttgagattttgtacaaattttcttaataaaattcattaaaaattacgaaaaactttccggcggcgcctatcggca

SEQ ID NO: 36116 - DNA, 545 bp, Heterodera glycines
tggcctaccaccaaatggccaatatggcccaggacagttcggacccccgccgtccaatagctacgaccttccaccgccggatagcagctcagacgcttcgtcccataagaagcgcagtccgttaagcttccgtgcccacggcccactaccaaatggccaacatggcccaggaaagttcggacccccaccgcccaacagctccgaccttccaccgccggaaagcagctctgacgcttcggcccgtaagaagcgcagtccgttaagcttccgtccacatggcctaccaccaaatggccaacatggcccaggaaagttcggtcccgcgccctgcaacagttctgaccttccgccactctcatcgacggacagtgaatgagcaatgaatgtttggatgatcaaaatgcacattatcattggaaaaaaatgcttgaattatggcatcgtttaagtgagaatatattctgaagtgttgattatttgacgcattttgtggaaatttcccgagagtcctctttttcagatttttctaatgtgcgagtttgaaa

SEQ ID NO: 36117 - DNA, 613 bp, Heterodera glycines
aaagcggcgcaaatgtcgattttgctgggcggcgcaaaaatcgcagcgcaaatgtcgcatcacggtaattaaagcgaattaggggaaaaaagaattaaaaagctaattaatgcaaatttatgggaaaaataaaaattgcaaatttaggggaaaaacaaaaattaaaaaagtaattaatgcgatttggaaaaataaataaagcgaattagggaaaaagattaattaatgcaaatttgggtggggaggggggaacggaggcattgtttgttacacaaatatatatttattttaattatgtataagtatgtatgatctcttttaagtatgccattgcaatacaaagcaaagtttgtcaaaatgaaagctaccctatttaattttgatgatctttgaccatcaaattaaggatggcatcattttgccggattatcaccgctcatcgaccacactcattcagtttatgatgggcaaatgatgaagagtttaatcataagatggaacaaagcgtccattagaagctaatggccagggaaattaatggcgaaggattaagtggagaaaaaaaaggctaattagcaaaagcatttgcatttttgaaaatctgtgttttaat

SEQ ID NO: 36118 - DNA, 413 bp, Heterodera glycines
ccctggcaaatccgccctttgtctcggacaaaaggcgttccctcgttccctcccctccgcttttgccaccccttttgctccccatttaccccttacccccgcctttgtgctgactccgccccgtctcttctgttgttggggaagtccttcatcttcatcttcgtcctccgtccgtgcaacaacagcttcccccgccccatttccttctcatttcaccgtcaaacatgcgcgaaatcgctccctccccccctctttccctatttgcatccaaaaagtgctcctccctctgtccgctcagttgcgctgatttactccctcccccccccctatttccccatttgtctctcccccctcccctctttttttttgtttgcctttccattcctttggaagtgagtgaagagcttccccct

SEQ ID NO: 36119 - DNA, 975 bp, Heterodera glycines
cgatgtgcacagccctccgtctcatacgcaagcgcttttgtgaggtataaaatttctcaaaaaaagagatagccatttttctgggatagagtataaatttaaaaattccctcaaaaataaaaggtctattgcgcaccgccctccctatcatgctcgagagcatttgtatgtgtataaaatttatcaaaaaaagagatagccatttttctgggataacctctaaatataaaaatcctctgtgaaataaaatggcgattgtgcaccgccctccctatcatgctcgagagcatttgtatgtgtataaaatttatcaaaaaaagagatagccatttttctgggatagagtataaatttaaaaattccctcaaaaataaaatggctattgcgcaccgccctccctatcatgcgcaagagcatttgtaagtgtataaaatttctcaaaaaaagagatagccatttttctgggatagagtataaatttaaaaattccctcaaaaataaaaggtctattgcgcaccgccctccctatcatgctcgagagcatttgtatgtgtataaaatttatcaaaaaaagagatagccatttttctgggataacctctaaatataaaaatcctctgtgaaataaaatggcgattgtgcacagccctccgtctcatacgcaagcgcttttgtgaggtataaaatttctcaaaaaaagagatagccatttttctgggataaactctaaatataaaaattccctcaaaaataaaagggcgattgcgcacagccctccctatcatacgcgagagcatttgtatgtgtataaaatttatcaaaaaaagagatagccatttttctgggataacctctaaatataaaaatcctctgtgaaataaaatggcgattgtgcacagccctccgtctcatacgcaagcgcttttgtgaggtataaaatttctcaaaaaaagagatagccatttttctgggata

SEQ ID NO: 36120 - DNA, 1650 bp, Heterodera glycines
  unsure (1)..(1650): unsure at all n locations
ttcattatttatttgttttttgcataattaatttataaatatttttttcagaaagggttctgaaacgcaccaaattttatttacatgttagtttaggcactctgatgctttttctatcaaattgggagatgaataaaatttttaaaaatttttaattcctttttaaacaggccaaaaagtttaggcttaactttttagtgaaaattcaatcactcatttttcgagtagtgatcagaagcgcaccagattttgcaggggcctaaaaaggtcaaggaaaggcgtctctgcgttgatttagcagtagtacctatgaatttaaattttctatgaatttttaaagttttttgaaatttttttaagtgcaaaatggtggtgtctgcaaaaaattttcaccgggtttaaaaaatctaggaaaattagtaagcatttgtagtgttccgatacgtatccctgcaaaatttggtgagcccctgatcaattacaaattatttatggacgatcaaatttttagaaatttttatttatttttgcataattaattcataaatatttttttcagaaaatgctctgaaacgcaccaaattttatttacatgctagtttaggcactctgatgctttttctatcaaaaagggagatgaataaatttttaaaaatttttaaattcctttttaaacagcccaaaaagtttaggctttacttttttttcaaaaactgatcagnaagcgcaccatactttgccagggatactgaagggaagagagataacctatttatnaatattatctagtcagttcatttaaataatttttatccaaaaaatttttttttgggttttcggggcagtccccctgaaccgatgcgcccagatttatggggagaccgaatccttccggaatagcttcactatagcctgtactttaattctgcgttggatttttgctccccataattgtttgagtaccccaaacggacacttgaaaaaatcgatttatttttgttttcggggcagtccccccgaaccgatgcgcccagatttatggggagaccgaatccttccggaatagcttcactatagcctgtactttaattctgcgttggatttttgctccccataattgtttgagtaccccaaacggacacttgaaaaaatcgatttatttttgttttcggggcagtccccccgaaccgatgcgcccagatttatggggagaccgaatccttcgggaatagcttccctatagcctgtactttaattctgcgttggatttttgctccccataattgtttgagtaccccaaacggacacttgaaaaaatcgatttttttgttttcggggcagtccccccgaaccgatgcgcccagatttatggggagaccgaatccttcgggaatagcttccctatagcctgtactttaattctgcgttggatttttgctccccataattgtttgagtaccccaaacggacacttgaaaaaatcgatttttttgttttcggggcagtccccccgagccgatgcgcccagatttatggggagaccgaatccttccggaatagcttccctatagcctgtactttaattctgcgttggatttttgctcccccataattgtttgagtacccccaaacggacactgaaaaaatcga

SEQ ID NO: 36121 - DNA, 384 bp, Heterodera glycines
aaagtgagttaatgaagagtctgtcataaggttttttatttattgttttggtgtgacatttctctttcgtcccttttgtgaatgccttcgattaatttcgctttattggcaaaaatttaacagtttgaaacaacaattgatggttggttggtgttggttcaccgttgaacaattgtggcaatggttggctgagaatgttttggcgattttggcctgcattggagcagaagagagaggagaagggcaaaggcagcggaagttgcgatcagaaaggcgaccaacagcataaatacgaagaaggtggtggaccagcgcgagttcagttcgttggttctgtgggcgaatcattcggcttttgttggccaaagaattgccttttcactc

SEQ ID NO: 36122 - DNA, 621 bp, Heterodera glycines
acaccatctttgttgtttctctttggattgacaagcccgatgataaatatctcgagcgcaaaacgcgtgcatgtttggaaagtatcgttcataccaataattgagggtttatttttaaatgaaattttatgataaaccttattatctcagaagctatttaattgattcaaatgtttttatcgcggttaattaaagcaacgaaaattggtttgaatcgggaagtttatcatttctaacttacttctcaaaattgttgataaattgcaaatatatttttccaaaagtctggggacactttctgaaaataaattctatactcatggattttccacttattaaattttgcaggcttattgatgcatgttctttgacacttcttcaaaataacctatgccctttattcgctcaaaacaccatctttgttgtttcgctttggattgacaaggccaatgataaatatctcgagcgcaaaacgcgtgcatgtctggaaagtatcgttcacaccaataattgagggcttatttttaaatgaaattgtatgataaaccttataaagtatcgttcataccaataattgagggtatatttttaaatgaaattttatgataaaccttattatct

SEQ ID NO: 36123 - DNA, 1497 bp, Heterodera glycines
  unsure (1)..(1497): unsure at all n locations
cgatgtcaaaagtaaaatctgatcacgtattcgtgatcagcggcctaaattggccctaaagacatgtttttgaaggtttttgatgaaaaaatttttccactcaaaaatcctacactcacncctttggtcccgattcncaaaatcacttttatttctataacttttttcaaaaaagtgataaaaagctaaaataaaatttataaaatagagcaaaaaattgcggatttttgtattattttacttttccaatacatcttttcagaaccgagttcagaatttttttctgaaaattcgaatttttccagaacttccggaataactttttttagattcatgatagagaatctaaataaaacccataaaattctcctgatttttctccatttttaatgctttatttaatcaaaattggtcaaaccttaggccagatatgaattttcaaatattaggccaaaatcccgagggccaaaaaattgccaaaaaataaagaatttttaaaaaattccaaaaattctgaaacgtaaaacaaacatcatattcgtgctcagcacctcaaaataacccaggaaaaaaattttcacccccattttcaaccaaaaaaaaatttcctaaaatttctagggggcctagctcgaaaatttttgaaattttccgggcatatatcccaccgttcgatagagcttaaaaagctctacaattttgctcttaggcaatttttcgctaaaaccaacccccgacgagttatgggcccgggactcaaatgtcccgcttaggccaaaaaatttttctatttcctggaaaaaatcgaaaattttctaaaaacatcactaatcgatagagctcaaaaaacgatgttttggaagtggtcttcgttttccctggaaaaatcgttaaaaaatcataaaattcaaaaaccgaaaaaccgaattttaggcctaactcgaaaaattttgaaaattttcgaaattttaaaatttggaaaaatcgagctcattgagctctacaataagtccgctggcgaccccctgctccgagcaaacccttacgagctattcgcctggtactgaagtgtccaaaaaaagtgattcttacgttgcctaacctacaggtcaggcctttgatctgatcaaaaattttttgctggcaaagttgtaggccatagttaaggcatttcgcttttggggtccgctaagctctgaaagcaaaagcaaaaaatttcgtaacactgagactgacggcaaagtcagttttcgagccgctgggactcagttgtccctcggagaaaaaaacctatagttttcccgaattctcctcaaaaagttgtaagacccttccaccactttcagaccccggccggccttcggccggccggaattagtttttgaaacgaaactcaaaacctatataacatatatataactagcgtgtgggaattgacgggggtccggtgcaggcagattgcttttggatgaagagaaaatggacatgcacatttgt

SEQ ID NO: 36124 - DNA, 1110 bp, Heterodera glycines
gccagatcggacgggatggcgtgcttctaacgtggtatggtcgtaagcgaaaggacagcaattaaagtcatttaaataggcatatttaaaagagcctttttttgccttttcacaagagaatttattaaaaaaggcaaaattcgccttaaattaataaggtgaaagtttgaaaatgtttattaaaaaatttcaggatgaaatacatttaaaataataaaaagaaaaaaaataaatttatttttctaaataaataaaaaacattgtcagaggcagtgcctgccgaaaaaatagacaaaattttttgaaaaaagcctaaaaaaattgaaaatttaaataaatttaaaagtgaaaaaagtaaaaaagcttacaacaccttcgattcccaggacgtctccgttccaagtactaagaaggcccaacgttgcttaacttgccagatcggacgggatggcgtgctttcaacgtggtatggtcgtaagcgaaaggacagcaattaaagtcatttaaataggcatatttaaaagagcctttttttgccttttcacaagagaatttattaaaaaaggcaaaattcgccttaaattaataaggtgaaagtttgaaaatgtttattaaaaaatttcaggatgaaatacaattaaaataattaaaaagaaaaaaaataaatttatttttataaataaataaaaaacattgtcagaggcagtgcctgccgaaaaaatagacaaaattttttgaaaaaagccaaaaaaaatttgaaaatttaaataaatttaaaagtgaaataagtaaaaaagcttacaacaccttcgattcacaggacgtctccgttccaagtactaagaaggcccaacgttgcttaacttgccagatcggacgggatggcgtgctttcaacgtggtatgggcgtaagcgaaaaggacagcaattaaagtcatttaaataggcatatttaaaaagagcttttttgccttttcccagaaaaatttttaaaaaaaggaaaaatcgcccttaattaataaggtggaagtttgaaaaaggttattaataaaatttcagggtggaaaaacattaaaaaaaataaaaaagaaaaaaaaaaaattttttttt

SEQ ID NO: 36125 - DNA, 964 bp, Heterodera glycines
tttccactatagcttttttctttgtaatccaaatccaacattgtaggtatcattcgaaatagaaaaagttttattaaaaaaaacatcaaaatttcgacttttttgcaagtatcatgttataacttttttggtaattgtctaatcgaatagcagctttcgatgataccaaaaaaatgttggatttggttgacaaagttaaaaaagttatagccaaaaaagttctggagcccaaacgtgccggtccaatcgtgccggcccattgaggtgtaccgatcgctggacctcagcatcgttccgaaaccaaattttgcgatttgggccaatttcccatcgggattgaaagaatatttgcgcttgtttgaaaacattctaaaataaaaattagttattgcaaaagatataacaaatacgcctcgaccatgaggaaaatactattatttaaaaattatgacataatgccataatttaaccaaaatattggtataaaattccaaaaaattgtaaaattttggatattttttcatccttgaaacttaggaagccttcaatatcggaaccgctggggccccaaaaatctcgttaaatttttttggagtgtctcaaaaaccgcaaaagaatcaagaattgacaaaatttttacgaattgaaaaatataattttattaaaaagttcattgcagtgtttttttctcgcctttctcttgttactgattgtttatgattagcatttttattatatttttattacaaataattttttacacccattaaaattttaaagggaaattgacttttgaaaacttcggacttcgccttcgagcaaaaattgggcttcgcctttggcctcgagtgctaaaaaataagccgagcttcgcccgtccctggcagtgagttcagcctaagaacagcttgccccaccgtttgcgctaccaaaaatatatatgtaggaagaagaaagataaaaa

SEQ ID NO: 36126 - DNA, 839 bp, Heterodera glycines
ccgcattcggacccccgtacgggggaacgcctcacgcattcggcccactgtacgtgggaacgcctcccgcattgggaccaccatacgggggaacgcctcccgcattcggaccccgtacgggggaacgcctcccgcattcggacccccgtacgggggaacgcctcacgcattcggcccactgtacgtgggaacgcctcccgcattgggaccaccgtatggggcgacccactaaagtgacctccataaggatggccgtactgatacgggggtacgctaataaaaatttttatttatctatttttctgcctattttgggatttttgtacctattaataactaacttttttgtacctatttaaatacctatttcgtgatttttcttacctaagtttcccagccctaatgataaaaaaaatataccgtatttgctctttttatgtgccatggtatattatttttcaacctcctcagaaaggagtagataattggagactggtagactaatggagactgggaaattatttttcggctgatttatttagtggaaaatttttgaaatttttttgaacatgtcgccaaaaaatgtcatcttgtcaaaaaaaatcatttttattgcatttctgttaaataacttctgaaaattgaccccaaaatggcaaaaatgtgtcattttcttgcatccaatatgcataaaaattgaaatttttaatggtgaaagatggacgaaacgatcacgaagaaacctttttttattttttattttattttaaaagtttttagtttttttttttggcttatctgatggatagtgtcgctacttttagtgattaacgaatttt

SEQ ID NO: 36127 - DNA, 859 bp, Heterodera glycines
aaaaagggacaaaatattttagccatgcaaagccaaattatgaaatatctcaatttatcaaaagctaaatcaataattagtagatgagtgagttaagaatgagcattgtgcttacatttaaaagattattgaattaagtcaaagtcgagtgaaagcggcgaaccgcctgcaaatggagcagaagtggcgcaaagtcgcaagaaacgtcaggccgaagaagtgaccactgaagagccaccatcagaaacaaacgatgccgaaggtgccgaggatcaccaatctgcggcagcgggaaatggaaaagcaccaaaaaataagggcaaaaagaacaagagcgacagcagcgactcgtcaagttcgtcgagttcgtcgagcgaaagtgacgagaagaagaagctgaagaagaagaacaagcactgagcatcggtcgactcactaatgaggccgcttaattggattggggtcattagcgaagagtggactgtcacaattaatgttgtcaaaattgtaaagcttttattctttgatgggaataaattttattagtggaattgcgcagttagtattggaaatttggagattgggtttcataataaaaatgttaaatatatttaagtctacttgaggattgatattttacgagaaaatccaaacttttttaaaggttttcttattttaacttctaataattttttaaattaaaattaatttcatttccctgcaaaaaaaaaatatttaatcataaaatattttcgaataaaaaaatgattttttggcatttgatgatttttatatttttcattgctaataaaattaaatcaggcaaaaccgaccaaagtttgatgaaatatttggcagc

SEQ ID NO: 36128 - DNA, 1065 bp, Heterodera glycines
  unsure (1)..(1065): unsure at all n locations
ccgtttcaactcacgttcgctgtcgtcgcggtcactgtcggcgactgtcncgctgtccgatggttcggcttgttccgctttcttggcaggacgtccgcgcttcttggtggaggtttttgcacggcgaggagcaggtgacttcttcgttgacggtttcttcacgcgtcgaccaggagtgcgactgcgcgggcccggcgccttcttcttcagcggttgtttcttcttgtgcggcgtctgagaacgtcctcctccacgaccggcgggcgagcgacgactcttcgggcctgacttcttcggcgagcgactaggacgaccacgaccagcagacttcgttgacgcggtggagccgtcacgagctttctgctgaaaaaaggggaaatgaatgacgacggaggaggaatgctgtccgaaaacgtcactttggctgccttttccttcgccgctttctgtgccgcaatccgtgccgagcgtcgcagtggtttggtctcgccagcgctggccgcacgtttcttcgtcttgcgactgcgagcacggcgttgtgatgttgttggcgattccgcagacattttgaaccttttgttgttgatcttgttgtacggacgatgctgacgatgaggaagatgcttcggtagacatatggcgaaatatgtgcactctaaatgttatcggtgtgcccaattagaagacaaaagtatggttcaaatcatttgcgaaagtaaaagagggattcggtatccctctccaaaagcgatccatattcctcctcccagttcagacgtacggtccgttcccaaggcaacggtcaatttagggggggggggagatgggtacggtacatctaccgttgccaagacggtgggccatggaagggggtgggtacggtccattgccaagacggtgggtaatttgggggggggatgggtacggtacatctaccgtctcgagtgaaattgtacggtacatctaatttttttgcaagttccgcacctcagtgagtatttagcctgggcattacaggccacaagagcaatgaatggcatcaattttattcgaatccccggaaaa

SEQ ID NO: 36129 - DNA, 786 bp, Heterodera glycines
tatctacaaatatattaataaatttacaaaaaattttgaacaaattcactctattaattacgagaaccgaactattttttgatgattacttaaaagcagaaatttttgcaaaaattttccaagaatccttttcaaattcagatgttccacaaattagcagttgtccttccaatcccaatggaccatttattacttatgttgaatttaatgccaatgaaatctctaacattctaaaaagcctaccaaatcgagaatccacatcccccgatgaaatttcctttaaaatcttatgtaattgccaccttacgctttcacctgtaatttccgaacttttcagaatctcaatggacacgggcaaaattcctgaaatttggaaaaagtttattgttatacctctctttaaaaaaggtgaccgaaatgacccacataattacagacctatttctcttacgtgctgtctatgttgagttatggaaaaaattattgcaaaaagcatttataacttccttcatcagaataatttaatatccgaacatcagttcggttttgttaaacaccgatctactaatactcaactaattacagtattagaagattggtacgacagcatatacggtaagaaaatatcgactgtatttatgtggactttcggaaagcttttgattcccttcctataaacattttaataaataaacttcataacattggcattaagggaaaactgctaagttggttatctgaatttttaagggataggtcttacagagttaaaattaacaataaatc

SEQ ID NO: 36130 - DNA, 1269 bp, Heterodera glycines
cattgactccgagactcaagatgaagacccgcaaaaaaccgaggaattttcgagatcgagaatctcgagcagtggaaacacccgtttttgagggttctttagtgatgcaatccagaaaatgtctgtccaaacactgactcatcattattatccataattacctgagtaacaattccaaatgtacctaaaccgcatgtgacagcattgaattccggactgtttgcgtcaaaatgtgcaatttttccattggctaacaccatttgcaaggaacgcacttgggacggcaaattttgaaggccaatgccactgccatggacaccagtttggatggcaccgccaacagtgatttcggcagtcgctgccaaatttggcaaagcaaaattgttggcatctgttaaaatacgcaaataaataaattttatttaaaaaatagaatataatttgaaaaattaaagaaatttggaatttttaaacgaattcggtaagaaggacagataggcctaaatttattatataatgtttggcctatatgtaaatatataaatcaaatttttgatttttaatttaatatatttactctcaaaaaatttaaagtctacctttgatcggaaaaaagaaaatcaacctttgatcggaaaaaagaatcatctggggtcaaaatgctcatttttgtgaaaaaagctttgaagaaaaaacactatgcctattttaagaatttgcaaattaaacaatctgtctttgtcattaatcttctatcaaaaaactataaaaaattcttaaattcccaaaaatatcactcaaaagaaagtctttgacccttcaaagaccacaaagtcctggaaaacccgtaaaaccagtctcaaaatatttcattttgccctgccactaattgacacttttgccagaatgaattgtccagtgaaaaaatctgcatgtactgacatagagtgggcataaggtcagtgtacgtgatgccagcttgtacagtgacggtggatgctttggtgttaaatccgatcaccgaattcatgcccaatgttgacaaaatggtgtcacagctgtcaccaattttgctgaaactgtgccgtctgccaattacgcgcagccgtgccgcgtgcgtgacgacgtgttgcacttgtgccgtggtgcgcgggtataggacgttttgggtgctgaagttgaaattgccgccccagttgtgcagcctagaaatcttgggtttttgggatcaagatttttctggttttcctaatactgaaaattataaaa

SEQ ID NO: 36131 - DNA, 934 bp, Heterodera glycines
tgtgatctaagcctagaaaaaaatggtcaagtaaaaatcgtaattacgctcaaaaagcttctcaaacaattttagcgcttccaattccttctacaatcgcctttatacatcccattatgagcgctaaaattatcagagtgccgaaaatcgcatgtgatctaagcctagaaaaaatggtctaagtaaaaatcgtaattacgctcaaaaagcttctcaaacaattttagcgcttccaattccttctacagtcgcctttatacatcccattatgagcgctaaaattatcagagtgccgaaaatcgcatgtgatctaagcctagaaaaaatggtctaagtaaaaatcgtaattacgctcaaaaagcttcgctaccaattttagcgcttccaattccttctcctttctcctttcatacttaccattatgaactctaaacttatctaagtgccgaaaatcgcatgtgatctcctctttgcaacaagtcgtgcaagtagtaatcgttattcccctcataaagctcctttcctaattttcgtgaaaaaaaatcattcttcaatattttatatacatcccattatatatgatcttattattaaacttcatatttgtgctcagtcctccaaatttacccctgaaatatatttttcaccctctttttcaccccaaaaaaaatttttgaaaatttctagggggcctagctcgaaaatttttgaaaatttccctacatatagtataccattagatagagcttaaaaagctctacaatttggctctaaggcattttttgtctaaacccgacgcctgacgagttatggccccgggactcaaatgtccccctcagaggcaaaatctttttctatttccggaaaaaaatcgcccgggtgagtaaaaaataccagtcgatagagcacgaaaaactatgactctagaggtccc

SEQ ID NO: 36132 - DNA, 980 bp, Heterodera glycines
  unsure (1)..(980): unsure at all n locations
cagtccttttcgcctancctgttaagagaattcttaatttcactaataatttctcaatttttttctataacagattactctttctatggtgagttttcaaatttctatgtactntattaagtatacaataataatcaaacatttttctatgattgcaaagcatttaaaaaatcataggcttgtttattttcattatgttttggaaaaggtcaattaaataaacaattttttttttgtaattttattaattgtaaaaaatcttatgcaattttctataagcaatcgatagtgtaacaaatagagaagataacttctgatcaagcacacacctttcattatttccggttaaatatgtgttcatattttaacaaaaagcagtcttgaatgtcgtcgaaatttgtggtaattccatggcttatagcccgaccaattgcgctggaattttgccatgaggcttattttttgtgctggtttcgaatttacaggcgcccatgcaattggagcgcattaaattttttgtcgatttttcttcaatacccactttaaacgataagcatttcctcgcacaccgctctatttgctctgttttaaacaacaaaattttcccaagcattcatacctactttcttaattgcactgggatcacatctaaacgactatgctaaaaacggggaactaaactgtattaatatttttaacaaattgcagcccttttcgcctaccctgttaagagaaatcttaatttcactaataatttctcaattttcttctataacagattatctcttctatggtgagtttttcaatttctatgtactttattaagtaaataataataatcaaacatttttctatgattgaaaagcatttaaaaaatcataggcttgtttattttcattatgttttggaaaaggtcaattaaataaacaatttttaaaggaattttattaattgtataaatcttatgcaattttctataa

SEQ ID NO: 36133 - DNA, 233 bp, Heterodera glycines
tgatgctgccatgcatatattatgcaggcagagaacaacatgtagaaaagaataaatgagagagagagaaaaaacaaatgagattgtgcacataataacatgcgagtttgtgctatggtacaaaataatatttttagaaagcgttcgggatcggaaaagaatatgaaattggtcataaacccgttcattgatgtgtttgaaaagaaacaaaaatatggctagcagagatcttg

SEQ ID NO: 36134 - DNA, 1083 bp, Heterodera glycines
  unsure (1)..(1083): unsure at all n locations
aaaaccaataattttttatccttttcaggacaatttctcgtacatggttttcgagtatgtggagaaacggtatgtgcgagttgaatttgaacacacaaattttttggcatttttcgaaatagtctccgaaaaaggctaaaatttaaaaaattgcccaatccgttttctttcagctcattgatggaccttcctacggacaatccgttgtgcgaatttacggcatggaaatatttccgagacgcgctcaaagggctcgaatattgtgggccaattaccatttcaaaaaatgccgtaattaatgacctctctctggttttggtttttcagtgcatttccaaaaaattgtgcacagagatttgaagccgtccaatttgttgttgtccgacacagaaaatgtcaaagtgagtcgccaaaaaattgccaaagattgagagaaatttcaaaaatgagaaattttctaattataagtgcaaaattcaaatttttgaaagtttaattaggggagcagaattgaaaatgttacaaatccttattttacgaaacattgaaattttttataatttaaatttttgcaaaagcaaattctaaattaattctttaaatatttttttctaaaataaaattgttatttaatttttaaaattttaattttttaaaataattttgccaatatttttcacagattgccgactttggagtttcctgtgaatttgaaggtgattttacgacaataaaaagttaggtaattaatttattgcatcattttccttaaggaattgatgcctttttgacggtgaattgtggcggcaaaattttgaataaaaatttaaaaaattttccattcatttttcagggtacggccggcactcccgcattcatggcacccgaggtaaatgccaaataaaattttagaaatttgatcatagtttctgaaaggaaaatttcacgcaatttttgttggtttcactttttccaaatcctgatcagaaaatagtcagggtaatataaattcgtgacaattaaattaatttacaaaataaaaaatgttaaggaaatttttattaaaaaaaactgtgaganttt

SEQ ID NO: 36135 - DNA, 977 bp, Heterodera glycines
  unsure (1)..(977): unsure at all n locations
cctaacattttcggcggcttttagaacataaaaatntggagccttaataaatctaaaaaattattataatcagattatttatatcattttttaccctttttagcaatgcttagtgttgtgaagggtttaagactgcttgacaaagtccgtacatggtatgcaccttaagcaataacaaatgatcatttagttaatgctgctgttgctgttatctcacatgagtgctgtagaaacaatgataaaattatgaaaaatttcattagaattattctagaaaaataaataattgttttgaattttcttaaaattttattttggccaacaaattgactagcattttattcattaataaagggaagtgaaatctctcagttacacgtcagaaatcgtttgaaaaaattggatgcgacattgattaattttgcattttaaaaagtaaaaagatgaaaagaaattataaaaaatgacttctataagatatgcaataattagggctgggaatttaagtcaaatgacttttttttgctgattcaaaatagtcttaaaatgacttaaaagggttctacactttgtttgaacatgtttttttgtgacttttttatactttttgggatttttatgacttacttgcacttttcgtggcttttttaatgttcttaagtagggttgctccccacccctcggggggcaaaatgtcgggggcaggggacctcggggggcgacatgtcgagggtcggagcggggaggtgctcaattgtcgggggtcgggggccccgatcggggaatgaccaaattttattttaaccccaaaaaaaccaatttttctttttaaatgctcgtcaatcttcttttttcactttaatcatcttatttcatagcgccagtaagagtgagtccaagctggcgcctttaaacctgggcttccatttgttctaatgtataagaatgttctgattttggggtagcgactaaaatta

SEQ ID NO: 36136 - DNA, 798 bp, Heterodera glycines
caagcgtcaaatgttcaattgggtaaaaaagccaatgatgtaatcattttggcattcatttgaaagaccgggtcagaattgtagcgctaaaattggaatggaaattaaaagtgacagcgttgaaggaaaaacctcaacaaggtgttcagtagcaagacgctttttgaaattacggacaagatgaaaaaagcatcctgacagttcacaattcgaaaacacttcttttacagcaccgatgattcctgcttcaaagtcaaccgaaattgagtcaggacgaaaattaggccagaaagacacaaccatccgaaaaaagcgggcataggtctcctttgtttttgtagtaagtagcccgtacaaaactgggaaaacccattgttcacgcctaaaatcattaaaaaataattgtttacaaattaaaatgtacctcgcaagaactgcgaacacctgttaaaaaagcggtggtgcgattgtaaaagtgccatcaacgtacacagttcgcatttgctgtgcccaactgccatttgactcttttccgaaaattagaattctaaatttttaaattataaacggataatgggttttgtttccttaccgttcagttgtctgtcgtcctgcttctctgtaaatccctgaatcagcgagcaaaaaatgttcctcccgctcatcacttcttttgtagcgcgtgtagtcgtcacgaatctgtaaagcggcaacattgtctggaatgaccggtggagtgtgttccttgtgccggacacgcttcacaacctaaaacattgattgaaaatgacaaaattc

SEQ ID NO: 36137 - DNA, 688 bp, Heterodera glycines
tgggttgagtcccagtgattgaaatgttggtgggtcgtgtcccagtgattggaatgctggtgggttgagtcccagtgattgaaatgctggtgggttgagtcccagtgattgaaatgatgttgggttgagtcccagtgattggaatgctggtgggttgagtcccagtgattgaaatgctggtgggttgagtcccagtgattgaaatgctggtgggttgagtcccagtgattgaaatgctggtgggttgagtcccagtgattgaaatgctggtgggttgagtcccagtgattggaatgctggtgggttgagtcccagtgattgaaatgttggtgggttgagtcccagtgattggaatgctggtgggttgagtcccagtcattgaaatgttggtgggttgagtcccagtgattgaaatgctggtgggttgagtcccagtgattgaaatgatgttgggttgagtcccagtgattggaatgctggtgggttgagtcccagtgattggaatgctggtgggttgagtcccagtgattggaatgctggtgggttgagtcccagtgattgtaatgctggtgggttgagtcccagtgattgaaatgttggtgggttgagtcccagcgattgaaatgctggtgggttgagtcccagtgattgaaatgctgatgggttgagtcccagtgattggaatgct

SEQ ID NO: 36138 - DNA, 947 bp, Heterodera glycines
ttttattgtttccatgcattttctgggaaatcttttcgcgaaaagtgaaaaaatttcaaaacggcagacaacagatgcatttcaaacaattcaacaatataatataaaatttaggcaaaaatttttgttccttcctctttggaaatggtcttaaattttgcttgtaaatattcagataacaagttttttttactgaaaattttttacacactacaggatgaaacgcaataaataatgtttgtagacaaaagaaattggcgaaaaaaattgcctcaacaatcagtggtgaaactgaaagaaaaaaacttccccaaaaaatcggagcttttccgacggcatcagctgcatttccaacagttcaacagtataaataaatattaggcaaatgaaaaatttttttccttcctctttagaaagtgtctaaaaatttttgttgttaatattcagaaaacgtgttttttttagtgacaatttttttcaagagaaggatatgaacaatcacttataaggctcatgcttggagataaaggaatcggaaaaaaaaattatctcaacaatcagtcgtgaaacagttcaataattcggaagcagtgccatattgggaaaagatgcacaagtagagtaggctcgaaataaaggcaactgccgaagattaacaaaaattcaaatttattggccccgttctgctttgacaggccatatctcgccagggagtggcggtagaccctttgttgatacatttgaaaatgtagagcgcgtctagctcattcgaataacatcaaactggtttgtttttgtcacgaaacaacccgctgatggccacgtcgaagaaaagtcccaaaatttgacatccataaaactccattttttcataggccagcgtgtttaaagcaaacccgaaactgataggaaagttaaattgatcataatagaagtttaatttttat

SEQ ID NO: 36139 - DNA, 470 bp, Heterodera glycines
tccgggcccggcctctcaaaaaccggtcaaaccggaaaaacggtcaaaccggatttttccaaaaatcaccggttccggtttccgggcccggtaaaaaccggtaccgggcccggcccggctcggtctctaatatttatgcgcatattttggtcagttttcgtgcatattttttgcacgggccatgacgttttcgcgtggttgcatataaaagagaattcataactcacatattttttgttatactatttatgtgtttttataaaattttaattattttttccatttgacgcacatccgaccaaactgacaaattactgtagaagatactagccgcaagaaataaaaaaattaaaaagttaagaaatttgtccgaattcgggttcgggattcgaaacatggatgttttgcacaaatccgaccaatttcagtcctaaacaggtactcacgcgaaaacctaccccacgcgaaaa

SEQ ID NO: 36140 - DNA, 1106 bp, Heterodera glycines
gggaaaaataaaaaaataataatttattatattcttaaaaagtaacattgcccaagtgtgcaaatgccctaatgtctagtctccttgactttcccttcttctttcccttggttcaatccctctacagaaattaaattattttgaattttctttttgtatactcgtgggtttcctatagagaaaatatgattactcatagttttttttaaattgatacatattttatcattttttaaatgaaaatccatagtaaattgttgagcctattaatcccaaaaaccaaccttttttgttgaaaatctgttaacaaattgcacccaaatttttaaaatttcccccggcggcgcctatcggcaccgccggaccccttctttcccaaaagttttttgaaaaagcgctccgaaaaaaagtgatgtgaaaatcaaatctgaatttctattaatattcgatgatttaatccaaaaatgattaattgtttgaaataattgaagaaaatttgtttgaaaattttcattaatttaatttattaaataaaaaaccaaataattttgtattattttcacttgatataaattaaaatttgaatttttttttaaatttttaaaatttttttgaatttttaaaatttcccggttggtcccggttcccggtttttcttgcggtcccggtcccgaaaaaaaatcgaggtcccggtcccggtcccggcttctcaggtcccggcaagtcccggtcccggttttggcaaaaattcccggtcccgtggcactctactttttatttattagcatttcttagtataaataaaatactgatattatttttctttaaacctaccgtactttattgctaccgtatccccccttttctgttgattctttggcaaaatgttttttacaattcatcatcatcatcatccatcaccttctcaattgacaccacatctgctgtcattttcttttcattctgccgattgtcgtcgtccattcctttccccgtctgtccgtcccattttttgtcccatcgttttttgttgtttatccgatcggtcggtctttgccctctcaattaggaaatctgaccatttccattggctttttgtttatttc

SEQ ID NO: 36141 - DNA, 1061 bp, Heterodera glycines
tttttctaaaattttagccaaatattttaataatatttaaaaaattatataaaataattattgtagtttgtttttttatattctttaataaatgttttgagatatcttctattcataattaattttttttgcattttaaaaaagaaatccaatgaatacaaatacaaaataaataaataaactgaaaattaaaatatttatgcgttaaatttatgttcgagaaaacaatttcaatattgcacaaaaacaatttgtcaaatgatcaaaacattattaggcccaggaaatttcaaatttgcgcgtctcgctgcgagaatgaaaactcaattttaattttgggtacaaaaagcgaatctgaattctaaattttttgagatatccttatattcttaatttctttttttacctttaaaaagtaaatttttaaatgccctaacacaattttatagaaggaattaatcaatttaattgctcgttgatctgaatcattataaataatatgcaatttaattcgatttgattttcaaatgacaaataatttgcaataaaaacattgtaaattttcaaattgtgaatcgtttacatgtttttcttcattcctttttagattttccagtctttcttttgctttatcgtcaatatgttgcctttgtctaaatttggttaaattcaaaaaatttatcaactgaaatgtttgtaaaaccatttttaaatttaaaaaaaaattaaaaattaatgtattttattacattttgtaaagaatatattatttaaacgggaaaattaagtgtgaaacattaaaaactttaacaaaattttgataaaataaaaaatcaattttataatcaaattatgggactaaggctgtgcagcagcgaaattcaaattttctagcaaaatactcttgctagttaaaaaacttaattgctaaatgaaatctctaaagatgggttaattaatccatatttgcgtattctgcatatcccatagttgctgcaatatttggggccgaaactgcgacatggagaaatgaggatcgatggtgctatgtccttataaaa

SEQ ID NO: 36142 - DNA, 1487 bp, Heterodera glycines
ctgaaaaatttattatttgaatttacaattattaggaacagaacagaaatgttcatgcgatggatgctaggtcgaaccgcaataagtattaatgttaataaaaataattaaatttaattatattagtatttatatataaactaataaagagtaatacaaattccacatttttattctaaatttttgcataaatttattttcatttcattgtggaagtccctgcaattgtgtgacactatgcaagaataaaatggaatgggttgaaattttgggactaaaaattgcttcatttatggacaacaatgtaaaaaaaggataaacaaaaaatgatgacatggaatttaaaataaaaataataaaataaatttagatttacgtggtgtccaaggttgctaacacgtaaaatttgtatgttgaaattattactatttcacaagttaaaattgctatcgaaaatcattgaatcgtaaaattaaatttaattatttttattgacactgagattttttgcggttcatctcagcacgtgttcatgttattgttaaatacgacctcaatgttatactttttgccaaatttttttccattttttatatcatattcctgatgtcgtaaatatgatatgacgacagaaaacatttataatttgaaacagaaatttcaaaatatgacaccagatcagtgataagacggaaattgaaagaagccccagggaaactctctcattttgggctttttaaaaatttaccaccttttttgctttgattttcttcggtttgaatgttgtgctgtcttcccgttggcttcccaacaatgtctccagtgcatattgaaaatccttctcgccaggtccttccgtttcgtctttaagccgtgccaacaaatcattgccatacattgtatggtacacactccaaatttctcggttatttttgcgtgttgtcaaaatctatgtaattaatttaaaagcatgatcgggagggatggggaattcgtccagacatttgcgccccgccggacatttgcgcctcggacatttgtgcctatgtccaaaatcggactcaaacatacattttttcaatcttagagatcctaaacagcttaaatttaataaaactcgttctttcggtttattaggaacataattatgatttttgaaagattatagttattctttcaaaaattatacaataactttaaatcgtttatttaaagctgtttaggctgggaaagggtcattttggcgccgacgttttggcgccagggtcgttttggcgcccacgttttggcgccaagccatataccttaaaagggtaaatttttgatcaaaaattttacagattaaaattttaccttccaatgggcttactctaattttcaaaaaaaaaaaattcccaaccccataaatttttttttggtaaaatcctaattttgattttttatataaattatatatatcattcgattcgtctcgatgagacaaatcg

SEQ ID NO: 36143 - DNA, 670 bp, Heterodera glycines
aacaaattctaaaaaaaggtaaacagtaagcttcattagcaaagggacagtgaaattttcataatatttaagctaacaatttattctaaagggaaatctcatttttcgcagttgctgggggggggggggaggggagcacaatgaatgggaaatggaaataaatggaaaaaaagaatggggtaggggggggggggacagatggatcacccgccgatgacaaaatctttgtttatgtgttgatgatggatgttacaaatagggttcgagcctggcccccgtcacccccgcctccccgggcgcgggacatggtttttggcctcaccccgcccccgtgactcagacccccgcccccgcgaccttcaccctcgcggggctgaaaatacacccctaagaatggcatattcgtgggataaaagacaaaaaacttattcaattttgaattttttaaccaccttgaaccagaaatccaagcccaggcatgaaaaaatgtatttttttaatcaatttttcatcatttatggtgaaaaactgataaattttatatggaaatcggatattccgacagcaatgagcaaaattaaaaaacaagcagcttttttgaacatggatgacattctcgacactaaaattgccggtactaattataacgattggagtgtgcaaatcgaat

SEQ ID NO: 36144 - DNA, 1251 bp, Heterodera glycines
  unsure (1)..(1251): unsure at all n locations
cctttcccaaattaaatcatcaattttgtgctacgaatcctattcttaccagtgcaaatttttatcggcggtgccagtaccggtctactcaaaacttactagttttagcgaaaaatcaacctgaaaaacgaaattctcgcttttcattttttacctctttctttacacaattatatgacttatagaacttttcaatatttaaaagcgacaaatttatgtattacaaatttcagaattttaaacaaatacccaatcaatgaccaaatttatgaaaataaatagggggagttctaaaaagtttttttttcggaatataaatagcaaatgccatcgctaaagatcgtcgtaacatctgagttccttgcttatcataattttttatactaancctttaataagtttttaaacaaaatttaaatgtacgtttaagcgatttttatgcgccaaattacacattgaattaattattgaacaaatttatttttacaatttattgtattaacaatttacttcattaataatttcttctatatttggaactgtcaattatttatgagtttatttatatttcttaaatcatatttaatgaaaatttaaaaatacattttgttttattttggttaaattttcaatcggtgtctccatgcatataggtataatctacatcataagatcaaatagcaaagaattaaaaagttaaaaaaaacacttgaaagagtatttcggtggtagaatagatctaatctgccgattagtcaaaatgttttattattttgttttactactcttacttttaatataattatgatatgcttaaataatgattatattttaaaaattcgataattatcctcgatattttgaaaataaataatgtgataattaaatatgaaacgaaatgctgggatgttctagttaatttattaaatattagtacaaatgaaacaatcaataatccaaaattaatatattcaaaaaataatgaataaaatattaaaattaattggtttttatttatttaaaacaaagagaaaattgagctaatactgaaatagttaaacatttaagtgcttatgattaataattcgttctttttttattttatacaaaaaaatgtataacatttataccttataaatataagaatacaacagaaaaaaaaaaatctaattattaatatgaaaaacttcaaataattgatattaaaataaatatacttacaaataaattttaaaggtcgacaaagcggca

SEQ ID NO: 36145 - DNA, 781 bp, Heterodera glycines
cataatgtccgcacattttcgagctcaaattaaattggcatttgaagaggccgaagaaatccttgatgatcccaaatatttcccagttcctgtacaaccccatggacaatccgaatccgcttatgttagaattgtaaaggcactaattaaaaccctggatgaaagggcaaatgatacgaattctattttgtccgaattgaatggcccttccgacagatggatgtcccttcgttccagtatgacagccgcagagagagctgtagatacccctctttatgatacctttgtggcagaaaccccatatctaaagtctatctcatcccttcgcaaatatgcccgaacccttcgtgaccaaaggagcagtttggaagccgttctactccgtcctaccaatcaacccaatcctaactccaatccgtcctcttccctaatccatttaccaaaaacggaccttcccgtattttcgggtgattgtactacctatacatcattttggaacacgttcaaagcaggcgtacatgaccttaacatccctgaatccctgaagtttacttatttgaaacagtgtttgtcaggccctcccttaactctaattaattccctccctgtcactgacgattcatatgttgccgcagttggcctattatcccagcattatgataaccccgaagaagttgcccgtgctttacacaattcgttgcgaaaacttccacgggtccatggtggcgaatcattttgtgatgacttacgttcactcattgaccaattagaagactctaga

SEQ ID NO: 36146 - DNA, 877 bp, Heterodera glycines
ttaaaaaaaattaaatagtgcctttcattttacatgtaattaatcctttatttatttctttttatttccaggtgcttcctgccgatttgatgcccattccgatggaatttgcattacccgaccacacccgtttgtccttggttgatttccctctacatctgccgcttgaactgcttcaaattgatgccatccttcaaatactcactgcaataatgcttgaatacaaagtaaattagtttgaaaaatattcaaaaattcttttgtttttgtgtaaaattttaatttttaaattattatcataaattattcattgcctttttaagtctaacaaaaaatttcaattctaatattatttacccttcaaatatgtgggtaccaaacagggacggcgttccgaggcccctaatatttcggaaattgaatgcttgaacccaaaatatggaaaagccggttttcgccaaaaaaattactaccttattttgttaagaaatgtgctaattttcaataaatttgcccatttttcatgaaactttttacaaattctttataaaatacgcaaattccaggtcattttgcagtcgcgcaactgtaacgcagtcagtgtttgcgtgatggcattggtggcacttttatatccgttagagtatgtacaataaaaattagggttgcgtccccgaccccgaaccccgacatttttggccattttcggggaaaaccccgaaccccaacccccgacgcttccaacccccgacaaccccgacccttaaaccccgatcggggtcggggttaaatatacacccctaagaatggcatttttgtgggggaaaaagcaaaacatttatacaaaaatgatttttttaacatcttgacaaatttt

SEQ ID NO: 36147 - DNA, 915 bp, Heterodera glycines
cgaaggaatggatttaattaaattctctccttcggggatttttttccattaggtcgtccgttagcgttcgattgctctagtcaatttttcaaaatttttgttgaaatatttgtcgtgctctgaagggcgtgggagggggggggggggcgaaggcccaccacgaggccgcgaagaggccgagtgagtaccttcggcgcaggaaaattattaaattttaaaattttttaattgcctttttaaatatgccaaaaagtgtaggcttaacttttttagtgaaaattcgatcactcatattttttgctaactgagcagaagcgtaccaaactttgcagggatactccccggtaaaggactaacttacactgaaatgagcgccgagctagctggctcaaaaaaatttttcgaaaatctgagtctttcgtttttatttatttgcaaaattaattcataaatattttttcagaaagggttctgaaacgcaccaaattttatttacatgttagtttaggcactctgatgctttttctatcaataatggaggtgaataaaattttaattgctttttaactttgggaaaaagtttaggcttaactttttagtgaaagtttgatcactcatatttttttagtctaatctactcaaaacggttcagaattcaataaaaataacattcacggtgcgaaaaatggggtttgacaagtttattggggaaaaaaagactttacaaaataatacccctgggagaagggagtgggaaacatgatttcaaaattttcaattttttctagtctaatctactcaaaccggttcagaattcaataaaaataacattcacggtgcgaaaaatggggtttgaaaagtttatttgaaaaaaagactttacaaaataatacccctgggagaagggagtggaaa

SEQ ID NO: 36148 - DNA, 1214 bp, Heterodera glycines
  unsure (1)..(1214): unsure at all n locations
ttgaacaagttgtaatcattgccctttgtcagttccatcgaattttccaatatttcctaaatcaaatcatattgtcggacactttcaaatgtcgccgataatttgagagggcagtaaaaagccaaaaaatgaaagcagagaaaagcaaagtaaaaatgacaattagaagaaacattgtgaataggtatttgaataaatattagcaattaaataatatattttctaaattttagaaatattttattgagtgaatgcaaatcccgtgaacgatttacatttcagccatttttggccaatgatttcaaaaagcgcttttttgttgacctttgcacaaattcacgtgctttgccgttgaaaatgtccgtgtactgcttcaacttagcaaagtgaaaagttggcgtcagaatgcgtcgctgtcttttccattttgcatcggtgctcagcagcaaaccctcgcccagccactgcttgaacaagttgtaatcattgccctttgtcagttccatcgaattttccaatatttcctaaatcaaatcatattcnccttgaaatttcatttaattttactntggcactctctgaatccaatgcncaaatgtgnagctcagaggcaaaccaccagcacatcgcattgtgcncatcgcgaagtgcccgatttgcatggccaattagaaactccggcacatctgctcattttgaagattaattaaaaatgaaatattgtcatataaatgtgagaccatatctagattttgggaacaggtggagatgaccgatcagcggaaccctggcaatttgccaaaaattgtcggacactttcaaaagtcgccgataatttgaaaaggcagtaaaaagccaaaaaatgaaagcagagaaaagcaaagtaaaaagggcaatcagcagaaacattatgaatatttgaataatattaacaattaaataatatttttatctaaattttttaaatatttcatttaattgattattttggaataaaacggaaaggtaaaggaataaaaataatcgaatcgaaacaattcgcccgagtccggtcgatcattcatcatttgcacctgaactgcaattatctatctcttttattatttgttttggtatttagcaattttataatttattttggtgtttttttattaattacaaaaacgggacgaaaatggagaacaaaaaggatagagaaaaaaacggacgaaaaa

SEQ ID NO: 36149 - DNA, 719 bp, Heterodera glycines
attagaacattttagaaaattaaatttttttttgcatatattgctaaagcattgactatttataaaactcatcaaattcattatagactcaaaagctctgccggatttaatctattttattttattttcatcggcattttgcacccatttaattttaatttttatccgagaaaaatgtggatgagatgccttgtggatgagttgccttgtggacgacttgactgtgggatgacctgaccccaatttttttgtgccttatttctttttataatttcatgccttttatttaatgtttttcacctttttcgtgcctatttttagtgaaaaatttcgtgccaaaaattcgggctcactgcattaattagttttagagtagggcgctttttgtttaatcaattattcattaaccagctgttgttagccacagtgagttgtgcttacttcctcggcataatcaattaattttttatttttttggtgcccaattaagcattttattttactgcacacggctgtcattaaaaggagtaaaaataatttatactccaattattacaatggaaaaagaaataaattaatggggaaaaatttgggagtgtacaaaatttgaagaaaaaaatctcaaggattatttaatttttttgatctttttttcagttttgtatcgaaaaaatcaattgaacggcccaatgtccagtctctagcaagatttaactttt

SEQ ID NO: 36150 - DNA, 1055 bp, Heterodera glycines
gagagagagagagagagagagctgtttgatattccccatcctttccgaggcaatccctccattgttctcttcctccctctccatgtccactctagcgcaccattgtgcggaaagctatcgacggcaatcataggattggattgcactggtcaggggggagggggcggcaagtggggcgcggggggcgacttgccatgtccgccggaagaggcggggccaagccgacggccggcgatttaagagagcccggagactgcgcactttgcatcggaggagtggccaagcaaagaatgcgtaggactgtgtctggcaaaacaattcccaaccaaaagaacactcggcccagcacaaattccatcagaatgtcactgggaaggaacaaatcatttgccccggggcttttgctgataattcttccgctgatcagtttcaacggacaaatcgcgatcgcttcacccattcccaacgccaaagaaagaaacaacgaaatacaagcacaggcatatgatccatcagcagggaagttggcagagtttggagcgagagaaagacgccaaaacgcgatgctttgctgctgtcagatgggcgcaggcgggggacctcaaatgccaccaccgatgggaccacagatgcctcctcaaatgcccttaggaccacaaatgccaccacctatgggacaacaaatgccattgggaccacaattggcaccaccgatgggatcacagatgccacctcaaatgccattaggaccacaaatggctccaccgatgggaccatcgctgggacctcaaatgccaccacctatgggacaacaaatgccattgggaccacaattggcaccaccgatgggaccacagatgccacctcaaatgccattaggaccacaaatggctccaccgatgggaccacaaatgccaccaccaccaccaggccaagcgaatatgggtaaggaaagcattgtcagtgatgaaaacagctcaaatgttctacgaagaccaatgttgctgctgttggggtggtccgccgggccctcccccgcaaatggcgccgccggg

SEQ ID NO: 36151 - DNA, 1340 bp, Heterodera glycines
caacaaaaatttttagacagtttataaagaggaaggaaaaaaatttttcatttgcctaatatttatttatactgttgaactgttggaaatgcagctgatgccgtcggaaaagctccgattttttggggaagtttttttctttcagtttcaccactgattgttgaggcaattttttcgccaatttcttttgtctacaaacattatttattgcgtttcatcctgtagtgtgtaaaaaattttcagtaaaaaaacttgttatctgaatatttacaagcaaaatttaagaccatttccaaagaggaaggaacaaaaatttttgcctaaattttatattatattgttgaattgtttgaaatgcatctgttgtctgccgttttgaaatttttcaacttttcgcgaaaagatttcccagaaaatgcatgggacaaataaaaattaaacttaagaccatttccaaagaggaaggaacaaaaatttttgcctaaattttatattatattgttgaattgtttgaaatgcatctgttgtctgccgttttgaaatttttcaacttttcgcgaaaagatttcccagaaaatgcatgggacaaataaaaattaaacttaagaccatttccaaagaggaaggaacaaaaatttttgcctaaattttatattatattgttgaattgtttgaaatgcatctgttgtctgccgttttgaaatttttcaacttttcgcgaaaagatttcccagaaaatgcatgggacaaataaaaattaaacttctattatgatcaatttaaatttcctatcagtttcgggtttgctttaaacacgctggcctatgaaaaaatggagttttatggatgtcaaattttgggacttttcttcgacgtggccatcagcgggttgtttcgtgacaaaaacaaaccagtttgatgttattcgaatgagctagacgcgctctacattgtcaaatgtatcaacaaagggtctaccgccactccctggcgagatatggcctgtcaaagcagaacggggccaataaatttgaatttttgttaatcttcggcagttgcctttatttcgagcctactctacttgtgcatcttttcccaatatggcactgcttccgaattattgaactgtttcacgactgattgttgagataatttttttttccgattcctttatctccaagcatgagccttataagtgattgttcatatccttctcttgaaaaaaattgtcactaaaaaaaacacgttttctgaatattaacaacaaaaatttttagacagtttctaaagaggaaggaaaaaaatttttcatttgcctaatatttatttatactgttgaa

SEQ ID NO: 36152 - DNA, 884 bp, Heterodera glycines
tagaatttttcttttaaacatttttcggcggggggaaacaagctctcccattttcccaaccacgaaaaatttttctaacggagtttggcgccaactcctaattactcccataggcgtcattagtttcttttcctaattcggattgctgttttcatttttcagcggatgatgttgacgatttggcaccggtgccgccgaatgcgcgcagcacactgtacgagccgaagatgtccagcgtggacttggacctgtaccagccgagccgggcaaaggacgtgcagacgctgtaccgggagtacgcactgttgcgcgagacggagcccgactgtcccagcctggacatcagcgacatcacactgtgtgtacactgtacagtacacccaaggggggtgaggtgcacaattcatcccctccctcccctcccgccgtttcccccgtaaaatcttaagaaaattttcaaaaatttgggggaaaaattagaaaaattttcagctattttttgggcaaacgttagaaaaagttatagaaagtctttaaattttctcatataaaattttataattttttaaaaatttaaaaattggggagggaacgagctgctcccagtgggacctgaggctccaagaaagccggaaccaaatttcacctaacaataagcgcttggttgatctcgcaaaaattcgactcatcgaaaaatttaaatttgcctaatcatcactctgatttgctgaaataaaatgttttttaaatttactaaaaatttcatcaattttctcggacaatgcattcaaagccaccaaattgtcagatggaacttcgtgctgaaaataataaaaccaaacattttttcagtgaagaagtgtacgaacggggcgggcattctc

SEQ ID NO: 36153 - DNA, 881 bp, Heterodera glycines
aaaaaaaaaataataggttgggactcccataataattagaatttttaaaatgtgtctgataaaagcaaaactgttgtgaaaaattgttatatcccctctcagagaagagatagaaaaaaaataaaaataggtttagagagcccgtgaacagctgcatcggatgcaagtgcccccgttgctgtacccctaacatttggtgagcaatgagggaaaattgcttaaaaaagaaaccaaacaaactcatcaattgttagctcccgttgacaaaccgaagggtacattggggcaatggatgttgggctaccgtatcagttattaaaatttttgtttttcaaaaaggatactaaaactgggataaccccattcagagactagtcaaaaaaaataataataggcttggactactatactaattagaaattttagaatgtgtctgttaaatgcaaaactgttgtgaaaaattgttataactcctttcagagaagagatagaaaaaaaaaataaaaataggtttagagagcccgtgaacagctgcatcggatgcaagtgccgccgttgctgtacgcctaacagttggtgagcaatgacggaaaattgcttaaaaaagaaaccaaacaaactcatcaattgttagctcccgttgacaaaccgaagggtacattggggcaatggatgttgggctaccgtatcagttattaaaatttttgtttttcaaaaaggatactaaaactgggataaccccattcagagactagtcaaaaaaaaaaataataggcttggactaccatactaattataaattttacaatgtgtctgttaaatgcaaaaactgttgttgaaaaattgttataagtcctttcagagaagagatagaaaaaaaa

SEQ ID NO: 36154 - DNA, 551 bp, Heterodera glycines
aaaagttatccaatttaaaataatccaggtgccaaaatttcattaaatatttttgctgctgcgtataaaaaaaaaattaaaaaacaaatttatggtggacaaaagcattgcagcaaacaaaatttttttgttttttttgaaaaacgtgttttcaaagggatgagtttttgatgcaatacttttgtcttagactgtaccatcaaaaaaataataatgagaaattggaaaaccgaaaaagatatttagagcatgggttgaaattgaaaatcattcttatcatgttgagcatgtgccaaccttcgtcttttttgaccatctcccaaaactgatcaaaaaaaaaattggtcaaacttcgggaaaataattttcatttttaaaattcataaaaaattttaaaataaagttttaaccaataaactttttttttaatatcaaaagtatgataaaacaaaaatgatatggtagtatatatggaagataaaaacctataagcaattcaccatcattagtgaaggggatctcgaaccccatgacagagttatcatcaaaat

SEQ ID NO: 36155 - DNA, 829 bp, Heterodera glycines
  unsure (1)..(829): unsure at all n locations
ttggaacgccgcgcacgcgttgaattggcattgttttttgggtttgtctgttggtgacgagcggaagaatgctttcgtttgctgtccatgccaaattcgaattgcgaatgagtcggcgtctgctgagaatgaagtttagtttttataagattgcacaataattttgagaattgccaaaaaagaattttaaattaaattagaattttggtccaataattgtaaatcgaaaaaactttttctctaaaactaaaagtccgttccattcgatttccaaacgcacctccttctcctcctccttctcaacctcttccttctccttttcttcccgctgttcttcgccttcgttctgctgaatgccctcgtcgaatgctttgcccaaattcgccacaagtgtcacttgttgtgagattttctcgtccgtctctttctttctgtccaataattcaatgcatttgttccactcagaaggctcttcggtgttctaaaattaatattcataaaaaccaaaatttattttagttaaaatgccaattagaaaatagttaagatggagggtcccgtttttcaaaaaaaaaattgcaactttttttacagttttcagtcagagaatccgaaactgacaccccattccgaagcccgaactcgaacagaaagtcacaaattattttcaacaaattcgcatttcaacgaaaccggcctaaatgcacgaaagtaggcaaccctggtgtcataacaactcgtacaatttctaaggttaggcctaggttttgggcttangcttgctttcgtgtttaggctttattttgaaatatgagttgccttttgtacg

SEQ ID NO: 36156 - DNA, 945 bp, Heterodera glycines
atagaaaaagcatcagagtgcctaaactaacatgtaaatatatttggtgcgtttcagagcattttctgaaaaaatatttatgaaataaaaaaatcgattttttcaagtgtccgtttggggtactcaaacaattatggggagcaaaaatccaacgcagaattaaagtacagactatagggaagctattcccgaaggattcggtctccccataaatctgggcgcatcggttcggggggactgccccgaaaacaaaaaaatcgattttttcaagtgtccgtttggggtactcaaacaattatggggagcaaaaatccaacgcagaattaaagtacaggctatagggaagctattcccgaaggattcggtctccccataaatctgggcgcatcggttcggggggactgccccgaaaacaaaaaaatcgattttttcaagtgtccgtttggggtactcaaacatttatggggagcaaaaatccaacgcagaattaaagtacagactatagggaagctattcccgaaggattcggtctccccataaatctgggcgcatcggttcagggggactgccccgaaaacccaaaaaaaaattttttggaataaaaattatttaaatgaactgactagataatatttaaaataggttatttctcttcctttcagtatccctgcaaagtttgctgcgcttctgatcagtttctgaaaaaaaagttaagcctaaactttttggcctgccgaaaaaggaaaaaaaaatttttaaaaattttattcatctccctttttgatagaaaaaacatcagagtgcctaaactaacatgtaaataaaatttggtgcgcttctgatcagtttctgaaaaaaagttaagcctaaactttttgggctgtttaaaaaggaattaaaaattttttaaaaattattcatctccctttttgatagaaaagcatc

SEQ ID NO: 36157 - DNA, 964 bp, Heterodera glycines
attaaatgggtaagtttctaaaaattttgagcaattatttcagaaatcatttgtaaaatggatccaaaaataatcaaaaatgttattttagcccccaaaaaataaaccacccccaaaaaagtgccaccaacatgggagttgatcaacagggtcttcagcaagttcatctgatagtggcgaatgtaatggtcgtacagcactcgccggtggtccctcagttggacttgttcgggtgaactgaagtaaccatctgaagattgaggattttgaaaacaaaaattgtttatagaattttaaattagataaataaatgtttttggaattatttttccttccaaatttttttttctaaatttatacgtaaatttcctcccacaatgtgaaaccattgaaccttagctttttctctagggcccaattttcaaaactcttccatctttgttcgccttacttcgaatgcgcgcaaaaaatttggccaacggattgccaaagcaaaaatttgggtcgctggtgaatgcgcaactgagcaactcgtcgagcggggcgccacaattgcgacgagcgacagaaactgacgatgatttaatggcggacgaaatggaagggaggggaagaaaatgctgaaaaggaagcaaaaatgggaaaatttaacgaaaaaaggagggaaaatttaagggtccaaggatgttttccggtatctgtttgcatgttccgcagctaaaattttgaaattgctaacttcgagcacaattccgaatgtttttgatgggttttgccacaatttaaaaaggaaaatttggtgaaattcgtcccggattttttgaaattccgtaagcaaacctcgaggtggtcgcgcgacgcctgcgaaagagaccaaaacgattttggacagagcacagaacgaaagattttctcctaaatggaggaaatatcttaattgcatataaaatttaagagcaatgga

SEQ ID NO: 36158 - DNA, 830 bp, Heterodera glycines
  unsure (1)..(830): unsure at all n locations
tttgttttcgggggcagtccccccgaacccgatgcgcncagatttatggggagaccgaatcctttcgggaatagcttccctatagcctgtactataattctgcgttggatttttgctccccataattgtttgagtaccccaaacggacacttgaaaaaatcgatttttttgttttcggggcagtccccccgaaccgatgcgcccagatttatggggagaccgaatccttccggaatagtttccctatagcctgtactttaattctgcgttggattgttgctccccataattgtttgagtaccccaaacggacacttgaaaaaatcgatttttttgttttcggggcagtccccccgaaccgatgcgcccagatttatggggagaccgaatccttccggaatagcttccctatagcctgtactttaattctgcgttggatttttgctccccataattgtttgagtaccccaaacggacacttgaaaaaatcgatttttttgttttcggggcagtccccccgaaccgatgcgcccagatttatggggagaccgaatccttcgggaatagcttccctatagcctgtactttaattctgcgttggatttttgctccccataattgtttgagtaccccaaacggacacttgaaaaaatcgatttttttgttttcggggcagtccccccgaaccgatgcgcccagatttatggggagaccgaatccttccggaatagcttccctatagcctgtactttaattctgcgttggatttttgctccccataaatgtttgagtaccccaaacggacacttgaaaaaatcgatttttttgttt

SEQ ID NO: 36159 - DNA, 707 bp, Heterodera glycines
gtccattttatcttcatccaaaacccaacggcctacgccgcccccgtcaattcccacacgctagtttatatatatatagaataaaaggggaactcactaaaaaaattaaggctcccggccgaaggccgggagcgccctgaaagtagtggaagggtcttacaactttttgaggcgcatctgggaaaactataggttttttgctccggtggccaactgagtcccggcggctaatttctcacttttgcttgcgtttgaaggcccgtaactttttttaaaggacagggagcggaaaattcttgctggtaggattttaagttgaagtgttttctaattttcaaaaaaaattccaggcctctacctatacttggaagggctgcagaaattggcaacttttcagtaccaactttttccagttcagtccccgttgaataactcattaggctttgacctgagcgcagggtggccagcagacttattgtagagttttggaacctcgattttctgaaatttaaaaatttcgaaaattttcaaaatttttcgagctaggtctacaaaacggttttccgggtttttggattttaggattttttaacgatttttcccagaaaaacgaagcccccttccaaacataatttttcaagctttttcgctggaatttttttcgaaaaatttcaattttttccccgaaataaaaaaaaattttggcc

SEQ ID NO: 36160 - DNA, 609 bp, Heterodera glycines
cgttaattttatattttatattttcttttttcattaaaaatatttatttaccataccttcaacaggactctcgtgctgttagaccgaaacggaaaaatttgtaatttgagttttgtccaaaattttgaatcccggacccgaactcgaacaaaattcgaaattttaaataccaagttatccttacatgaaaaatttatttaaaactctcgttacttgatggaaaatcatagacaaaatcaaagattttccgaattctggactcagactcgtaatcagggtatttttaacactagaaaccccgaaagaaaaatttttaaatttttttttcgccgggacaccaattctccagtattaccaagcatcatgtgctgaaaatgctaatgcgcagagttaattaatcgattatttttttaaatgttaagtatatatatatataacgcacttattctatgaatttatacaggaattgcggtccattttattggatccaaactcacaaatgccgactgaaacaacggaatccaacgaaaagaaagaaaatcccgaagacatttcgagcactgtgttctttgagcatcagcaggaattattgaacgagacagtttcgag

SEQ ID NO: 36161 - DNA, 439 bp, Heterodera glycines
ttttaattggaaaaccaagttttcaaggagccaaatcttttttctttttcctgaatatgtttgccgtttttcagggcaacggaaaacataaaaaaacaaaaaagttttggaaaaattgaagtataggcctagtagcctgctgggcaatgagccttatttttcaaaataaaagaaaatatttggtgagtgttttgtcgcgacagacaccacattttcaggaaatgaccataccgaacaaaacttagccaaaatgatgtccaatttccccttgaaagagggacgcccccctccaaaaactctcagaaaaattttcgatttagaaaaaaggcgctagttaaaagaaggtacatttttaacattttttcgcactttttttggtctatttttaaaaaaaaaaaatttcgcattaaaagtcctctatctgagtatccgatggtta

SEQ ID NO: 36162 - DNA, 1436 bp, Heterodera glycines
  unsure (1)..(1436): unsure at all n locations
aaatccgattccgattaaatcgccgattccgattatggccaaaaatccgattaattgcgattccgattacgattccgatttttttttaataattttttcccaaaaattttattcataatcaaaaccataaattttaagattgtgatgcaaaaataaaagtttgtacacattctcaggcaataaacgttttctcagatctgtcacaatcaacccagcggtggagaattttcccagatatttgacatttttgctaaataacaaaaaacttgattatatcggggagaattaatccggcactgctttgtgagaaagatttaatttcagtcattatgttaaaataagattaaaacattcgtttcagtaaacatttttttcaaaattcattggtattctcactaaaaaaattccttcaaaaggtcaattcttaggggtgtaataatcggatttcaaggcaaaatccgattacgattatccgattccgattatggcccaaaatccgattaattgcgattccgattacgattccgattcggcacatccctggtatgtgccgtcccccccccctttccccgcttttcctccttattcgccctttatattaagttttgcaaagttttggcgttctgattactaaataataaacctatttgcactgagagcccaaaattgggccgctgtgtatattacaaaaagagcactatttagagaagggtcgaaaaaatcaaagtggggttcgagaaccaaacgatggatcctttttaaggaacaaaaatggataggctaaatgccttcgagactgaaccgtcgagtgggtaaaacatataatgttcaacaaaatctaaaacggttcccctcatttggagtttacccatcttttgtctaaaaaattctttcgaatttggcatttacagaccgagagacgtcaaatgatatatcatttatagaattgaatgaggcacacttttattagaatggcagattggatgcttcgaaaataaatttacaaacaataattatgacttctctctttctctatcaccctccgttattcgtgcgcacaatcagctgctcccgtcccttcccaactccgatgtattcgacgggtacgcccagttgattttgtatgaactccaaataggcacggcatttgtccggcaactgttcccactgacgggcactggtcgttggcgactgctccgcctccttctccttctccgcctcctcctgcgtctcctcctccatcttctccgtcgtcgtcaccaccgcctgtttcggtggcttcgaaaataccaagcattccgctcacaatgctcgcctggctgtggcgatggcggtcgagcctccttcggctttttcgaccctgnggtggacagggggaggagggaattacgatgaacataaatgggaaaattacactcatttctcccttctctccc

SEQ ID NO: 36163 - DNA, 989 bp, Heterodera glycines
tttaagccaagttatgaatttatatgtcttacattttttgtttttctaccccttggcggatttaaaaaacgccctggcggatttaagaaacgcccaatgtggcggaatttaagaaacgacctagcaccctcactgcagcgttgaaaaatgtttgttgaataaagcttaaaaaataaagaaaagtcaggagaatttttccattttattatgtttttcaaagctaaagatgaaaaaagtttccagaaatcctggaaattcgatttttcagaaaaaaattcaaggtgcacttcgttggtgctaggtcgtttcgtttcctaaaactgccaagttggtgtttcctaaaaactgtctagttgtaaaaaataaaaaatgtaaaacaaataaattcgtatcttaggtcaatttcaaccaaattaatatttcatggtatcattcaatagctctatgtattttatatattttttctttgattttcttataaaaactttctaagatttttttcgaaaaatttttgtttgtaaattataaaaaattttctcggagtggaaacgatgcgaggggtggggacggcggagggaaacgagctgctcccaaaattcgaagtcctttctggagagagttttcacaaattaaaatagttgaaaaactcgtaatttgttgttttataagagatattttatttatattttatctctttttttgaagaattttaaaaataaaactcttttggggtttggaaccattgaccaaaacaatgttcttatgaaaaaacacatttttatttgtcaattaggaattcaactagtttattgtttcaatttagaattaattaatttcctattaaaatatcaaaaaaaaaatttctcgaaaaattaaaaattccatttatcccccggggggataaatggagacggaggattatttttcaaactccccagaaaggggtggggggtaattggagaccagtgtgattaatggagacagagggg

SEQ ID NO: 36164 - DNA, 1377 bp, Heterodera glycines
tttattaactcaaaaaagatttctgagtcggataatgttcgtgacttgggcattataattgactcgaaacttaatttttcagaacacataagcaaaattgtacgaaacgcatatcttagaagctttcagattttgagagtgttgaaaagcagggaaataaagactctaacagcagcttataaaacttttgtacgacctcaattacaatacgctaccgaagtttggaaccctaatttaaaaaaagatatagacaaaattgagcgggtacaaaaatttttcacaagaaaagtttttcgaaaatgtggatttgtgtacaaaaaatatgtggaaagacttaaaatcgcgggtttacataaattagaagaaagaagaaaaattaatgatttgacaacagcttttaaaattattaaagggttcgccagcctagaggctgagcaaaatttctttttctcagaaaggcccaggaggcctttacttttacgagtaaagcgccacacggccaaaacacaaaataattttttcataggatagtaagaaactggaataaccttccagtggtagcggtgcaaattaataaggcaaaggaattcaggggtttactaaaagcaatgagttctgagtaggaaattttctgtgccacatatacactatattttaatcacctgtgaatttttaacatttgatttatttttattagagttgagcggtaatcggtaattgcaaaaaaaccggtaccggtactgaccggtactgcaaaaaccggtaccggtaccggtaccaactttttcaaccggtaccggtaccggtaccggtaaaaaccggtaattttagaacataaaaatttttggacaaaatttttcaaatacaaaatttttattcagttttcgcgcgagtgcctgttttttagcattagaattgttcagaagtatatgtatattcaggttgaccaagtttttttgatcaaaatataggtggtcaaaagtgttgtcccatttcatttttaaaatattgcttctctggatcagcattaaaaaaatctaaaaaaattcaggtaagcataactttggatgctgatcaaaaaaggtagcaacaccaagttgatcagatcactccttcatggtgatctgatcagcccattttggctgggaacgaggggtaaatttcaaaaaaaatttctagggggttgggaaaatttttctgggaaattctgagtaggcccattttatagagcacaaaattggctaccgaattgcctttggaatagtggggctacaatttaagcccgctgagatacctcaacttttaatttcggtgcctataaaaagtaactgtatttcttaaaaaaaaaatggatttttacactacgtcaaaattgaa

SEQ ID NO: 36165 - DNA, 733 bp, Heterodera glycines
cgatttcaacaatggttcgggaattactatcgaacatttgactccacagattaccaggtttagatttgtgttttgaaacgggaaaatctccaagtgtcatttctccttttgtccttcccgcccgggttcaaattttgaagaattacgaatggaactcaccctctgtacctcccccttttaaggttataacgactgttgacaccaaaaaacctcttttggatttctgtgctggttacaccgacaatttcgttggcctcattgaaattggacgatctgatgacgacacaaacttctttaaactttacgagattggacgtcgaagggacttcgatgaggaagaagaagaccaggatgaacaagtgaggggattaacagtcatttattattactgttaaagtaagtatcttaaaatgaatattaagaatccggaagaagaggaggacttttcactgggaagcagttcgccgagcagtagtagcagcagttccaacaattccgacacagaatctcattatccacatgaaaacggaagtataagagacattgaggagggagcagaagaccaggacggacaggtgggagaaatcttcctatttaaaccttaatattctttagtaagatattttaaaaaacaaaaaaaatcatgttgtgtaaaggtttttttaacttgcagatgaaaaaagcttaatttccacagtaaaaccgatttaaatcggtaagactgccttgaccc

SEQ ID NO: 36166 - DNA, 1088 bp, Heterodera glycines
ttttttctaaatttgaaaaaattttctgattatttaaatgtgccatttgcagtttatttttcattatgtgcattaattttagtatgaattttacaattccaaaaatatttttatcagtagcgaattcacatgttttgttggcttttggactggaattctaatttttcaatttactggagatttttttaggcattggaatttcaattttcttacaaaattttaggtatttaggcaaatttttatgttccaattagcagtgattgtgcattttgaatttttatattctcgtaagaattattttggttttctcacatgaaaaaatttaacaaaatgccataaatttgtggaggtgcctctttggcattttgaaatggcaggtgaaaattttaaaaaaacgaccatttattccaaaaataaaaccaacgaacgtcagtcacaacacttattttatttaatatgtatttatttctgccatttcattttttttctcttttatttttccgattgtaaattaaaaaaaaataaatacaaaagattagctaaaaacccgaaaatggcaaaatatggattaagaactgccaaaagttttcggaaaatcatccaattgacgtcagaacagaatttagaaaaggtcaaattccaagaataattgcgcgaagagaattattcacacgcaaccaattccccgccgccagtttattatcaataaaggataaatcattaaaaatatttgatcagcctttttatcagcagcagcggccacacattccaattattaatcattaattagttaattaattggtttaattaattaattggtcattggtgctgagtgctaagctgttctgctggcgggcccgaaatgatcgatgtgttcttgcagcaggagatgacgacgaggagttttgggcaagccggctgcttataatgcaggagaaaatgcatcagcaggggatgtaaggagaaagaaagattttaacttgtgagggcgatggaaatggaaagtagttattgatggggagagaaaaagtgatgaatagtaatacagtgatcaagtaagaataatgagctgttttaaatggaaaaag

SEQ ID NO: 36167 - DNA, 820 bp, Heterodera glycines
aaagtgttcataaagccttcctgctgctcgtttcccacgtccgccagcaccaaaccgtaggcggacagaacgccgtggtggcgatggaccaaaactcggccaatacctcaaatgcgacttttttttctttcctccgccgttttaagaattttccgatatttgcgggcggatataatgaccaatcaaatttcgcattaaaattatatgcttggcatttaaaaaagcaaaagtacaaattgaaatccagaaattattggtcgcaaaacctggaccgcgaaaatttgattttaactgtgtgtaaatgctgccgaatgccgtcccggcccccccccccccccaaaaaaataaatatataaataaacatggcaaatgctcgactcgtcccttttccacaattgaaaatgctttcccaagtgtgctcccccctcaccaagtgtccttgctattgcgcatgcgtgctgtcctcccgcaccgccgaaacagctcaacaaatgttgcgaagtgtcgaagcctttggccttaaccgaaaatgccattctctcgagcctttggcccgacttcagttagtcttcggatgggtctgctcatcgcctcattggccacttggataaagccaagcgccgcttcggacaccgaaatgcgcggccgtcccttttgtgccaattgcgcgttgatttgttctgtcatttcgccaaatgctttcaccgatccctcccttaaatagccaaatcaaaatttaattaatttcgattgtgccaattaaagaaattgtcaatcgttcacttgttcaagcgttggcactcgtcatttccaaaaatgt

SEQ ID NO: 36168 - DNA, 503 bp, Heterodera glycines
tacattaaccaaagggaaaaaagggaattgacaaattaaagtgcacaaatcaaataaaacaataaagcaacgaatgtgaattatgtaattgataaatatgtgagaatatcatttatccggtaaaatccaaaatatttggtgtagctatatgcttacattaacgaataattccttatttgtcataaatagacacagctaatttgccaaaaatttcatcatcaaatgaggcaaggcaattaaacatgtaattatacaatttggcatatttgcatacacaacaacaaacatatgcatgtgtacgtatagcactttttcatcatgctcttcttttatggaagtaaaaatagggagggtggggggaagggatgataaaaaattgtatgtgtggaaaaaagaatggcaaagaaagtgctgaagggggcgggggatttttccgctgctgccactgtcccccgccgttgttgacaacaaaaattgccaaaacacgcgccaccaccacagca

SEQ ID NO: 36169 - DNA, 569 bp, Heterodera glycines
cgtaccattggttccgagacaatttccctaagattttatggccaacatccaacaagtactggaaaagatgagaaaattttataatattgaagaaaatttcactattttgtgccaaaagaaattagcgatgtgcaaatcttccgcagaaaaaagggcgctacaaaatgttttcagctgatttttcactttctgaagattttgccccctggactgcatccactgcagcaccgaaacatcccttcacgagtttggtggaccgtctccgacgacaagccgatcaatacgtcgggttgccatcgtggtaaggaaaagccgacgggaaaaggacgaaaagcacattttccattccacaaattgaggtgccaatgtcacccggttaaaccgcaatgccctccgggcccaccgggactgccgggagagccaggccaagacggacagccgggccaaattggccctccgggggaggacaacacgcaaatgcacagctcccaacaacgcccggggacaacggaaacggcgagcacgaagggcccagcaggaacgccagaggacgcagaaaacaaataaaa

SEQ ID NO: 36170 - DNA, 439 bp, Heterodera glycines
acaattatttcagttggccccgagaaatatatttttctttatagaaaccgggaataattttaaacgattgcgggaccaacaattgacgattttctgtacacattttcggcatttttttttttgcagggccaccgaacggttgacagtcaaatttcacttggacgaggaggtgacgacgacggatggacatcgacggaagcgaaaatacgcggaagccacgggtttatttatttttttaaatttttgctaaaaacatttattttgcaattcttatatttcttttatacactaattgaaaaaaatatatattgttatgttggtttgaacccggaccacccaaaaaatgcaaatttaacaaatctatttgtgagcggcgggtgtcgactgaccgccaaccaactgggcgccagctcgatttttggagcataactattttcat

SEQ ID NO: 36171 - DNA, 827 bp, Heterodera glycines
  unsure (1)..(827): unsure at all n locations
ggcattgccttttccgaagggattagccgttcatttcattgccccttgggcgcatcattcgcggcacaaaacctcctcccctcgcgcgggttgcactccctccacgaaaaacggacgaagaagccgagggcggcgacggggtgatggcgaaagttgctgaaattaacaaattatgacggattgttaaactcctttgaagttaaaattataccagccccggccgatgtgtctccaccgttctgtcgtcgctctgttccgttaacttaaaatatcaaattttcatttgaaataatttaagatagataggttttttagaaatcatcgatttacatgacatgaaccgtggaattagtcatcattaatcccctcccgttgaccccttcgcattcgttcgtaaatggcaggccccacccccttaacgtatgatgccattgaccgttcttcgctcaccccatggcatcttcgcgcccatttgtcggtaattttgtcgtccatccgtccgacttttcgtatttgcctcatcaaattcggtctcccaacggcgctcctcctccgcccaccgctgcattttctcacttttggactttgatttctcttaaatttaaggcgtaaaaaatgataaaaattaatgactgacctctgttgtcacttaagtcaacgtcggctaattctgcgtcaacgtcgaaatcgcgattctaagggaaagcaatttttagaaaaagggatttatgctcagattttataatcaatttgtatgttttgaacacaaattanaaaaatcattaattaagcagataccttttttggcggtgcacccaaactcagcc

SEQ ID NO: 36172 - DNA, 506 bp, Heterodera glycines
tctgaatatcgatacccaaaaattaacattttgaattttgtttgatttttgtataatgtaattttgtgcctatactgaaaaacaatttatcagtttgtttcgtcgttaaagcttcaactactgacttatactctgtgtactccattttgttaattgaaattgcttatttattccaccacaagttttcctcccggcctcgcatcatccgccgatcgtatgtttcccaattgagagaaatgtccattcattgaattatgcattttattcattagctattttggtgttgaattcctgggaaagcttcagaccaagaagttcatcgagttctctttttggagagttaggattgcgggtgaaatccaatagtcaatctttaaaacgctaatggaaaaaatagaagtcgtacaagtgattcgatcgatattttccaataaaattcgttaaaaaatcgataccgaaacataatgaacaacgtgaaatttctttatctatttttcgataagatc

SEQ ID NO: 36173 - DNA, 750 bp, Heterodera glycines
gccgacactaccatgcccaccacatctttcgggaaaatcgataactaaattggcaaatgtccaattggcgcattacccccccccccatcctttcggaaaaaaccgatttttgagtttggcaaatgtccaatgtttacccccattttggcgcacgccttctccccgggtcaatgcgtccccggttctccccgggtcaatgcgtccccggttacgggaaccgatacgccccgggcgcgcacgcccgcccaagcatacgcgtcactgttagcagcgtgcgcgtcgatgggacataccccccccctcacccacatacacaccggcgaccgtcagtccgcccagaaattacttaagggtttgtatgaatcgagaaagctacacttagaatctcgcaaaattcccacaaaaatttcagagatggaaaaaaacgttcagtctgttgatgggagttttattgagcttcacgagtaataaagaataaaaactgacaactggtgaccaacaaattaattttatataggatcaaattgtcagatgaatggaagagataaagaaaaatggttaaagaggcagataggtaacttagctactgtaataaaattcctaaatatgcaaaaatattaacaatttattgcctttcagggaaccaggaataaatttattatatgaaaattattttagattcaagcagccaaaatttcggatgctatattataaaaacttctgacaaatataaaaacattttccaattca

SEQ ID NO: 36174 - DNA, 792 bp, Heterodera glycines
aaaaatttggtgtttcgggcagttagccccaattgacaacaacaattacaattaaatattgtaattaccaattgacgtggctgcaattgcaccgacagcagtgccttagagaaaaggaaaacaaaaattattattatcaaatgagtcacaaattgtttttaattatataaacagcaatttagtttttttgttttttgtttacccggctccgccgttgctcgacatattcgcattgcacaaatgtccaaaaattggcgcatttggccaagactgaaatttaaaaaacgtatttttcgttctttttttgaaataaaaaaattttataatgtaattcaaaaaataaaattttaaaatgtctcaaagatttcaaaaaaaaattaaaccaatttttcagtttctgggatttaaaaaaaatgcggggagagggcaaatgaaattcacccctaacaaaatggcaccaccaacaccacctgaaccccgtggcattcaaaagggccctccgccgggcggcgatcggctcgcagtcgcggcaacgcgtggaatggccgcctctggaacgagttctgtcaccaaaatgcaaaattaataaattaaatttgtttctgtttttttgctcacgtcggtgacccaatgccaatgtgccgttggcattggcccggcacagagtgcaaaagacgcaaattggctttgaacagatcagcgaagaatctgtgaaggaaaattggaatagaaaaatttaagtcattcaggagatttaaatttaaatggaagggcactgaaaatctcaaattt

SEQ ID NO: 36175 - DNA, 767 bp, Heterodera glycines
ttttacctgaataatcaaattgattatgatttgtcggttaatttgttgtcttcttgctgagcttttgtccaaatttttatgtacaaatctggccattttgtatccacaaattacaattatcgtataacatattttcgacaaaagaagcccacattgaaattttcacgggaaaataatcctaaaattaagtaaaacctaaaatatttaaatttttgaatcagctcacatttcgttcacaatatgtcacaaagtcgttgagattgccacccaaaagttgttcaatttgaaatatttcttcggctttaagcaaggaaagatttatatagtcatttccaacaataagagtatatatcacggttacaattccgatagaaacacaaatgatagcattgcaacatatgttctcagtgttattaaaccactaaaatacctaaataaaattacgaatggattaatttatggcaaatggaagagatgtgccgtgcttcacggacacggttaccgtgaatttcacgggagattcacggggacagttcacgggttttccgcgaaaaatttacgctggaaaaactgaaaatttcagaatttcatattgttttatagaaacttgatccttttttatggaaagtttgataaggaattgaaccatgatctttataatttccccggcgcgcctattggtaccgccatgcttccaaaatactggcttatattcacaaaaattggtaatattttggtgtatatctgttatatacactcaaattatg

SEQ ID NO: 36176 - DNA, 1324 bp, Heterodera glycines
catggaatagaaacaaatgtcttttttaaattgctagttattttactttgtcatttcagctgtaagagagtgaattgggttgtgtttatctacttggcttcttattgttagattgtcactggaactgtcacattctaccagcaaatcgccaacaacaaaacacaattgtgtcaagccgcctgcggaaggctcttgtcccaaaaactcacgatcgccgtctacggagcgctcccgccgaggcaattctcactcccggcacaattcgggctcaaagtcactaacggtgcgctctcgtcccaaaactgtacgatcgcggtcaacggcacgctcccgtcgcagcaattatcgttcccggcacaattcgggatcaaagtcaccaatggcacgatcccgtctctgcaattctcgctcccgtcgcagcaattatcgttcccggcacaattcgggatcaaagtcaccaatggcacgatcccgccgaagcagttctcggcacgggtcaccggcgcaatattcgcgtcacaatagttcaaatgaaattggggcaccgatggcatactccgttcgcagtagatcacttattcgatgattttttaacatatgttcaaatgtttttggcagttctaacgacaatcacttaatttgcattttttttttgcatttttgacattagtagtattggggtaaaaatcttggcccccccccctgggcagagagatgcgcatttattataggagagaggagagaattagagaaaaagagtaattcttaaaacttggaaaagggattaaaacggaaaaaaccccttttgttatttttttgtcttgcggcattttttaatgcgggaaatgaacaccattttccatcaaaaggaaggggcgggaagcgctgccatcctctttttggagatggtcccatttttttgagtttgagttcacagcgaaaaaacttttcatttcattcaaaatttaaatttcgcgcgtcttttgacctaattattttgcaaaatcctgcccctgctgagtcagctgtcaaccgaaaatgattgatggctaaaaatgtgtattttgggacctaagaaacggcacgtgactggtcatgtgaccgaatatttcacaatgaagtgcaccgcgcggaaaatgactcctctgtcaacgaaaaatgctgatttgccgaagaaaaatgcggccaccctcaaaatgaccccagcaaatcccgaggggagtggtacgcaccaaaaaatcgttggcccacgtgcttacgtgtggtcaaaatgctgcaacaattttatgaaagcggcacgagtgtaagaagtgcacccaaaggt

SEQ ID NO: 36177 - DNA, 868 bp, Heterodera glycines
  unsure (1)..(868): unsure at all n locations
ggtgaacaaattacgcactgatgaccatttgtccatgcgtctgtccaccaccaacacanatcctcctctgcccccgccagcggccaacaaattgttttggaacagtgaagcatttttagttgcacatctttgctcgaccaccggtgaaatggactcgattctgatagagatggggaagaagggttataaaagagaccaggaaatagcggagagaatgagagagagaacagagggaaggaggaagaatgacaagcagagaggcagaggagagagagagatagttgggccatgcctgttgagatggacgaggtagtcgaccagcaattgatagtcctcgaaactgagcgaagtacgcgagtcgggaaaagtcatcagcggatggccggcatccgtttttgggccttaattaatgggcaaaaaagtaaagagaggcggggggaacggaccggagatgaagcagaagcgggacgagagaaggcgctgcctaaagtcaaacgacaaaaacgcctttcatccgtccgcccgcgccactcacaaaagttgaatggacacgcggctgtccccaacttcaacggaccctcctaaaggatttcaatttaacatgcagaaaagagcacattttgtaccccattcggcagccttttctggccattctgatggcttacgaaagccaacggccaatggttggcccgttatttggttggtcaattgcttttcatcgttttccccactgagagaaatcatccaaaaatgagttggggtcattcatccaaagatcgaatcgagcaattcaatgggaaaagcgcaaaagaaaaaacggacgaaagtttggaaaagggggaggggtacaaaaatggaggaaagaaat

SEQ ID NO: 36178 - DNA, 964 bp, Heterodera glycines
ttttgagaattaattcccaatttccgcagctcttgcggtaatgaaaaattttgaagattctctgtggaacggattagcatcggggtttcgagatagaaaattgtcctaaaaagagatagtcatttttctgagaattaattcacaatttccgcagctcttacggtaatggaaaaaattttgaagaggctctgcggaacggattagcatcggggttacgagatagaaaattgtcctaaaaagagatagccatttttctgagaattaattcacaatttccgcagctcttgcggtaatggaaaaaattttgaagaggctctccggaacggattagcatcggggttacgagatagaaaattgtcctaaaaagagatagccatttttctgagaattaattcacaatttccgcagctcttagggtaatggaaaaaattttgaagaggctctccggaacggattagcatcggggttacgagatagaaaattgtcctaaaaagagatagccatttttctgagaattaattcacaatttccgcagctcttagggtaatggaaaaaattttgaagaggctctgcggaacggattagcatcggggttacgagatagaaaattgtcctaaaaagagatagccatttttctgagaattaattcacaatttccgcagctcttgcggtaaggaaaaattttgaagagtctctccggaacggattagcatcggggttacgagatagaaaattgtcctaaaaagagatagccatttttctgagaattaattcacaatttccgcagctcttacggtaatggaaaaaattttgaagaggctctccggaacggattagcatcggggttacgagatagaaaattgtcctaaaaagagatagccatttttctgagaattaattcacaatttccgcagctcttacggtaatggaaaaaattttgaagaggctctgcggaacggattag

SEQ ID NO: 36179 - DNA, 175 bp, Heterodera glycines
cctcggggggtgacatgtcgggggtcggggacctcggggggtgacatgtcgggggtcggggcgggaggagctcaattgtcgggggtcggggaccccgatcggggaatgaccaaattttattttaacccaaaaaaacatttttctttttaaatgctcggaaatattcatttttttc

SEQ ID NO: 36180 - DNA, 883 bp, Heterodera glycines
tttcattttccaaaaacgataacccgagagcaagatgccaaaaaaaaaaatgaaaaaaggactcgtatttcaaaactggaatcttgaaaaatcttggattggtgtcggggatcttaattttaaaaacgaacaatttggccgggattttccggattggattcgatggttaaaataactggttagaatttggaaatggagaccaacattttgcttaattagaataattcctacataaaattcgctgaattcgattgtcgacacattctctttggatacggtcacctccagttgcattacggtagcgcccactaaaatttattaaaatgcccaaccaccgtatccaaaatgcgcttttacagtttttgacaggttcaatggcgtcgtggagcaaataaatgttgaaatgtgtggtgtccccatcgagcaatttgatgcgtgctctcagctctgatcgttcactccatggtgcaaaactgtagtaggatacggtagtgctgagttcgtcctataaatggcaaaatttaatcaattaagttattagatgaaaactgatacctgtgcctgtcttggaaacactcgtggctcatcaattaaggcataatgaccatcgagcttaaaatttattcaaatactaagaaaaaataaatgaattttaagtatatttaatttattgcttattaaattaattcaagtcttaattattcaaaaaaatttctcttataggtttcagaattccgtaactacgtaattagttttgatatttgaaaaatattaaaatatattttaattaattttattctgaattttagattcataaaattaaattaaatttggatatttaaaaaatttctgaatctaatgccaaattattaattagatatca

SEQ ID NO: 36181 - DNA, 773 bp, Heterodera glycines
  unsure (1)..(773): unsure at all n locations
ttaatacnncgcggccaccacaaatcatttcgtaagttcaataataattatagaaactagaatggtccaaattttttctgttaaaaattttaattgcaattcatttctgtattcaataaattaaaaaaacaagaattaaatacgaatgtaaaaaatttctgaagagaaaaaatttaaaagattttttaagcaataacttcatacgggcttcatcatcagagaatctatcttatgtatgttttgtttgtttatacgtattgtaaaaaattgtatttaaattatttttaggataatgatgacgatgcagcttttcaaaaggcacttcgcgattccattcacgatcaaaagtatattttacaaaaaaaacttttctattaaatggcatttattataagttaatttaaaaatatttttatttattttttagatgaaagtgtgcttctacaaaagaaaatttttgtgcttttgttacaaaaatatgaaaataaaattttcatttttgaagtttgtatttatttccattatatctttagcacctatttaattatttggaataagaataaaatttaaaaaataggacaagcagatttttgtcatcatttttatctcagaacatttaaatacttatgaccaggggttggattcgtacttgaatgcaagtacgtacttgaaagtgagcattggagaaaaacttcaaaataacactatttttatcaacttaaagcattatttggtacaaaatctattattatatcgcaaaaaaaacaaatttt

SEQ ID NO: 36182 - DNA, 471 bp, Heterodera glycines
  unsure (1)..(471): unsure at all n locations
aattattctaataacatcgaggcttttntggggaatttcaccaccaatcctgggcccgggattccgttccccaaatcgtcctcccatttattcttcgagcggtgtgtcgactgggggacccaacacgtttccctcactataacaataaaaccattaaaatacaacaattaatttaattgatattttcttgccatcaggggtgcgatcgccaaaacccaaaaaccgggcgcgcgagttgaaaaacccggcaaaaacccggcaaaaattttcaaaaacccggcaaaaaacccggcaattttttaagccaattattcactgtaaaaaaggacaataacatttaaacaatatatttatcaccacttttcacctgtttgagcaagtttggcaattaaagaaaataattgtgaacatttaggcacgcaatttttgtttgacaaaatcggtcaaaggcacgtttctattanattctgc

SEQ ID NO: 36183 - DNA, 603 bp, Heterodera glycines
tgaaaaagtactcgaaatcaatttgttttccaattttttatcctaaatttataaaatcctttttaatttgaagttctcctaaattgctaagatgtgatctgtagagaccggatttttaggtttttacctattttttttgcggcttagttatgatgagagaagcccaaaaatagcattttctccgaacaattttcgatttagagcgactttttagcacctaaaattacctaaaactggattttcggtcaatagcacctattttggcatttttcgagttttagcacctattttggcctttttccagaaatttcatagcaaaaatgcaataaaacgaaaaatgcaccccaagaatcgatctaaaaaatttcaaaaatatacccctaaaaattgaccaaaatttcagaaaatgttcccctaagaaatgaaaattttccccaaaaattcgtttccaaaatttttgttcttgataagttgcaattgtaagggctaaatgaataacgaatgggacttaaataagattttttgcataaaatatacttggtttttccaatttttaatacctattttcgcacctattttgggatttttagcacctaaaaatcc

SEQ ID NO: 36184 - DNA, 163 bp, Heterodera glycines
ctttgatctgcccgtggcgccgcgcgtcatggtgcagggagggatcgcgctggcgatgatgctggcggcagggatgcagctttcctcgctgggctatgtctggggccatcaggaagtgatgctcggttatggcgcgctgctgcttacgccgctggcggtctgg

SEQ ID NO: 36185 - DNA, 1079 bp, Heterodera glycines
tgaagggcagaaaatttgtcaaaataaaaaagaatttacggcatctcgttctttgacccattgactgaaagcaaattttagcggactatttttcgtgcgggttcgttttcaatttttttttagaatcatgaattaaacttgagtgacgagtttattttaacaattatatattatttaagctatttttcaaacaaaaaaaattgcgaaaatttattactagaaattttaagaaatatttaacccattggttatgcttaaaattagcgaatttatctatgttttggggcgggattttccattttttttgagcgtttcgaatgatgaaaaatttcgattttattaattgattttaaatttaaaaaaattattccgttttttgcacctcctttagctgcattccaaaaagaaggcgaattttttggctttttccctttattggccaaattacgtgaagaaaagttgcgcaaaaagaatacaccgtcgtttggtgaatttatgcttggcattgattcccattttaatccgtacaccatcggtttccctgctaataagtcaattgccaatctcattgacattttctacctttccatgatgtcagacggtttgatcaaggtatagaacaataaagcatcatactaggataacacaagaatagtcttaaatagggcagggggggggaagggataaacgaaaggggccaggtttaaaattgacacagaaaaagggcatctataaatcaatcaaagttattcaaaattatttaatcaattttacaagttaaaatccaaatattatcagaataaatgtataattcctttttgattgggcaagctcactttggataaagcttttttatctgtgatccgcactaattacccttattttttaaaaattacttacataaacatttatattcgctgcttgtcgagtgtgcaatgatcactaaatttgtacagtgcccatacaaacgaatataaaaatatatttaaaaaggcattttaataaaaaaaatttaatgaataaatttttatttgtaattagagacaggacaagagggtaggtcgaccgcggtttcggtt

SEQ ID NO: 36186 - DNA, 920 bp, Heterodera glycines
tcgatgatgcctttgaccagaatgtatttgtccatcggctgtgcccttgccaaaacacgcaatttcggccagacttggtccaacttctcctggcagacttcgccgtcctcgtcccggatccggtcgttgaattccttcccctcaagcgctaagaaatcctctccaggtttcaaaatgccacaagaagtcgcgatcgaccgggccgtgtttatgttgtcgccggtgaccattcggacaacaatcccagaccgttgacctaagcaacaaaaaaaatggtacatcagatttgccttaaacagtgctttcaatgtttcaaatgaatgcttacatttcgcaattgcctcaggcacctctgaaatggacgatggtaattaaagaagctaaatggacagacagaggcagacctgatctgaccgggtcctgaatgcccacaattgcgacgactgttaagtcactaatgaccgcactttcgtcgtcccaatcgatttcgcctccaaatgccagctgattctcctccacttgtgctgatccgtccgctatatagtctttgtaggccaaacaaatcgttcttaggccgtcggatgccattggctcaatcacttctttcaccaaacggtccaaatctttgctgccaaattgtgacaattgcccgtttcttccgagcatccatttgcatctgtaaaatgggagcacaacaatcagcgaattccggcggagcactcgtccaactttttcagaatgatttcggacgcccctttgctgaacacgcggtaaccaaggttgaagaatcgtatccgtacttcttcagctcgatgaccgttgacattgacttccgggacgaaatgaaagtgtacacctcaaaaaacaaaagtcagaaaagcgcaaatcgaagggacactttgaaatgcgctcttcgggaa

SEQ ID NO: 36187 - DNA, 1363 bp, Heterodera glycines
acccgataatcgtcgccgatttgcccaattcggcactattgccgagttccatttgggtggagggaagcaaatccctgtctaaaaatgccaccgtcggaagggtccaaacgagcaggcgctgattttcctgcagtgcggccaacatattggtcaaattgttggcactcaagcaggagatcagcgatccgatcttcgtagtcctttgggctgacccataacagctgactaatgccaagaaacagtcgcccttttggtccacaaaagccactcgacgctcggcaaaagtgccacacatattcacacacaactcagtgacttcagcctaaatggaggtgatgaccaaatcaatggagaaagtacaattttgggcatttgttggcattgtcctctttcgttaagtgcctctcatgacaaaatccctatgactgcccatttcgcctttacgcttccgcgctagtgattagaagttttaatggtgagttaagccgtctcagttgcaattgccattgaccggtcaatttcaactttccttcccaaaacgttgagggctctggcgcatggacaccgaatggtcttcttttgttcaatttacaatagaactcaaaattatcagtgagatgcagaactgaactgattttctttacaatttgcaatttgctgatgaatcatttgtgccattttgccgcttctatgctttactagtgccatttaatgcccccgccccccgcccccccgctaacattgtgtgttatcggcccgtcccccgccgttcgtccgttctgtgggtcgaaaagatggaccagtgaatgttgtgattggtcccgaagaacgatcaaatcgtttgaaattgccaccgtttgttctgtgaagggttcgcccgcggcggagggaggaatttgaattgtgctgagaattcggccttcgaagttgaacacttggacggcagagctttccaccagcagaaaacaccttcgagaattgggaatggtgggatataaagcattctcgaaaagatatttagcagaaaattatgccaaattgtcacacttttcgcagagtctgatcagcgacacgggccctgagtcctcctttaggtcgacaattgtcggcgcattccaattttttgcactaatttaaatattaatgagccattaaatgccggcaattacctgaatatgtagcattgtttgatggtcgcaaccaccaaatagttaaagccgagttcgaaacgcaccactctgtcccgcgtttccagtcgttctcgcgcgacctccgagctcaaatccctaatgttaatgaccttttggcgggcctggacggcctccaatgttcccacacaattcgccttaattcattcatttat

SEQ ID NO: 36188 - DNA, 1460 bp, Heterodera glycines
cattcattcattcttctcttttttctggctcatcaatgcattatttttgttgttgtttttgttgatgctttgtgttgctcttcccccctctctccctctcactgtcttcctcctcttttgctttgtcctctcctccattcattcattgcctctccttcctctcttctttgttccctttccctctcatccattttttctctagatccactatctttcttctttctctaatttcttaccctccttctccattcatccattatctctcctattatatatatatatatgtctcatttgatgcttttggtgtttttggagggattcactgcatctcttttcttcattttctcttctaaaggatgactcatcagctaatgcaaaccattcaaccaaaacacataaaaattgcagccccaaaattggcctgcgaagaaaacaatttgacgccataaaatttttggttgaaatttgttttaaaatgggaagaaaaaatgttttttttaaatacgccatgtaaatttcagttgtaattaatttaaaaaaaataaattttaccaaattataatcaaaaatccaaattttacgggtattaattaaggaagaatatattttttaggaaatcaatttaaaattttcgaaatttataattatcctttttttctcttaaatttttttttcttcttttccttttcaaacattttgtcggaattcttgaaaactttcacggcacacccaaaagccgcgaaacactaatcgagtttttcagttataaattccaaaaatcatcggcaaatcagttttcaaaaataacccgctgctttgttagcagccgcctgcttcaccgatcagagcaaaattgctctgatttgggaaagcagttagtcactttttacctcaaagcaaaatgagtcatgcttttcatttcacaaatgtcgcccctcccttcttcacgttttatttactcggtttgaaatgactggctgatcagtcaggtcaacttcagtgatcagggtcggggttttgacggagatcggcttacatccgtggctttatccccccccctcccctcctcgtgttgttgatgcttattcaccgcccacatattcatccctccccggctggagtgatcagatttatgtgttcctccttattctgagatttgttttttgagcctatcatttttgattttttttttagatttttttaaataaacaaaaatatttttaccccaaaaattggtttaaaaaattgcctattttgatccaaaatctgttaataaaatgcataattttcaaaaaaaatttcccagtcggcaccatcttaccaaattttcatactgtgtataaaaagatgaaaatctttattttagcttgcttgaagcttctaggacctgtctccatgcctctcttttaatcggcaattttgtttcttaggactgaaaattttttcaaaaaacttacttt

SEQ ID NO: 36189 - DNA, 930 bp, Heterodera glycines
tcggcaattgtgatgatcattggtcccgaaattttttaatttaattttcttttcaaaattttttaacacttttctaggggtgttttgaggcgctgagcacgaatccggcctccatttcgaccaattccgaatccctaatccgaactcgaacatttttcgagaattaaattttaaaattttttaaaatttcttttaaaacatggttcttacaaaggaggggtcggcaagtgaccgtgggatttccaaatgaaatttggtgggtggatagatgacgcccagattctattgtgagatgatgaccatttttgcctgaggaccatgattgacgtgatatgacgtgtgaatattcttggctgaaccaaataataagataaacaattgcaattatgcatatttgcaaatgtatttcatgattgtttagacttataaaaaattatggcgtactgaactttaatatcttattattattcctattaaagatcgtactatttacaacatgatcataccgagcaggtgaaattagaacaacaagctagctttgatgacatatgtgacagagatgtgtcgatggagcataagaaattctctgccgcattgatcacgtgattcaccgagatattgctgatcagtaatcagattctacaaaatacccgacgatttgatcaattttttgatgaaatttttggcagtaaaaaaataagatagtgaagaaatgtccaataattgcgatgaattggaacaattaaaattgggatccacctcaaagaaaatttatgaattgaaaaaagattttggattgaccaaaaacaccacctcttatgtggaaaacgcaaaataataaaacaatttgatcattatttgaccaattaaaattaaattaaataaaattggaagggaaaaagaaaaatatggccaaaaataatagcaaaa

SEQ ID NO: 36190 - DNA, 1057 bp, Heterodera glycines
aaaatcccgccacccgaatttcgccgagataaaatctcgccgcataactttttaaatttctagttttttatggtgttaactttttttcaaaaaaccgtaacgaattttttttttttgaaaatgttttaaaattaaaaaaatcttcagaggcgagcttttgtcccatctccaactccaaggtaacaattgaaaaggcattagatgttttctccaattaaataagtaacataaactgaccggaatgacaggctgagtttggcacgtgtacgcaattcggccgtccaaaaagggtgggattatgttgtggacgagcagagacactctgttctcgtcagtttcgttgtcgaagaagtcgccgagttcctcggagaaagtgaccacgcctgaacaaacaaacagaagtgcaaatgaatgaaaattgctaaaactaaatgcataattttttatgacccgagttggtgttctcaaaagctttggaatgaatgatggatgaatgcattgcttgatatttttggctaatttttttaagtaaaaataggtttttgggggccggcggtgccgataggcgccgccggggaaaaattttcagaatttttaatgaattatcaacaaaaaacatttcaaaaaaaaaaagaagataaatttattaattttagcgaaataacggcctgttagcgggcaccgccggatgcccatttaacaaaaatggctgaatgtgcggtatatgtgaatttccatgtttttcgaatcctacttaactatcatgctaattgttagtcagtcaactctaatcaccccccccccccttcacctgatctggccagtcggttgttctcccacatttcgttgtcttttttgatctgttgctggcggagggtcagccgcggtttctgtcgcgtttggtccaattgtttctcgcgcttttccacgtaattctgcgacacgttggcgaacgggttgaactcatcgttgtaacagccctggtcattctcatacctttacaaaattaccgggtggaccaatttgcatgtgttaattgtaagtgttaccattctct

SEQ ID NO: 36191 - DNA, 880 bp, Heterodera glycines
tttgccactcgactgtcaataccgctgccaagtgaacgtttgctactgaaaatgcccagcacgcaccgcaaagggctataaatttaatgaagcattttcaaattgttatttttaaattcccatgctgtttgaaaaaatttttcccttgatcgccggggtatggaatccgtcgctctccttttttggagtagcgcaaatccagctcggttggccaatcattctcttctaaaaaaatgattttaaagaatttaatgtttaattaagcataacaaattaatcaaaagtaaattgcaaccttggaaaaaaacgattattgaaaagaaatggtatataataatattgaaaagttgatgcatttcctaaagatttggtaaacattgtaattctatctggttctaagtgttttatcggggctgattttaaatgttttagctgctccttttaaatgctctagtggctgaaatccctagcgcccaaaaatttgtacccaaattttattcacaaatcagggggagagaatcgctgattagatagcaaattggtcatttcattttttatcctttcaattccatttcaatcatctgttaagttcgtaatgaaaaaattatttttcagttatttatcaagagaatttccaaattgcacaattatttcacgcattattattttttctttgtaaaaatgtgcaattggaccatttctctcttacagtaactactgaaattaatcattttaattatcgaaataataatgattgaaatggaatagaaagacaaaaaatttaattgacagccaatttgctatcaatcagcaattcattctccacattttttccaacacattcgaaattaatctcgtgccaaaatcccccccccccccc

SEQ ID NO: 36192 - DNA, 807 bp, Heterodera glycines
  unsure (1)..(807): unsure at all n locations
ggaaatatcaatataaaaggcaaatcatttgttaagaaatttcatccaaattttatttatttaaaattttttttgattctttttataaagtaatgctgaaaattgtaaaaattcccaaaaccttctttttattttttaatgaattttaaattggttttgtctaaaatgttatcaaaagtgataaaataaattaaaggcttattattgcaacaattagaatactttaagattttcctaagcaacgaatgattttttaattttatttactggtaatttattctttttcaaattgaaacacttccctaatgtctcttctgtgcgttatcacttttatgtactatggacattctgttgaaattctctccaattctgttttattatttcaacattgggtgatacgatattttacttaccgtaacctatttactatcgttccatgaaattgttttccatttcctttactagttcgaaaattttttatttatttctattttcactttttttgtctgtcaaataaaaatattgcattaagtttgccgactgttaattgccaaaaaaaactaatttatttgatttaaaaaatttaataatctctctggaatgaaaagctgaaaaacatataaatccgttccctggccataacattacgcaagtcggggtgtttttttggactgtaaattttctcattgtaaactagatccaacaaaattttatcatttaaagcttaacatgtttagagcctgtcccactgaggccaaaatttagacgaaataaaaaatgctcaaaatattttccaacnngtgacca

SEQ ID NO: 36193 - DNA, 1661 bp, Heterodera glycines
ccatttgcccgaatgttttgtgctcgacaatttggcatttggcattcaaaatttcccatttctcgtccatttccgactcattaatggcacaatgacgggcaccaccagcagaagaatttctttgtcgtctgaacttttgcaggcgccgaatgtttatggcattggcgatttgcgaatggaacaccggtggaggggggagacgacgccgcaggggcaatcggaggagggaaattgccaaagggtgcgaaagttgctgagaaaaatgtacgaggccgaatttgaaacggtgaggagcaattgtaggcaattaattaaatggctaattggttaattgattgtcagatggacaccgccgattcaccgattgtcagcagaacgatgcttatcccaccaatggaatacagctgttgtgggctgaatgaggaggagatggagaggaaatggggaaggcatttgacacgcgtgtacagagacggagaagtgccaataacggcggagagggcgaaaatgatttgtgtgatgaagggggcggaccaacgcaaaaaggtgggcaaaggcaattggcggattttgggaagaattcgaaaaggacgggggggggggggggaattggcaccaataaaatgactaatcgaaaaagaaacagggaagaggaaatcactgatcagaatggtgggaaaaagcataatgatcaataaaagagtgacgaaaacagtcggaaaggctcagaagagagtaactacaataattacaaaaatggccaggaactcgtcgttggcctccatataatcggtccaaaggctactcagctgatcagtgggtacgcataggcaatgaaattgggactgacaaagtgccaaatggaacaggacaattggcacaaaacaactgctgcttttggaaagtgatcagaaagagagagaaacgaaaccatcgatcgcttattatttggccaaaaataaatatttgaaaattaataaatttacgccattaaaaagaaaaaaaggaatgggcaaacaattttgctaatttgaacttttgttgcaaaatattaaagaaaatagaaatgaatgaatgcattgaaatgggaattgaaaattaattttggccgtctccgtttgatctccgcccatcgctttttaaaatgcaattgtcgtctttcgctttaaagagtttgctcttccaacacaaacacatggccaatgtcgttggtggagcagtgccaagtgatttggtccaacttctgtccccatcccgcgtgtgtgtcgttgtgggggtaaaatttgacttgcaaatttttgctcaatgttttgtccttggcctggaaatgggaatgaatgttccataagtgatcgatcactttttgttgttttccgatcacttttcgctgatcattcgacgcccttaccgaaagcacaaattcaatgtcctgccgtgtcccttttttggtcggctctttgtcagcggtgttctgaaagaaacaaagcgtatggccaagtgagggcactcgtccaattggacacggcacacaaacccaaatggccacgtattctccgctgccgccctcaatcggagccaaactgagcacgttcccggcgatgttcaaacttctaaagggaaaagtgatcacttcttcaagctcgatcaattgacaaaatgct

SEQ ID NO: 36194 - DNA, 1459 bp, Heterodera glycines
ttcccctcaatgcttttcctaagatcgctccttctgccaagtgtctctcaactttgttcaccgcattaaatttgtgcaggaatcaattcgattcgagtttttgcattgtatgttcgttttttgttttttcaatctttagatggatttttgtttccatttcctataaagtaattgagagatcaaaactaattatgacacattaaaaggaatgggcggggggcgatttttcttaattatcttacgccacttacaattagcacttaggttttaaagttgcttaaaaaacagaaaaattcacctaacttgccctatgttatcattcaatttcttcaggcatgggctcttttctgtaccagatgaaatcgttttaccaaatggccaatgaaattcagaaagattttgtgagtttttttcgaatgattttaaattgcttttccccctttagagtctgatctacaacgacgtgtgctacagagtggagaaggcgaagaaggaccagacggaactgcgtgcacagattgagggcacaaagcgcaatgttttggagaaattcttaaaacattcggtgggcgttagccgaacaattcaaattaatcgctaattatggctctgaaaaatgccacaagttttatgccacctttcaccccattttgtctaggtgtttgtgctcaattcgtcgtcgtccaactgtggcgagttgtcgtccgatttgtccacagccgcggtcgccgccgcttcggctgccgttgggggcggtgccgaagggtccgcgcacattcgccaaggctatctgttcgtgctggagatgcgcagtctgttatccaaggcggtccagtccaggggcactccgaccagaaattactgcgtctactccaaggagtccaggtgggcaacttgccattgggccgggtaatcaaatgcgataggcatgagaaatctttagatttgggagattgatttttaacatgttcgatttccaggattttgacgcttatcccggtgaacagtttgaccgtcaagacggtatgtccttattgttttgtaatgtgattctctcccatttactatttaaggatatgaagggctgtttggaccagaccatttcgtacaaattgaaaaattgcgcccgaaggccgtccgattcgattgacagaaggtgaattgtaaagagtgtaagagaaagaaacgctcaaattcgtccaccccaaaacacctaattttaaccaattttttcttttaatttgaattttttaagtttttttttatggatttgcggcctttgcccgacaattaatcaacttccttccaggttctgttttgatgtgtatttggagaacaaaaatgagccgatcacaatgcaagcactgagtgaatcaggttgggattgtgacactttttcggattggaaaaatataaaatttttgcagactttgtccaatggttgaacgtgatggacgcc

SEQ ID NO: 36195 - DNA, 1032 bp, Heterodera glycines
  unsure (1)..(1032): unsure at all n locations
ttattaacatatgaatttgttttgtgaacgaaaaaaacgttttctttttatcagtatatttntattgatnntagtggttgttatttttcagtttgtttgtttatttggtttttgtgttccttgcgtgaaatattatgcaatgcttaggcttaatgtttaattgttattagatctttgtttttttttgtctaatttttctgatttagccaaaattgaagtgattaattaattaaaataaatttcaacaagtttaaagtttctgctctgccggttcggcaatattatcattccacactaactgccggtcggccattcatcatagggtgtagcatttctgaagaagttaaagtaattgccttttgtactcagaattatgtaaaaagtgagctaaaatttgtatttgtggctgactgtgatttagtttttccatatataattgtttttcaaaatttagataatgaactaagtgtcatggaggcctaaggttttgttgaatgcattgggatattagttttgttcagtcaaccacattagtgtggtgtgttgtttgttttaaacaatagtgtggtttatgtaaacaaaccacattagtgtgctttatgtaaaataattagaattggtttgagacgcacactactgtatctctcatgttttagtgatccacacaagtgtgaaattttgttaaaaaggaaatcttcgttatagtattgttttgagatgctgggaggccacgaagcggccgagcatgtaccttcaaagaaaatgaaaaaatacaaataaaatgttaaaaagaaatgttgcaaggaaacaagaaaagatgaggaaaacgctaagaaatgttcgtgccataagaaaatgccaataaacaagaaaatatgaggaaatgctaagaaatgttgtgccatacgaaaatgtcaagaaacaagaagagatgttgaaaatgctaataatgttgtgcagaaaatgtcaagagagggtgcgaggccgctaacgagaaaatactaaatgttgtgccataagaaaatgccaaga

SEQ ID NO: 36196 - DNA, 647 bp, Heterodera glycines
  unsure (1)..(647): unsure at all n locations
acatcactcatacatgggttggtatagcacaaattttcattttatgaaaaaatcacaattttttcatcatgttaattactgttattttcactgtccatagatatcatggaatttggtgttggaatacgacacggccaaggcgaccgatgtttgtgacaagaggggtaattagtgtgccgtgattagtaatttgggaatcggctttttgtctttagcctttctctccaacatcccagcggcaaaagttgtgcatccgttcgcttcccaagacacgtgttccaaggagggctgttgcaagtgcacaggcgaaagtcgaagcggcgaagccaatgcccgcggcaaagccatcgacgcgaacaaattgcacgacgagcggaaggaaaagagcaatttcgaaggtactctcttttttccctgtgaattattttgacatttttcattataattcaatagttttagtagaaatttaacaaaaacttaaagggcggcatatttttgcaaaaattttcagcgttatttttaaataaaccaattttaatttttaattaaaaaccaaaaaaggggggaggggagacccttttggtttgtatttttttacaaaagcccatttttccactatnncnatattcgaccnntgcgaggcatgc

SEQ ID NO: 36197 - DNA, 688 bp, Heterodera glycines
ttttcaattctcacaaagatgccagttttcgagaattttgaaattccagcactacatgccgaaaatattgctccaattgacatttctcgcccttttaagcgcaaatggggacttattttgtaattctcccgtaccgttttcaattctcacaaagatgccagttttcgagaattttgaaattccacactacatgccgaaaatattgctccaattgacatttctcgcccttttaagcgcaaatggggacttattttgtaattctcccgtaccgttttcaattctcacaaagatgccagttttcgagaattttgaaattccagcactacatgccgaaaatattgctccaattgacatttctcgcccttttaagcgcaaatggggacttattttgtaattctcccgtaccgttttcaattctcacaaagatgccagttttcgagaattttgaaattccagcactacatgccgaaaatattgctccaattgacatttctcgcccttttaagcgcaaatggggacttattttgtaattctcccggaccgttttcacttctcactaagatgccagttttcgagaattctgaaattccagcactacatgccgaaaatattgctccaattgacatttctcgccctttctatcgcaaatggggaattattttgtaattctcccacaccgatttcaatt

SEQ ID NO: 36198 - DNA, 1035 bp, Heterodera glycines
gtatgaatgatttggcttgctataaaattcttaacattttacgatttgatttcacttgcaatttactataattatttgttgaatttgttttatattagaaaattattgttggatttctttgtgtgaataaatattgtaaaacataaatacatatgatttttggattaatttttgtgaatttttagcatacaaatttgatttcttaatagtggattttggaaacttgttgattattttcgctagttgttcattttcattttaaatgggaaaaaatttgtttttattggttataaatttgtgattggtttaatcgcaaaccaagtcatacaaacgtgcagcttcatttagcgattatgttaaatattaagctaaattagtttaaatgtttttaaattataatattacataataatgtatcaactgaattgccgattttatggcacatggtcacaaagttggcgtattctttttgataaattgtcataacagtgttgtttgtttttcaaactttttctttattacaaatatatttatttattgcatattatagcatttttatttatatcgttccagtaactaatatttttgagcaaatatttctttattttgttgcaaaaataggaagaattttcgcagcatatgagtgagcatcatttactcgctttgttccattacttctctatgttctttgttttttatttttctctaattgatgcaaatttcctgagcgtaaaaggtttttttaatttttcacagttgaataattagtttacttttttaataaatttaaatccatttacaattatttatttttgcaaagctttggaataattctaattctagtgatgcgttaattttttagcctttttcgcacgcttagtattattttaagaacatttgtttaaattttaggaaattaaataaattcgtgaagaataattgatttattttttactagaatttttatttttatgagattcataatatgagagataatttatagttttgtaagattcttaattaagtgggttttat

SEQ ID NO: 36199 - DNA, 1247 bp, Heterodera glycines
ttaaatgaataatgaatgatatacctaggcgtccattaatctttattcaaaagaaaaagacatcttaattacaatgagaatgattagcactggcaccgagaataacaaagtattttttgtaataaaaacccaccaaaacaatttagctttcacaaaaggttttaatataattgcatgcttttatgctagatctctttgataattatattattaagaaaaaaatgagtcgaataaaataaataagaatgattagcaaagggaattcatctaaattagcctaaaaagacttggatattaagcatttaatataaaattttattttttcaattattcaggttctaagaaaagccatcttaattaggagaataattagcaatggcaccgaaaataacaatgtatttttgtgttctaaaagccaaacaaaaataatttctgtttatagtacgataatgcactttaatataattacgatacctacggtagcgaaaaggcataagaaccaaaatttgtcgcttaagcgccgcccattctttaacattttaatgcccatgaaaagtaaaaaaaaacaaaaaaaacaacaacattagtcttaataccatgttacaccttaattcgatttttgttaattaggataaggaaatagcaaaattggaaaatataacttttttatgcccttgtgaattttttgcaaatatatgtgcatatttttttaaaccttgtatttatataccatacagtatctaagatcatttcattcaaatttccgttttctttggcgttgctgattggcacccccccccccccccccgatatagggattttttaaaataccgtaattatagaaccaaaaaagaaaagactggattaatttttgtggcggaaaattaaaatttttgattgaaaatctgttaggaaatgaattaaatcaaagcgtcattgtcggcttgatcattaaatcagagatgccatcgaatattttccaaaataaacaaatcgctagtcaaaaataaatatatttttttgaaacttggttaagggccaaaatattttgacccaaaaaattgctgaaattaaatttaatatcaccaaaaatcagaccaaatgcagaggcttattattcattttgagttgctcattaatttaatgtgactgggcaaacatgaatttttgagcaagatctttttctttcataagtacattattaatacaaattgaagcaaacaaaaataaatgaaaaaagtgcattt

SEQ ID NO: 36200 - DNA, 1755 bp, Heterodera glycines
  unsure (1)..(1755): unsure at all n locations
tgggttcattcggggccaaatgctttcggtgcttggttggccaactgttggcgaatgaactgaacggacacgcaaattatagggaaacgatttaaatgcctaatcatgttttttaattgtccaattaataaaattaattgtttctgtcggtctgttcttactccgtccggttggtgctgcacgcggtggaaaaacgcccttcgctcgcccttttcactggtgtccatcgcctcgccgttcatttcccacccaaaacaatttggccgggcacagcctttacacaaagaattaattttaattaaataattgatgctttattttttttaattggccccaaaaaataattacccaaaatcgggtgactgccagtgagtgccttaaaatattttacgataattataaaattgttattttcatttagcaaacttcaaagctaaacggaatggtcgattctccgcagaatgaggccaaataagaggggaaaataaagaaaaaaactgacagaaaaacagtgcaagttttcatgtgttttttgtccagcataattaagaggcttaattggtcaattaactgatggcaattaaggggaaaaacaatacttgtaaaataaaactaacaaatatttgaataaataataattaaatttaattatcaaaaccaaatgtaaatgattaataaagcagaaaataaataaataattgtttattcataaaaaataaaaaaggcatcagaagggcgaaaaccacttactctgaagactattccggtaaatgtgtcgtagagtaagtgacaaaaatatatggatgatcacaggaattaaaaaaagacaaaaatatgtgaaaataaataataaataaattgaggtcaaagtcaaatgaggtcgaaataccaaatcacttagaaatttgttacattctagctttcccggtcttacatattaccctagtgaactttaagttttattttaaattgatttaaagaatttgtttttattagttctttatctagttgattccacaattttgttaccctcccagcaaagggaatgaattttttgcccagtttgtattttgtgttaaatctataaaaggggatgttaaagcgtgctgatggattaaaaatagaaaatagtttcagatctgttcggccataaacaattttatgcgccatgaacagatcaaacagctttcgccttttctcaagtgttggcagttgcaggtattctaatcgattttggtatggaattggcggaaggctgcatttaaaaaatacccttttggtgaaatatttttgacacttttcgatttttttaatatttttttgaagaaacggattccaaacctctggagcgtattccaataaaggcctaatataagttttatataacgtaatccaaatcttagacgatttggatttaattattctaaacaaggaacgcatacgtaaatacgcattccttgttatttggttaatatgatcggaaaattgtaatttgttatcaatgtttactcctaaatccctaattgtatccacagcatttattgtatttccatcaaatttatatgtttcttttgngtttttttgacccaaatataatacaaaagttttttgaattgaaacttttatttgccatttatttgcccattcgaataannatatgcatgctttatgcatatttttaatgtgtcggttcttgctttatacnaaatatataatttaacatcatcagcatataaattttattttcactcctga

SEQ ID NO: 36201 - DNA, 1275 bp, Heterodera glycines
ctatttctgagcattttttaaatcgaccgcgaaagttttgttgtccaccaacatttttggttttaggaaccgatttgtcggtcttttttttcatttctaatttccgtcacaatttgtatataggagtgcattttttgttgtttttgggccattttgtaaaaaaaaaaaaaaaaaaattgtatcccaattttcaggagaatgtccgaatgtactaccaggcctggatggaagagcaggcacagaaattgatcgatgccaccactcgcggtatacaaatagaaaaattggctaattaatagagcctggacgggaccggggcctgccgggatttttgccgagactccctctgtcccggttttttggacggtcggaaaaacgggagtcccgggattccgtcccggtcgattttctaagtcccgaacatttcaaaatccgggctctcctaattaaaatggatacggtcatcaaatacacactccattttatgggtttagttttaaaactgaatttgctttcagcttttacatcgcagcggatgttggcaccaggagctccaggatttgtgccgcccccgactggcgttcccgtcatgattgtaatgttttgaacaaaacaacattgttgtttgctcaataatttttgatgtcatctcaatatatatatatatatatatttattttaaaatttttttttcactaatttttattaccaaaaatatctaaattttcaagtttgataaattattttaaaaaattgggaaacgatacggggggggggcagcctatctagacttcaattttttaaaattaaaaaaatcctattgtaggtttgtattttgtacagtttgccaatggcctttaaaactaatcccatgtgcttgatttacacctcctctgttaagccaccgcgtgctccgtatgttaatccgatgtcgattgtgcgtccgccggtgatcccttcggcggccggcttcttcacaccgccggtgttgccgcagggaatgccgtcaatgactgccgccgctttgagtgccattccgacgccggcagtcaccgccgcagcaatggccgctgttgccgcggcacaatcgtccggcattgcggtgaatgccaacggcgcattggcttcgtcggctgcgcttcgaacctcaatcaaacagcaaccgcaagaatgatgaagatgatgatgagctaaaaaattataatttgggctaattgtacactacaatttatgcgtgtccgatcgacttttgcgcggtttttttttaaattttta

SEQ ID NO: 36202 - DNA, 925 bp, Heterodera glycines
  unsure (1)..(925): unsure at all n locations
aatgccgggggaggaggggactagaatgataagagatgccgagggaggaggggggaagatgatcagagaagcttgaagggggatggattaatgaaatgccgggggaggaggggacaataatgttaatacatgcctaggtatgatgagcttagatttcatccccgacattgggagagaaaagtcatggatcggtgataaattttcccgacaaaacattcacaacattcacacaaaatcaatcctggcattaattttttaatttttttaatcttgtttcatcaccgttattcgaggatataaaagtctcggatcggggtgaaaattcccgaaaaaatattcacataaaatccctggtgaattcaaaaattttttaaaggccgccatgtcaaactgtataataattgaaattactttgaattctttcaatttcttcatgttgttcatcaaccaatttttttatccaataattgtacaggttgaattcgatgaccatttttgttcgccatttgcctaattcggtgccattttcaaaatattcaatgtatgtcaactgatacaaagcgtctggcaaagaaaagccgcctaaaaataaaatgaattaaaataaatattttaaaatgggaaaaggtaattaaaatgattaaagtatggaattaaggaaaagactaaattgactacaattttttcttaatgacaagaatataatttcttgattagtcaaattttgcgatgggtacttgaaaattgcagtttcaattgaggtccttgaaaaataaattataattaataattttcagtaaatgccattttaaaattgtttctcatttttggcctccaaatattaattgttgtactanatattcatanttttgcaattnttagaagaagtggnngaatatcataatttattaccaaagcataaaat

SEQ ID NO: 36203 - DNA, 759 bp, Heterodera glycines
ttttttccccaataaacttgtcaaaccccatttttcgcaccgtgaatgttatttttattgaattctgaaccgttttgagtagattagactagaaaaaattgaaaattttgaaatcatgtttcccactcccttctcccaggggtattattttgtaaagtcttttttccccaataaacttgtcaaaccccatttttcgcaccgtgaatgttatttttattgaattctgagccgttttgagtagattagactagaaaaaattgaaaatttgaaatcatgtttcccactcccttctcccaggggtattattttgtaaagtctttttttccccaataaacttttcataccccatttttcgcaccgtgaatgttatttttattgaattctgaaccgttttgagtagattagactagaaaaaattgaaaattttgaaatcatgtttcccactcccttctcccaggggtattattttgtaaagtctttttttccccaataaacttttcaaaccccatttttcgcaccgtgaatgttatttttattgaattctgaaccgttttgagtagattagactaaaaaaatatgagtgatctaactttcactaacaagttaagtctacactttttcccaaagttaaaaagcaattataattttattcacctccattattgatagaaaaagcatcagagtgcctatactaacatgtaaataaaatttggtgcgtttcagaaccctttctgaaaaatatttatgaattaattttgc

SEQ ID NO: 36204 - DNA, 631 bp, Heterodera glycines
caattgttggatacagtactcctgttttttttacgtgaccttatcccattgtcaacgataaatttatgaccaaaaaaatgctcaatgctgcaactccaaaacacgcggtaaaattgtacatatttctaacatataaataaatatagtataaacatatacattgttgggtaccgtaaccaatacaaattatctggggagtgtcaattacggtacaatgtacagtatcagtcagtgtcaatggtcaattagtgtggtgtccccgttgtgcgcaatggcgaggccaaaattggcggtgaaatcgtgcacaatggcaaacgctgtgccaagcaaatggacaatttcgaccaaccgcggcacaaggcattcggcttggaaaatctgaagaaacaaaaaaaaattgtaagggacgagaaaacgctcaaaaattggagtcatcggaccaaaatttcatgaaaattaagaaaaaaaaaaattttttttaatcaaactgagggttaaaatttgaatcaaactgcggaacggatgggattgaatttaaaataaagtgccaatactgaagatttttaaaaatcaatagaaaatacgacgaaaattttgaaatccaactcgagggggggggaaagggattttg

SEQ ID NO: 36205 - DNA, 825 bp, Heterodera glycines
aggtccggatacaaagtccactagtacctggcttctgacctttcgccggccgatagcgcgctcaactcagtcccatttaactcagtctcggcgctaataactttttcatatttttagttgaatggatgcgacaaattggagccatcaataaagagttatattatttaacctaccaatgattaaaaaatttaaaaaaaaaatttctaaaagttagggatttcgaatagttttctaaatcttttccatttggtttactaaaaaatatgggttgttctggttctaaatttgcaggaccgagttggccgatgatgccgagctgtggcccattttgtctttggtgggatttcaccaatttgtcctcctcctgttgctgggggggggggggggggacgacgaaccaagacgaacgaacgacgaagctcggcggcgagtggggccgaacttcgccgcacaattcccccgcggggcccccgtttgcccaccggcggcacggggcacccaaatgaggggtaattgcagtgttctagcgaaatgcttggccattccattcttttttattttgcaaaaatgttctaaaagaaaagcaattttgtgttcctctgctgggggaaaaggaagggacaaatttgagggggacacacaaaaccccccaggggatgcacaaataaggggcttaagccgaggcgagtttgtaaaaaattttcttaaaattcaataaggattagatggtggtggaagccatggaaaaaaagaacattatgtaatttacccaaaaatagaaattcgcaaataatttaatttaattttaaatggaaaaacaaaaaa

SEQ ID NO: 36206 - DNA, 1341 bp, Heterodera glycines
aaaattaaatgcaaaaatttataaattatattattaaaaaatgttaattataataattcctttttgcaaaataatgattttcaatgaaaattttttttctaaaactaaatttttagtgccaatgaattgtataaaataatcaatatgacagtgcgttatgagtcttagtgccgagttatgacgtgccaaagttttttaatgattaaacaaattaaataattgtttaaacacctttgcattatccagtggtgcagcggtagtgcgctattcagcgttttctagaacccaggttcggatcccctacatgcaaatcccttttttaattttaatttttgatttttatgccaagtcaattatctttatcaaaattttttatgatataaaaaaattcttattttttatccatttgacaaataagttactcataaagtattaaacaaaaattaataactgaaaggatatttattgcaccattatctttaatgaattttttaaatcaaataaaattaaaaataaagattttgtttcattaaaattttttgtataattgaccctgcataaaaaacaaaaataaaagtctaaaatggatttgcatgtagaggattcgaacctgggacccaaaaaattttgactaacgcactacctatacactatcacacacttctaagagatggccgaagtttcaggctaatggaaaagataaataaactgccaattttctaattagctaactaaacgtctagaaaagctgtaaaatttggtggtaattcttagcaaacaaatgcgccatgtccaaaatattaatagtcacgacaactgaacttaatacaaatcacatcaaaaattcttgaggttcaacatttttgtctcaataaagtaaaaaaagtctattttagccttattaggccgaactgaaataaaccaattttttcaaaacatttggcatttggcaacaacacgaatcagagatactgttaaccaaaagcaggatctgatgtcttaatgcttattgttagactgtacggctgaacatagaaaaaaacatatttgaataatttatagctttgatcaatcaataaattttttaagacgactattattggcctaagggaagtataagaagtgacacaaaaaactttggttttaaatttgttacgcagcgtaagaatttttaatgcgtgaataagaaaaaacatgcatagtaaggaaaaataaaaatgaatgtttttatcgcaatatgctcatcatcaaaattccgttcaacggacattggcatttcaccaagacagccaaccaatttcacagcccaataatcaaacacagtcacagtcctgaaaatgg

SEQ ID NO: 36207 - DNA, 808 bp, Heterodera glycines
  unsure (1)..(808): unsure at all n locations
agtacnctgttttttagcattagaattgttcagaagtatatgtatattgagggtgaccaagtttttttttcaaattcaggataaagaacactaaaattcagatatagacctcaaaattcagattattgcaaaacaaggggtcagcagccaattttccaattttgcgaaggggtctccggccatgtaaattaatgtaaatcaatgacctttttttgctttcaacaccgctttttacgcggcacgttttttccaagacttttgggggacaaggagggccggcggtgccgataggcgccgccgggaaaaattttgtaatttttaatgcgatttgttaacagaatttgtaaaaaaaatgaccaattgattaagttttgggtttttaggatgcttaacatgaaagaaaaaagttggaatattttttaaaattaaaattttaattaaaataatggtaaagaaaatgtgaggaatattctatccaagtggggaattgaactcaggcgaaaaattatgaaaggtagaaagtttaaccactacaccacatgtgcatgtgtgtaatcccatgactaaatgaaataaaatttaattttttctcaaaaatttctccttcttcaccaatttcctactcttttctcgaccagacccccattcttaccagtgcaaatttttaccggcggtaccggtactagacaaaccggtaacggtaatttcatttttgaaaaaaccggtaccggtaccaaaaaaaccggtaattaccggccagtaccggtaccggtaccgctcaaccctagtcaaaagtattgatgagggg

SEQ ID NO: 36208 - DNA, 1125 bp, Heterodera glycines
ctgaatgtaggggataaagtctgtccgggtccgtccctgtccagcaggtgtccacctcgaaaatcctgctccaggtaaaacaggggagaggaacttcgggccggggtccgatccgaaacggttttttaattgagcccatttaaaatgaatgctctttcattttgtagaatgtgtgatgaatgaatgaaccttttgcttttgttgctccgcaaattgaccacccaaatgacgcgcagtgttcaacaacgggtcgtacatgaactgtaagaaattattttaaaaaattccgtagaaaattttttggatttgaaaattttttcaacttttttggtcgagtatcgaattgagaaaaccaaggattcacaatttgatatttgtaattttgtcgccctcatccattttttgacaattttttttctaaaatttggtggagggcaaacttttggcatttgttaccgaaactttcagtttaaatgatcatctatctgtacctgtgtgcaattccattagtacaaccctaatggaacccaaaacatttaaaaaatccgaaattcctccatatgtccatttccatgccatcccaacccaatcccatcatttgcatcgattttctcttggttggcttggcttggcatgcccccaacctgctgttgtgggtccccaattggtggttggaacggcggggacatttgcggcggcgcctgctgttggtattggtggtaaggagaggacggcggtggtggcgacggcacattgccaccgctgtacatcattccgtagggcgatggtgactgatgctgttggtgtggttgttcaaatggactactggcgccggcgtcatacggcggtggtgggggactgaaattggtgcccgtactgaactggccgctcccctctcttgcaccgtaaggcaaattgggtgttgtcatcagcagggcgtatatttatagttgctaaaactgccaaaataggtattttgtttttagtttctaaaaaaccccaaaaagagttgctaaaaatgggtaaatagttgctaaatatttcaaatttaggggtgtatttttcgtttttattgcatttttcataaatttttattcacaagcaaaaatagttgaaaatagtttt

SEQ ID NO: 36209 - DNA, 1464 bp, Heterodera glycines
agcagggctggccgtgatcacggatcacggaaatcacggggtttttggggtgccatgatctcggatcacgggtcacggattttttcaatttttccgtgattttgatccgtgattggcattttatatatggaatttttattgaaacgaaaataggaaattggtgtgaaaagagaaattttttgagaaaaaattaaataagtaaatccatttatgttaaggaacttacctagtgattaagccttgcgtctttcattgtttgacccttgggttcaatttcccattgggataggagaatttttatattttgttttataattttaattgaaatttacaataattaaaaagaaaattttcttacattaaatttttttcattatttttaaaacaacattaaacccataaattaacaaatgattggacattttttggacaaaatctgttaacacattccactaaaaatttcaattttttcctggcggcacctatcggcaccgcctgaccctatccgtaccacaaaagtttttgtaaatggcgagccgcaaaaaaaagagatttaatcaaaaaaaaaagatttggtcaataagttcaaaatatagtcctttattttcctcaaaaaattggctcaaacagtaaatttggtcattttttggaaaaaatctgctaaaaaatcgaattaaaagtatcggcaccacctgttctgccccctgtactcgaaaagtttttgaaaaaagcacgccgcaaaaaaaagcgttacctatatggtttggtttctttaaaaaacttttatttatttttccagcgattaaattccgttttttgttaaatttaaatacaatcacggatcacggaaaacacggggttttggggtgccgtgatcacggttcacgggtcacggattttttagaagccccgcgatcacggctcacggatttccgtgattagaaatttaatcacggccagccctgattcatagggacaagagtggggttagggtattgacaaacaaaaatgggttaatggcaactcttacaaaggcaactcgtattttacaaaaaaaaaaaaagcctaagcttagcctaggcccaagcaagcgtaagccttggcctagcctaaagcttaggcctaagcttaagccattgtacgagttgccttttgtacgagttgtttgacaccggcattcataggggacaaaatgggtttagggtaatgaaaaaaattaaatgatgaattcacccgtttcaatccctctataaggctacagtaccaagggcaccaatttagggatacagtatactactttaaataaaaatcctataaaaataaaataaatcttcttcgtcagaatggcgactcattgaactcgatggcacgcaaagcacaacggttgtccaactttgtgcgctgttacactcagcaacagcagcaacttctgcaccatgctgatcaaattgccgtcccatcgaa

SEQ ID NO: 36210 - DNA, 999 bp, Heterodera glycines
aatagggttgcgctccgacattttcggggttttacgaaagtcgtcaattgcacttgaaatgagatggaagtgtctttaaatgagtttttaagacttttttgttctggaactttttttttaatcttttttccgactttttatgaaaatttcgcccccgacaaaggtgtctgcccccgacattttttaaatttctccagccaaccccgacaaatttagtcggggaattttcaccccgaaccccgacttttccaaccccgacgtcgggatcgcaaccctacattttaaggtcagtttgtaatgcgaccaatgagtgacactgtcggttccctctctgaagcattgcaaaacgaagacccggggattgagctcgtgacattctacaattcaggttcataaaccagtagaattattataactggatttgtttaaacagaagggtcaaggatatcgaaaagcacacgaattcagcatcttttaagacttccctctttctacattcgtatcaacgatacgtgagtttccaaatgttttaatacggtaatttatgtatgactacatttttgccaggtttttcaagttcaccataaattcctttgtttttgagaacattgagaacttagaaactctggatgggataaagtcgaaagtgagttcaaacataaatctaggagtaatgcatttttaggtattttctatgtacagcctaatgaacatggatgaatacaaattaaaattggaacactcacttatggaagagatagaaaatgtcgaacaaaggctcagaccgctgataatcgtaggtttaatgtttgtttcccactgtttgtttgataactcatccgttctatgacttcagtttaggtacgatctgccattgaaaaagaatgtgaagaatacactcaacgtgtcttttggctgggattttccgcaatttgttttcaagttggcgtttttgccaggtttaattctttgattcattacatttaatttgacttatta

SEQ ID NO: 36211 - DNA, 567 bp, Heterodera glycines
gaagagatagtacgccaaaatgagagaaattacaaagaaaaagaaaacgacgagatagtactaggcttttctctgcacagtggagttgacccatagtgttggtatattacctatctatatatataaattcggggcggctcgtttccccccccgccgtttcgctacttatcccgacgatttgctatttagcgactcgtcacaagacgcttcaagacggacgagtcttttgcccacacatggccaagtgccgacgctgacagtgacacgggggtcaatttgggacgacgccgcgggggacggcggacagcccaagggcgaagaagcagagaaaacaccacgatcagcacacatgtcatttttggagcacaggtggataataaagcagcattggcaaagcaaaacattgcgctgatttgagggcggacgggagaaagccctcgcggcttctccattcggtgttcgcgccaatctctgcgttgaatcgccgccgcaaacgaacgaaggcggaacgacgagcactcaaagcttttcggttcgaaaggaaatgccgattttggcggagtcggt

SEQ ID NO: 36212 - DNA, 587 bp, Heterodera glycines
ctgaggctttcgtttttatttattttttgcaaaattccttctagagtattttttcagaaagggttctgaaacgcacccacttttatttacatgttagtttaggcactctgatgctttttctatcaaaaagggagatgaataaaatttttaaaaatttttaattcctttttaaacaggccaaaaagtttaggcttaacttttttttcagaaactgatcagaagcgcaccaaactttgcagggatactgaaaggaagagaaataacctattttaaatattatctagtcagttcatttaaataatttttatccaaaaaatttttttttgggttttcggggcagtccccctgaaccgatgcgcccagatttatggggagaccgaatccttcgggaatagcttccctatagcctgtactttaattctgcgttggatttttgctccccataattgtttgagtaccccaaacggacacttgaaaaaatcgatttttttgttttcggggcagaccccccgaaccgatgcgcccagatttatggggagaccgaatccttcgggagtagcttccctatagcctgtactttaattctg

SEQ ID NO: 36213 - DNA, 1094 bp, Heterodera glycines
  unsure (1)..(1094): unsure at all n locations
ttttgctcattaagtgccttcagtgttngcagtttagccttgtcaatgggcacgcgnagttgagggcggcgtatttcgtaaaagggcgccatttcgttgtcagtaatgctctgaatgcaagggatttcagtcttttttgatagaagacgagattcggactcaaattttgactctttaaaaagcaaattatgaaaattatccatttgctgttataataaagcacaattcaaataccaaccttaagcaattcgagaaaaattgttgcgacatcttttttgttttctttacacaagaaaaatttttgagcgatttcaagatcaggattcatttttctatctgaatgggaatggcaaatttggaaagcttttgattgaaaattgccgaatttaagagttaaaaatttaaaatcatcaaataaacaaaatgccataattattatttagcactaattagaaattatcagaatgaaaaatgaacattttctaaatttttttttttcttgacatttgaaaacgcaagtcttagagaattggaaaatgcacaattcatataaatatatatttattcgtcaatgagaacaaggaccataaaacatgcataaacagtgcaaacatgatacaattatgaaatacacatatactgtatatggcataattaaatagaacaacaaccatttgtgggagaatacattcagcaagacaatgccacagggatatggacatacaatatacaatatatacatacatagagatacaatgttctctttttttaattgggggattagtgttacagatgaatatattttttatttgaatgatttatatcagtaggttaaaaattgtttgtttatcgcagggctaggatcgaaaaattttcaaaatcagaacatcgggcccaaaaaatcagatactggggccgaaaatcaagaaattctgccaaaattgcttcaaatcagttatttttacaatgtttgatcaaaagtgtatcaaatattatatttttcatctcccattatcggttttaacaattttgtggagaaaattagcaaagcataaattttagcgcattcgagatcaaaaaatcagatttttaac

SEQ ID NO: 36214 - DNA, 1107 bp, Heterodera glycines
  unsure (1)..(1107): unsure at all n locations
tttatgaatcccaacggggtgggctgtctgtttaaattgggctggaaaaataaagaaattttttacctacaccggcttccctttaatataccaaaaaaagtaaatttttaaataaataaattattcaatttaatatatttctgattatttaaattgaaaattttagtttggaaattttcgaagcaatggttttatttttcaatttttaatttaattccctaaatgaaattgttaaatacattttgtctgagcaatttaataatgttgttttggcatgaaatggtgtaccaccacaatttgtccgcgacggtcattttatgtacatttttgcctaaattgcagtcaattctaatccatcatttcatgtttgcctttctcgccaagcatttatcatcatgcctttgtgttgagactctatttacacacaagtccaaccaaattgtggtccattaattcgaaaaaaaatatttttttttcctacaatcaatcgcaaattactgggaaaattcaacaaaaaaaaagaaaacaagttttcatcataaatgatcggagagaataaaattattttatgttaaaacaatgaaaatatatttcaaaaacaataaataatattaattatccattaatatgattgcgtaaattttttctattattttaaatgaccacaagcagcacttcttctgaaaagggtgattatgaatttcattggaagaacccaagggagattaaacagaagtaaaatatatatatatttttaattttagaaaatataaaaacatttttagatgggagtcattcgcaaaatttgggcaatctcaagctcaagcaactcaagtcactgaaatcacagggaaaaacttcgataaatggtgcacaaattaagagttatttaattaattttaaaatgaaatcgctcgcaattttctaattcaaaccctaaaaaacacattattttttanatttacttttataaaattatttattttttaaatttattttacttaaatgaaattttagagtgcttatttttgctttactatttanaaattataattaactctcaaaattaatgtaaatgaaggtttataattaatcattttgaaaaat

SEQ ID NO: 36215 - DNA, 1744 bp, Heterodera glycines
  unsure (1)..(1744): unsure at all n locations
tttccactcccttctcccaggggtattattttgtactcacccatgtttcaaaataaacttttcaaaccccatttttcgccctgtgaatgttatttttattgaattctgaaccggtttgagtagattagactagaaaaaattgaaaattttgaaatcatgtttcccactcccttctcccaggggtattattttgtaaagtctttttttccccaataaacttgtcaaaccccatttttcgcaccgtgaatgttatttttattgaattctgaaccgttttgagtagattagactaaaaaaatatgagtgatcaaactttcactaaaaagttaagcctaaactttttcccaaagttaaaaagcaattaaaattttattcacctccattattgatagaaaaagcatcagagtgcctaaactaacatgtaaataaaatttggtgcgtttcagaaccctttctgaaaaaatatttatgaattaattttgcaaataaataaaaacgaaagactcagattttcgaaaaatttttttgagccagctagctcggcgctcatttcagtgtaagttagtcctttaccggggagtatccctgcaaagtttggtacgcttctgctcaattagcaaaaaatatgagtgatcgaattttcactaaaaaagttaagcctacattttttggcatatttaaaaagcaattaaaaaattttaaaatttaataattttcctgcaccgaaggtactcactcggcctcttcgcggcctcgtggtggggccttcgcccccccccccccctcccacgcccttcagagcacgacaaatatttcaacaaaaattttgaaaaattgactagagcaatcgaacgctaacggacgacctaatggaaaaaatccccgaaggagagaatttatttaaatcaattctttcgggggaccgtgccgggtggcgcggggtaaagcagtgctggttcgtttcatcacggaaccgaaccttttggctagtcagcaatcgttgcttaactgccagatcggacgggtgcgcatgattccnctgttccaagcaccccaccaaaagcaaaacgatataaccaaaatataaggaaaaattttttaaaacattttttctccatcttcctttttgatactaaagcatcagagtgctaaaattaagttgtaaataaaatttggtgcgctttagagcactttctgaaaaaaatatttatgaaacaaaaaaatcgattttttcaagtgtccgtttggggtactcaaacaattatggggagcaaaaatccaacgcagaattaaagtacaggctatagggaagctattcccgaaggattcggtctccccataaatctgggcgcatcggttcggggggactgccccgaaaacaaaaaaatcgattttttcaagtgtccgtttggggtactcaaacaattatggggagcaaaaatccaacgcagaattaaagtacaggctatagggaagctattccggaaggattcggtctccccataaatctgggcgcatcggttcggggggactgccccgaaaacaaaaaaatcgattttttcaagtgtccgtttggggtactcaaacaattatggggagcaaaaatccaacgcagaattaaagtacaggctatagggaagctattcccgaaggattcggtctccccataaatctgggcgcatcggttcggggggactgccccaaagacaaaaaaatcgattttttcaagtgtccgtttggggta

SEQ ID NO: 36216 - DNA, 816 bp, Heterodera glycines
ttattttatatgtatatattttttattcacgatcctcaaagaaataacacaaatatagaattgaatttgatttaaaattaagaatcccaacaaaataattcaaaaaaaaagaaaataataatgatattcctttaaatgcgacagctgaatacttaaaaatatttagatatatatataagataaatcatggattatcccgcaatgtaaaaggagaaacaagggtacgaaaacgagaaaataatttattaaaagatatagacaaaaatataaattcaacattaaattattttaaaaattaaactgacaaagtcagaaactttgagatgtttgtttcattacttttattttaaataaataaagaagaaaaccttaaactttatacataatgtgaacaataagaaattatgatttgttaaaaactatcaaaaaaattattattatattgagccataaacagctcaaaattttattatctgattatatttatcaaaattacataaatattaaatattgctcaaatctggctaatataaatttaaataaatcttatatttacttttagcttctaattataatgaatgaaatttctaaactaaagtaaatgtttttaattttcaaaacaaggcaataaaattaatattggatctgctaaataatctaaaatacttaattatttaacatgacttggatttaaattttttacaaaaatgggaccttaaccgttacaacagacaaactgcaagtgcagctttgcaataacacagttcaaccaccatcgagatccacacttttaacgacgccaataacatcgtcaac

SEQ ID NO: 36217 - DNA, 698 bp, Heterodera glycines
actcatcagcaaaggtcctgccgacgacgtcagtgatgcccaaacgggcaaaaagcccccccccccccccgcaggtccaccatggacctgtgttggttggtccaccgctgccccttctttcatttacccacctctttgatgctttctctctcttcgccatgcttttccccccgagttattcagtcgttcgttcgtcttcgtttgtcctccccccccctcccttttctgtttcattcgctttcaccgcccctttccctttaatgtccaacaaagtgcaataaacgcaactttcgaattcgaattgtcgctctgtctgttgttactcaatggttgacaatggcatcggttgttctgccgccgttccgccgccgcccttccctttcaacgtgctaatgagcagtgaattccattctatgaacagaggcacaatttgcaaagatgaaaagccaacggaagccgagcggaagagaagagaaaatgagggagaagaagaggaagagaaggagaagggcacgaggacggccaagaagaagaagccgtacaaggagctgaccctggaggaaaaggtggagctgattcgacttgcggaacgctgctcaaacctcagccaggcgagcatcgcggaacggtacgcaattgcgaagagcaacgtgtgccgcattctgcagcggaaggacgagtacataatggcactggaa

SEQ ID NO: 36218 - DNA, 1208 bp, Heterodera glycines
ctttaaggttttgtctttgactttgcttttttgtcctctctagccaatcgaccacgttaattcattctctatacattttgtgtcttatttcatgaaattatatataatttaattttaaataaagaggcaaatttttacagaaaataaatagacgctgactaattagctaacatttataaagaaagtagaaatttgattaaatgcatatacaaaatattacttttttaaaatttgtataaagttcctagtcgtatgtgctttgcgttggttggttggcgtgggtgactgtggtggttgggccgtttttgcgatattatggctggaaaaaagatgcgatttcgctatggggagcgcggccgtctgggttcaagtgcttgcttgcgcttgtgctcggcattgaacggtgatggctgctgctggggtgccacctttgtcgtggcctcagtttctccagcgattggcagctgtcgaaatgaataaacatgcagctcgtctgtgtgttaaagaaatttggcgagttaattgacttgtgtaaatgtggcctaaggcacaaatgctgtggggaactcagcactggggatgctgaacctaaagttggtggtggtgttggtatacgagtgagtggcgtattgccatggttgacaagccctatgagttcgtggatcggaactccttgcctggggaccagtgtgcttgcattcgaaaaaacacgagacataagcgcccgaaggcctttggcctgaggaagtgtcctaaccgggaaatccggagtgctcgtgtgagtgcctgtgcactgccctcggagctgtgtccagcggcgagatggttcttcccaagtccgggaagctcggatgcctggccagcgctgtgtcattaccacttgctcggtctccttcgctgcccatgcgcacgcttgcgctgaacggagttgtttctgctgaaactatccgtctttacaagacggctgtaatagcggcgcttggcaacgctcgctagcagctatctggttgatcctgcctgaactgatgtgttcatttcaaagattaagccatgcatgtgtaagtttaacctgccagacagggaaactgcgtacggctcattacaccagctataatttacttgaccttgacttcttacttggataactgtggtaattctagagctaatacatgcaccaaagctccaatctccccagagcggagcgcatt

SEQ ID NO: 36219 - DNA, 553 bp, Heterodera glycines
aaaattgggtacttttccgttttggggtcaacgtttgaattttttaaaaaatcaaattcggatgagtagaattgcagaccaattcgaagagttcttagctcaaattgtggcatggcatttatgcctccgaaacaattttggcgagtagctttagcatttttacgtgccagctgctgattttaaaaaatcaaactttggctccaaaacggaaaagtaccaaaaattgtttggccaaaaacatttaattgaataaaacgacaaaaaaaagaatgttgtatacatatatttatttggtgtacgaagcaaaaaatgaatgttttggtgtcgaaaaaatcaaaataaacgagatgaggtcccttgttgctgcaggtaatgagaatatttgccaagctcctccggtttgagcagacgcgacttgaaaaaaaaggcaaagaatttgttaaaattcataaatgttttaaattattgaaattttaaaaaaatacgatgggagttagttaggtacttgggtttttgtttgattttatggaacatacccattttcgacaaaaaa

SEQ ID NO: 36220 - DNA, 841 bp, Heterodera glycines
cggctattcgggctttagtagtgcaatttgatttacctcctaacccaacgccagagcaagtgattaatcacttaagggccctacaataccgattagcatctaatgggtttgatcagtggaattagctcatgccaattattttgtagaattgtaaaaataggctgttgttggggccttcagcaagcctaataaaaaatttaaataattacgaattaatttgttttggcttttaaaaaaatattttggcttgtattttttaatttgttgatgtgtgcttctttagttttgtgtgtctgcggtagggccgaaacacactttttttcttattttttgttttcttttggaagagcaccgcactgacgaggcccactcttccattagaaatttttataacaaaaaaaatttttttcatttaattttttctcaggaattgtccgcaaatgtccgtccgcaaatgtccgtccgcaaatgtccgtccgcaaatgtccgtccgcaaatgtccgtccgcaaatgtccgtccgcaaatgtcccactgcgtaaagcgcccatccgatggatgggagggttgaaaaatagaagcaagtcctcctcctccaaaggagggggtggataaaagaaattttgcaaacaatatttgtcgaaatgttccatcttcgaaaacagttttaaactcataattgcatagacgaactcgaattgggtcaggtaattggcgtgccaattcgaagagacgaacacgcgacggtcaaagttctgtcgcttaagcattattttaataaaaaatttttttttaatattcaacaattattattcgaaaagaaattgccttttggaattttcg

SEQ ID NO: 36221 - DNA, 1079 bp, Heterodera glycines
  unsure (1)..(1079): unsure at all n locations
attcaaaaatgcaatggccnngcggcggcgggacgcccctaccgggaggcgcaaaaagcaaggatggccgctttgaaccccttgctagctaggaatgtgccggcgaagaatggtgatccggcattcttcgagatttgccagcaaatctgggcaattctcggccaattcttgggtaagtttgtcttatttggtatggggaaggcgggagatggggggaatgaaaacggcaaaatgcaaaaataaatgcttgtaaggatggtaaagggaaaaatgagaaagaaaaattgcgagatgactatcagtggatcagtttaatggccgagaaatccattaggggaggggcataaatgtgtgcaaattatgtgatttatttaaaatgattgaaaatgattttaaatatatatatttatttgaaagaaagttatgaaattataattacatttaattgatatttaattaaatttgtccttgaattgtccttaaatgctaacttaaaaaaaaggaaaaactttgggatataatgtgaggttactgtaggttatattaccgatccggctttaaggggaattgaatccagtgactttcggctatttgaccaggccggaggaactcgcaacggcatgggcaacagtatgccggcgcaagttggcctgcatccgctgcaccattcgttgccaatgaagcgcctcgtgtcgtctttggcgcacgagggcctgcacatcctagaattccaacagggaaggcagtggccgagggctggcaccagcacgaagcacgatcatgggccattttttcgtgccaaatgtgccgaatttgatgagatttccggtggactgatccagccggaaatgcaagagtttgacccattgtgaattttgggtattttattattataaatttggtaactttgattttattatttataagaatataatttaaaaaaatattaaactcataattttaataaaaaatttggaaaatatcccaaaattaatttttattaatttttttttttaaatttttgggcaaaaagtttagaaaaaaaaaatttttctcaaaaccaaaaaatttttaaaatt

SEQ ID NO: 36222 - DNA, 1027 bp, Heterodera glycines
tatccctttttaaaaaaaagttataaaaataaaagtgcttttgggattcgggaccaaaggggtgtgaccaggatttttgagtgaaaaatttttccattaaaaaccatccaaaaacatggcattaggggttatttgggccgctgatcacgaatacgtattcaaattttacttttgacatcgttaagacctcagaatccctgtgtgattggggattctgaggcatcattttgaggggggggggaagttcgaatccggccggtgtacattatttttatgtgcattttttgattacttttgcatgtttaatttcatttcaaattaaataaatattatattattaattttcattttaataaatataaatagttttgtttaatccataaaaaataaaaatttttaatttaaattaaattatttttttgtgaaaaatgttttaaattaaaataataatttatttacttttattaaagaactcctgtattttttaaattagaatttgtaatattaatttcttaatttcaatttaaataaatattcaatccctgtacattttaaactctctttttaattaataaaaggaataatttattttattttttaaaatttattaattacattcaatatttaatcttactttttaataaacgatttccttaattatttaattttaaaaccatgattgtaccctttttaaccattattgtaccattccaacaattattgtaccttttcgacagtggttgtacctcatctaatcactgttgtacctcttctaatcactgttttacctcttctaatcacttttgttcaaattttaatcactgttgtacctcttctaatcactattgtacctcttccaataccttttccaacaaatcaccaaatttaaaaaacgggcgcgaagcgcccgtcgggcccaacaaaatttaaaaaacgggcgcgaagcgcccgtctggccaaaacaaatttaaaaaacggtcgcgaaacgcccgcccaagcccaacaaaattttaaaaacgggctcgaa

SEQ ID NO: 36223 - DNA, 1032 bp, Heterodera glycines
attattaataaaaggaaaggaggataatgatgaattaagaatgaatgattgcctttgcgccaagtgggggcggggggtaaatggccaataacaaggacattaattatgcttttatttgctatgctttgatattaaaaataaataccaatgctttgcggggaagtgaaaaaaaggaaataactgcaaaaatatgtaattaattagtgatggtaaaaaaaataataacaacacaaaatgcaaattaaagtgagtgtttacagcggcggcagagattatttgggccgagcgacccaattagggccaagggactgagggcggcggagagattggcgaagccaaaaacggcgaaaacgccttggacttctccaatttaattaaaaatgatatttgcacatttgttctctttttttccggccacaaatcccccgcttcattaagcccaacccccaaaatcccaaaaaatcaaattttaaccaccgccctcagccggaaaaagttggacagaatcggccaagacaaaagaaaggtcaggtgatcggtcggcggtcggtccctttgcttttcccttccgccgctgcgccgtttttttcattcatttcgcagcctatcgaaagaataaacaactcaaagccaaacaaaaatggaagggaccgaaatagcaaaggaaaaacggagggaaaagggggaaaaaggaaaagagaaaagggggaaaagggaaaaaagaggaaaagggaaaaaaaggaaaagagaaaagggggaaaatgagggaaaaggggaaaaagggaaaaaagaggaaaaggaaaaaagaggaaaagggaaaaaaaggaaaagagaaaagggggaaaagggaaaaaagaggaaaagggaaaaaaaggaaaagagaaaagggggaaaatgagggaaaaggggaaaaagggaaaaaagaggaaaaggaaaaaagaggaaaagggaaaaaaaggaaaagagaaaagggggaaaagggaaaaaagagaaaaagggaaaaaaaggaaaagagaaaagggggaaaatgag

SEQ ID NO: 36224 - DNA, 525 bp, Heterodera glycines
ggaaagaggagagagagaggagagagggcgggagaccttttagagggcgggggagagaggagagagggcgggagagacgttagagggcgggggagagaggagagagggcgggagagaggagagagggcgggggagagaggagagagggcgggagagagaggagagagagagggagagggagggagaggagagagggcgggggagagaggagagagggagggagagggaggaagaggagagagggcgggagagagaggagagagggcgggagagagaggagagagggcgggagagagaggagagagggcgggagagagaggagagagggcgggagagagaggagagagggcgggagagaggagagaggagagagggcgggagagagaggagagagggcgggagagagaggagagagggcgggagagagaggagagagggcgggagagagaggagagagggcgggagagaggagagagggcggtagagataggagagagggtgggagagagaggatagagggcgtga

SEQ ID NO: 36225 - DNA, 1234 bp, Heterodera glycines
  unsure (1)..(1234): unsure at all n locations
tccctctctctctctctcactctctctcacctataatccatccacgggtgttgagtttagaaatttgttaggggaagaggctttttgaggagagaatgaagatnaaaagatntganganngantaagggaaggataaatggttnagnganagtggtganatatggnnagaanatgngatnattattagntggntggtngttgnntgnttantagtnggattgtagtaaatggantaaatttaaanttannttaaaattatttantttttgantaataaataaacacttaaaaaaaacacctcataaattattggaatccttttcgctttagtttatttttgtcattagttctaatgagttgctgctttttcaaagttcgctgtttttcgtccattcattgcttcatttttctccttttcttcggaagaggtcatttgaaagcagaagaaagaacggtaatattctgaaataacggaaatgggaaaattggattaaattgggaaattgttaattattccaacagtgccaaaggaaaagcctttcattgagaaagagaattaatattatttggctattactgtaaaagcatcattagacagtcagaagagtcggaaacattggtctgctggcaaaattgccaaaagcaataagcaatattagtcttccattaatgtccaactccgtctgaatccaattagtgccgtctttttcaggagaagcatttcagctgtgtctcttcccttccgtccggctttgagttttgtgcccaggggctgtgctttgatctcttccgcactgactccgttcgtcgtcttcgtcctttccctttttgtcccttcgtccattgctttctttgtccctttagggccaaatcctctcgggttgtgccaactcttccgacctttgcattgcctcgggctgttccctttcctccgatggccaatcagttcgtttgtctgctcattcttttccccattttgcctttctttcccaaagtttgtctgctgttgtgcccattccttctgcaatggcaaatcgccctctttggttcgggcgcggtggaaaatgtttcagaagggcgattatccaatggcaattgagggaggaagatggagaaaaagtgccaaaaatatgaaaaaggaaaatggggaaaataataaaggaattggaagtgaggaacaaatgccaatgaatacggcaagaaaaatgatgacaacaacaaataagccaaaaa

SEQ ID NO: 36226 - DNA, 811 bp, Heterodera glycines
gttggagttcatttgagtgttgagcagaaaaagagatagcgtgttttttcaaaattttcagagccaaactcgcccagaaagaaaatccagaaaaattagggtcgtcgctattattccgaaaatgtggttggagttcatgtgagtgttgagcagaaaaagagatagacgttttttcaaaattttcagagccaaactcgcccagaaagaaaatccagaaaaattagggtcgtcgctactattccgaaaatgtggttggaattcatgtgagtgttgagcagaaaaagagatagacgttttttcaaaattttcagagccaaactcgcccagaaagaaaatccagaaaaattagggtcgtcgctattattccgaaaatgtggttggaattcatttgagtgttgagcagaaaaagagatagacgttttttcaaaattttcggagccaaactcgcccagaaagaaaatccagaaaaattagggtcgtcgctattattccgaaaatgtggttggagttcatttgagcgttgagcagaaaaagagatagacgttttttcaaaattttcagagccaaactcgcccagaaagaaaatccagaaaaattagggtcgtcgctattattccgaaaatgtggttggagttcatttgagtgttgagcagaaaaagagatagacgttttttcaaaattttcagagccaaactcgcccagaaagaaaatccagaaaaattagggtcgtcgctattattccgaaaatgtggttggagttcatttgagcgttgagcagaaaaagagatagacgttttttcaaattttcaga

SEQ ID NO: 36227 - DNA, 1548 bp, Heterodera glycines
aaaaaccggtaattttagagcataaaaatttttggacaaaattttccaaatacaaaatttttattcagttttcgcgtgagtacctgttttttagcattagaattgttcagaagtatatgtatattcaggttgaccaagtttttttttcaaattcaggacatacagtcatggtcataagtgttgtcccatcatgctttgaaaaaaataattgcgtataaaattgtcattttccaatttcaacagataagtagcataccattggatagcattttttatgggctttccaatgataccatatttgcatttgtgacataaacatttatttgatttattttaccatgttcacaatttgatcaaaatataggtggtcaaaagtgttgtcccatttcatttttaaaatattgcttctctggatcagcattaaaaaaatctaaaaaaattcaggtaagcataactttggatgctgatcaaaaaaggtagcaacaccaagttgatcagatcactccttcatggtgatctgatcagcccattttggctgggaacgaggggtaaatttcaaaaaaaatttctagggggttgggaaaatttttctggaaaatttgagtaggcccattttatagagcacaaaatttgctaccgaattgcctttggaatagtgggtctacgatttaggcccgctgagatacgtcgacttttatttcggtgcctataaaaagtactgtatttcttaagaaaatagtgcattttacactacgtcaaaattgaagtgcccatacctcagccggtataagtcatagagacatgcggttttttgaatattgtagagaattttgtgctctataaaatgggcctactcaaaatttccagaaaaattttcccaaccccctagaaattttttttgaaatttacccctcgttcccagccaaaatgggctgatcagatcaccatgaaggagtgatctgatcaacttggtgttgctaccttttttgatcagcatccaaagttatgcttacctgaatttttagatttttttaattattgatatttgtgccaaaaaatgaaatgggacaacacttttgaccacctatattttaatcaaattgtgaatatggtaaaataaatcaaataaatgtttatgtcacaaatgcaaatatggtatcattggaaagcccataaaaaatgctatccaatggtatgctacttatctgttgaaattggaaaatgacaattttatacgcaattatttttttcaaagcatgatgggacaacacttatgaccatgactgtaatatcatttttataaaaagggggtgggggcgcgccgaaaagcggcgcctaattttgatacatattggactttttcttacataatttcattttttttacatattttgaagaatttttacggaaattttttggaaatcctcaaaaaaagtccaaaatttcggcaatttttcgtaaatattttcattttttttacatattttgagaatttttgaaaatttataaaattcttatgaaaaataaaataaccaaaaattaattttt

SEQ ID NO: 36228 - DNA, 870 bp, Heterodera glycines
  unsure (1)..(870): unsure at all n locations
tttgttaaggattttttcgaaaatccttaaaatagaggcacattaagcacaaaaatcccgaaataggccaaactaggcattataaaagtcatcgtagacaccccaaaccaagcggaaaatgcgtttttcgtgcttatctgagcgtatgaagtgaagtgcgcaaaggcatttgcctaaaattcgcatccctagtaattagtaagtctaaattaattcgggaatcaaaaatgcaactctgaaagcctgaacattgggaaaatttaggcttgcaaaaaatttgctattaatttttcgtttgaggcatgactcgtggaaggaacgtttttgatgggactgatatggccggtgtggaaggggtgggaacgaacgataaaatggcattggcactcctgctgcggggggatgaatgtgagcaaattttgtgcggagagggacgagatgggattgattgttggaatttgtattttttttgttggactaatttggcctgttgtggtgggtggcacatggcaacattagacgaatgaagcaatataaatgtgacagggattaaagcggcttaatcttcctctctattttcggattaatttattcccccgaggggatgaacgacaaattgggaacactaaatggcctccgagggataaaatgggcaaaatgggaggagaggcgggggggaatggnaggtggtcatcggtgatgggactgattacggaagtatttttggtgggactgatatggccgggtagggtggggggaggggcgaaaaacgacacatggtaacattaaattgaaaaagcagctaatctctctttttttaaattaattgattttcccccgaggggatgaaaacaaattggtggggacact

SEQ ID NO: 36229 - DNA, 1425 bp, Heterodera glycines
ttcgaatgattgtatataccaaatttgaattgcctaaatgtaaaaaaaaagtattttgaaaaaggtagaaaaaagtaccgtcaaactgatattggatgatgttgttgaacaattcaagcaaaaagaaaatcaaatggtgatttgttggagttgagaaaatgaaccaaggagtgctaaaggaaaatttgaatgtaaaaaaacaactgacaaattgggtggacctaaatgcttcaaccaaatgcactaatttattagcagtaaccatcgatagcgatttgagataaggagaaactgaaaaaacgaattgaaaataatgcaaaaacaaaagaaaactttaccattcacgacaattgtaagaagacaatcgaaaagtgactgcaatttgtgatttccgctagtgattaatttgtggaaaacctaaaacatttttgaataaataaaaacatgattaaaaaataacaattatcagcaaatcggcatgagatccggtaaaaattggcacgtcaataagtcctcgggaagtgaaaggctaaaaatggagtaattaatataatttcaatcgtgttttatcagtcgaattttgacttgccttattcaatcggacaccgaaatttctttcaccactcaaaagaagaattaggaaaacgcccatatgaatcaaaccaatccgagcttaagaacaaaaattcaattaaaagggtacttagaagaataaaataaaacccgacttgggtccgtcctcgaatcattgagatggaacaaaattgggacgagaagttcaagcacatcgctgcttttcagcacataataaaggaatttctgtaacaatccgataaaatagtgaaaattgtagccactgtaaaaaggacctggtagtactcacaacatttccatagcaaaacaagcagttcctggtgcagttcaaccttcttcgtggagttcggcagataagaagtttgcaactgactgttaagaagtcgggtgaactcataaagagaaaaagattgaaattaataatttgacaggacggccaaaaattttttaatgtcttttttggtcggtctttgccgtggaaaaggttaaattttgaaaagggacaaaattcaaagaaaaaaaatttgaagtaaaaaaagggaggaaataaaattgagcaaattggaggacaattcaaaaggcggaaacaaacgatcaatgcccactgacgacgaatccattggccgaaaattaagtgacggacacatccctcccccgggggatggaactttcatcaagccattcattcattcattcgtgctataaaccccgaggagattcttgcctagcaaccaagacgaagcccggggggtccattacaggggaggagagggcacttaagatggcccaagggagaaaccgagacagtgacagcacaaggagaggggtgag

SEQ ID NO: 36230 - DNA, 879 bp, Heterodera glycines
tccatcccctgctatttctccccctttcctctccctcttttccgctctctttacacaatttcttctccttctttcgtcggagtgtctcccaccaattccaactctttccccataatttgtctcctcaccaaaacttaccaatgaaaggactaaaaaaggttaaaggggcgaaaagggctgctgagtttatagcgttattctgtgcataatttatgcattcgcagaagacatcagaaaaacatccgcaagtaccaaaagaaaaacaaacagttgaataattcaaaattcagaaaattaaagcaacaacccaactctaatcgcttcttctccttccccatcctcttctctcacacattctatccctcctctctctctccccctctctccccctttctctttctctccccccgcctcccctctctctcccccgctctctctctccctctctctctttttatatgtctctctctccctctctcttctctctcttttttcatcgctccctttcaaattttaggtcattttctcccccttccttctcacaaaaattcgccaccaaaagagtctcttctcatttattgccaacatttctgggtgaaacctgagtgtttctccctccccctccctctcttacacagcaggcatttgctcaataataaacggaacattatgtgcggccatgtatttttcgggatcagtgcctccgagttctttctcagaatcaatttgcgagcgttttccaatttcttcataagattatatggtaattccaaaaatgtctcaatttccgtttcaacgtcatcttcatctttttgggcatggatttggacagaatgcggccatgtgttttttcggttcaatgtctccggattctttcga

SEQ ID NO: 36231 - DNA, 979 bp, Heterodera glycines
  unsure (1)..(979): unsure at all n locations
atataccaatcgatagctctcggtctgtaatgtaagacttcgaaagaactttttntgcggcaacaaaatccctgaagggttacagacccgggactgaaatggccaaatgcctttgggactgaagcgtccaactggtaaacatgtgtccgatgtttgaatttgtgtggcgttatgtaattgttttgcgttaaaaaatgatttgaaaatgcgtgtgtgtgggagagggagggagtgtgaaaaaagagagagtaagtggaaaagtaaaagaaataagagaaaagaaattaaagggagagaaaatagaaaattgtctcgcatcccttccttatttatatcccatcttttattatataaaatatttaataaaagaaagaggaaaatggttctttttgattcctgtttttgtttgtgagaaaattttgcctttacttttctacattatttaatgatttttttgtttgcgattttcacttgaatttgttaatggtattaaagaatttgttattgttaaagagaaaagaattttatagttaaagagcggtgttttttgattttgtttagtaaaaaatgaagaagcaaaagattttgaatttgttttcattttgtaataggaaaaagctcgactttgaatttgatttgtgctttgattagtaaatgactatatgtttacacttattttggcattacggtttgccaagtaagaaaggatttgctgaagttgagtccagtgattgggataccgaagaatttgagtctcgatgattgggatgcagaagattaggtcacagtaattggaatgcgaagaattggtgagactgagttccggtgattggaaggtcgaagaatatgtgagattgagtccaaataattggaatgccgaggttgttgggattaagttttgaaagctgattaaatgccaaganatgttatgccataagaaaatgccaagaaaagggtgcgaggccgcgaagcggccgag

SEQ ID NO: 36232 - DNA, 1359 bp, Heterodera glycines
tgacttgacattattaaatgaatattaaaatttctggaaaatgagtcaaatgttggtccctttcaaaaaatttttctagctttttaaatttcttgaaattttgtataggcctatattttgaccccctctagcgattccaagtttattttatggaacttaagtttttaactcgagatcggctcttcagttcttacaagggaaaatctcggcaaaatttttaaattagtggggttttttggcgttttgaatatatgtaatgagaatatccgaaattcagtttttttcaattatactttggaattattttttgtttatgtctcgagcacaaaaattagttacacaaacattttgcagacagcttttaattgataccacgaattagtttgtattgttttagatttgacaaataaaatgtccccttctctttccgttgccaactcaaatgtctctcgaccgcttggccaaccaaaagtagcgggcttcaaagataaggataagccggaaagtgttcgtactagcaacattgtggcagcaaaggctgttgcggatgcggtgcggacgagtcttgggcctcggggaatggacaaaatgatccaatcgggcaacggagaagtgacaattaccaacgatggggcgactattctcaaccaaatgtcggttgtgcatcccaccgcaaaaatggcaagatttgtgttgtttgcttttatcaattgcactgttcagttggtcgagctgtccaaggcgcaggacattgaggcgggcgatggtaccaccactgttgtggtgttggccgggtctttgttggacgctgcagaaaaacttcttgccaaaggttgattaagctcgcttatacgccaaattttagcacttttgtttttaaaggaattcatccgaccaccatttccgactcattccaacgggcggccacattttctgaaaaagttctcgaggaaatggccacacccattgacattaacgatgacgacgagttggtgaagctcgccatgacgagtttgaactcgaaggtcctcagttcactttctgcactttctttcgtttgcccattgtttccttcgattttccttttttcaggtcgtcccgcaatattcccatctcttggcaccaatggcggtgcaggcagtgaagaaactgatgagttcaccggaggactcaagtgtcaatctgaagttgattaaagtcgttaaaaagttgggcgaaacgggtggaggagtcgcagctcattgagggggcgctgatcgatcagaaatcgatgggccaccgaggccccgcgcgggtggagaaggcgaaaattggcctcatcccaatcccaatctcaccaccaaacccaaacgaacgtcc

SEQ ID NO: 36233 - DNA, 1208 bp, Heterodera glycines
  unsure (1)..(1208): unsure at all n locations
atcactgggactcaattctcttgcatttcaatccctgtaactcaattctcttgcatttcaatcaccgggactcaaccctccagcatttcaatcaccgggactcaattctccaggacttcaatcactgggactcaaccctccagcattccagtcactgggactcaacacaccagcatttcaatcaccgggactcaattctccaggacttcaatcactgggactctattctcctgcgtttcaatcacccggactcattctcctgcatttcaatcactgggactcaaccctccagcatttcaatcactgggactcaattctcttgcatttcaatcactgggacctaacctcacctggtccttcggcattccaatcactgggactcaattctcttgcatttcaatcactgggactcaattctcttgcatttcaatcactgggacctaacctcacctggtccttcggcattccaatcactgggactcaattctcctgcatttcaatcactgggactcaaccctccagcatttcaatcactgggactcaattctcttgcatttcaatcaccgggactcaaccctccagcatttcaatcaccgggactcaaccctccagcatttcaatcactgggactcaattctcttgcatttcaatcactgggactcaattctcttgcattccaatcactgggacctaacctcacctggtccttcggcattccaatcactgggactcaattctcttgcatttcaatcactgggactcaaccctccagcatttcaatcactgggactcaattctcttgcatttcaatcactgggactcaattctcttgcattccaatcactgggacctaacctcacctggtccttcggcattccaatcactgggactctattctcctgcgtttcaatcacccggactcattctcctgcatttcaatcactgggactcaaccctccagcatttcaatcactgggactcaattctcttgcatttcaatcaccgagactcaaccctccagcatttcaatcactgggactcaattctcttgcatttcaatcactgggactcaaccctccagcatttcaatcactgngactcaattctcttgcatttcaatcaccgggactcaaccctccagcatttcaatcactgggactcaattctcttgcattttcatcactgnngactcagacaccagcatttca

SEQ ID NO: 36234 - DNA, 925 bp, Heterodera glycines
agtgatgggctagcgagtgatgtccgtaggaataaaagccaaggcgtggctgcgtcccgtccaacaatttcctaatgcttagtgatggactagcgagtgatgtccgtaggaataaaagccaaggcgtggctgcgtcccatccaacaatttcctaatgcttagtgatggactagcgagtggtgtccgtaggaataaaagccaaagcgtggctgcgtcccgtccaacaatttcctaatgcttagtgatggactagcgagtgatgtccgtaggaataaaagccaaagcgtggctgcgtcccgtccaacaatttcctaatgcttagtgatggactagcgagtggtgtccgtaggaataaaagccaaagcgtggctgcgtcccgtccaacaatttcctagtgtttagtgatggactagcgagtggtgtccgtaggaataaaagccaaggcgtggctgcgtcccgtccaacaatttcctagtgcttagtggtggactagcgagtggtgtccgtaggaataaaagccaaggcgtggctgcgtcccatccaacaatttcataatgcttagtgatggactagcgagtggtgtccgtaggaataaaagccaaagcgtggactagcgagtgatgtccgtaggaataaaagccaaggcgtggctgcgtcccatccaacaatttcctaatgcttagtgatggactagcgagtgatgtccgtaggaataaaagccaaggcgtggctgcgtcccatccacaatttcctagtgcttagtggtggactagcgagtggtgtccgtaggaataaaagccaaggcgtggctgcgtcccatccaacaatttcctagtgcttagtgatggactagcgagtgatgtccgtaggaataaaagccaaggcgtgtctgcatcgcatccacaatttcctaaccttagtgatg

SEQ ID NO: 36235 - DNA, 794 bp, Heterodera glycines
acattatttctccgttctggatatgacaaatgtacccttgaaataaaattatattttaattagatatgcacctttttgcttgaggtaattaaataaaactttaaagcatcgaagattatggccaaggagggcgggcggaagggagtaagtgcttaggaccaaaatgaaaaagcctaaatgaaacgcgcctgccgattataaaaatcgcagattcattaaccgaattgaaagaggccccaggcgccgcctattggcctcacaaagctattcatttaatatccttaaattgatttgttcatacttttaagggcttaaataattaatagggattataattatagtaaattcaaatagttttgtttttttacaattttcctttttaaaaaaacgcacgcaattaaaaattgatttatttagtaaaattaaatgttttttaaattttatttttgaaatctatttttattaataagaagattaaagttaaaacaaaaaaagttattacaaaatgcatctccctaaaaatgaaaatcttgaataaataaattatttcctactttttttatattaaaaattcttaaaaaacgaataattcccaaaagggtctcaaaaatctcaaacattggttttagcataacgaaatatcaaaaatgaccatgtttaaaacgtgatgagaacatttgcgacgagggagtgggaaacatgatttcaaaattttcaattttttctagtctaatctactcaaaacggttcagaattcgataaaaataacattcacggtgcgaaaaatggggttt

SEQ ID NO: 36236 - DNA, 992 bp, Heterodera glycines
  unsure (1)..(992): unsure at all n locations
cttccaccagaggacgtcgcaacaatcatcacgcagaaggtagtcttcaacgccccgttcgacaacaaggccacctactacatgcgggtgcgtttggcgtggtgcacgtggcatgtggaataacccccccccccctttttcaggtgatcaaccctgggacgaagcgcatcggctacgccttcaagaccaccaaaccgaagcgcatcaacatgaacccgccgaacggagtgctcggcccaaaggagtccgtcaacgtggccgtctcctgcgacgccttcgaccccggcagcgaggacaccaagggcgaccgtgtgaccgtggagtggaccaacacgccggacccagccgccaccgcgttcaagctcgagtggttccagggagacgggatggtgcgccgcaagaacttgccgatcgagtacaacgtctgatggaaggatgcttcgtcacctcaacatggacatgataggatcccaccgtcccaaaattgtcattttgtcccccatcatgtaaattgttgtatctgtatgtaaatttctgtgatcatcacttcaaatgaatgtatatttaattgttgcctatgtaattgtatagttgttgtgcttaataaatgctcatatgtgcttcaattcaactgcttttgtaggaaggggggcggggtggtaaaatttggcgtctgtttggtcggagggttagctcgcgtagaactcggtctgctcactccttgtaaattcaggtcaaaatgagttttagacaaaagtggtccttcctataagtctaccagtcacacatttcgtttggaattcgaatgtcagccgcccaaatttggagataaactgaaattcagagtgtgcccttccttctgtttcaattcctgagataggtaacactggtacaaaaatgacgaaattcacaaataaggacagaactcgttcnaaaaatcacaaataacaagccggacaatcaaatctttccctttgaaaagtcattgcttg

SEQ ID NO: 36237 - DNA, 1033 bp, Heterodera glycines
attaattaaaatcattgaaaataacgtaaaaatgcacagaaaaataatgttacaccgtccggactcgaactttgcccccccccccaaaaatgatgcctcagaatccccaatcacacagggattctgaggtcttaacgatgtcaaaagtaaaatctgatcacatattcatgatcagcgtcataaaatagccctaataacatgtttctggaagatttttggtgaaaaaatttttccactcaaaaatcctggtcacccccctttggtcccgaaccccaaaatcacttttattttggtatcattttttaaaaatgtgataaaaatatgaaataaaatttatttggtagagcaaaaaattgcggattttttcagtatttaaaatttcaaaagcacctttacggaaccgagttctgaatttttttctgaaaattcggatttttccagaaattcttgaataactttttttcatttgaagatataaatttcatttaaatcccataaaattctcctgatttttctctatttttaaggctttattcctgtaaaattgatcaacccttcgatttgttatgaattttaaaatattaggccaaaatcccgagggccaaaaaattgccaaaaaataaagaatttttaaaaaattccaaaaattttgaaacgaaaaataaacatcatattcgtgctcagcacatcaaaataccccagaaaaatatttttgacccccattttcaacccaaaaaaaatttttgaaaatttctagggggcctagctcgaaaatttttgaaaatttcccgccatatggcacaccattagatagagcttcaaaagctctacaattttgccctaaggcgttttttcgataaaaccaacccctaacgagttatggacccgggactcaaatgtcccgctcgggccgaaaattttttctatttccgggaaaaaatcgaaattttttcgaaaaatatccacccaatcgatgagagccatgaaaaaaccggttgctatgaagagtggtctctcgtttttctgggaaaat

SEQ ID NO: 36238 - DNA, 911 bp, Heterodera glycines
  unsure (1)..(911): unsure at all n locations
gctcaattataaattaaattatctatatcttttttgagaatgtatttttatgattgaaaaaattatgttcaattaatttatattttgctttaattcgaaatagttaaatagaatatattaaatatcataagtgatagaatctctataaatctctcaataatgtaatgggtcgcgccgatataggaacgaaaagaaaatatcattaactaaattgaagtgcaattaaaattagactaataaattttaaattaatttaagtctaaaatttcattactaaataagtttgtatgtaaatgaaaacatgtaaaagtaaatgatactttttcttcatactaaaataagaaattaatttttgggaatatgaaaatcaaaacaaaaaatcataaaaggatttcaaaagtgtggaaactgtgcagaaaatcaacaagtacttaaaataattttcaagctaaattgtcattttcttgtttcaaattttaaactaaaatagtatatatttcattaataagaaactttcttgtaacatttaattattattttttagtagagaatgttttttcctttttaaatttttttgtttttaatattgcttatccttttgtaaaaatttactaattaaaattaaattaatttaattattttgaattttataattttttacttttattaacgttattaatactctttttgggtttgccttacatttcgaattttcaggtttgactattaaggttcaatatttttttattcctataaaaatcaatttcaattcaaagattaagttttaaatttagttgatcgataagttttaagattttttatataatataaaatcgatgtatactataaaatatattaaattttattanataaatgatatttgaataactttttatggttatttttttgat

SEQ ID NO: 36239 - DNA, 793 bp, Heterodera glycines
agcataatattctcactccacagatcacttttgttgcccacagctgggtaattttagttttatcatttgtttcctttttgttttcaatttcaagttcaacattctccgttttccgattgccatcttcgcaatgatcggctctcaagccattcaaacagccgttagcaatcgacgcctcaaacattttttggccgccgaggaaatggagcctttgttgagagggagaccaacttctggtttccaaaaaaatcgtttaaaggaattttttgcaatttagaaatttcgataaccattaaaaatgctgactttgcctgggaaaaagatcgatctttggttctcaaggacatcaatttgtctgttcggaagggaactctgttcgcaattgtcggtttgttttctcaagttctaagtgaaccgacagacaatccgtccacttttaggaaggaccgggtccggaaagagcagccttttgtctgcaatgcttggttagtgatttgacttttttacttttttgtattcggatttaaattaaggcgaattataccgcaaatcgggggaaaattctctaaacggaagtgttgcgtatgtgccgcaacaggtgtcctttcggagtgttgtccaaccaaccatctgttttcatttaggcttggattcagaatatgacgctggagaacaatgttttgtttggccatgagtttgactccgaccgttaccaaagtgtgctcgacgtgtgcgctttgcgacaggatttggccgttctgcctgccggagaccaaaccgaaattggagaaaa

SEQ ID NO: 36240 - DNA, 919 bp, Heterodera glycines
  unsure (1)..(919): unsure at all n locations
aattaaaataaattaaatgataattaaaataatgttcctctacctatagtgtgcatttgggggaagcccggccgggcattctctccccccccccctcccgcgcgttttgaaaacgtaaaaaattaaaatattttattcaaaaactccttaaaaactcaaacctagcaacttaaactttttccatattttatgaatcgccaatctccttgttatcagaacagttccagtccgcgtttggtcgaccgacgaaaaagtgtaaaaaccaagcatttggtttctgcacatgatttttaatctaattattagattatttaattcaaaaattttaaagttagctcttttgtatagtaaaattatgctaattttcaaatgaagcaaaagataaaatttttgttaaataataatacaatttatttaaaaatagcgtttctttcaaagtttttcagggttttattgtatttttggggtctagatcaccatgaagaagtgatctggtcaagttagtgctaaatacttttttaattagtaaaactaattagggagaattttgtattaattacttaaggtgatccactcccaacaaaaagtgccctccacgggcactgtaatttatatgcccggattgcccggctcacacaaacactgaatgatgaaatgaatcaatgagataattttagagttcattttgacaaattgttcgtcaattagttgttgaattttgtaattagcaaaatataaattatttatcctttaattggtactcatttttcaatttaatgctgtttttttttacatttttcattattttgcactgactgtatttaaatgaattaacgaaattgaatgcgaaaatcattggcattcatttgctcggcactttctgctggcaattaatntatccgccactctttcaaacttt

SEQ ID NO: 36241 - DNA, 926 bp, Heterodera glycines
tttttgggttttcggggcagtccccctgaaccgatgcgcccagatttatggggagaccgaatccttccggaatagcttcactatagcctgtactttaattctgcgttggatttttgctccccataattgtttgagtaccccaaacggacacttgaaaaaatcgatttatttttgttttcggggcagtccccccgaaccgatgcgcccagatttatggggagaccgaatccttcgggaatagcttccctatagcctgtactttaattctgcgttggatttttgctccccataattgtttgagtaccccaaacggacacttgaaaaaatcgatttttttgttttcggggcagtccccccgaaccgatgcgcccagatttatggggagatcgaatccttcgggaatagcttccctatagcctgtactttaattctgcgttggatttttactccccataattgtttgagtaccccaaacggacacttgaaaaaatcgatttttttgttttcggggcagtccccccgagccgatgcgcccagatttatggggagaccgaatccttccggaatagcttccctatagcctgtactttaattctgcgttggatttttgctccccataattgtttgagtaccccaaacggacacttgaaaaaatcgatttttttgttttcggggcagtccccccgaaccgatgcgcccagatttatggggagaccgaatccttccggaatagcttccctatagcctgtactttaattctgcgttggatttttgctccccataattgtttgagtaccccaaacggacacttgaaaaaatcgatttttttgttttcggggcagtccccccgaaccgatgcgcccagatttatggggagaccgaatcttcggggatagctttcctatagcctgtacttaattctgcgt

SEQ ID NO: 36242 - DNA, 1414 bp, Heterodera glycines
  unsure (1)..(1414): unsure at all n locations
actttttttctaaacccctgatcaaaaaatgctgctggtaggatttaagtgaagtgtnttctaatttcaaaaaaaattccaggcctttacctatacttgggagggctgcagaaatgggcactttcnnagtaccacttgcnnccagttcagtcccgttngaataactcattaggcttgacctngagcgcagggtggccagcagacttattgtagagctcggtgagctcgattttctgaaatntaaaaatttcgaaaattttcaaaatttttcgagctaggcctaaaaaacggttttcgggtttttgaattttaggaatttttaacgaattttcccagaaaaacggagaccacttccaaaacatagtttttcgagctctatcgactggtatttttttcggaaaaatttcgattttttcccggaaatagaaaaaaattttggcctgagcgggacatttgagtcccgggcccataactcgtcaggagttgattttagcgaaaaattgtcttagaacatttttgtagagctttcgaaactctatcgaatggtgtactataagtctggaaaatttcaaaaattttcgagctaggccccctagaaattttcgaaattttttttgtgggccaaaatgggggtgaaaattttttttctgggctattttgaggtgctgaatacgaatatgatgttttttttaagtttcataatttttggaattttttaaaaattctttattttttggcaattttttggccctcgggattttggcctaatatttgaaaattcataacaaatcgaagggttgaccaatttagattaaataaagcattaaaaatggagaaaaatcaggagaattttatgggttttatttggcttttgtatcataaatatgaaaaaagttattccagaaattctggaaaaattcggattttcagaaaaaaatttataactcgtttctgaaaagatattcaggaaaagtacaatgcttcaaaattacgcaatttttaactttagtgtataaaccgtatccgacacctttatggcatgtatacacgagagaatcaatgaatgagaaagccgggactagtcccggtcaagaccggggcttcggtactcagttgtccgtgttcgggtcccggtcccgctcaactctacttaatgctgaataaaaatttttgaaaattaacaaaaacaatgaaaagttaaaagctttttaagccgaaaatcctctataaaaatattcgaataatgcttttttgtgacgaaatgatcgctcaagttctacaacattgagatgaatatgatcaaaaaagaaatgaaatttgtacaaagaaaaaaaaagtattaacaaaaaacggactcaaagtacaaacaacttggaggaactatcgtttagcaattctctttaaaagcagcgac

SEQ ID NO: 36243 - DNA, 1141 bp, Heterodera glycines
  unsure (1)..(1141): unsure at all n locations
aaaaaatccagagcggcgtctctcggcacccatatttcgtttgttttctacaaaaatgcaacattgngaaaaagggtcgggtcgtggtcaaccaccacacgaaattttttctgtttatgacatggaatggatcccttataaaacatatttattgcaaggcctaattattatcaaaataaacctccaaactggtaattgatgaaaacatatttgcacagtatctccgtattcgcaacgtccacaaaaccctcgtcatgctcctccggtatatttttttgaatggcaacagataaatgtcttttgaagaaatttggcaaaactccacgtagagaacagagcatttggcaatgagtagggcttccttttttaggcacaaaaatcgagaaataggcacctaaaaaggcacaaaaatcttctaataggcataaaaataggcaaatacaatttttattatagcaaaacacggtaatagtaaagctggtgtccccctcccccttcgtagaaaaaatttttctaaagagtcgtgaaacatgttttatgagggttttgagagccgctgataaatatgacatccgaccaattgcgaacccggacccgaattcgaacaaaaagtcgaaaattcactccaccaaaactcatttaaaaaataaactacataaaagccatatttgtttgtgatcagcgaagccccaaaacccgcataaaacattttcttacgattttttataggaataaacaatttttttcggctctaatgcagtttacgcgtccaatcgacttttagcgtccaatcaatgactatcctcggtttcttaggcatcatttttttctttcttgcttaaaacttacattcttggtatcaatctagagcttaaagtccaaagaagtttgttaggaaaattattggataaatgcaacagacaaatatttcgaatatacgcgaaaaataatgaatttcaggtttttttcattgcaatttttttcttattgntaatatttgctcttttcttgtatttgtaaattcccgagactttaagctctcaattgataccaaggatgtatggattgaccanngtagaacgttatggcctaagaaccgaggatggtcattgattggacgcgtnaactgcattaagccatt

SEQ ID NO: 36244 - DNA, 849 bp, Heterodera glycines
  unsure (1)..(849): unsure at all n locations
attctgggttgaaaccncggtaaaaaattataaaaatttcatttccccatccaaaaatgggtttttttgtagtaaattaagccccgttcggctaaaaatttggtaccaaaattcccaataccccaccttggaagtgatcacatggaacttctccaccggatgttgcagttgttcaatggccaacggatagtcgtcgtttggcggcgggccggccaatgcgttttctctggcgctgctagcggcggtggtggaccgatgatgctctttcggtgttctcctctgctaaaccgcaaatatttgaatttttaaacaatttttttggcgttttgcccaccggtcgggaatggacaattttccacacattgccccgtattcggagttggacacagtgctcgacaaagcgatggccgaccgcaaaacaggcggacgaatgggccagcagttggcacgtgtcctgctcggcgggcccgggcgctgccatcagcatgcaatctgggaaaagcaacagaagtacaccaattttcgtaagttataacaaaactaaggtggactaaaatttgtaaaatttgtgataggtgcagaaatttttgaattttagatcttccttgatggaggattttaaaaatcaaaggaattttgaaaacttaaaaattttgtcgctaaaacaggcaatacgaagggtgnggtggacagggaattggtggggatccgccgcccgatggatgttgactgaccatgngtccgatgggcggcgtaaatgttgagcagatgcggcaccgttgccggcgttttcgggcggaaacgaatgtgcagcacgcgcaggcccgaggcgcgcaacagctgctgctg

SEQ ID NO: 36245 - DNA, 893 bp, Heterodera glycines
  unsure (1)..(893): unsure at all n locations
ttgctttaagtcaaataacaacaatttaaaatttaaaaatatttacattttctatttttgttttatttttaataatgtccacgtgtacatatttattatgccttaattaaatgtacttttagtcaattaatgaccattgaacccaaatttcagccaaaaacgcaatttttcataaagaagacgaagaaaatgctggcgccgataatgagtaaattgaggagggagggataatgaaaagctaatgaaatataaaatatttaattagtttaaatatttaaagaggaataaacttaatttaaattttgcaattgatcattggtgcttatttttgcctttagccaaggagatgaagctgttcccgtcccaaccgcttccgtcccgcgttaaaaatggtttgtgccggtattttgggaatcattctttggtttatcaatgatgcagggagggttttgaggttttgtttagcggtacaaattgttaattatgcaatttcgagcaaaatttccatatgaaaaacatatgaatttaatttgttttaattggcaaaatatattttggcttggctttacgatacaaaaaacaaacaaaaaacaattatgttttgtgtcatgaattaattaatttcccattttcagtgcgttcgcgtgcgcaaagtttgaaagagttttatgcggtacgttcataaaattatggcaaatgtttaaaaaaagncaatgaattaaatgtgaaataaatgccaaatgaataaggaatggtagaaattaatttaaaaagatattcggnaccaaatttggagcagggaaaataggagaagggacgngacaatggcactttgtgaacaaattttgaaagtgaaatctccgccatttttctgtttcatcanaattgcaatt

SEQ ID NO: 36246 - DNA, 939 bp, Heterodera glycines
  unsure (1)..(939): unsure at all n locations
cggtgcaccagaaaatgtcgccgnttgaaaagacaatttcgttaaaaaaataatttttcaaactcagattttgcaaaatctaattatgcctatgacttttcatcaagtactcgattttctcaaaaattgatcttttcaatggcgtagaactcaagtctttcaactaaaacccatcacaacaattcggcattttaaatttgccttcatatattatagctctttctaaaaccacttattagttatatgccactgaggataatatgaattttaccgccaacaattttatagaaattaaacattttggaaatcaaatacttgatgaaatagccctatttgataaaaatcatttcgatcatagctataaagcaacaatgttagttgagatagaaatttataagaaaatctctatagaacaggtttcaatcagatcataaaaataaacggtcaatttcacaaatgtaaaggcggctcgatgaatggaaaaatgtttgtcattgaggctggcggaaaacgaaggctggcatacgctgcggcggagccacatgttgtggcggagccacatgttgtggtggagcaacacgttgcggtggagcaacacgttgcggtggaggagccatacgttgcggcggagcaacacgttgcggtggaggagccatacgattcggcggggccacacgcggcggcaaatgtaatgcaacatgaacacgttgaggcagcatcggtggaatgatggctcgtggttgctgtttcgtggacggtccaggcataggcgacgccgggatgttaatctctacgccggactccttaagaatgcgaaggattgcttcgcgatcgtgacgcttgaagtcctcccacaacatgcattgtggcttaacgcacttgtcgcacttcgctatagtcgggtctcgtggatggcccaacaatataaatataataaag

SEQ ID NO: 36247 - DNA, 1227 bp, Heterodera glycines
  unsure (1)..(1227): unsure at all n locations
atcaatnttggtgaataatccattgacattcttttgccgatggatattaaagccattgcgcttaaattaaatgtccaattctttgtcttcctttacctgtagaggccaatgatgccgtcgtgtttggcaattttggcaaaacaatcgaccagccctttgaattcgcgggtggcaacatctgtaaaaagggaaagaaaaactcagaaaaacgagaaaaagctcccacagaaattttttttctcacaatcagctcgaaaaatatgaatttataatctttaaacatttttcatcaaaaattgtgcgagtttttttggaccccgcaattattttgcattgaaactaattaattttgaattttacctgagaaattaaccaactgaggcggaattttggaaaacgcagaaacggaggaatgggtttcgaaaatggtgctgattgtgaacaagaaaccagcggtaaaaagtcccgttttgctggactccatgggtcattcaatttctccaaaatcgggcataagaccgggatttctgcaaaattatgtcccgtaataaaaagtgccatctgattgtgagaatggagctgggggtcaacctttgcccatgtcaacagcgagccgagtgcgcgagaagtccaacgggtaaatgaagaaaaaggtgacacttccggccaaaccgccggccaacaaattgcctaaggcattgagacattcggaatattttttgcccgaccaaccggcaacaaaacgacgataatttacagagcgatcagactcagtgacacaccaacgcttgaacaactccttaaaagccatgccaagcgactcctaaaagcgaaatggaatatttgtaaaagcacaaaatgattatgaaaaaagggataaatggaagtttttcgaagagaacggactcggaaaaagcccttaaaaattaatatttctattaataggacttgttacgaaacaggagactttttccaggagcccaaattttatgcaaaaaaagggaaaaattaaaatttggttttagcccaaaattattggcactttataaattgtncaaacgtgagttggtattgttcagaaatggtttgtcttctgctcgatggcaactctgtaccgccaaccaagtccccagcaaattgaagaagccatgactttttttttctcagacagttgatcttttttatcatcttgacatccaggtccgtaaccaaaaaattttcccgcat

SEQ ID NO: 36248 - DNA, 1063 bp, Heterodera glycines
gcccatttgaggcgctaattgaatgggcgagggaccaaacggaaacggagggttttatcccctccagcagcaatttaaaattaaatgttttgtttctattgtatatttcagtgtgccattaaagtcagaaacctaaattttataagtccgctgattttgttttatttggtacactttaaaaaagggaaacgtgccaaatttttgtttgctataatttaattttcaacatttttaaataaaaattctcattgatttattggtcctatgaaaccaaatacaaaaaatcccattgggcaagaacggatttaaggaggaaaaagaaaataatctaattaaggaacaaatgacaacgaaatgagagaaagaggctcaaaagggggaattgacgatgagtatcaaagaaaacgcactttaattgggggggggggggggggacattcgtacaatgaatggaatggagtccaaacaaatcctccgctaacaaagcaatgactaaggaaaagccaaaggagcagtgggaaaaacaatgggcagacgaacctgagaaaaaagccatgaaagaacttgaaaagaccgacaaacaattcaaggaaaacaatcgaaggtgaaaaggccactttaaaaagctgagaaaagccaaaaatggcgacaaaaaacgacgattgtataaaagcagaacatttggaaaggcaaaacgaataaacaaaacaaaaaagacatgacgagtacaaaatcgggcatctcttcgctcattcccttctcttccctcaaatatcgcttctgttggttcatcggccccacacgagttcgtcctctttcaccgaccagaaactgtccacctcctcctcctccggctccacacggttattgttgttttgggcattgtgccgtggtacgctggccgtttcttctctgcccattgttttaccattcactgattgtgaggcatctccgcaggggccacgcgagtcaaagttcggcgcgtttgcccaatcaagaaagtcagggccaaatctgcgtaaaaagtccggcacgggcagccccccttgcagaagcacctgaa

SEQ ID NO: 36249 - DNA, 741 bp, Heterodera glycines
aattaaattaaataccgaaatttaaaaaaaaaatcagaaatgaagaaacaaaaccgactgaagaaatgggaaggaattgtcaacaaatttatggaggaaaagggaaaatatttgcgtaaaaaagaacctaaaggcaaaaagaatatccatcatcgagaaattgatgagcaaatcgccgaaacatggggcactaatagcagaacaatttacagatggaaaaaaaattgggacagactcgtgagttttattttattaataattttataaatatggtaactgccaaacttcctattaaatgacagtcaaaaaatgatcattaccgataattagggttacaatttttcagctgaaaattttggactaaatgtgtaagtaaattttctaaaaatggttgttgctaaaaggtcctcattaactcgtaagttttattttatttataaatttataaaaaagccaaaaaatgccaattaaaaacagaataaatttgtgaaggaattaggcattttaaaaaagacatttcgcaaatggaaaaaagaattactgccaaattgctataaaagtaataatttttttttattaatttcaattctatttttaagagaatattaccaatgcggacaaattagaaaaaacacggcaatattttgaaattaaagaaaacaatccaaaaattagtgacgaaataattgctaagaaattgggaatcggaatcgcaactcttttcagatggaaaaagaaatt

SEQ ID NO: 36250 - DNA, 945 bp, Heterodera glycines
  unsure (1)..(945): unsure at all n locations
ggacgcataaaatgagattggacgcataaaatagggacttgtgacgcataaaatgagattggacgcataaaatgagattggacgcataaaatgagattggacgcataaaatgagattggacgcataaaatgagattggacgcataaaatgagattggacgcataaaatgagattggacgcataaaatgagattggacgcataaaatgagattggacgcataaaatgggattggacgcataaaatgagattggacgcataaaatgagattggacgcataaaatgagattggacgcataaaatgagattggacgcataaaatgagattggacgcataaaatgagattggacgcataaaatgagattggacgcataaaatgagattggacgcataaaatgagattggacgcataaaatgagattggacgcataaaatgagattggacgcataaaatgagattggacgcataaaatgagattggacgcataaaatgagattggacgcataaaatgagattggacgcataaaatgagattggacgcataaaatgagattggacgcataaaatgagattggacgcataaaatgagattggacgcataaaatgagattggacgcataaaatgagattggacgcataaaatgagattggacgcataaaatgagattggacgcataaaatgagattggacgcataaaatgagattggacgcataaaatgagattggacgcataaaatgagattggacgcataaaatgagattggacgcataaaatgagattggacgcataaaatgagattggacgcataaaatgagattggacgcataaaatgagattggacgcataaaatgagattggacgcatanaatgagattggacgcatanaatgagattggacgcataaaatgagattggacgcataaaatgagattggacgcataaa

SEQ ID NO: 36251 - DNA, 822 bp, Heterodera glycines
aatttctattttggaggcctttcgggatcgctgagaataattttgacatccatatgcacgaaattctggattcctcaaccgaggcacgggatccaacccgaatgggactccaaaatacaagaccctaaacacttttatccttcccaatgttgattttaaaaaaagtataaccataattaaaaatatgtatcttgttttgactttgcacaattattaattaacatttgaaaagggcacatttttaattcgtactttaaaatggtgaaagtaaacttttaaaggtaaacatatgctttggaattgcagcaaatataatgaaaaaaattgaacattagattaaaagtgattggagaagaataggagcaatttttaatcgaaaaaataggggagaaaagagaaattaataagtgaacgaaacgaatgcatgcttaattaggtaattaattaattaattaattgcttttttgtttttggctgtgtgtggttgaactttttctgctgttggaaaggcaaaaaaaaagcgaatatgaaatggatgtgacgatgatatgacaaccatatgatgacaaataaaatacaaaatgtggcggtggtgcgccaagggaagaaaaaagcgctccaatgaaggcaaaagtaaatttaatgacgaccgaccacggacataaggtgatgttgatgaaaattaaaataggattttgtgtattttgggttgctaaaaggaagccaagggaaaaaccaacaaacaaattttttcagggaattggattttcggggctcaaaggcggaatcccaaatttttggttcggaccccccaaatttttt

SEQ ID NO: 36252 - DNA, 925 bp, Heterodera glycines
  unsure (1)..(925): unsure at all n locations
attggcggattgagaaggtcgaaatncggctgaaaaaatgcgcattttgtggagccaattaaataatgatgcttaattacctgatgcggtcccctcccctccctttttaccgacttagaatttgagttttaagtaatacttacactcttccctcgccatcagtttggttgacccgtcatcattcctttgaaattttgcgtgtgaatttgtgttggctgcgaatggacttttcgactggactttctcgctgtctatgacgtcgacggaacggtgaaacgaatcacggtcgaccagaaaagacactgacggcgtgtgattctgcgaaaaagcgcatttctgaccatcttgagcacttgcatttttgtgccctattacaattcgagagtctcgctattggaccgagaaaatatcaagttttggagattttcggtctcaagatttgctcattggtcttctcagtcggttccatcaccctgatcagtttagaatccttctcctcccccccccaatccatcgattgttcgcgccacctttctttcaggcagctgatagtgccggtgattgcgcagctgcgcttcctcccgtcgcattatttcgatgtgtcgcatcaccgcacgcagtttgcctccatcgacgcccatccgtcgggcattttgccgaaggcttcgcacaatgtccgccttgctgaaacgcctcagccgcgcggctaaaagcgctgggggcaattgccaatagtcggcgggaaagctgaacagcaaacacaagaaaacataagatccgcgaacagttcttctcgagacaggtcgatgtaccgtatccctttgcccaactgacattggcccgtagactacggtgttttgcgatgcatttgcatttgcgtccgcgtgtttgtcagtcgcaatttgncaattcgctgggctttttg

SEQ ID NO: 36253 - DNA, 822 bp, Heterodera glycines
agcaatgattattagtgttgaggtaaaaagcttcaactgtgtttgtaaaatttttttgagaattcttaagggtctttttgcgtaccaagaattaaagtgcatcggaatgaaaagggaaatgagcaaactgaagaatatgtgtcatgtgtctatgtgatgcttatttataatcaggagaatttaacagttcattagataggtattcaagtattgtgcattacagacatatcatgtgtaccatggccatggtagaatgaatggacatggaattagatacatatctatgccaattatttattccttggaaaaaaatttaaaatcattttctaattttttgatctaaatactgatggcaggcgaaagaaaagaatattttaacgctttcatacctaaaaattcctgagaatttgcttgaatttttgaaaatttcacgacgtatccacatatactttacattagttgaaaaaaagactacgccagtctcaacttttcctaagtttacgctccttatacctacaaaatttaaatgcttgtccgaatattcgccgtggcgttttgcagtgtcaaactgacaattcaaaatggcaccctctctctctctgctttatgctttgtcactttgcgctccctttgtcaattttcgttgcccttgtaaaatgtttccctcatttcgggtgcttaaatagcggcgcgtgggggaagggcgttgtcaagcgcagttactcattcccttcccacccatccatcgacgcccccacaaatcatcctcccgctgcttggtgacatacccccctcccacgggtgaaaaaaaggaaatttttt

SEQ ID NO: 36254 - DNA, 890 bp, Heterodera glycines
taaatacagtacatgcaccctattagattcttacatgaataacaaattaaaaaattaaacaacgtattaggccttcgtgtgctggtttatgccaacgtgtccgaatatttgcccatcacagaagctgtcggttttcgcatcactgtgcatgacaagtgggaaagattaggcggggtggggaaatagggaaataaaggtattaactgacgaattcatgaacaattttggcattgataaattaaccccatttattttgggcacttttccgattaattttggtagttgatctactgataaccggtctggccacttattaaagaacctctgattaacttttggccctaataatgcttgctgatcggtgatcactttatttcccagatggactgtgccgtttgtggacgcgtttggttacaacgcacccaccggcactttatcagcatttggcgtacgtatggtatgcaaaaaaaaaatgcttgaaaattaaaaaataaacaaattaattaagaaaaaatttttccgcctcgagcacccatacggacattgccgcgaaggcggagaacgtgccgaatggtacatctacaacaaaaaagaagtaggcaaaagaattaattaataattaaatgattttaattaaaagaattttgatgcaaaattattaaactaataattttagaattacaattattcaatcgaaggttgtcatcgaagttgcacacaacgtgaggtgcaaaatatttgaaattagccaattaattaataaaattaattaattaatgagtatgtgtatttgtaggttgtgcgcgtttgtggttgcgcagatccaatggtccccgtcagttgaaaaaattaattaaaattttaaatttctttggtcatacacaaagcaa

SEQ ID NO: 36255 - DNA, 967 bp, Heterodera glycines
aatattttataatgtttttcgaataaggaaaatttttcattgaaaaatttttttatcaaaaaaataattaattttggtgggcaagttttgagaaaatatttcaattcttagaagggtattttctgaaaattttcaagtcatttcttagggggtgtattttcccgatttattgcatttttaatggattttccggaaaaaacaccaaaaagggcaccaaacggcaaaatgccaaaaaaagcatttaaggcacgaaaatcccgaaaaaggcaaaaaaaaaaaaggcataataaaagtcaacgtagaagcctcaaaccaagtgaaaaatgtattatttatgctttaattgttggtacacggaaaacccgccaagggaacatttttacgggttataatttgttttcattggcgcctaattttaaaataatcaattattaagtttttgaaatttcaatttcaaataatttattaaagaacaataaattttcaagtaagaaaatagtgaactttcaaaactttattattgaaaaacgaaaatttttcaagatttgacaataagtgagtcttggctttccgattcgagaaatttcttagattttcaggtctatctcattctcgaggtttttttctttaattcttgttactcaatcttttaatcgttgtctcgattttttttttgttttttttttttttttgcattttcttagtcttaattctcgggaccaattatcgctcttattctcgattaaaaaaaaaatcatttctcacatgttttgaatgaattattgaaaaaataacatttttttctccataatcttgggtgtttcgccgttcaaaaatcaccaaatctcatgggacgttaatggattcttacattatcatcagtcccttcttagctggaatttatttttgttttttagccataatatccgcttacaaattatgtcagtcatttctcctcccctatata

SEQ ID NO: 36256 - DNA, 580 bp, Heterodera glycines
ttacccaaatatatgaggcctttcatacaccataaaatcatttcaattcgctttatcattctcatgaataagtcgccgtgatcagaccattgctcaaaaaaagggcggaaaaaagtcttgactcaaacttgaaaaactatttcaaagtttacccaaaaatctgaaaaaattcctatttatataacttttgatactgattaaaaaagtctcttataccaacttggtcaaatcactcctttatggtgatcgaaacaccagaaaatacattgaaaatcggggactttttcgaaaaaaatttctagtaggtttagtgaaaattccctgaaattttgaattagctcattggaaagagcataaaattctctaccgaattgccttttgaatggtagggctacgacttgtacataaaaagttatacttgggttaaaattggacaactcaaaaatgatcaatttttgatcattttcccttaaaatacggtagaaaattgtgatttttatcatcatcaaattcaacgcaagtatagccttttatgtacaagtcgcacgtatacttaccattcaaaaggcaattcggtaga

SEQ ID NO: 36257 - DNA, 860 bp, Heterodera glycines
tatttcgtttcacattttatcaattttttgttgctcttcccaagttgtgaaaaaatatacgaaaattattttcgctctttattatgatgtacaatgcttttaagccccgccgtgaggcggctcctttttgtgcactattttcgtttttaaaattggatccggattttttggcttttttaaataaattgtgaaaaattcaaaacaaaaaacttttattgcgctacaaatgcttttaagccccgccgtgaggcggctcctttttgtgcactattttcgtttttataattggatccggattttttggcttttttaaataaattgtgaaaaattcaaaacaaaaaacttttattgcgctacaaatgcttttaagccccgccgtgaggcgggacagttccaaaatttgcaccacattttactgtggaaagtccaagtaccttaattggacaactacgtgccaatgagcacagtcaccgttggccagttgtgaaacagaaaaatgggaatatcagatggggtgcgtcccatcctaaaaattcctcttttcgtctaaccatccctccctttttgtgcactatttcgtttcaacattttatcaattttttgttgtcttttgaaataaattgtgaaaaaatatacgaaaattattttcgcttttaattatgatgtacaatgcttttaagccccgccgtgaggcggctcctttttgtgcactattttcgtttttaaaattggatccggattttttggcttttttaaataaattgtgaaaaattcaaaacaaaaaacttttattgcgctacaaatgcttttaagccccgccgtgaggcgggactgttccaaaatttgcaccacattttact

SEQ ID NO: 36258 - DNA, 401 bp, Heterodera glycines
cccccctttccctgtccatttgtccctttccctcactttttcttttgtccccaaaatgttcattttgtccgccgggaaaggtcaaaaaattatgtaagaatggtggccaaaaagaagcaaatgcattataatttgcacaacaaaacctgctagcgaacagtttgtttttgcatccctttgattaattatttttatgcaaatttttggggaaagaaaaaacgaaagaattttgaggggggggggggggagacgaacaccaacaatttgctgggtttttttaaaattaatggcaattaatgcaacaattagagatttgtcactttgaaatggaaaaatttacagaaaatttttcactataaatataacagcagctgactctccccctttttttgctcctttta

SEQ ID NO: 36259 - DNA, 1121 bp, Heterodera glycines
  unsure (1)..(1121): unsure at all n locations
attgtagtgtgaggacaggcgcacccggctttgggccggactcgaaacttctaaataaccattgcataagcgtacatagttagcctgcaaaattttattttagcatacaaaattctattcagaggaattgttggaatataaccggcaccattaaaaattagtattggttattggtgtaacacagtgggccacccactgcgtcttccatgcgcatttaaaagcgcctaaatataacgaaattaattactacttgcggtttaatattccatcatttttccagtggaatgtaatgtgataaaattaataattataatataaacaaaacatttagactatgagcaccattgtcaatttagtcccattagcataaaagcgcttcgagcaacattcacatacccaaattgtgaccaatacaccaatgtaaaaccgaaatgaaaaaataaaaaataaatatatattttttacataactaaatagtgcgattttgaatcaaatttaaaaaaataaagagttttaagggtatagcggtgccaataagcactaccggggaaaatttaacaaaagcatttaaaaaatactatatatacacataattaacaaataaattattgtaattttctaattgaaaaagtaaagttcgacattaaaacatatgggttatatttttaaaaaacaataatttaagaaatatatttgaaaaattaaaaataatcattaaataacaaattttttcttgaaaacgctaaaatataatataaaatatatcagctttaatttacttgcaattatatttatacatgagttatgccaaaggaaagaaataaatacaacaaggataaccataagaatgaataaagtaaaactaaaaaactaatcaaaattatcattactgaaaacaataaagaagttccgagtttaaaagatacgaaatatgaaaaaacaaaaaggcttaaaatatggcaaataattcaataaaagggcccaatttttttgactttcggtattttatgattgtcataaataaatagttaaacaaaacgatcccagcgaaattttgttccgtttgggtcgngatacattttatataatagaatgagcaataaatgaaataaaaaaattca

SEQ ID NO: 36260 - DNA, 1431 bp, Heterodera glycines
  unsure (1)..(1431): unsure at all n locations
atcgatgaggttcacatgttggacttggaatgctttacatttttgcaccgtgccctcgaatccgaagtcaacccggtcattgtgttcgccaccaaccgaggccggagtaaaataaggtgtgtgcctcgggtggaaatgtcacattacgcgtaccttacatccgtcaaaactaatttgctcttgtgtacaattcatattttatgttaactttttgattttcaagaaattcggatgaaattggcttctacggaatcccaagcgatttgatcgaccgtttgctgatagtgcccacccggccctattccatcgaagaaatgtccttggtttgtttgtttgttcgtggtggatatatatgtagaccggcgggtggtcccactgctgatcgttcagattgtgagaattcgtgccgatgccgaaggcgtactgctcgaccccggggcgttatctcgcctttgtgagctcggtcaaaaaacttcacttcgttacgtaatgcaactgttaacacccgcaaagctactcgcccacattggcgggcgtgagtccgtagaggttagaaggagaaaaactgtatttttagcatagaaatgacatttagattgttgacattgacgagtgcgtgcaattgtttatggacagcaaaacatcaactaatctactcaaaagcaagcagtcagaaggtggagacgacgatgtggagatgagttgaaggagaaaggggagacggacacaacaaacagcccgcgatctctgttccttttcaaatccctaaatcacaattgttgttttttcatttatattttagtttataaaaatgaacaaaaaaaacaaaatcaaatgttcgtttcgcagtccatcacaatgcttagcccatcaacgaatgggtcgacgagtctaaaattaaatgtgatatttttatggctggttccctcttcttttctcacctaacattgatacgcttccgttggtctttctgttccacaacggtgacactgactttcacttccctgaacaaagtgatgccatttgatgcgcaaaattccgccatcttttgctgagtccatgccgcgctttgttgccgcgtcgtgccatctccatcccggttcagataaataacgctttccaagccaaacttcgggaccataacctgacgaaagatatcgtcaaaaaaatgattgtccacagatgggcggcgattctcgcctttattccgttgctgctgattccaatgacaatcgcaggcaaacacttctccggacactccttcaccatcaaaaaagtgttgagcagaactgacgcacggccggcgtattgcgcgtgacgatgacgtcggttcatattctgtttttgagatttgattatataagagaaaaacagtggtcttgtcaaatttnggcagatttctattttttggccataatttgacaaccgatt

SEQ ID NO: 36261 - DNA, 1109 bp, Heterodera glycines
aatgggaaagctcacgcaaatttgctttcattgtgtacgagtatttgttccgtgaatatgttgctgaatatgtaagaggttggaatactttcaataaataataattaataataatatttaggctaatttttccagtttttaatattttaaattcaacgcatcgaaaaatttttttggcctttaaaattaattaaaatttcatatttcttatgaataaattttcagaagtcgactcggctttggctgaacaaattcccgttgttgagaagcccataattaattatcataaaagagcattcgcacaacgggtaacaatttgtgaggcgatcaacaattgggccaatattcggagtagtgtccaagtagaggattattcttttatgctttactatgccaacacgagactacaaaatgatcgatcattgatcaaaaattatgcgatcaatttcaacagattgtatgagcccgaatatctgttcgacatgcaaaaactgaagttgcaaatcagtgccaattccaaatttgacaattcgtatgccccactccgccgtatatttgaccaccaaatggggaaaatgaagacaaaagcgatggcgaagtttgtgtcaagcgccttttcttgtcatcagcacctcagcatgttttcaagaagtcattctatggcatagacaaagcggtaaatgtggcaaaatttttgaaagttttgcatttatcgtagcaaattacggagaattttaaaaaatttaccaccatgtgaagccatgcctgccggcaccgacagatataaagttacacatttttaaaatggtttttggcgcaaatctatcaacgaatcactcaatttttagaactcaaaatgtctgtgtaattttttttagtatttttactgttttatgccatcaaggtgctaataatctggtcaagtgcaagcaagtccggttctggactttcaaaattttgtttctcgactaaataagcgttaaattaggtctatttagattgatgacaacatatttcttagctctctgaaagaagagaagcgaagcaaatttgaaaaattttgtgacaaattgagagcagaaaatttgccaaaagttaatgcattaaaa

SEQ ID NO: 36262 - DNA, 1188 bp, Heterodera glycines
taattaattttctaatagtatttcattttagagtccactctttaacatcttcgaaatttaaaatgctttttttttgtctttttatccttttaaaattgattaaataattactaaaaatattgtaaattatatttatttcattataataaatgatcgatttgagttcataattattattttaaaggttattcgttatgcattcagttttttacttaatgtttatttttgtatttattcatggctccatatgtgagtgatatcccattttgaaggaaaattgatttggaaattatttattagtctttttatagaatttatttttattatttagacatttggaaaaattcattattaatttaagaaaataatgattattttaaaattactttgaattctatcattttttaattttctttacagtttattaacaaattagtaattatgtaaatatggttgaatgaaattattttaaaattgtcgctcaaaactcccggtttcaaacattgccgcatccttttcttaataaattaattttaataaattgttaaatgcctatattaattcctaatttataaaataatggctaacatttctcaaaacattcttatatttttttaagaaatgtatttataatttttgttgtatttatgtcatttatttatttatttcgataattgaaaaatttgatatttaaaaaattatatataataacttataaaagttttatgggtcataattatcacttttttgccattttatttaatactttttttataatagaaattttggtccttttgcaagtttttagttggtattccttgcataagttaacttttcttaagaaaaaaagagagataaagagagggagagaaaggatatagataatgagagagggagagagagagagaaagaaagagaaaaaaggaaagagaagagagaaaagagagagagagagagaaagaaaaagaggaaagagaaaagaggagagaggagagagagggggagagaaaataatagacatagagaaaaaagagaatagaaacggcgagaaaccatcctagatacggagagaggcagagagagagcgaaagagacacaaggaaagcgataaagagagagatagagagagaaagacagaaagaagacataggaagagagaaaagcgcacgagacagacgagagaaaaga

SEQ ID NO: 36263 - DNA, 1105 bp, Heterodera glycines
ttattagcggcagaaaatgctgcaaaatgtttaatccattcaaaatacaacggaattttaaataataaataaaatgactccaattttgcgctcatttgttcgcacatttgactatgtgggaaaaatcaaattagcgggttcggttttaggattggggggtccaatctttaacgggattagattaatgctataatttcccaaataagccaacaaagagtttggaaaatgccaaaatagtgaaaaaatccgaaatagtgacgaatagtgacataattttcagtcaaaaattaagcaaaaataatttttattcactttttgcagttgcaaatgaggtagaaaataaatgaggtcaagaaatatgtttgttttttttatatttcgctgttattttattcttctctttaacaaaaacggtttttggatgacgagctaatttggaaaacaaaattgaaggaactgtcaaaattgagtgaatgaatgaatgcgttgggtggtgtcagtccgtcccccccccccgccgcccctcccaccgttttttggtctctccgaatttaaatttatgcagcggcagaaaatgctactgcaaaatatgcatttgaatgttcaaaattaaatgaactttttaataagaagttatttgtcaccttttgactaggtcgacaaatccaatttgcgggttcgatttcggaattggagtcgtccaattttttaccgggtcgatttgccagattagactgttcatggggaaaatcaaattagcgggttcggttttgggattgggggggggcccaattcctaacgggattagattaatgctataatttcccaaataagccaacaaagagtttggaaaatgccaaaatagtgaaaaaatccgaaatagtgacgaatagtgacataattttcagtcaaaaattaagcaaaaataatttttattcactttttgcagttgcaaatgaggtagaaaataaatgaggtcaagaaatttgtttgttttttttatatttcgctgttattttattcttctcttaggcagaaatttaacttaaattgtgatacctttaaaatattaattgaaattcaaaattttttaaatatataatta

SEQ ID NO: 36264 - DNA, 981 bp, Heterodera glycines
  unsure (1)..(981): unsure at all n locations
ttgccaccatttgtcggctgtttcgcactttaatcatcacattcaaaattgttttgtacggaatgccagaacgttttgccaaaaaaatgacggagtatgccagtgttgcagtgagaaagcatttacacgcagctttatcttaaatttgtattatactaaatcaaatttttttaggtatttattgaacgctttttatgatttatcatttttttttggggttttatcgtataaaaaggcaaaaaaggaatttcattttctccgaaaaactctcggattaatttgacaataaaaaagtgataagcgtcgtaaaaaaatcgtgaataaaaaatatattgaaactaaaaaattaaaataaaatatactaaaataaataaacttttatttttatccattaaacaaaaaaaaaattttaatttattttattaatttttaagaaaaaacttttatataaaattgttaaaaattccatttaattgcattacgtaaaaacttcaacagcttaagtttttggtaaatggtgtacaaattttgcaaaaggtgtcccattgccggatcattttgttcaacataatcaattggagatttgccaaaaaataaaaaacgctaaaaaataatatataaatttaaaataaattaaaattagaaaatctgagtattttaaaagaatttaaattaaatttaattaaacttaaaaacctgagttaatgagttggcaaatgtattgacaatgacttgatcgagttgacccaactggcataataaactttttgttgctacggcaccggcacttttcacaagtttggcaccatttttatataaatttgcccaaaaacttcccattgttgtacaacaaactgccgaaatagcaaacattgaaacaatgatgcaaaacgacaatattgcacgcctcattattcgcctttttcagactanatttcttttaaaaatttaaatttattttaattacaattatacattaat

SEQ ID NO: 36265 - DNA, 1210 bp, Heterodera glycines
cttttttgaaaatcatgtgaaaataaaaaaatttaaaaataaatgcagaattcttagggctatcaaataaattaattaagtttggctcaattcaaatacggtattttggtacatcttttttttgtatatttttaaaaatatttatacttatttcaaccattttaaattattctgtttaaattatcaagattttatcctctgagcctcgaaatgacgcaatgatataaataatacttatatatgacattgatataaagaaaagtaaataatacaacaaaataagcatctaattgaatggatattcgttaaaaacactggattcctaccttgattaaaatttactatgcttttaaattaaaggattgcatttttgcgcaattaaaaatatttctatttttaaggtcgttgatttggtgcccaaacttccccccctgcgttttttacggcataattcgcgatttttcggcttaaaatccaaatcttactcaaatatttttttgtgctttataaaaattgtaatcaagaatacgtgcatgtgctggaatcaatattcttaaaaaattattaaaaacatcatgttatacaaaaaacatttgttgatgggttccccttccgtcgtgccttacgtctttttatcacgtttaaacgtggcaaacatttttacatgcaaaatttgcattggcggttacagcctgacatttgttggcaatctgttttgaaagtatctctaatggagaggcaaaaatagggtacattaaaattttgtttttctctctcgcttccgtctttttcgtatggataaagcaaaggcatgcgggcaaggcttctttgcctgaaaaaggcatatataaatgcaccgcgattttagcatttttatacttacaaaaaaaaatattttaaatgaagacttttaaaaacaatttgcttctctctctcgtgttgtttagcttttttccatttttcattagcggaggtaattataaaaaacctaagttttttcaaattttttgaagatacatacacataaagcattattatcagggcccgaaattacattttttgattttttggtgaataaatatgtatttggcgtttttagcacatataatcctggccctaattatgatgaatgtgttataaaaaatacactttgataattgtaaattacgggagccccaaattttgcaggtttttcatctgacgactcaaa

SEQ ID NO: 36266 - DNA, 1349 bp, Heterodera glycines
  unsure (1)..(1349): unsure at all n locations
aaaattaatgaaaataattccatttaattgaatgttttatgttaataaaaaattgtttttaaataattttattgtattatgctgcttatttaaatataaactcggcttgaagacaatttgaatggccatgtctttgccgcgcggaaattggcaacggtcggtggccgaacaatcggttgtgatcgccacactgagcacatcaaactgagactctaaaaataaaaattaaagaaattacttaaattaattcaatttactgcaatttttgtaacgaatcgggtagaaagttgactgatcagcgtcagtaaattgagcaatcgagcagataaaaaggaccaaacaaatgtatttgttttgacaaaaaatcattttttccaaaataaaataatcaaaaaaataacaattaaataaataaaataaaataaatgggatgataaaaaatgaattaatgctaaaattagttgttttaatgtaaatcactgaccaataaaaaaaaatattgggtgtgatgaatcaatcagccaagtgggacgaataatgttaagccaattaatgacacacaactgtttttgatcgatgaaaagccgttttagcattaatttaagtggtaaaaaagacataaaataataaaatggaaaataattattttaattttgaaatttactttaattataaaaaaaatattttaaaatatattcaatttatctgttggatagttaattgttctttttttatattttttgattgtttactaattaaaattaaatattgatcttttttcgttttggatttttcaattttaataaaaaaaatttcataaattcatggatgcttatgcttgtccagagcaagactcgattggttttgtgcgttgatttgctgatttaactgttggcctacggtagtgcgtgctgcacgaatactgtatcacatggtcggatatcgtgagctgatgtttcgagtaaaattttgtgcaaaggcaggaacaaattttgtctatttttgtgaaacagatggcataatagtacggcattcaaatttttcattgtttgaaattttcgattaaaagaatttaattttaagaaatttaaattcatttacacaaaaaattatacaaatagcgaaaaacaaaaatttaaaagtaagaaaaaggaaaaaagaaagacaggaaggaaataaagcgtaacaattggtttgctaccaaaatgtgccattcttagggggtgagtatgtgtgtttaacacaaatcccgagttgaggtttgaagtgtcgtggttggggataaccactagaaataaccctanaaaattgagacaaacagaaatttttgaaactgtccttcctcccat

SEQ ID NO: 36267 - DNA, 882 bp, Heterodera glycines
cagaaaaatcgtaacgtgcccaaaaatggctatctcttttttgtatccaaattgcgcattaggtatttcatacagtgcgtagcacaggttgccttttcttatccggccaaacgaagcattagtagggtgttggacaccgacagaaaaatcgtaacgtgcccaaagatagctatctcttttttgtatccaaattgcgcattaggtatttcatacagtgcgtagcacaggttgccttttcttatccggccaaacgaagcattagtagggtgttggacacagacagaaaaatcgtaacgtgcccaaaaatggctatctcttttttgtatccaaattgcgcattaggtatttcatacagtgcgtagcacaggttgccttttcttatccggccaaacgaagcattagtagggtgttggacacagacagaaaaatcgtaacgtgcccaaaaatggctatctcttttttgtatccaaattgcgcattaggtatttcatacagtgcgtagcacaggttgccttttcttatccggccaaacgaagcattagtagggtgttggacaccgacagaaaaatcgtaacgtgcccaaaaatggctatctcttttttgtatccaaattgcgcattaggtatttcatacagtgcgtagcacagggtgccttttcttatccgggcaaacgaagcattaatagggtgttggacacagacagaaaaaatcgtaacgtgcccaaaaatggctatctcttttttgtatccaaattgcgcattaggtatttcatacagtgcgtagcacagggtgccttttcttatccggccaaaccgaagcattagtaggaggttggacaccgacagaaaaatcgtaacgtgcccaaaaatggctatctctttt

SEQ ID NO: 36268 - DNA, 1587 bp, Heterodera glycines
  unsure (1)..(1587): unsure at all n locations
atataagactccctgatctgaattcaatggcatgcttctgagaaaggggtggcataatcttgatccgatcagaaaaacttggccccatataagactccctgatctgaattcaatggcatgcttctgagaaaagggtggcataatcttgatccgatcagaaaaacttggccccatataagactccctgatctgaattcaatggcatgcctctgagaaaagggtggcataatcttgatccgatcagaaaaacttggccccatataagactccctgatctgaattcaatggcatgcttctgagaaaagggtggcataatcttgatccgatcagaaaaacttggccccatataagactccctgatctggaattcaatggcatgcctctgagaaaagggtggcataatcttgatccgatcagaaaaacttggccccatataagactccctgatctgaattcaatggcatgcctctgagaaaagggtggcataatcttgatccgatcagaaaaacttggccccatataagactccctgatctggaattcaatggcatgcctctgagaaaaggttggcataatcttgatccgatcagaaaaacttggccccatataagactccctgatctgaattcaatggcatgcttctgagaaaagggtggcataatcttgatccgatcagaaaaacttggccccatataagactccctgatctgaattcaatggcatgcctctgagaaaagggtggcataatcttgatccgatcagaaaaacttggccccatataagactccctgatctggaattcaatggcatgcctctgagaaaagggtggcataatcttgatccgatcagaaaaacttggcatggcctttatccgaccagaaataatgcaacactttttaagatgcgcactaagcctgaacacatcaatgagggcggagtggaaatgggtggaggtgtccatgactcgccatacttgatctagataatcaatccataatttctacaaatgaaggattatttgaatttttaggcatgtaaatggcatttttcctacaaattttttattttatttatttgatggttgtgtattttgaaatattatgccaatgatgacaataataaaattttatacgaaaaaaatgatttatttgaaaaaattattattttatatatttgttaacaaaagaattattttcacaggttataatctattcaattatctttccattaattttacaaaaaataaaaaataaattttagctaattacgtcctaatcctaatattgttttgttttttgtatatcatcaattcacttttttggtgccactcacattntgtgggttttgccaatttaccggattcatcaaaagatttctcgacttcttcctgctgatcatttccatcaccaaatggcggttttagtggcaaaaaatgcgcaaatcggcgccagccagtagacactgatgtgtccgagatgactgatctaaacaaaaaaaaatgtggatttggaaaatattgtttattaactcaaaaataaattgtataaagtatgaaaaaaaactttttttaaatataaaaaaatagca

SEQ ID NO: 36269 - DNA, 657 bp, Heterodera glycines
ggggggggtggacttggcgaagtgccacccaaaaccaaatggagtgagtgccacccattgaaacttccgcttttcttttatctccccccccccaagtcattttttccaccgcacattggcacttgtgcagaggcgaaggtgaagagacaaaaggcgaaagagtgccgaatggcctttgtggaggaacacatattggcacttctttaagttctgcaagttccgttgtccattttagaaagtaaaactcactaagtttctttggcttttggcaattgaaaggcctttttaagcatttaaaatttatttaaatgttattttagtaagcaaaaaaagcaataaatgtgaagtaaatgtccaaaaaagagaagtgaaaaaagaacagaaaaaggaaagaaagcaaatgcaaattaaaataaaagaatttctggggcacgattaatttgggaaggaaaagacttttgggatgggagggcatttggagggacacaacaaattgacaattggtcgatagaatgaatgattatgacagtttgtgcacttttatgggggggggggcaaaatgagtgaaatcggacgaaagggcggcgccattctcagcaaattcgacggacataagaaaagtcagagaaatctgctggtcagagcaacgggctgaag

SEQ ID NO: 36270 - DNA, 762 bp, Heterodera glycines
tttaagtcttcggatttgtcaaataaattaacgatttgcaattaataataaaaaattctattataaattttttttgtagaggggaaaattctgaaccaaactactatttgaaaacccaatcaaaactgggaaaaatttgaagtcaaaaaattattcgaatttctccaattttgtttccataatttccgaatgttattcggtatcataatgccaaaccaaaacgaattcgttttaaaatattcttttctggacttgacttggtttctcaatatcgaagcttttttctccgcaatttctaaaacgcttataccaaaccctagatttttggttccgatgggtttcagaaaaaatcccgtgtggtgaaaacatatttcacatttcacttcataactttttgagttctgcacggatcgagaccgggataagaccattggaaagagcagctcgagctctacaagaagctatggaaagaaaaaatcgacatttcagggactttttcagaaatcatgtttaattccccaatggggccccattttgggtcctcagccacagccccatgcttctcccaattgtggcgaaaacaatatttcacatttcacttcataactttttgagttcggcagggatcgagaccgggataagaccatgcaaagaacagctcgagctttacaagaagatatggaaagaaaaaatcgacatttcagggactttttcagaaatcatgtttaattcccccaatggggccccaattttggttcctca

SEQ ID NO: 36271 - DNA, 692 bp, Heterodera glycines
ctgtacgccgccgcgcacccgaaataaaagtgcattacggaactaaagaagtaaaaacataaacatttatcatcatcctccaccccggcactgctcagccgcaacaattgtaatttgagagagatagagaaaaagagaatttgaagagattgtgtgtatgggagacagtgcaagaagaaagtaatgtctgccctttcccaatgaaatagagaaaatgagagtcaagattgtaaagaaagaaggtgcaagaaggaagtagtgcctgccccatttctaaagacatagagaaaaagagaatttgaaaagttttcgttaggagacagtacaagaaggaaatgtctgccctttcctctgcgtcactgccctgttttccatgtcatgtactatttctttagtttcttttccttttgcatttttagcgaaaaaaaattgacagaaaaagacaatggcgaaaatgttgaaaaaataaatgtctagttgtgtatgtaagtgtgacttcattttttattgtgatttttattgtgaatactgtttttgctcttaactttgcctatttttattgactgaccgctcgggtaattattgcatttactggtccgataaaaaatgatgaaaacagtggttttgaacagttctgagttgcagttcgaattcgggatcgaattcgatataagcttaatgatccgcgccca

SEQ ID NO: 36272 - DNA, 988 bp, Heterodera glycines
tctcaccgagtcgtggttcgcttcccgagtggcgtgtatcgcaattggcacccagtttagtgccgggtcgaatcggtccccgtcggactgtggcgggaacattccgctcagcagcgattgcgcactttctagcgcccgatcgacgtcggtggaacgaattattatctttgaaacaaataaataattacctattctcattaaaggttccttcctctaattgatttttcggtaattagcttattttgttcaaaaattctattgtcatcttttccaatttggccttacaatttatcataatctccaaaattggcgttaaaatgtctcctcaattggtccattaatctttttcttggggaagtttcttcttctctgtctcaaactctaattaatccattttttaaatttaatcggaaatttacctggaaattgcatcaaaactaaaccaatttaaaaataaaaaaaatccagaaatattttaaattatttctcggtgacgaaacgaacagtggcgaaaactttcggtcaccttcccaatttggctttacaattaattccgtgctgagctgatgcgaaagaactcaatgattgataaaataattaaattaattatataaatcaatgtccatgaattaataataggataattttttttcttttatctacaattaggcgttcagatcaaattccagttaaaaattgcctgtactttttgatttcggagattaatatttacaaattgatagccctaatcaatcaataattgatcactttcttacctcttttctgtcaaaatgttggggcaaaaaatttgcagcggcataacgctcccggaggaactggccaagctcctccatttgccgcatgccatcctgaatttgtttgcactgtttgaatttcgaaatttaaaaaataaaacatttgttaattggccccatcctctggcccatttgctttcatctgaaaattaattaattaatttatttatttt

SEQ ID NO: 36273 - DNA, 828 bp, Heterodera glycines
ttcacagaaatgtttccatacggttttaattatctctcatcgtaaaaaaaattcccattttatcattttctccattttttaattatgtaattattttgggttttcactaaatattccactcatatgtagtccaatcacttgttttttaatgacaatccgtcgaatttcttatccctttttccgttttttatgcgaatcgaattttttacattctttttccattaattattcattctttttttcacccctctatccaaaactaaagggcgtcgtgacaaaccgctgaacaaaatgtgatcagcttgcgaaaattccacgtttttaacatttcctaccaaaattgtccaaacaaaaagggcgactgaatccataccgtgccccattttcctttttctcctttgaaacgtttcattccgtcaaaaaaaaccaagtcccaactatgttaagtggactcctcaaacggttggaagaggattgtattgggtcagccccagcagtaatggacaaggacgacgccaaacaatttgaagaatatcgggcgaggaaagtcgcaatgataactggcatttctggtcaggtaattgaccgtaaatgaattaataccaagtacaagatacatacctattttttctccctaggatgggtcgtaccttgccgaatttctcctcgccaaggggtaccaagtgcacggggtcatccgtcgttcctcctccttcaacactggtcgaattgagcatttgtactccaatccgatgacacacgctgtcggttccagcttcaacttgcactacggcgacatgaccgactcgtcctgtttgatcaaactga

SEQ ID NO: 36274 - DNA, 942 bp, Heterodera glycines
  unsure (1)..(942): unsure at all n locations
cagctcttagggtaatggaaaaaattttgaagaggctctccggaacggattagcatcggggttacgagatagaaaattgtcctaaaaagagatagccatttttctgagaattaattcacaatttccgcagctcttagggtaaggaaaaaattttgaagaggctctccggaacggattagcatcggggttacgagatagaaaattgtcctaaaaagagatagccatttttctgagaattaattcacaatttccgcagctcttagggtaatggaaaaaattttgaagaggctctccggaacggattagcatcggggttacgagatagaaaattgtcctaaaaagagatagccatttttctgagaattaattcacaatttccgcagctcttagggtaaggaaaaaattttgaagaggctctccggaacggattagcatcggggttacgagatagaaaattgtcctaaaaagagagccatttttctgagaattaattcacaatttccgcagctcttagggtaatggaaaaaattttgaagaggctctccggaacggattagcatcggggttacgagatagaaaattgtcctaaaaagagatagccatttttctgagaattaattcacaatttccgcagctcttagggtaatggaaaaaattttgaagaggctctccggaacggattagcatcggggttacgagatagaaaattgtcctaaaaagagatagccatttttctgagaattaattcacaatttccgcagctcttagggtaaggaaaaaattttgaagaggctctccggaacggattagcatcggggttacgagatagaaaattgtcctaaaaagagatagccatttttctgagaattatttcacatttccgcagctcttanggtaatggaaaaaattttgagaagctctccggaacgattagcatcgggg

SEQ ID NO: 36275 - DNA, 1105 bp, Heterodera glycines
  unsure (1)..(1105): unsure at all n locations
atttcccaaagccatgcgcagctttgttagaccgatgccgaaatggcaatataatggaaaaggacagacaacaatgcttttctttatatcagctgatggtttacaaaaatcgaaatacttcctgagtactttccaagaaccatgagaataaatatcgcactagcgccaaaatcgaacaagaacgctaatcatcagtatcatcttaattttcccccagtgatttgtgagtgataagaaaatagaagaaattcagggattaattccagaggaatttccaaggaccacgtgcatcattgctacaacggtgccttaatggcattttaatgtcaaaatgcccgacactagcgcatttctttagacaacgaaaattaattcctgaggaatttcccaaagccatgcgcagctttgttagaccgatgccgaaatggcaatataattggaaaaggacagacaacaatgcttttctttatatcagctgatggtttatttacaaaaatcgaaatacttcctgattactttccaagaaccatgagaataaatatcgcattagcgccaaaatcgaacaagaacgctaatcatcagaatcatcttaattttcccacagtgatttgtgagtgataagaaaatagaagaaattcagggattaattcctgaggaatttccaaggaccacgtccatcattgctacaacggtgccttaatggcattttaatgtcaaaatgcccgacactagcgcatttctttagacaacgaaaattaattcctgaggaatttcccaaagccatgcgcagctttgttagaccgatgccgaaatggcaatataattggaaaaggacagacaacaatgcttttctttatatcagctgatggtttacaaaaatcgaaatacttcctgagtactttccaagaaccatgagaataaatatcgcactagcgccaaaatcgaacaagaacgctaatcatcagtatcatcttaattttcccccagtgatttgtgagtgataagaaaatagaagaaattcagggattaattcctgaggaatttccaaggaccacgtgcatcattgctancacggtgccttaatggcttttaatgtcaaaatgcc

SEQ ID NO: 36276 - DNA, 1234 bp, Heterodera glycines
cgccttgtaatttcgcgaaataatgaaaggttacctttttatttacaatctgatattaatcggaccatatcttgttaaagaatctgaaatacagggaaaatcactgatatgacgataactccatcaaaactgaatttatagattttatattaacttttagacctactatatctaccctctgacgaaaaatcaattactaaatattttttcataaaccgatccccaccgatcaaaatgctaattaagacgtatacaagggtccctgatgcttttcctatcaaaaggacatgaataaaatttttaaaaatttttaattcctttttaaacaggccaaaaagtttaggcttatattttaaaaagtttcatcgaacctagcgcactaaaatcgatataatctctccaaattttgcaggccttctccattgtaaaggactaacttaacctgaaaaaatgccaacgcttgttgtttttaaaatttttcgaaattctgactttttcattacttatttattttttgcaaaattaattcataagtattttttcagaaagtgctctgaaacgcaccaaatgttaattaaaagttaaataaggctctctgatgctttttctatcaaaagggagatgaataaatattttaaaaatttttaattcctttttaaacaggccaaaaagtttaggcttatattttaaaaagtttcatcgaacctagcgcactaaaatcgatataatctctccaaattttgcaggccttctccattgtaaaggactaacttaacctgaaaaaatgccaacgcttgttgtttttaaaatttttcgaaattctgactttttcattaattatttattattttgcaaaattaattcataaatattttttagaacgtgctctgaaacgcaccaaatgttaattaaaagttaaataaggctctctgatgctttcactatcaaaaagggagatgaataaatattttaaaaatttttaattcctttttaaatttgcgaaaaattttaggcttaactttttttttataaactgatcagaagcgaaccagattttgcgagggcatcaaaaagacaaggaaaagcactgctatgatgctaactccagtaattctgaatttaaaattttttattaatttttaaagcttcactattttatttttttagcaaaattaattcataaatattttttcacagactgctctgaaacgcaccaaattttatttacaagtta

SEQ ID NO: 36277 - DNA, 980 bp, Heterodera glycines
  unsure (1)..(980): unsure at all n locations
tttccaaaaatcgtaacatcatcatcatcatcatcataatcatattgacgataacaaatccaaaatgtcaaacctaagctggatgattttgtacgagccacgtgagggtggtcgtatggtaccccatccgctgttcgaccccggtccggaaatgtcggcgcgcgtcattgccaccgctccgcttttttcgacatcatatttttgtttgttttttattatcttttacattacatgtcttggcaatgtgcacatcgcaccgttccatgtaataataataataatttttaagccacccaacacgctaatgaatcagacgacagcgtggcagatgctgtcatctccggcggcggtagcggcgtagcatacactgtaacagaagctgcgttgctgaacaacaccaccagcacactaataggcacgacgtcagccgccgccgtgacatcaacgacggcgatgaccgcggcgggggcaagagtggatggggctgttcagattttgtccaccctgttccttatcgccaactacgcaatcgtgctgccaatgttcctactgtgttggatgatggttgtacactggctccgccgctccggcctcatgcctccgcctcatcaatcaccgtcgacatcccaacaccccaaccgctacggtggccttcacaccatatttgaggacaccgttgagcagaaggcagggcatgagaaagacgtacggcaacaacaacaacgccacacgtcagctgctgctgctgctgctgctgatactgtcactacagaggcaatggtgcgtgaggcgcaccgggtgacctcccaacttgctgctgcaattccggagcctatgcgtagcgctgtgacctcctccgtggccattcccatgcttgtgtcggcaccaagtggcgctggtagaaaaaaagcacgcaacacaacagtgaagaagaaaagaagaagaanaggaacgctattgatataatgatggaaggacaa

SEQ ID NO: 36278 - DNA, 2543 bp, Heterodera glycines
  unsure (1)..(2543): unsure at all n locations
cccccaatttttttttgtcgtcaaatttttccaatgttttaggctaccacaaatattttcgggatgggagacgagtgtcattttaatgtggcacaccgtacattaatgcttgtaacttttcttagtttagtttttttgccaccaattttttaatttaattaaattttttcaaattttgtagactaattaaaacccattgggctatctaatgatgtcaatgaatgtttaatttggttgatcattttagataaaagttaaaagcctaacaataaaactgtccaatttgaattttccgattcaatagagcgagcctaaccgtttgattttttcaaaaaaaaaatttttttttctttatttgctcatgcaaattttttttggcttttaaagccttcattaaaatgcaaaaaattaagaaatggcaaaattcaatgggcaatctcatcaacttgcaaaacaaggaaaattgtactatttgctaccgccaaaattgctactttcttatcactcgaaattttggggggtgccgaaaacagccaaaaatttttgttgggtcaaaattggtcactcactctctgctgcactttcttcgtttgtttgtttgttttgtgtacaatttgtacgaacatttgcaagtggacaaacacgaaaaacagaacgcggcaaaaagatcaaagggcgcgccaccaaaatgccgcgccgcaattaataaaccaattaattaattaattagggttattagccactgatagccgccattcattagccactgcacatttttatcacattttatttgtacttactgtattagtcaagtcagtacccattntttgttttgttttgttacctcgtgttgtgccctccccctccccacccccatataaaaaggggggagcataangcaatggtgaaataatgtggacgacaacgagngcacgattgtgggggcgggaaaatggagaaaatgggaatgggcaaaaaaaagacttttccgaaaaaaagaatgcatttttgcgggggaaaaatagaaaatttttcaatgtattttctcccccatttttttttttttttatggaaatttttttccccccttttaacatttttttaaacaccatttttttttttcctttttccccctttttttttaaatatttttttttcccttcttctaaaaaaatccccaaaaattttttttttttggaaaatttttttttggagtttttttttttttttgaccaaaaaattttcaaaaaaaaaaaaggggggtctgttttttgctttttatttttttttttttttttttttttttttttaaaaaaaaaatttttttttttctattttttcaaaatttttggggctttttcccccctttaaaaaaaagttaaaagaggaaagaaagaattccttcccttttcttccccaaacccaatttttggggagaaaccccccttttggggccgggaaacggcccaaaaaaaatttcgttaatattttaaaatcccaattttttcccaaaccctaacttttttagtagcgagctccaaaagcgggagcgcttttccccagctaatagcgagcgttcacgcaccggctagtttataatatatagataaagtgggtttcgtagaaaaattataagtccccgtggttgcccggagggggctgaaattttgcaggcaggggtactttttgattgcgcatctggaaaaataaaggaaattccggtngggagcccaactgagcgccagcggcgctgaaacggccaactttgaaaaacgagctcggtttccgggctgtaactttttcctgggaaccgggagcggaaaaagtccgctgagagggcacaccncagacatgttggctacaactttgtcactgatcactttttgatcagatcaaatgccgagcctgtagaaattggcgactgaacggcgctcaaaatgccggttttatgtttttcgggaataactcgctgggggttaagcggagcgggttggcgccgcttgagcatttgtgtagtttttaaagctgcatccgatggcgttttcagattttgaaaattttcaaaatttttcttgctaggccccctcgaaaatttttcgtttttgaattttattattttttgccgatttttcccaggaaaacgaagaccactttgaagcaaccgtttttcgagctctatcgattggtggcatttttgaaaaaatttcaaaattttccggaaatagaaaaattttccggaattgagctccccatttccgttcaaggcttataactcgtcaggcgttgattttagcgaaaatttgtcttagagcatttttgtagagaattttaagctctatctaatgtactttatctcatgtttttaccttgagtttaaaaaaagttataaaattaattgtgattttgaaactcaaaaccataggggggaccccatggttttgcatttcatgaaaaaattttttactcttaaattagccaaaatgcatttttatggcataatttgaagtgctgaatacgtatatacgctttattttgtgtttcag

SEQ ID NO: 36279 - DNA, 837 bp, Heterodera glycines
  unsure (1)..(837): unsure at all n locations
ctcccccaaattgtccaactccaaaagtccgttggccctttccccgattgggtggtgtttcgccttctccctgcagtgcctgtgctcccatcgctcaatcttcgtctcacttccacacaatcgaatcttccattccgttttgtctccacaaccccaaattctgactgaaccaaaacatcccccggggggctaagggtgaacagacgcggagaattgggagaattgggggatcgaccgatggcggcggatggcccatcgaattggccctttccctctgagcacaaagaaaggccatttattttaggcacaaagacaacattttatgtcattttggccgctttctgtccattaaactccgcagttgacgagcacagttttattgggtcagttcagcagagagtggagaaaatattcaaattaaaataaccaaacgacgccattcattcggtttgaaaactcggcaaattgaccaaagaaatgaaagcatttgcccaccccccgcaaattgtcacaccttttctgcaccgagtcaaaagcaccggatcaaatctcgaaaaggccaatctaagaaagtaagctaaagcaatggtaaaagaagagggaaaacaaaagggagagatgggaagagagagggcaattaaaaaggggggggggggaggaggaacaattagtcaattcaaagaattttggaaatttattaatcagatggcccatgctcaaaactttttaanaacaatcttaatctatttcgaanagcaaaaaaaaaaatgcaaattannggctntcttagttttttgctccattnttgncgatgngtaactgagtcccggntaaaat

SEQ ID NO: 36280 - DNA, 1720 bp, Heterodera glycines
  unsure (1)..(1720): unsure at all n locations
tcattatcaaccaaattaaatatttttattatcattcgatagctcttgagattctctattagcctacaaaatttcaaaaaaattcatctgtttacaaaaaagttatggccaaaaaacctcaaaaattggctttttcttggctttttcggcgccgcgtgccataacttttttattgttgaatcattaatttctattttggcatgtaaatatagagcacacatagagctttcaaatgatgccagaatggctaaagttgactgacaaataaaaaagttatagcatttcaaaatttgcggcgccgaaatggtccgcgccgaagtgaccccgacccgtctttttctgcgtggcttggtcacgaatttttaaattttaacaaaaattaaaattgtcgactttcattcgcgtcggattgtggattggtaattgctcgaaatagatgtcagattcgtggtcagctccctgaaagtcctgcagggacaagatttcacgactatacataatctaactaaaaaatttgggtactttacggttatctgtactcagattttgaaaaaaaacattttttttttgaaataaacgtgttttaggggttttcaaggtcgggagaccgattctggcatctgttttgacccaattcgaaccccaaacccggattcgaaaaaaagtcaaaatacatttttcaaaaaatttcacattttatacacaaaatcgcttcacaatgtcacgaggatgacccgcacaaccaaaaaatgccacgacgacgacacgtataaccaaaaaatgacaccacgacgactcgtacaaccaaaaattttttgcatgttttagcctgggaattttgttaaattgctatttttggcagaaaattttcatcaaatgttgcccagaatttgttgtagtagcagaagtttgttgctccggaatttgagtaagtttatgcacataagtgttgtaaaacaaatgttcatgtttcccattttttcgatcctttcccacactgaattacacgaaaaatcgagaaaattcttggttcacagcacattgtcctcacctcccaccgaaaatattgcaaaaaatcgtctaaactggccatgtttttggaggtttttggatgcttaaaagtcgaccaattccgattttcagcagaaatttgcatttttgggattcgttttccacaatgcattcaatttattattgcattccccatttttcaggaatttcccccgctctctccattcattttgcgatgcatcaaagcaccgtcgcgccgtcctccgccgctgctgcgcagagtttgggctgtaaaattgagcccccaaagccaagggttgacgccacgcgggcgaccgactcggacaaacattcgacagcaaaaagttagttgtgtttttttgcccccccccttttctgacgttgacactttttttgactttggtggaaacgtgttgaagaaatggagacagttttgtgcaaattttgaaaaattttaaaaacctaaccctaaaactttggcgagtcgcaaccatcgttttcccagaagcaaatcaattngaattatntgtcgttaatagaggaattttttgagaatgaagtcttgntccacagcatttccccctccccccgaagtcttgcaaaatcggaaatgggcattttgaagcataacgacaaantttaatagcaacaaaacaatgcaacagaaaatttaattttggaatttttg

SEQ ID NO: 36281 - DNA, 671 bp, Heterodera glycines
attagagcccggaaatttcaaatttgcggatctcgctgcgggattgatactgaaaattttagaattaaattttgaaaaactaaaaaaacaaatatacctgacaattttaaaaaagaaatttttagaggctggcggtatacgttgaaaggggttaatgggtttaagtcgtttttgcggcgcgctttttcaaaaacttttcgagaacagagggtccggtgccgataagcgccgctgggaaattttttttgaaagttttgtcgatttcttaactgattttgtccaaaaaagaccaaatatcgcacttttggactcaatttctaaattattcaaaaatatttggcattttgtcattaaaaattttcaaaaaaaatcaataaaatcccgcattccccaaaaaatgcgggattgcggattgggatccctcaaaatcccgcgcgggatcccgtcccgcgccgggctctagtttccatcacatttggtatagaagcgcgtcgtcgcgcagcggtgcgctggctaaaatgcttttgggactctgggagccaattataaatgagcgatatttagggagctttaatgttgccatatattcccgaaggagtcaaacgagtaattccaaaccccttacaaatcccgactctctcttacagtatcttcgtaaaaattttatcaag

SEQ ID NO: 36282 - DNA, 809 bp, Heterodera glycines
gaatggcattttgggagagaaaggcatttggaagacattgtgccattcattcattcattggccgtgctcacagtttggccctcatttggcttttttccctttccgtcctttcactttttgctttcgtttggcttttctccgtttccatccgtttcggcactgccctcggcacccaaacggcttctccctccacttcccccctaaggaatgcgttccgtcttttgtgctgctcgtagtgccccacttcgtccatgttcagcaccggcgttacacacgcgtcctcccctcaatggcaccgtttgggaggggcaaggcgacccttttcattttcaccttcaaaaataatggcccattctctctgcgtttttcccctgaacgcattttccatttcgcgcgttaatttcgccattccgtcaattttttcggtggaaattcccaaaactgcaaagcaatcgaaaataagtgccaaattcgaaaatcttcatactttcgaagagtttctgctgaaatttcggctccacagctcccactgccatccattttctgtccgccgtttcgtaagtccttcaaacgaatggccaaaaacaaagattaatctcgaaaaaaagaaaattaccgatagatgggacatttacccgagaaaagggcaaattcctcgtgccaaagccacggctcatgacgggagaggaacagaaaagagcccaggtaagccaacccttccgtcattgcgcagtccaacacaaagcctcggcccccaaaagatttccacaatttgctccaatcaaattccaaaatgccaaaaccttttt

SEQ ID NO: 36283 - DNA, 997 bp, Heterodera glycines
tatttttaaattttaattgaaattatgaatgtttaaaacaaaaattattatgtacaaaattcgcaaatagtaattcaaaaaattcaattttattaaataattcattttttaatttgtcttacaggctgtgtgtaccaataggtttgtccaggttcaacggggcaagtgatgttgctggcaacgcaagcattctctgccaaatttcagtcatttattttttaatgtttgcaaatttgaatcattcaatattatatttgaattttaagattttgtcaaatcattcggctgccaaagtgtcaacgttttccgagtcttgtgaaatgagatccgagaattgtccttccgtgaatattatgcagttctactgctgatcatatatcaataataggcagggtaaatgaaccattttcaatgtggaaacgagtcagtgctccgcgagagtcgccaagatgcgcccacacggcggtttgcagagagtcaacatgacgatctttaaagaaaaaaaaaaaaaaaaattaaaaatggcatgattaatagtagggatcggaccccgtgggcgggggtggcttttcgcgggggcgggggatggcgggggtcagagtcgcgggggcggtggcgggggaacaataatcccgcccccgcagtgaccggggcgggggtttgatttgaattagctccaaaaaatctcaaaaaaattaatttttatgaattatgtgttggctccacatttctttagtcgatgtatcgcctcgattcaattccttttggcataattacacagattttgtctaaagaatgaccaaatttattgatttatgttaattttttaagaaaaaataggttttttggggggccggtggtgccgacaggcgccgccgggggaaaatttttttatgaattttgttagaaattagccaaatttttcagaaatttcattcttttggatgaaattagcccaaaagaaagaacatttctcagaaataagaacataaagaaa

SEQ ID NO: 36284 - DNA, 1018 bp, Heterodera glycines
cccaaaaccggaccacttgaaaaaaatcgattttttttgttttcggggcagtccccctgaaccgatgcgcccagatttatggggagaccgaatccttcgggaatagcttccctatagtctgtactttaattctgcgttggatttttgctccccataaatgtttgagtaccccaaacggacacttgaaaaaatcgatttttttgttttcggggcagtccccccgaaccgatgcgcccagatttatggggagaccgaatccttccggaatagcttccctatagcctgtactttaattctgcgttggatttttgctccccataattgtttgagtaccccaaacggacacttgaaaaaatcgatttatttttgttttcggggcagtccccccgaaccgatgcgcccagatttatggggagaccgaatctttcgggaatagcttccctatagcctgtactttaattctgcgttggatttttgctccccataattgtttgagtaccccaaacggacacttgaaaaaatcgatttttttgttttcggggcagtccccccgaaccgatgcgcccagatttatggggagaccgaatccttcgggaatagcttccctatagtctgtactttaattctgcgttggatttttgctccccataaatgtttgagtaccccaaacggacacttgaaaaaatagatttttttgttttcggggcagtccccccgaaccgatgcgcccagatttatggggagaccgaatccttcgggagtagcttccctatagcctgtactttaattctgcgttggatttttgctccccataattgtttgagtaccccaaacggacacttgaaaaaatcgattttttttgtttttcggggcagtcccccccgaaccgatgcgccccagattatgggggagaccgaatccttcgggaatagcttccctatagcctgtactttaattctgcgttggatttttgctccccataatttgtttgagtacccccaacgggacacttgaaaaa

SEQ ID NO: 36285 - DNA, 892 bp, Heterodera glycines
tttatgagattatatttaatactttaaaaatataaattttatcaattagcatattttattattaattgtaatttaaatttaaaaaatatttcattccttatggttctattctatcctttatattaaattaatttgtcaattttaatcaaatcatcatgatttattcattgtaagtaaaaaggacgggtttcaatttttctatgtaaatcgggaaattaatatttcttcattaatttcaataaagatttaatattcatttttaaaaagtattttcttttaaaattttctttttaataaaaaattcctctatgttttttctttaagtgttaatcactagtttttatatatactattcttcacggttaattaaaaataaatgtaagtttttagcatttttcttcttttcaatttgctaattaatgaaattcatcatacattttttcaattaatcaattagacgaaattatctttcctcagtcataaataaaatagaaaacaattactcaaaataatacaacggctattatttctatttaaaagtaaaaatatttttgagctcggaatttggtttttaattaacgtatttttttgagccgttagattcccgattcgttaatttttgtattttttaaaaccttcatttatgtagaaaacgtaaaaagattaaaaaaattttaattaatttcatttgtgaaaatgcatttattcaaaggaaataaattgtgaaaattttaattgactttaatataaaagaattgttaggtttaagaagacttacaaaatagtatgaatcgaaaagatttgttattattttttggctaaccatacataaaagattaaaaaaacatttttgtattaaaaggaaacgatcaaaaaattatcgcaagaatgc

SEQ ID NO: 36286 - DNA, 978 bp, Heterodera glycines
  unsure (1)..(978): unsure at all n locations
tgcctgtggttgggtaccagcatattttttggaaaactctgaagcttctctctagaaattcgggtggtatattttgatgatgaattaaaaacctataatgagaaactgcgtttatattattatatttaagcgattcaaaactgtttaagtgtgaatttttagaaattaactattgtaattttctgaaatcatcattaaattcattcctttcaacaaaaaggaaaacgaattaaacaaattccattatataattaattattttaataagaaaattataaaacctttgcatatttattatttgccaaggtgtgccaaaaaacattggaaattctttcttattgccaattattcttgggaaaaatgaaatgccgttgtaaaaagattcttttagtgcctgtggttgggtaccagcatattttttggaaaactctgaagcttctctctagaaattcgggtggtatattttgatgatgaattaaaaacctataatgagaaactgcgtttatattattatatttaagcgattcaaaactgtttaagtgtgaatttttagaaataaaacctattaattttctgaaatcatcattaaattcattcctttcaacaaaaaggaaaacgaattaaacaaattccattatataattaattattttaataagaaaattataaaacctttgcatatttattatttgccaaggtgtgccaaaaaacattggaaattctttcttattgccaattattcttgggaaaaatgaaatgccgttgtaaaaagattcttttagtgcctgtggttgggtaccagcatattttttggaaaactctgaagcttctctctagaaattcgggtggtatattttgatgatgaattanaaacctataatgagaaactgcgtttatattattatatttaagcgatttcaaactgttaannngtgtgatttttagaaatanaacctattaattnntctgaatcatcat

SEQ ID NO: 36287 - DNA, 1144 bp, Heterodera glycines
  unsure (1)..(1144): unsure at all n locations
ataaatagccatttttgataaaattgattaaaaatgtatgttaaaaatctatanaatttctcttaagnaaattggcttaaaatcacaaaattatgagcacttnaataaaattttcagtatttttcggggtgtctaaagtaaaaaagtgccaaatntggttatttttcggcaaaatccgttaacaaatcgcattcctcaaactgtttgaatagtgcaccgcaaaaaaaaagcattgtgaatggcaaaaatgttcttggcttggcctaatcacaagctgaactataagactaccattttttattttattaatcaaaatcccacaaattttgaaaaagcccgggcccggcgggcgcccggccacaattttagaccgggcccgcgactcgcggtaaaagggcttttttttggaccgggcggcccggtcccggtcaaatggctaaaccaacccggtttcggtactttcaaaattccgggttctagtattaatcacttacaattggagaaaatctttataaacatcgtccgaattaaaaatatttttataaagtccttaaattttaattgcttaaaaacatagctaagattttcaatgaaatgagaaaaaggtaacctatttataataaagttaagtgtactattaccgtaccctttctttgagtgatttttggtatggcatgttgaatatgacaaatgtgttatgacgtaaaaaggacgttgtcaatgattgtctgtcatacagtacgctccttctttcaccgtaaagaattgaacaaatctgttaaaaaaaactttttttatgcctcttcacattttgaaattattgtattatagaagagatacgattgaataactcaaaaatttatatttaggaaatttaaaagtttaatagaattttgaaattttttaaatttttattgcattttttttaagcattctcttataaaaattttaattttcataaaatagcaatcctaaaattattttaattaccattgaaagttcaatttcgtaaatttgtttaaatccaaaacgccatcatttttgcgcatgatttcatagcccaatgcagaaaatccgatgactgtcttattgaaaattccnagatgntccnacatatctaaatttaagatgcaaaatattaaaa

SEQ ID NO: 36288 - DNA, 437 bp, Heterodera glycines
tttttcactttttatgtgcatattttgcgattttatgtgcatataattacctgccctactcattagaattgttttacctaaacatattatacacaaattatgggtgatcaaatgtttatcaacaccacaaaaaagcagagtatttcgtgagccaccgcgagatttgatcacagattcgataatatttttggcgctgatcaaaagattttacaccaacttggtccgatcactccttcatggtgatccgaatagactgtaaatcggaaattttttgaaaaattcctaaaggttgggaaaatttttttaacttcatgaaaataagcttttattttcgtggaaaaaattgaattgaaaaaataattttttgggatggtttcaatacccggttgacccaatacgcggttgaatcctccgcttgtgtgtcgtactcgctactc

SEQ ID NO: 36289 - DNA, 763 bp, Heterodera glycines
  unsure (1)..(763): unsure at all n locations
gcggcaatctttcggaattgtggtcccgaaaattttttaatttgtatggcactttttctaggcttaaaaatacgctaatcacgaatatgaactcggatttgcccaattccgaaccccggacccgaattcgaacaaaaattgaatttttttcaaaaatatacgttaaaatcgatcaaattttggcgtaaaccgcgcatttttatccaattaacaatttgaagcattattttaatcaaaaaataatagttgttgcatgaattagagttttttatcccaaaaatgcattcttgaaatttttttttttcaatttttgttcgaactcgggtcaggagttcggatttgggacaatccaagttcagattcgtaatcagcacccttgaaaacccttaaatatgaattttaaataaaaatttttttttcgggaccacaattccgaaagattgccgcgccgacggcattttgcctgttccttttttcaacacaatatctgattttttccttttcatcaagctgttttttctgctccctcattagcgattttattataatttatgagtattaatgatacacacgataaatacgacgtacacacaccgccgccgcaaccacaacgacccaatcacacacagaacacagacaaagaatttattttgggttttcgataaatttcattctcacaaaaacacatacagccaatcaatcgatcatatttattgtatttctgaaacaattacatatgtattttgaacaanttagacctgca

SEQ ID NO: 36290 - DNA, 1396 bp, Heterodera glycines
tttgacacattggactgttaaattccaaaaatatcgcctctgggtccatccaaaaacccaagaataattaatatcctttttttaacggcatttatcggaaatttcctaatgaatgattaatcttttttctattggccggttttggcatttaaatttcatgaattgtcatttttaaatattaaactgggccacataaaaagatattttaatgaaattatcaataaatgccgaaataaaaaagaatttaaatttttattaagaaattgggtctcttttaaagcctatgtcgaaacacgggtttcgaaaatcaaattatttgatttgtgccaaaatgcacatcggacaaaaaccaaaaatcaaatcaatttaaaaatggtccgatgtgcaattgcgccttatcagcggctgtcactccccccccccccgcaaattccgttccttatcacctaaaaattctctccccattttccgtcccttttaatgtgtgcttaacaaacagcacttcatttccccaaatcgacaacaatttgttggccgaacagctccaacccctcggccctcgttcaccgccatatttgtcccattttggccccctctggccaattcatttccatgcgcacctccccaaaattcatgcgctcattgtcctgtcccaattgccctcgcacacatttacttgttgtactgctccaacttcatgtcctcccaatttggcccaattttcaccatttcatttgtgatttttgtgtgatcagccaatagggccattttgcattacatttcaatttgtggcctttggccggatttttcttcccccatttgtccgcccattgtccactttttcggtttagttacccaagtttgaggataaaatttgggtgtgaatttttcctctgcacttgcccccgtttgacccccggtacatttcccgtcccactttctgcttcctctcctgtcaatttcaacgcccgaactcctcgggctttgtcgacaccaccgcggcgacctgcaccgcactcaacgtcaagcgcacacggccaactccaagcagctcaacggagctcaactcaaaacacggccatctccaagcagctcaacggagctcaactcaatcaatcaatcaatcaacgggtggtgatcggacaagtggcgacctgggcagggacgacagggacgacaaaccctcgacagcaccagcacaactgaacgacttcaagcagtagtggaactgcaactggtgggaattttttgagaaaaaattccaaaaaaagtatcaagtttgagctctccgtagccaaacttgaatacatcaaaaaggggggagcaaaagtgggaattgtgaaatactgcttggtctccgagccagcagtagtttcacaggggaaacagtgactta

SEQ ID NO: 36291 - DNA, 881 bp, Heterodera glycines
attccttcacaaaatgattttccgacgtcgtcgcctttggcatccgtcgcccgtccttttcgagccgtttgttctgttccattttgctatcgtcgctatgcttttactttttactccttcggttgtgccaaacattgtgagaattgcgcatcttcagcccaataacccggccataatgcatgagccgcaagtgctcaaaatgtgctccagcgatttgaaggagaagaaaatattgccagacgcgatcagtctcgagtaagggggcgcacaaaatggcacagaattcactgaactgcttgaagtcttgccgctgcgttttgttaggtttaagagtcgacggagtaaaccacacaaacaagcccgtttaaattatactttgatattttgtatgttaattaaataaatggtttctattagctttttaaaagtgattgtgcaccaccgtaattcattttttcatataccgtaactttcccaattaatgctgtcaaatccatctcagggtcatcacaatggagtcgtgcaatcggttcagcggagttgaacatgctgcttacctgcactatatgcgcaactccagcgtgtatttcgggcccggctgtaacaatggcagtcaaacaattgaaaaactaacgaatcaaaaaaatatttaaaaatttaaattttcatttgaaaataaattttttttattttattcagaaatactggtcattggtcggcttgtttcacgttggaatggtacaaattatgctgccaaattgttaactttcattttcttcccaatttcagtgccgatcattgctcatttgtccggcgatgacgcactttctgatcgaacaggtcggtgattttggccgtttcactcattaatcaaatcatcg

SEQ ID NO: 36292 - DNA, 520 bp, Heterodera glycines
gaaagttacggtactccctgcgggtgcatatcaaggctggccgtgatcacggatcacggaaatcacggggttttgaggtgccgtgttctcggatcacgggtcacggattttttcaatttttccgtgattttgatccgtgattggcattttatgtattgaatttttattgaaacgaaaataggaaattattgtgaaaagaggaattttttgagaaaaattaataaataaattcatttctgttagtgaagaacacatgtatatatagcctagtggttcagccctccgtcattcattgtttgccctttgggttcaattccccattgggatagcagaatttatatatatatatattttgataattttaattgaatttaattaataagaaaatttcttaacagtgaaaattattttctttattttttaaatatccatataccaataaattaacgcaatgattagacatatttttggacaaaatctgttaacaaattcactccaaaaatcaaaattttttccggcg

SEQ ID NO: 36293 - DNA, 409 bp, Heterodera glycines
aatggattctcttttccctttcaatccattcacatatctttttgaacatttcgcctaagcaaaaattaatgtacttgcacgttcgcgggcgggcaaaaattgattttccccctctcatagttttttaataaaaagttaattaataattataattaaaattttctagatttaaaaaaatattaatttattagcaaaatttcgccaatgataactcctgtaagtaggctttttaaaatataatttaaattattttcataatgttttttcttggtattttctcattttttaattttcaggaacaacaccaaaagcggctcgaatttataaaaaggaaaaaaatgaatagcgtgggctgtttcggcttggaggtgtgttgtaaattttttgttttttatttttatttgatttt

SEQ ID NO: 36294 - DNA, 885 bp, Heterodera glycines
ataccaaaaatgttcatttgctaatgaaacagcaaagcccaagctcagcgcattctctgaatggaaaagaaacggcacaaaagccgcagagaggcaccgatgacccatttttggtaattgttggaggggagggacagtgccactgaatccctttaggtaaaggacgacgtgaaaacattggcctcgaaattgcgctacaatgacgtacataaagccaatgaattctttgccatagaccaaagcaaatcaaaaaacaattggacaaatttattgcccgattggacggcgaatgatcggaaatttgaagaagtgcggcgacagcagagcagcagcaatgtcgcggttgttcagccatttctgaacaaccaaaacgaagtcgaaactgtgcaggaccaatgtccgctcgtgaaacccgccgggtccctccttcccccgccttcggacctccttttgtccggccttggcatttcttctgctcaaattagacactccgatcatttgaagtgtcagcctctgttcgacatttccggtatatttctctgttcatttatatttgttttttttaatttttggcggattgtccactcgtgaaaacccgtacattcgttacggagcaaatggcatcccaattttggagccagcgcctgtctcagtgacaacgaattttgacttgtttaaaccccgaacaaacaatcgtaaggaaaaggccgaagagagacagaaagaggcgacggccgtttccttgagcgaattggacaccgacgcacttttaaaccgagttaaagttggagctgattttgcgaggtatgaaggcactccctttcgccggcggggggagggggccgcaccccccccccccccccccacacaattttcacttaaacc

SEQ ID NO: 36295 - DNA, 631 bp, Heterodera glycines
aatattttacttctaattttctcttaatttttttgtcaatttttaattttaaaacgattttagaaatgaaaattttacttttaactttttttttactatcctttgctttattgacttaaagtcaaaccataagtcgaaatttgaggactttcttaaaaatcgagaagcaatgaaactgatcaaaagttacaaggaaaatcagatcaaaactgttaaggaactacatattggattcaattgggaatatgcactttaaaaatatatatgtgtaaaatcaagagcactatttccgatacatcaaacgaatccctcgattagaaatgaaatttgaaatgtctttctcgtgatctatcagatactatctatttaatcggaagtgagaacaaagcctattctatcaataatatgcttaaattataaaatatataaaaaaatacaattgtgaataataaaagtgcaatgcattgaatgggtaaaatatattgatggattttttgcctccatatttaaaaatatttaaaataatatatttaaaataattattaattaattaaaatctttgttccgtactgaaatgacccgcctcttctgatcacccacatcgatacttttgacacttcgccacagcacc

SEQ ID NO: 36296 - DNA, 1014 bp, Heterodera glycines
ccctagagaagtgtcgttcaaactacgccatttttgctatggtgcgctattttgccgaaaaaggacgatcccaacgagcttttgaaaagcgaaacttctgactcaaaacacctcaaaccctagagaagtgtcgttcaacctccgccctttttgctgtggtgcactcttttaccgaaaaaggacgatcccaactagctttttgaaaagcgaaacttctgactcaaaacacctcaaaccctagagaagtgtcgttcaaactacgccatttttgctatggtgcgctattttgccgaaaaaggacgatcccaacgagctttttgaaaagcgaaacttctgactcaaaacacctcaaaccctagagaagtgtcgttcaaactacgccatttttgctatggtgcgctcttttgccgaaaacgtacgatcccaatgatttttttgaaaagcgaaacttctgactcaaaacacctcaaaccctagagaagtgtcgttcaaactacgccatttttgctgtggtgcactattttgccgaaaaaggacgatcccaacgagctttttgaaaagcgaaacttttgactcaaaacacctcaaaccctagagaagtgtcgttcaacctccgccctttttgctgtggtgcactattttaccgaaaaaggacgatcccaactagctttttgaaaagcgaaacttctgactcaaaacacctcaaaccctagagaagtgtcgttcaaactacgccatttttgctatggtgcgctcttttgccgaaaacgtacgatcctaacgagctttttgaaaagcgaaacttctgactcaaaacacctcaaaccctagagaagtgtcgttcaagctccgccctttttgctgtggtgcactattttgccgagaaaggacgatcccaactagctttttgaaaagcgatacttctgactctaaacaccgtcaaccctagagaagtgtcgttcaaactacgccatttttgctatggtgcgctcttgtgacgaaaacggacgatcc

SEQ ID NO: 36297 - DNA, 1080 bp, Heterodera glycines
  unsure (1)..(1080): unsure at all n locations
ttctcttacagggtaggcgaaaagggctgcaatttcgttaaaaatattaatacagtttagttccccgtttttagcatagtcgtttagatgtgatcccagtgcaattaagaaagtaggtatgaatgcttgggataattttgttgtttaaaacagagcaaatagagcggtgtgcgaggaaatgcttatcgtataatgtgggtattgaagaaaaatcgacaaaaaatttaatgagctccaattgcatgggcgcctgtaaattcgaaaccagcacaaaaaataagcctcatggcaaaattccagcgcaattggtcggggctatagccatggaattaccacaaatttcgacgacattcaagactgctttttgttaaaatatgaacacatatttaaccgaaaataatgaaaggtgtgtgcttgatcagaacttatcttctctatttgttacactatcgattgcttatagaaaattgcataagatttatacaattaataaaattacaaaaaaaaaattgtttatttaattgaccttttccaaaacataatgaaaataaacaagcctatgattttttaaatgctttgcaatcatagaaaaatgtttgattattattgtttacttaataaagtacatagaaattgaaaaactcaccatagaagagttaatctgttatagaagaaaattgagaaattattagtgaaattaagatttctcttaacagggtaggcgaaaagggctgcaatttgttaaaaatattaatacagtttagttccccgtttttagcatagtcgtttagatgtgatcccagtgcaattaagaaagtaggtatgaatgcttgggaaaattttgttgtttaaaacagagcaaatagagcggtgtgcgaggaaatgcttatcgtttaatgtgggtattgaagaaaaatcgacaaaaaatttaatgagctccaattgcatgggcgcctgtaaattcgaaaccagcacaaaaaataagcctcatgggcaaattccagcgcaaattggtcggngctatagccatggaattaccacaaattcgacgacatcataactgctttttgtaaaatatga

SEQ ID NO: 36298 - DNA, 340 bp, Heterodera glycines
tcaaaggcgtagccagacccttggcttcggggggggggaggggctgaagtcaaaaattcgatttttaggggtgcatttttcgtttgttgaaatcccgaattagtgggtgtattctacaaaaaattttaactgtttttcggcaaaaaattaccattttttgccattttggtctccatttttcaaaaatatggtaaaatgggggtccccggcggtgccgataggcgccgccgggaaaattttttgagtattttaatgcaattttgttaagaaaatttcttaaaatttctaaaaatctactgaaatttttacttttttgggttttcgggggggggggtgggtt

SEQ ID NO: 36299 - DNA, 760 bp, Heterodera glycines
tttccatgtcgatgtccgatgatccaaggcacaacgcaacttctcttacttcccttccaaatcccaactttctgatcacttcactcaattgtatgctgtcttgtgccctgattgtttctgcatcgcatctgcttccaatgtccttggccaaactgtccccagcaaacacaaaatgcgtgcggattacacgactatattttgccgatttatcaatttttggttccatcttcggattttctcttcctttcactcgattttcctttttcatttctttctcgaccacgtttaaaatttttaattgcatttgtttttaattttacattcaattgttttcattcgaatgtgaacattgattaccccgatcacactgatttttgtcccatttaatgaagaaacagagaacggtagtttattgtgaccagtatttggcggaatccccaatccaacaaattaattcctttttcttttgtcaaactatgtaaaaaatgggatttacaacagcagtttcagcccttgagtcggaaagtgccgttgctgaatttccaattacagacaaattcaaagtaagacattccgaaatttgggggatggcagggttttcgggtggaaattcgcttgcgtggagagagagttcactgaaaaattttttatgtttgataatccaaattttccaacatgaacactctgagtttcttccttctcttcggcctgaacaaaaattgtgtttgcacgcttttgttcaacttttttttgggggggg

SEQ ID NO: 36300 - DNA, 632 bp, Heterodera glycines
agttgagaagggacgacagagacggcgaaaagcggcgctgacgcggaagggcgcggaaccgcgaggcgagcggaagcggcaaaaagtaagggttgcggcaaagtggcggcggaaacggccgcggtacgccccgctcggcgaccacagcagcggcggcgattgtggcggtggcagcgcaacgcgcgcggcagcagcggcaaaaatggcggcggcggccagcgcattcccatcgcggcggcacagttgcacatcggcgggcgcggactgttccgaatggtgagagagcaattagcgggaattacagtaatggtttttttgacaattagtattagctacaagagtaattacagtaatcgttgcatagttcgtcgagagttacggtcaagggtaattacagtaatcgttgcatagttcgtcgagagttacggtcaagggtaattacagtaatcattgcatagtgcatcgaggagttatggcaatggaagcaataaaaaacatttgtatttgggtggacgttttttgacaggaaaaattgcgttcaactaatcctaggaatttttggatcatcaggaaaactaaaataatttcttaaaagttcagcattttcatcataatttagttaattattttgg

SEQ ID NO: 36301 - DNA, 576 bp, Heterodera glycines
  unsure (1)..(576): unsure at all n locations
agaaccacatctggtcggtgctgcttgacagcaaaagccttggcctgtcgtgccccaggcgttgctccaactccgccgcgtcccatgggcagtatcgacgggcccgctgctcttcccgacgcagccgcaacctataataaagaatgtagtagagggattgctaacaacgagactgcagctgtgaaggtaagcgtgtgggatgagattaagcttcatcactttaccatatccttatggggatgaaattccatccctttaccaatgtccatagggaatggaaacccatccctttaccaatgtccataagggatgggaacccatnccctttaccaatgtccatagggatggaacccatccctttaccaatgtccatagggatggaacccatccctttagcagtgaccaaagggatggaacccatccctttaccaatgtccatagggatggaacccatccctttactaatgtccatagggatggaacccatccctttaccaatgtccatagggatggagtccatcccttttaccaatgtccatagggatggagtccatccctttaccaatgtccctaggg

SEQ ID NO: 36302 - DNA, 955 bp, Heterodera glycines
tataaattgtgacggattgaaaccgaaaaaatcatttgagatgagacaatggggaaaattagaaaccgactgataatttctctgatcaaaagaattgatgtcagacacgatgttccaaaggcggtgcaaaaatggcggagagaccaaacattcccagaggggaggagccgaaaagtgccggcggagcaaagggcctaaagaaaatggaaaaatgcaataaatagcaattaaatgggaatgatgggcaattaatttaaaattaattagtgttaattgggttataagtgctggtttctgttgtcaaatgacctttgctcggattccgtcgtgctgtccgaccaactcgttgaccatccgccgttgcttttccctttgtccttccacttttctcgctttgtcaatggcacattgctaatcactcccccgaggggtcgtagtttttcgctttcccccgcttttacccgtggccgtgccggcacggcgcattgccgtcgcgaatggcacggctttggcgcgtggcacattagatgcccattgtcagttgtagtgctccaacttgtcgttgttctacttttggctgttggtgaccacccctttgggtcgaaagtgtccctccctcgcgcatcgttcgtttcccttccgttcggtgaatcatcgctctctccgtaggagtcttttcgccgtgccaacgaccgaattttgggcactctttccacccaaaagttcgcttctccgtttggtgccatcgctttcttctgctgatccatcggatcacttccgaacccaaattccattggccttttgtcccttcccttttccgtcccccaaaattcgtccattggcaaattcttttgtcggaccaattgttgtccatctttgcatcctttcgttgttgggcagtcaacggaggaacatcgcagtgaaaggtcaatttggtgcagtttgtggtggcaaa

SEQ ID NO: 36303 - DNA, 747 bp, Heterodera glycines
ccccgaaccgatgcgcctagatttatggggagaccgaatccttcgggagtagcttccctatagcctgtactttaattctgcgttggatttttgctccccataattgtttgagtaccccaaacggacacttgaaaaaatcgatttttttgttttcggggcagtccccccgaaccgatgcgcccagatttatggggagaccgaatccttccggaatagcttccctatagcctgtactttaattctgcgttggatttttgctccccataattgtttgagtaccccaaacggacacttgaaaaaatcgatttttttgtttcataaatatttttttcagaaagtgctctaaagcgcaccaaattttatttacaacttaattttagcactctgatgctttagtatcaaaaaggaagatggagaaaaaatttttaaaaaaatttttccttatattttggttatatcgttttgcttttggtggggtgcttggaacagaggaatcatgcgcacccgtccgatctggcaagttaagcaacgattgctgactagccaaaaggttcggtgccgtgatgaaacgaaccagcactgcttaccccgcggcacccggcacggtcccccgaaggaatggatttaattaaattctctccttcggggatttttttccattaggtcgtccgatagcgttcgattgctctagtcaatttttaaaaatttttgttgaaatatttgtcgtgctctgaagggcgcgggggg

SEQ ID NO: 36304 - DNA, 969 bp, Heterodera glycines
ataaaaagcaaaaaaccattatacccgaccattctctgatcatttttaagcgtcatgaggactccgccaccactgttgtgcagcgctattcgctgcctgatctggcttcatcaacagcaacaacaacgccaaaaccaattcgcttgcacgcgaacaaattttcttggcacgataatgccaacatcaacaatttgtgacggcgcaacaacaacaacccaaggaatggcacaccgcgtaccacaaccaccaacagacaggggcaggcggaagcggacgctaccgcgaaggtattgcaggtaaaaaagcagacggatcagctgcacccagtgaccacgaaactgaaacagccgaggcagcgtctcccagcttggtactgtttatattaccaattaggcattatttgataccggtatatcctggagactgttaattttagttaatgctattttttgtgtatatttgaacaatatcccaaaaaactgttactgtactacaaaaacgggcaaaatgtaacaaaatgtgcttccgttttttaaataaattaacaatttgcttttaattgcctcacataaatgtccttctaaaaatttagagtttttatcaatcaaaatttttaaaatttcagcgaatcgactagccacggtggcgcaccaccaacagctgagccgattaaaatgccaaataataagcggtttattatagacgaagccgagttggaattaaaatatgcttggattcggcactataacgtaattaaatttgaacgttgcattaaatttatttaaaatttatttttgtcctttttaagtaaaaaataaaagtaataatcattttataatgtttattataaattgacgaatttcagccaattacagctcttgccggaggacctcggatggattggaataataacgataaaaataatgaaattgtaacaaaattttaaaaaataattttatttgattattt

SEQ ID NO: 36305 - DNA, 935 bp, Heterodera glycines
aaaaaaaaaaaaacgacaattttataagtccctctcctttcttaatttacccctcatatcaaacatcattcagatcagtgggatggatcacttccttcccatatgaggggatggacaaaaagttgttaattttatgctgccgtggtccccaacgatcacaacaataggcagaaagtgaactattttgtcgtaacagcaccgtcttggacactgagaccgaatgctggagcagttcgggtggcagtgacggatgctcggatagacctttgtcgaaatgctgccgaaggctggtgccaggctgttcagcttcacacacaaccggagaaggagccaatcgcagggccgaatgcagaaatttgatgtgcaaaccaccagcctcatcgacggccatacatttcgaatcgtcccgtaggtattcggtgagacgctcaaaaaacccgaccccgaaaaagaattcaaaaagtggcaacatttcactaaaataacaaaaaaaaaatcttttttacaaactattatttcagattttacaagccaccgttaaatcttgtagccttaggttttctatcggtaaaaaaaaaaaaaaaaatttttccaaatttaattgaaattgagctggcctgacagcttagatgataagacactgatttgtgtgggtcaatcgcaggacaagagtcgctttttcgagtccctcccaggaaattgactaaatcatttagcaaataaaaggagatacagcaacttagaaattttgcaactagtgtaagccataatttaaaaaaaaaaacacacacacaccattaaacccagcctgagggcgggaaacaaaaaatacataaatcgaacaagatcctttatttaatcctttaaaccaatttacaaaaattattaaattgttttttttcctccaatacatatacaatacataaatatttatt

SEQ ID NO: 36306 - DNA, 434 bp, Heterodera glycines
ggggggccgaaggccccccacgaggccgcgaagcggccgagtcagtaccttggttgcaagaaaaaacaggccaaaaaatttaggcttaactttttagtgaaaattcaatcactcatttttcgagtagtgatcagaagtgcaccaggttttgcaggagcctaaaaaggtcaaggaaaggcgtctctgcgttgatttagcagtagtacctatgaatttaaatttcctatgaatttttaaaggttcacaatttatttattttttgcaaaattaattcataattattttttcagaaagtgctcttaaacgcaccaaattctatttacatgttaaataaggctctctgatgctttctctatcaaaaagggagatgaataaaaaatctaaaaatttttaattgtttttaaatatgcgaaaaattttaggcttaacttttt

SEQ ID NO: 36307 - DNA, 1042 bp, Heterodera glycines
acaaacctcatcaggtaacagcatcaaaacaggcgacaattatgctggggaaggggagggagttctgatttcaatgtaatttttctgatgaattcacagcaaaagtcttccggtctcaacaataattgttttcttcagatcagttcaaatattaattctgaatatcttttgcttatatttaatactatttggtcatttatgaaataaaaacaaaagaattgtttaaaatatttgcacttggcaaattaattaaatcaaaatctttcatgttttttagaaaattttccagttgaaaattctggtcccggtcccgccttgaaatactaaaattcaaaatatttcaacttaaagtttacaattttttttaaattgtaatttctataagtcaggggtttcattttgaagacacagtcattagggctgggaattcattgaatacatatttttttcctggcttctgcatgctctgaatagtaggaaaatctttttatttttcttctgttaccattaaaattttccaatttctagtcaaaaacacataattttataagagaaagtttactgtgctcttcccaattattggggtgagcggaagtctttgcatagttcagaatagggttcggaccccgtgggcgggggtggcttttcgcgggggcgggggttggcgggggtcagagtcgcgggggcggtggcgggggcacgataattccgcccccgcgggggcgggggcggggtttgctttgaattagctccaaaaatctcacaaaaaaaaatattgtttatgaataatttctttggctccacattctttattcgttgatcgccttgataatatttattttgacataaattgcacagattttgactaaaaataatcaaatttagcgatttttgggtaattttttaagaaaaaaaggtttttttttgggggggccggcgtgccgataggagcgaattttaaatttatttctaacagatattcaaatttgcaaaatatctactaaaatatgtaaataaaagtcccaacttttgtctgcaaaca

SEQ ID NO: 36308 - DNA, 1232 bp, Heterodera glycines
  unsure (1)..(1232): unsure at all n locations
ttatttcntgactcncaaattgagagaaatgtaaagcaattgcccacccgtagcaaaagcatgtgctgctcaaaacgacggattgtctcccgcgcgtatcgcaacacttccgtgacggtgttgtgacgcacttgcagcgtgttcagctgctgctccttctgtccctgctccgtctccaattcgcttttgtcgccttctgccaaaacttttccaacaatttttggctttgtttggggagagagcggctgagaaagcgaacgaacgataggagaagggacagaggccaaactcagcctaaaagaacaaatggaaatgggaataaagaggacgaacgaaaaccgattgtgcaggttttgggcggacaaaagaaactgatgggccagcaaatgagcatggattttgaccaatggcaaatcctgtaaagaattgttcaaatgattaattaacaatttggattttgaatgactcggcccatgtgataacgaacttcttcaaccgtattgagatacatttggacgcccaaaagagtacaatggcgacccaacggaagaagacgaagctgcctgacccaccggggccatgcctcggcattttctggaatggcattccatgggaagggcaattaataccgccgatagtaggccattatttgccagaaaaatatgttataaaaagtcacgaacatattcccggagttgctgatcagtgatcacaaatatgacattcacttctgacaattccaaattccaaatcagaattcggataataataaattataaacgattaattatcgttggcgttttgactttattgtttcccggaccatcagatccttccaaaagtgtaaactgccttgtccttctcttgggcttttaattaaacaaatttggaatttaaaagtttgtaagaattctgattcggggtttgaaattagccaaaatgatgtcagattcataatcagatgttttatgacgagtttttaattgatagaagagcccatcatcaatcaaaggccaaaccatttacactccaagttttgatagaatctgacaaaagattggccaaagcgtccaactcggaaagtgcaacttcaaataaacccaaattccaataaaaacgacacaaacgaaactgaaaatgaatatataaaatgcaaatggagaacaatgctggtatttctcttacttatatatgaacattcgctttgatttcacctgctcatgacaagggaa

SEQ ID NO: 36309 - DNA, 1116 bp, Heterodera glycines
  unsure (1)..(1116): unsure at all n locations
gcgaaaaaacgcattaatgatatgaagtaattatttgacattattttcattactagtaaagcaatatnttcgaaatgtaatttcaaaaaaatccaaaatctaaaaagatgtttttttaggagttttccgataaaggtcgaaatggaaaataataaaatattgtcgctaataattgtgacctcttttagagcatattttagaagttaacagtcaaaattaaaaacaattatactaattatttgatcaaattttctgttaaacttccgagaaaaatgcattaataatacatcaaattctattttattaaatattcgtcaccataaaagcatatttttggaaattaatgtcaaaaagtaatcaaaaatatgctattaattcaaggattttaaaagaaactttgacacattggactgttaaattacaaaaatatgcctcgggtccatccaaaaacccaagaataattaatatcctttttttaacggcatttatcggaaatttcctaatgaatgattaatcttttttctattggccggttttggcatttaaatttcatgaattgtcatttttaaatattaaactgggccacataaaaagatattttaatgaaattatcgataaatgccgaaataaaaaagaatttaaatttttattaagaaattgggtctcttttaaagcctattttagaactctacagtccaattaatggcaattaggagaattatttgaccaaatattctgttaagcacctgcgaaaaaacgcattaataatatgaagtaattatttgacgttattttcattactagtaaagcaatattttcgaaatttaatttcaaaaaaatccaaaatctaaaaagatgtttttttaggagttttccgataaaggtcgaaatggaaaataataaaatattgtcgctaataattgtgacctcttttagagcatattttagaagttaacagtcaaaattaaaaacaattatactaattatttgatcaaattttctgttaaacttccgagaaaaatgtattaataatacatcaaattctattttattaaatattcgtcaccataaaagcatatttttggaaattaatgtcaaaaagtaatcaaaaatatg

SEQ ID NO: 36310 - DNA, 1049 bp, Heterodera glycines
ctatcagttcagtgcaatctcatcgaaagtccatttcttttacctctttcactaataaatcccaaatgtgccaaaagcacttttcacactttaccataattaattaataattataattatcaaatttaatatttttgtctgaaattctctttttcgcttcacacaaaatgatcagatttacttttctaatgttttccttttctcaccttttctttttcgtcattttaatgcaatgatattttattactaattaggtattattattattattgtaattaaatgttaggtttgtgatttatttatttttttaaatctaaattaatgctttcgtgagtcatcggaaattttaatcttttttattcttgcgaattgattgtggcaattcatacaaacctaacgcagtgaccaacaaatgggccatattatataagggaaactaaattttctgttcttatccatgccgaataaaaaatgacatataaactgaatggaacaactggaaaacaatttgtccggcattttctattctcaattcgcttattacatttcatgccaattttgtacgttcgttcattatttgtttatctttctttctcaatttactaagcacatatgatttatttaagaagaataaactgctaatcaaattaaaaaaggcgaccgacatatatctgaaatgggggggggggcaatgctttgcttatatggtaaaatgcttaaactcgaaatcggttcttgcatttttacatgggataatatcagaatttttaagttttgcaaagttttggcgttttgatacttaataagaaataaacttatttttgaaaataaaatattggaagcaatatttttttttaatgtgaaaccatttcattttgatttagatttgttaaaaagtccaattatcactgcattcttatgattctcgcttcttcgtcaaagcgattagcttgtcaattcctcatccgaaaagtgcctcattttgctgtgacttcctcgagaaaagagtattttgttgttttgtcgacatgataaatttttggaaaatt

SEQ ID NO: 36311 - DNA, 1561 bp, Heterodera glycines
aaattacctttcttatgatgacgtttttgggcaattttgacaggaggcaattctttgtatccgatccctcgttttgggttgggacgcttcgtagccaactgttttctcaagttgtgcagttgactctgcatgtgttggctgccactgctcgacgaaaagcctttttgggattgggttttgcgggctgtttgcttggttcgtgccatattctgcaagaaaatagacagcatgtgttacaacccaaaatttttgaaatttattaaaaatcgtaagaaacaaaagaaatatatgagtttacatatttgaaccgctgtgacgtaggaattcggcgggggtttcacgactttaaaagaaagccaaagttaaagtcacatgacgaaatttaaaaaatttaaaacattatgccaaatattaaataaacattatgccaaaataatatttttggcattttgaattaccaaaaggcaaaatttcgttttttcggtgttcctctgctaattccttccatgttaagccattgtacatgtttaatcctgcctttctttaattctctcaacaattcctctgtaggcagctgtcactgtttggtcaatggtttggattaagcctgaacggttgttatttggacacagtttttggtaaaaaaaaaacaaattgcaaaaatcgtaaccttttcttttattaggcattctgaacgtgccaacccgtatttttgtgcttcaacgtcgaaaaggccatcgtgaagatgagcagcaacggttttcgcatcagcaaaaacagcacagtgacgtctcctcctcatcgaagggttgaaaatgaattttttaaattttgctaaattataaattaaattccaaatttcagtgctcagcggaggactgtcggctttgtttgtgtccaccatcgactcaatttttgacactcgtccgccaccctatcgcatcatttaccagcgagaattggacgagggccaaattgcgtggggtcagtcagaggctaatgactccaaaatttggggatgggccaaactgggaattttggctaaaattatttttgtaataaatttaatttctaattttcgcttttttctgaaattaatcatattaatgcgatttttaaattttacaaaaattcatccaaatttttcttccgtttttcatctctcccaatattttccagtgattgcaattgccgtcgattggcgcgatgtgttggacaattggcaatgtttggagacttcgctgttgccaattttggaggtattttcaaagtaatagaaaaaataacaaaaacaattcctttttaaattttccttttcttagtcattgggcaccgatgagaacgaattggagaaatttgtgctgacaaaaattgacgggtttttggcgctgcgcgatgaaatggaacgccgtgaacatttggtggccgacggtggggaggaggacgatggcgccgagtcggctgccggtgaaattttacaaattaaattcaaaattccataatgttattgatcacgcacatatttttttttgaaaaaataacttcgcccaatgaatttagt

SEQ ID NO: 36312 - DNA, 1201 bp, Heterodera glycines
  unsure (1)..(1201): unsure at all n locations
tggcgtttcttgctccgtttcgctgctttcatgggtaatttggatgtgtgcgaacttttggtccaacacggagggcaatgacattggcatggtgaacatgacaatggccttttacgctgcatgttatggtggcggcataccggccccagaatgcaactgcccagacgcaaatcggccaggacgcaacctggctcgtttcgtatgatggaaacttggacanncgtaaaagaaaaaagagaaaaaatgtgggggacacattttcaatctgtttctaatatgaattttcggaattatggcatctcttttgggactcccacaaaatacactaaaaaaatgaaaattttcgggaaaataccataaagttattgtttttcaaaattattagttggccaataaacttttagtccaattctttatggaaagagtccatttctctgatcaattgcgtcgcgctgcgatcactgccgcgtcctttcacgggcgaatcgaagttgtgaattatttgctgtcctttgaaatgcgtgcaaatgccaaccaaagatcggcatcagaaacggagggtaagccatgaaaaagttattccggaaagatttcccaatgccattgttttaatgactttggtcataaaatcattttctttttaagccaatccatcttcatcaacatcttcaccttcttcttcttcccgttctccatcttcatcaacaacttcatcttcttcttcgtccagttcatttttctcatcagtttttgccgtattcgaaaatttggctatgaatactgtcaatctactggttactgtaatcgacgctgtgatttggctttgcaagacgatcattacatgtgtgaagtgtgcctggtggtgctttaaaaaattgagacaggtgggtacaaatttcaaaataaacacttattgttaactattttctgggtttctcctttaaataattacttattcaaggttattggtacctcttagactttaatccaaaaacttagcagagattccagcaaactcagataaaaatttaaaaagtttagggtatttttgaaacgaagaaaataattaatgcctaaataagtttttcacaggacttcgtcgtattaataattaattacctattcttcaattgatttttttattcttaagactgcatatgtttataataatattgttgctctcttggcacgcatcaaactg

SEQ ID NO: 36313 - DNA, 903 bp, Heterodera glycines
ctaactcacgttctcaaaattagttgataaattgcaaatctttttttgcaaagtctgtggacactttctgaaaataaattctatactcatgtattttccacttattagattttgcaggcttattgcttcatgttcatttgacacttcttcaaaataacctattccctttattcgttcaaaacagcatctttgttgtttcgctttggattgacaagcccgatgataaatagctcgagcgcaaaacgcgtgcatgtttggaaagtatcgttcataccaataattgagggtttatttttaaatgaaattttatgataaaccttattatctcagaagctatttaattgattcgaatgtttttatcgcggttaattagagcaccgaaaactggtttgaatcgtgaagtttatcatttctaactcacttctcaaaattgttgataaattgcaaatatatttttccaaaagtctgttgacactttttgaaaataaattctatactcatgtattttccacttattagattttgcaggcttattgctgcatgttctttgacacttcttcaaaataacctatgccctttattcgttcaaaacagcatctttgttgtttcgctttggattgacaagcccgatgataaatagctcgagcgcaaaacgcgtgcatgtttggaaagtatcgttcataccaataattgagggtttatttttaaatgaaattttatgataaaccttattatctcagaagctttttattgattcggatgtttttatcgcggttaattagagcaccgaaaactggcttgaatcgtgaagtttatccatttctaactcacttctcaaaattgttgaataaattgcaaatatatttttcccaaaagtcctggtgacccttttctgaaaataaa

SEQ ID NO: 36314 - DNA, 892 bp, Heterodera glycines
aggaattgattaaatgcaatgcaaattgaagagaagggaaaacaaaggaattgccttgaggacgcgttccttttttgttctccgtaatgactgatcggctccaatacaaaactgttcttgtggcattcgattggatgtggcgaaagtgtccaataattcggaggtcggttcgccattctgcgcactttcctcgctgctttcgccctgaatttgccttggccatcaatcagcttcatttgcccaaaataaccaaatagaatttgtccggcgtgtccactacatttttcttatcgttttcgtaatatcgtggaatgaatacggtttcccggcgaacattccttcgtggaaattctctcataaaattggctttcgtttggtccgtcttttgtcagcactttcattcagtgaatattttttgcttttttaatccgcttctttttgagcaattggccaattgttttctctttcttttttgtgtttttgtctgctttctctctcactttccatttctttctttctttctctcaattctttggcattgattttttcattttccttttgcaaaaagccaaaaataatcgattctttattttatttaagtcagctggtgcttgtttttattttatatttcgtgttttatttttgcctttaatattttggctgtggtgccacgtgaaaaaatttggcggagaagggaaagaaaagttttgctgaatgagagagacacaaggccagtgctaattgcattttaaaaatgaaaaacaaatcattcatcacagttttcaccctcagaatttctgttgttgcaagctggaaaattggccatttaagacgaactttggcgtgagaggaaaagcgatccccaaaagcattccatggactgttccgccgc

SEQ ID NO: 36315 - DNA, 805 bp, Heterodera glycines
tgggaaccgcccacttcggcgccggccttttcggcgccgttgctaacaaccttcttcattatcaaccaaattaaatatttttgttatcattcgatagcttttgagatactttattagcctgcaaaatttcaaaaaatttagtcagtttataaaaagagcgcacccagagctttcgaatgatgccagattagctaaagttaatgacaaataaaaaagttatagcgtttcaaaatttgcggcgccgaaatggtccgcgccgaagtgaccccgaccccataagcctcgccctaaactaaccttcaaaaattgtcgcaccccaagaagccaaatgatcacgctgtggccgacctcatgcgaggcggtgccggctttgtttgaccggagcgtcttccgggaaatgctggcaaggcgcgcgaatttgtttgcccattgcctgcgcatgtggcgctggatttttctatttttttttaaatgaacaactttttttgccattttctgttgtgctaaatgctttaaaatgtaattaattattaacaaaatgaaattgttgctttaaacggcgtaaaacaattaatccctgcttaaatgaattaagcattttagtaataatgtaaacttttttggcgttttgtttattgtttttcaaaatcaagtgctgctacgatgggtgcaaatccgcgagttgtcaactgcgtgccgccgacagcgtgccagccaattcaagaagccgtgacggaatgattggatcggcgtggtgggcgtaagtttgcatttgagtaaatcccattgatcacttgtaaattac

SEQ ID NO: 36316 - DNA, 822 bp, Heterodera glycines
  unsure (1)..(822): unsure at all n locations
aaaaatgttaattattagctcacttttcaagtttcaaaatcctcgacccatccgccggcgccgttgcgtccgccaatggcatttccgtccggcacccgccctttgcctggatgctcatcggcatgctgttcatcctcagcgtgcagtcgctgatgctgctgacggtgctgcgctgtcgttactttctgtcccagcgcgaattgcacgcgatggcactgcacgtggcgcagaaaagcgtaagtcacacaatagagagaacaaaacattggctaattaaattggaatttcaaccccctgcctccaatttgtgaggattcaaaaaattcctggatttacaaatatttatgaattattaattaattaaaagtgcccccaaaaaacttgaaaaaatgttcagcgccaggattacccgaccatccaaattgtggtgactaatggctccgttctttcctctgctgctgcagccgccgaaaatggctttgttgcaccgccgcaggggaacggcgttgtggggaacagtgccggcacagaaatggccaatggacacgcgacaacggcacaaaatggacagcagcaacagaatggggggcagcaggacgaaccgcaggatcagcccattctcaagggaattgtgtgatcagttttcagggattacccaagaaaaaaaaagacgaatttgtcatttatttatttttacggatgacgaaaacttcgaaaaattaatttttggcccatttttttttgtaattgccaaaaagtaaggcattgtgngatgaaaatgcaccaccaaattctttattttctgttttcgtccttcctttt

SEQ ID NO: 36317 - DNA, 670 bp, Heterodera glycines
ttagtcaatgtgcagagaacagaatagccaaagcgatttgtgctgtataggagaagccaaattttttattacctttacaaagtcatttttgcttaagcttttaaaatttaatttgcatttgccagttaggagggcttgtgattatcaaagatttctgatgaatgacccgcagcagccgctgtggaagaaacagtcaccgatttacaatcgtacaatggcactgggaaaagggggagggcatttacacagaagaaaatggcattcatttttacaacaattgtacagttctcatttcatttatatactctgatagcaaataatccctaagattgatcaactgctgattagccctgtgaaaagattaaattttacattatgcattaattactccgaatgtccatccatgcgcgtctttgactttgccgcctcgccaaaaagccgacaaaaagaaatttcacattcccaaattatgtcattgcttttcggcatttaacctaattatatatttccaaagattattttatcactagggttccaattttggaaaattcttcctttcgggtgaaacaggcacaaaatgccataaaaaagcctacataggcttagaatcacattttagtatttaaaaattaattttttatatctctttttttgaaaacagccgattttg

SEQ ID NO: 36318 - DNA, 1018 bp, Heterodera glycines
tggtgtaagtaaaaatcgtaattacgctcaaagagctcctcaaacaatttagcgcttccaattccttctacaatcgcctttatacatcccattatgagcgctaaaattatcagagtgccgaaaatcgcatgtgatctaagcctagaaaaaaatggtgtaagtaaaatcgtaattacgctcaaaaagcttttcaaacaattttagcgcttccaattccttctacaatcgcctttatacatcccattatgaacgctaaaattatcagagtgccgaaaatcgcatgtgatctaagcctagaaaaaaatggtgtaagtaaaatcgtaattacgctcaaaaagctcttcaaacaattttagcgcttccaattccttctacaatcgcctttatacatcccattatgaacgctaaaattatcagagtgccgaaaatcgcatgtgatctaagcctagcaaaaaatggtgtaagtaaaaatcgtaattacgctcaaaagcttctcaaacaattttagcgcttccaattccttctacaatcgcctttatacatcccattatgaacgctaaaattatcagagtgccgaaaatcgcatgtgatctaagcctagcaaaaaatggtgtaagtaaaatcgtaattacgctcaaaaagctcctcaaacaattttagcgcttccaattccttctacaatcgcctttatacatcccattatgaacgctaaaattatcagagtgccgaaaatcgcatgtgatctaagcctagcaaaaaatggtgtaagtaaaaatcgtaattacgctcaaaaagctcctcaaacaattttagcgcttccaattccttctacaatcgcctttatacatcccattatgaacgctaaaattatcagagtgccgaaaatcgcatgtgatctacgcctagaaaaaaatggtgtaagtaaaaatcgtaaaacgctcaaaaagctcctccaacaattttagcgcttcccattccttctaccatcgcctttatacatctcattatgaacgctaaa

SEQ ID NO: 36319 - DNA, 911 bp, Heterodera glycines
  unsure (1)..(911): unsure at all n locations
aatcgcaaccatcagtaaaatgagtcaataaatcaatcacaaaatcgaaaaagcataatatttgaaattaaaatgattaaaaaaataataatgatttaaaatttgaaaatcgaattcgaacaatttataaaacccttaattattatggctaatttgtcagagtatggatgaggagaaattctggcaaagtcgggcgccggaaccaatccaattcgaagtgcaagttaaaaattgcgtgtgctcacaatgaatgattttctatgataattcttggcgccaagcaggaataacttttattcaggcttctgaccttgttctatcaaattttttagccataacgtgttttacgtgaaattttcttggacacgagaaaattaatcaaactgatactaaataatttggtttttaaattttatgttttcatataaaattaacttaattagaattattttatttgtgtgtccgtttcaactatgaaactttgcaagtgtctaacaaaaatgcgacacaaaagtgaagcaagtgtgtgaaaatgagataataaaataattaataataaaatttaaaaaaatgaaaataatttcataaaaataatcacaaatatttttccttntttttgtttttctcttttaaaacatttcttttgggatcttttgcgcccctaaaaacagggggacccctattgtggcacttgtgcccttattttcgccacactctttcggcattttgtgaaaaatttctttagccgaaaagtggaattaaaaaatgcaccaataaggaccgacctcttgaaaatgtttcaataagttggaaaaagtacaaaaattttcaacctatgaaaaaataagccgaaaaatcgaattttctataaaaaatttttttttcttttggttttattcaaaaaatgatgg

SEQ ID NO: 36320 - DNA, 446 bp, Heterodera glycines
aatataattttgaagtgccatttctcacttttctccaccgtatttcttctgctgttccttggctgttctgccgttaaatgtttctgctgctgctgctgttcgttgtcatcagcgtcgcttcgagaataattatacgctaaatgagcagagaaatccacacagaagccgatgctctgatgggggaattgattaattttattgaaaaggaatatttaattgggcattagccacggtaatcagagggcttttaaattaatattttcaattgtgccattagtgggttaacaagaaatgagtcaaacaaaaactaggctaatggtgcgccatcatttaaactgactaattaattgcactaattaccattatgatggtgaccatggacacaaagtcaagtcgaatggagaggaacggcatcaggccaagaacgcccaaattggtcgagactg

SEQ ID NO: 36321 - DNA, 904 bp, Heterodera glycines
ttcaatgtgaaaaaaatttccatgggatgccaacctttattttttttcgcctctttttgaaaagaaaaacttgttagcaaggggtgtttggaccaatttagaaacaaatcggggtaattaatttaatctggctttataagataaatgggaatttaagcggaaggattcatgcaaaataataatctatagaaattctcaaaaaagtagttcctcgcagattcggggaccgtttctataaagctagagacatatgcgctaaccataaaaaagatgaatcattttttgaaaaatttatatagttcgactaaatttgctaatcgatttatggtgtacaggatgtttgtcgaaacataactcgtcaggcctttaagatagacctgccattgctattcctgcaaatatggagtctagtcagcccaatcgattgctattcgaatggtttggggtcattggcccaaacaaaagttgtgctgcttcttgcaaataagacgtagccaactgtaaacagcaagccatacaaatgcttcaatgtaaaaaaaattacatttggatgcaacctttatttttcctcgcctctcttttcgaaaagaaaagctattagcaagcgtgtttggaccaattctaaaacaaatcggggtaattaatttaatctgactttataagataaatgggaatttaagcgaaggattcatgcaaaataataatctatagaaattctcaaaaaagtagttcctcgcagtttcgggaaccgtttctataaagctagagacatatgcgctaaccataaaaaagatgaatcattttttgaaaaatttatatagttcgactaaatttgctaatcgatttatggtgtacaggatgattggtcgaaaccataactcgtcaggcctttaagatagacctg

SEQ ID NO: 36322 - DNA, 948 bp, Heterodera glycines
  unsure (1)..(948): unsure at all n locations
aaatttattatttattaaattttcatgttgagtccnagagaatctggtaaatatcattgcatgcacattcttttctgtatcgacattctttgatttttatttatttattattagcatttttattttcttatctccttccactatttcatccactgtttcatttttatttatttttaataattaatacaattttttcatttatattatttttaatatgatttgttaatttatattcttaaaaaatacatttttatttctttcaaaaattgtatttttcatttttaaattgatatttttattaaatttgttctttgattatggttaaatttaattaaattgtcatatgcttttaccatcccttgaagcagaattactgatattaatttaattaaattttctttaaatctgtagtgatgcctttaattaaaaattttttaaatttaaatcttttttatatattttactgttttgccaaagcatttacaaatttttattatcattttttcaattttaaaaaattgaacttttcttattattaatttaatttagccaatagctccttattacgtgaatatattccttttataacactccatatattcatttaagcctcttctattaatcatttttttaaataaagtaatctaaaatttttaaatacttataaataattatccttaaaatacatcgaaaatcaaaaaaatttatgatttttttatctttatttttttaagaatcatattttacgaaaaataaatttttaaaattaattattgttaataatattttttttattaactttattttatattttcataatgtaacagatttcatcatctttttatttagaagtacacaattcttatgacaataaaagttactgtgtcagagtttaatttgaataaaaattaaagtgaatgaagtaaagcgaaatatttaaaatactaa

SEQ ID NO: 36323 - DNA, 924 bp, Heterodera glycines
  unsure (1)..(924): unsure at all n locations
ccccccccccccccacgcgacggtctgtcccctcgcgggcaaaaaatgttntaataatatgatgtacaacaaaagatcccatgccaaaatgacttggaatgtgggcttaatccccggcccagtcaggttttaattccgattccatttgcttgccaaatttacaaaggcgtaaatcatttacatgatggttagtcgagagtgtcgggaaaagttgcgactctcgagtcaccccgcccaacaatccctcatttttcgatcgcaattaattagaggtgagattctgaatgtggccagatccccgtgacaaaacatccgtggcgccaaaacgactcggaccctccggcttattcccgacccaattggctgccaattttaatcccaattccctttgtttgtgaaattttcttgatgttgtaaattctcgaattacatcacaccaatgtttttatctcgaaccttcaacacccctcccctgaaatcagcggcacttctgtgccattcttaagaattttgtgctttcactctcgtgtcacatcgtcaacccactcataatttagagcgtaattaattaattgtttgtttatcattttgttggcacaaaatgaccatttcctatgaggaggagttctcctcactgatgctccgatggcgcggctccatttggaaagcggtgctcaaagatctgatcggcttttacattgcttactatgtgattctgttttggcaggtatttattatcatggtcttgtggtctcttggtgataaagaaggactcggaattaccgtattttctctaattatcccccgggggattattttaaaacttcctcagaatgagggggataattagagaaaatacggtatatgcacganaaattgcaaaatatgaaaaanagtgaaaaatatgcacataaattttcccaa

SEQ ID NO: 36324 - DNA, 784 bp, Heterodera glycines
agaagaggtacaacagtgattagaagaggtacaactgtgattacaagagatacaacagtgattagcagaggtacaacagtgattagaagagatacaactgtgattagaagagatacaacagtgattagaagaggtacaacagtgattaaaagaggtacaacagtgattagaagaggtacaacagcgattagaagaggttcaacagcgattagaagaggtacaacagtgattagaagaggtacaacagcgattagaagaggtacaacagtgattagaagaggtacaacagcgattagaagaggtacaactgtgattagaagaggtacaacagtgattagaagagtgattaaaagaggttcaacagtgattagaagaggtacaacagcgattagaagaggttcaacagcgattagaagaggtacaacagtgattagaagaggttcaacagcgattagaagaggtacaacagtgattagaagaggtacaacagcgattagaagaggtacaacagtgattagaagaggtacaacagtgattagaagagtgattagaagaggttcaacagtgattagaagaggtacaacagcgattagaagaggtacaacagtgattagaagaggtacaacagtgattagaagagtgattaaaagaggttcaacagtgattagaagaggtacaacagcgattagaagaggttcaacagcgattagaagaggttcaacagtgattagaagaggtacaacagcgattagaagaggtacaacagtgattagaagaggtacaa

SEQ ID NO: 36325 - DNA, 905 bp, Heterodera glycines
tattttttaaaattctctatagtgtcaaaattactcaatgtcgaaatggtccagtgtcgaaaatgcaggaaaacagtgaaagttttagaaataattccgtgtcgaaattacttagtgacgaaaatgtagtgtcgaaattacttagtgtcgaaaatactcagtgtcgaatttacccagtgtcgaaattacatagcgccaaaaaaactggtaattaccggccagtaccggtaccggtaccgtgcaactctacctgtgagggaatcaaaccctcggcctctggtgctgatatgagaaaatgagcaataaaatagagagtaaatttgtagttccagaatcagactttattacttttgagattttcgccggtgagttttagccagggcttccatttgttcttatttatagaaatgttctgattttgggctattattattattttgttcttatttcttaaaattgttcataaatttagaaatttatggcataaatgttcttattttccctataaattaaaaaaaaatttccccggcggcgcctatcgacaccgccggacgctaaaatactttattttctttaaaattggctcaaaaatcaccaaaattggggcaatttttagacaaaatctgttaacaaatcgcattaaaaattacaaaattttttcccggcggcgcctatcggcgccaccggacgcccatgtccaacccccaaaattttttgaaaaaatgtcgcaaaaaaccttttgaatgtaaaaatggtcgccaattgtctcaaaatcgcaaaaaatgataatttttgatgaaaatctgttaacaaatcagaaataaattacaaaaatttttccggcggtgcctatcggcactgccggacccactcccctcccctgttctccaaaattccttggaaaa

SEQ ID NO: 36326 - DNA, 742 bp, Heterodera glycines
tggacacggaaagaaatggacattttagttctaaaaagcaaccatttttgaccactgatttcggctgtggtaccatggcgagcaatgaggggaaggtggaggcgggcaattggttgtccatttggaaattgtgcaatttcacgtgaagcgtctgctgatgagtggtctgacgatattgacaccagaaaccggtggccattttgagcgactcttcgtcacttttcttctgttttcctgcagaaatggcctaaatttggtattgaattaaatatgtactgaatcaatgaccatgtaaatgacttcaatgcttttcaagttgttgaccagggagatgcccagcccgtgcaagtgcagctccaattcgatgtccggctgttccatctgtgaaattttaatgattgaaaaaccgatggaatgtgaaaacaagataaatggttctgcccctctgtccactcacttcatacgcttggtgagcaatgaaagaaactttttcgtcagcagtgaactaaacaaaaagaaataaggaattatcgtaaatattaaaaatgattacgagcaaaacgcgctggcgcccgtccaaaaaggacacacaataatggtaaccatcattgttggctggcagataagaaatgtcgcggttgcgcaacaattcatccgaattttcagcatcgcccgactcccattccaatttacaatctgaaaaagggctaaaggattattgaaaaataaaaagccatttaaa

SEQ ID NO: 36327 - DNA, 1667 bp, Heterodera glycines
  unsure (1)..(1667): unsure at all n locations
aaaattcaagttaaaaaccaaccatccattcccgcaagtgattgtcgcacccacttttccttgcgggaatgttcccacaccgttcatgcgcccctcggcattttgcacgacggcaccaggatgcttgatggtgtaaatcaatgcaccgaatccgtcactggtcagaaaggcacgccagtcaggctcaacctgcacgaaaaatggattacctataacataatcaccagttaatttttgtcaaattaaggattaaagggatgatttcatcaaaattaaattttgttttgccaaatgattttgtaaaagaactttttttttaattcatttttttttgctcttttataaaggtgcattttttgtattttatttaaagcgcttatgtattcattagggttgtaaattatatggactaaaaaacgcgaaatatggacattaaatatggactaaaaaagcccgaaatatggactaaaaaggccaaaaatggccaaatatggaccaaaatatggataaaaaatgccaaaatatatgttgtaaacccccaaaaatcccaaaaaaggtgtgcatatttaatatttgcttaaataaacctaaaaagtacaataaacaaccaaaaaatggggtttaaaacttaaaaatgcatattttttattgttgttcgttgtatcaaaaacacctccaagtttgccaaatttcgaaaaaattctcattaaaaaaaaagaaatgttcgcaaaaaaatgacgaaaatatttattgaaaatgccaaaatgacgacgaaaactcaaatttttcgtgttttgtggggtgtaatttttaaaaatttccaaaaagttgatctttaggggtgtatttttcgtttttttttcatttttcttgtgaaaatttccaaaaaatggccaaaatatggactaaaaacccaaaaatggcgaaatatggatttattcccgaaaaccaccaaaatatggatttatatggactaaaaaccttcaccaaatcaaaaaattttaacgcagaaatgctatttttaagcccctttcttcatagcatatgcgcagaaaaaatatgttaatccatataatttacaaccctaattattaatgaagacaaaaccgattttaaataatctttttgttcctgccacagccgagaattattaataaaaaaatttttgtttgcatgacacaagaaggcatacacaacccnatgcatgtgcaatgggaaacaatttatatcaattcataagtaaatcatctaaaaaaattctaaatgaaaaagacaaaaagttcatttattttaaatatattttaataatacagaaaaactgaaatgttctaatatcaatttataatatccatcaattaccagaaaaagaatttcagaatgggtgttaaaagtccgaatggacaagtgtcttttttcaaaaatgaaatcaaatatttgggtgtgatcattgatcaaagtggacgtcgaccggatccaacaaaatcacagccattgctgaaatgcgcattccttcaaatgtcagcgaattgcgctcatatttgggcatggtcaattattaccaggaatttgtacgaaatttccgattcattcgacagcccatggatgaactgctaaagaaggaggtgggatgggattggtcacccaaaccaaaantgcgttcaccanaa

SEQ ID NO: 36328 - DNA, 698 bp, Heterodera glycines
  unsure (1)..(698): unsure at all n locations
aaaagtcgttaagggttttaaaagcaaaaaaaccaaaacattttttttaattattntggtaaaaaccaaaatttagaccatccttttacgattattcggtaacaaaacccctaggggtttaagaagcaaaaaaatcaaaaaattcttttaattattcgcaaaaaaccaaaatttagaccattttttaaaattaaattttcttggatttatgactctcagaaatgtaatcacactgtattacgtggggcttgatgggaagacagccggagaaaattttgaaatttttagtgcactttgttaatagatttagtccaaaaatgacatttttacgattttaattgttaaaattgtgtttgaactcccatcgaaaaaaagattaattttgaaaaatgagaagaataaataatacttggaggggaactgatccaacgcaaaaataaggaacaaaaccaagaacacaacccgctggaccacgcatatattaacaactttgaacaaaaaagaacctaaaatttataaaaatagaagtttaccaaaggccaacaatcattaggggtgtaaaaaagtctcggtctcggtctcgagtctcgaaaatcgagaccgagacttgaaaacccgagactcgagaccgagaccaaaaaaacccgagacttttctcgagtcgagactcgagaccgagactctcgagcatcactact

SEQ ID NO: 36329 - DNA, 162 bp, Heterodera glycines
ctcagttctaatttttaaaaacgtcacatttcctaccccccattctccaactcaaaaattttgagaacaaagtcagaattttaagaatgtttctcaagaaacaaaaaacaacttgcgagagttctcactaattatcccattttcttggcaattaattaatta

SEQ ID NO: 36330 - DNA, 113 bp, Heterodera glycines
cgcgcgcccaggggccgccgtgcggatgcaccagcgccggaagcggtgcgtcgccctgtttccaaccggccggaagatcgacgatcgccggaatcgagcggccgtcgcgcgcg

SEQ ID NO: 36331 - DNA, 796 bp, Heterodera glycines
  unsure (1)..(796): unsure at all n locations
tagttaattaattattaattcgccggtccttaattagttccctaattgtttcttcccaccattttaaccggaagttgctgcgcgttttgaagctcttgggcgagcaacacgttcagatcgtccatgtagaacactttgactttgctaaagtccacatcctgttgaaaggcgtccacctttttgccggccatcacctttcaagacaattcatcaatttgacattaattgctcaatttaatttgggtaattaggactatttaataaaaaataacggatttaaaatttaaagtggggaagccctttcattaaaatataataaaggttattgagaaaattcatttattttcataaaatttcttgaaaaatgatgatttttgtcgaagggggcgggtcatttttcatttttttaaaattaatgaattttatttaaattaaataacaaaaaaaatacaaaaggttttacaccaatatttaaatttaaaaaaatttttatataaaacttanacattttggctaatattagagccctaattgtttttctgctaattanaaaatttgattggagaaatttatttttatttttttttgtcattttttcctttgaaatttaccgcaagtgccaacggcaagtcagaggcgtagcggcacattggtccattgctgagcatgttcagggccggcttgtataaaaggcttttgggcaaaatgccctcggtcggcacgacgtcttaaaaatagtcgtccgtcatttttccgtgttcattttaaatgtcttgcaatttttggttaccgcatt

SEQ ID NO: 36332 - DNA, 558 bp, Heterodera glycines
agcacggtttttggcaaatcgtcggacgacgaagcggcaaagagcgaccgaatggtcaagggcagcaacaacaacagcacaacggagggttcttccggtggcaatcgtttgccaaaactttgccaagtctgatgacgcaacaagcgaattcgtacggaaattcggcagaaagccgagggggaaattgcattttgaatgagaaaaggaaccaaagacaatgggaggagagagagatggtggatgcgaacaacaacaacaattacaacagcagtgatactgataatggtgggtggagaaaaattggacggattaaaagccgaggaaaaaagagaaaatgccatgggaaggaattgtgccgtttccatcccattaaatgcccggctttcagaggcggtgctcgacagtgcctttctcgcgccgtttgtgccttcctccgtctcttacagtgctcagaaccacaacaaatgccatctcccgcaacgttttacgcatctgatgaccgatgagaagaaagtttaaaaggaacacggcacaacaataataacaatgaaaaggtga

SEQ ID NO: 36333 - DNA, 881 bp, Heterodera glycines
atttatttaattgttgataaaatttatttgaaggattgtgtgccgtttttatacaagctttgagagcattggccggaaacgaaaacactgtgacaatttattcgcttattatggaattgctaaaaaagggtgccaaaaaagacgacgaaaaaatcaggaacaaatttaaaaacttggcaaaaacattacgccaaatggacactcgagaagttgagggaagactttttgaaattaaattgatcagagagggcaaaatgggcgaagtgatcagagaaacccaagcggatgtggcaattgtttttgacaaaggcttggaaaagtgaggggcaatttaatttaaaacataaatttaaatttaaaactaaactttaaatttgaaggatgggcaaagaagcgggagggcataatgccaagcagcaaatctttcggaaaatgaacccgctacagattaagttcactgacacaaaagttggccatcgcacgaaatttctgcttttctttttgcgtctgtacagaaaaatgatcggacaaattggggcaccataccaaggcagtgccgaactgtacgcggttacggtaggcaccgcggggccaaaaatggacataaaattagggagaagcaaaacgaaattagcttatttaaaacaaattaaggaaaaagtgaaacggacggaccgcgaagctttgctaattttgatgagcatggcaaaagacgaaatcatggcctattttgggggatatttgaacattaatgcatttaagcaacacaaattggtaaataaaattttaatgctaggaaattcagaaaaatattttcctaattaaaaatttcattttttaaataaaatttaatttttaataaataaatgaagaatatttgt

SEQ ID NO: 36334 - DNA, 1259 bp, Heterodera glycines
ggatataaaaagacaagtaagttgtttttacgtgatctgctgtccattttttgttgcgtgccattatttttgtctgtgcccattttttttgtccctttcggcgatatgcttccgtccgaccgcaacatttgttttttcttccctttgccttccgccgtttgtttttccttcctctgaaactccagcaaaacccaaggacttctcattgcccgcaagtgttgatcatcatcctcatcattattatcaccacgccctcattatggctgctcctccgtcggattttgctttgggccctctgccggtgaaacctgtcgtccgacgactaccgtatgcacccgaagacaatccaaaaccgatactcgcgtctttttataaaactaatcttttgagaattgacttcataacaagcaaaaataaaaatttaaaaaaaaaattgcatatagcggattcgaacctggtgcgactgttactaacgcattacctctacaccatttgacaatgcgaatggttgcaaataattatttaatttgtttgttcattaaaaaagtttggcacgtcatatctcggcacagaagctcatttggcaaaaatggttaaaatttcacaatagaaactaggggtgatttacccacccaccaaatttcatttggaaatcccacggtcacttgccgacccctcctttgtcagggttattaatgttaggttcggtgtcaggatttgagattttttaaaataagtaaggtgagattgagatttatttaatttgtgaatcgtgctttaatccatgtttcattattcgaacatatttttgactttgagtcgattctgcaaaaatttcttaaaatgtagcggtcgggatcctacgaatgagaaaatttaagaatatgtaatgagtccgcttcacgccagctcgaaaattgggcataatgtatagttttaaaaaaagaaataaagcaatcaaaattcgagataattcaaaaggttatttatcggtaaggccttagaatgaatattttctgctgttttttcgcgagaaatgcaccaaaaggcattaatctacttttgagatttgtgcatttgattaataaaattatgattttcactggatcacgcagaacagcgattttttttggaaagtttatttaaaagcaaaagtaaaacggaaaggtagaatgtgattaatgagaaagacataaataacagatgaaaatggttactttggattattctgagttaggaatgtgaggcaggcccgtagc

SEQ ID NO: 36335 - DNA, 1077 bp, Heterodera glycines
tctcggttctcgattcccgactcgggaaatctctcgggtttttttgggtctcggttctcgtatcgtttcctggggtcatttcccggtctcggttctcggtaaaaatcacttctcgcacagccctagtctatgcccaaaatcggtttaaaattaagcgatttcaatcccaaatagcgtagagtcttaaatttaaatttaatgctgattcacaccagtctttttttctggcggtgcttttttaagagataccttcaaaataccaaattctcaaattctgtttcgaggcctaattttgatttttttttcatttcaatttttgcctattttttttatatccatttatcgcaaattatctgtttcatgttttgttttttttcccatcattatgccaatttttccacaaacacaactaccaaggaatgctgctgctgaatgatggccattttgtttttgttagtgttgttcaacggcgaggtgtgcaactgctgttgctgctgctgataatgatgttgcatatgagtcaaatgatggtgatggtgacgaatgtccatgtccaccttgaacccgtcaacgacgacgccgccgtcgtcgccatgctccgttttgccgtttaacaacaaatcatgatgatgatgatgattctgctgatggtggtggaatgaagcccggtggtggcaccgcctccgtctcctcctcgtcgtcatcctcctcctttatgactaatggtggcgggtggcaatcggtggaaggcagcgacggtggcgaaagttcttttggcggcggcggcggcgccgtttttccgccgccgatggtcgtcggggcgcgccgagtgcagcagacggaggcggcggacccgctgaggtcaatggcctcctccttgtgctgctcctccttcatcaacggaacggtcggatggatggactgcttttgttgttgttggttcagaaagcaacaaaaaaatggtgtgatgcgcgcaaataatataaacaaaaacaaaaaaacaccaatacaatctgggcaaaatattggatgaaatcgggggataaagatctcggtgcgtcttgtatatgtgtactg

SEQ ID NO: 36336 - DNA, 446 bp, Heterodera glycines
tttctaaaattttgattttgcttcatttcttttgtgaatctgcctttatcttcgtcaatttgattatttaatttgtttgccacgttttttaacaaatttattgttgatgggcggtcattgttggaattttggtcatcatcaccatcatcatttgccatggaaaattgaaaaagaacggcaacaaaaagcggcaaagcaattgcggccacgaatttaactttggggacatctgaaaatttcattttggcgctatgtttttctaaaaaaaagaaaaaatagtaataaatgagaatgaagaatttatgccaccatatgaatatgccaaaattgggatgggaaagagtgaatgagtgtaaatgcatgatcaacaacatcatccccattattgatatgcgtaacatgctcctttattaaaaatttttgaggcagaattatggcaaactatt

SEQ ID NO: 36337 - DNA, 866 bp, Heterodera glycines
tattaaaaaaatatatttaatcggaggggggggggggggcgggtgcgttccccacaaaaaaaattttttttttttttggtacttttccgtcatgatataccccccgaaacttttttgtttacatatttttttcaacacctattttatgtgctgaaaacaaatccggcatttttttttacaagaaaaacgtgaaaaatgtgaacaattttttttcatttttacattttccacgtaaaatttcacgtatttttttttgttgtaaatgacgtaggaccaaaaaaacaccgagatttttttttaagtgaaactgacactcgagcacctaaatttaagatgtttttacacggtataccccaaaacacagtcgggaacaaatttttaaaaaattttcaaacagaattttttaaagaaaaaaaatcttagaaaaattttttcttagaaacttcgatgaaaattttttttaatttcagcgatttttttgaatttttttttgaaaaacttgtaattcatcagtaaattttaaaaaatcgccagaaaattttcaaaaattgttttcatcgaattttctaagcaaaattttgcttatacttttttgttgaaaaaattggctgtgttatgtcttgactgtgtttctgcggctgtgttttgtcctgttccggtttttacagcaattaaagatattactttaatttttgcagttattacataacgccagaattggttttaattttcaaaaaacttgataagaaaaaaaatcatgaaatttaaaaaaaaatatatatttctccttgaaggaccagcagtcgtctgctgatgaatggaagccaaaataagggggcgccctggcacaacggcgcaagaagtga

SEQ ID NO: 36338 - DNA, 117 bp, Heterodera glycines
ttaaccctcttcgaagggaaattggggtcgcatcccaacaacaatcatgagcgcgagaaatacaaccgaccgaccgattgacgcccccccccccggcgccgtcccccgccgcttacg

SEQ ID NO: 36339 - DNA, 578 bp, Heterodera glycines
ctttttaaaaaattgttgaattaaagcattattattctctttcatatattttaaatatttttaatgtgcaaaatttctccccactacctaatcagaactgctggtccctttgtataatatttttttttggacctgaaacctcttagaaaacaatcaccttggtaatgcatattgatgagggatttagaaacggattatcgccagacacgcacataaaaaggcagaaaaatcctattatacgcactatgacaccatagacagattattagctcatttttaggtaacggaacccatgacaaattccagatcggataaacttttttctaaaaggagaatttttgtaacgacaaattttcatgaataaaaaaatttttgaaaaaacaaactttctgaacatttggcattctatttttaagaattttcaaaaaatcaatgcatgatcctgctgaatcctgcataaaaatcaaatttgcgggtcctgctgcaggattggaattcggaattttttacaggacaggatccggcaggattaatcctgcaaatcctgtaaatcctgtattttccaaaatatgcaggat

SEQ ID NO: 36340 - DNA, 888 bp, Heterodera glycines
tttctttttgattattttaattgtatttcatccctgaactttttttaataaacattttcaaactttcaccttattaatttaaggcgaattttgccttttttaataaattctcttgtgaaaaggcaaaaaaataggctcttttaaatatgcctatttaaatgactttaattgctgtcctttcgcttacgaccataccacgttgaaagcacgccatcccgtccgatctggcaagttaagcaacgttgggccttcttagtacttggaacggagacgtcctgggaatcgaaggtgttctaagcttttttacttttttcacttttaaatttatttaaattttcaattttttttggcttttttgaaaaaattttgtctattttttaggcaggcactgcctctgacaatgttttttatttatttagaaaaataaatttattttttttctttttaattattttaattgtatttcatcctgaaatttttttaataaacattttcaaactttcaccttattaatttaaggcgaattttgccttttttaataaattctcttgtgaaaaggcaaaaaaataggcttttttaaaatatgcctatttaaattactttaatttttttcacttttaaatttatttaaattttcaattttttttggctttttttcaaaaaattttttgtcttttttttcggcaggcactgcctctgacaatgttttttatttatttagaaaaattaatttattttttttctttttgattattttaattgtatttcatcctgaaattttttaataaacattttcaaactttcacctcattaatttaaggcgaattttgccttttttaaaaattctcttgcgaaaagcaaaaaaataggctttttttaaaaaatgcc

SEQ ID NO: 36341 - DNA, 921 bp, Heterodera glycines
ctctccgcgcccctctgcccatgctgggaacatttgtctggtacaaaatttctcacaaaaaagagataaccatttttctggcatagagaataaatttaaaaattcccatgtagaatagaatgggcattgctctccgcgcccctctgcccatgctgggaacatttgtatggtacaaaatttctcgcaaaaaagagataaccatttttctggcatagagaataaatttaaaaattccctgtagaatagaatggccattgctctccgcgcccctctgcccatgctgggaacatttttatggtacaaaatttctcacaaaaaagagataaccatttttctggcatagagaataaatttaaaaattccctgtagaatagaatggccattgctctccgcgcccctctgcccatgctgggaacatttgtatggtacaaaatttctcacaaaaaagagataaccatttttctggcatagagaataaatttaaaaattccctgtagaatagaatggccattgctctccgcgcccctctgcccatgctgggaacatttgtatggtacaaaatttctcgcaaaaaagagataaccatttttctggcatagagaataaatttaaaaattccctgtagaatagaatggccattgctctccgcgcccctctgcccatgctgggaacatttgtatggtacaaaatttctcgcaaaaaagagataaccatttttctggcatagagaataaatttaaaaattccctgtagaatagaatggccattgctctccgcgcccctctgcccatgctgggaacatttgtatggtacaaaatttctcacaaaaaagagataaccatttttctggcatagagaataaatttaaaaattcactgtagaatagaatggccattgctctccgcgcccctctgcccatgc

SEQ ID NO: 36342 - DNA, 1094 bp, Heterodera glycines
  unsure (1)..(1094): unsure at all n locations
aaagttttttgggaaaagcggcgcctcgaaaaaagcttttttattgattttttaatatttagaaatgaattttacaaaaaaaaggatttttgctttatgattttgactattaaaaaagttgtagaaaaaatttcgctntcgcatttcgcaatttcgccttttttggatttcgcgtttcgcatttattttcctttcgcattttttactttcgcaaatttcgcgtttcgcattttattttccgatttggcccatccctgttatacaaggaaaatttgagaattgaataaatcatggtttatatggcttgcttaaggcctaacaagcggatgttactggataacattaatcttattataaattcattgacacgattcattaatttaattattttatcaatcattgagttttttcgggtcgctcaaactgcatttttttcgcatcgtctcagtacgggtgtgttccagggttgccgcccgaatcccgaaacccgacatttttctcgtcccgaaacccgacccgatattcttttggacccgcggcaaccctggtgtgttcgaccacgcggttgtgccactccggggtacgcagaagggaacggcagtaagaaatggcggcactgacggtggacgggaagggaaacgggagatccctcccgtctgaattggggatcgagaatgcgaagcgtgtgaaaaatgatcgttatgcctttttatctttccattttctctaatttgtataatttacttttgttcccatttttcttccaatttttagctacagaaattattcctctttgacggatttacaattttgctccttttcccctttttcgcatatctgcttctatttctctcttttgtattctcgaaacaatattcgtacaatttcgaaataatgcaatgtttgtcattctccctttatttatttaaattcctccgcaacattgtcttaatatttgtgaatttattanataaaaaaattttaaatcaaaaatgtatgaaaataaaaatctgattggataatttatttttacacaatatntttatggttttatgcgnaatcaacaaatacatgaaaaaatatacaaacgaata

SEQ ID NO: 36343 - DNA, 1311 bp, Heterodera glycines
caaatgggaacaccgtttggaaggcctggcgatattccttactaaaaaaaaataaaaatttaattaatttaagtaattattctaataccttgtgacgtacaaaatgggtgcatttgatgccgcaccaatgttcattgggattgaggtcaaaaagtgggcaaaccaagcagtgatcggtgatggaattaagggcttgatgagagtgagaaaaaacaaacagataaaatagcctccaatattcactgcgatgatgcaacaaagtgatcgaaacgtacgataattaatctgatcagcggaaggcaaacctaaacattaaataaaatagctaattcaccattattattttaaaaattattacctgccgatttaattcttataatgagtccgacaaataaataaatgaatatggtaattacgatgagaaagagacatattaaactgtattgagaagaaccctaaaatattcttttttgttgatttgtgaccaagaatttatttaccatgaaaaaatcggcataagtgccagtgatcatttgatcaccattcaattcaatattctgataaaatgtcagacatgaacctaaactaaaagtgcagcaaataattgttatcgtagccaaatacagtcggattttgcatttgctatgccttaaaacagtggaattaaaatatatattttttgaatatattccttacatttcgccaaatataattccaatcattctgtcaattccaataaaaaacattataggaggaatgcctcctaaagtcaattatgataaaatttaattattagtttgagtaaattacctaacccaaacaaaggaatcattaaaatctttgccgccaaacgatactcaatgaaattttgtcccgaaaatgctgtataaacaaataaaaaatggccaaactgatggagcatttcaaaaaaggaacaaagtgccaaaaggtaattaacggtgccacggaatgaccttaattaaggttcaattaaaaataattaataatgcttttccaagattttatcgatattaatttcacgcactttgttaaaaaggttacaccaatgacagaagaattgaaaatgatgccaattaccgcaatgattccaaaaatcagtgcgcatccaattaatgaccagctgggatggacatctttgaaggccaaataaaactgcaaaaaaattttaaaaaagtaatttttaaatatttcaattaatgactaccgtgttgttgttcgttgagttgtcattcattttgctgaatttttgtttaatggattttttttaagataaaacaacaaatggcaata

SEQ ID NO: 36344 - DNA, 1113 bp, Heterodera glycines
  unsure (1)..(1113): unsure at all n locations
taaaaatttggtggaagagagaggggtccttgcgttggcaaaagtcggcgtcatggaattttgttttggatatttggaagtggtattaagaaaatttttaaacatggggatgggatttttgacggaggtactagcatcaatttcaaacagtcgttttacctgcaaaagaccaatgttcagttcctcaggggtgtagccacgctgcagatttcgacggacataatcatggtagtcgcggacaatgcgcgtaatgacgtcactggtcgacacgccctcggtgcgctgagtttcctggggacaaaaggacaaaccaattaaaaaatttcgaaaaagctagaattattcaattctttttttaaaatttcgatggcgaaattttgaggtaatccattatcatatcttataatatcttcttttccaacccaatcataatccccgcgttttaaactgaccacaaacatatccgcgcgacggaatttctcgtacaagtcctcctcgtcctttgccgagtagggaagtgcatcgtgtgcaatgaaatcgatctaaaaattttccgataccatttccatggttgacaattaccatccaaaactcataaataacatcaagcctaaatagaaaatgaaataactaatccccaattttttttgaatgattcgaatgtctgaaaatcgacggggaattgtcagtcagtgcgtgggacgaggggcncctgccatccctggcgagaatggactacgtttcccttcctcccgctaacctgcaaatttttaacagttatttcaaaatgaatttctcaccttatagcgcttgaggaaatcgaccgagacataccaaggggaatttgggagaatttcgtcgacgtaacgacagtggcgtactccttcatagcgttcctgtcagaaaatacatttaaaaaaataaaattccttttggaaataaatgaacagctcaccgtctcgttggtcactgtcttccctttgtacttcttggtgtcctcgtctccattcactgaattgtaaacaaaattttaaaaacgatttttcaataaatggccaccacccccaaccatttcacctccgacgatcagataaacattggaaacgcattctt

SEQ ID NO: 36345 - DNA, 921 bp, Heterodera glycines
ccagaaaaatgggctttctttttttttgagaaatttttatcccttacaaaatgctctcgagcatgagacggagggctgtgcgcaatagcctttttatttctgagagaatttttatatttagacgctatcccagaaaaatgtctatctctttttttgataaattttatacacatacaaatgctctcgagcatgatagggagggcggtgcgcaatagaccttttatttcacagggaatttttaaatttatactctatcccagaaaaatggctatctctttttttgagaaattttatacctcacaaaagcgcttgcgtatgagacggagggcggtgcgcaatagaccttttatttttgagggaatttttaaatttatactctatcccagaaaaatggctatctctttttttgataaattttatacacatacaaatgctctcgagcatgatagggagggcggtgcgcaatagaccttttatttttgagggaatttttaaatttatactctatcccagaaaaatggctatctctttttttgatgaaatttattacctcacaaaagcgcttgcgtatgagacggagggctgtgcacaatcgccattttatttcacagaggatttttatatttagaggttatcccagaaaaatggctatctctttttttgataaattttatacacatacaaatgctctcgagcatgatagggagggcggtgcgcaatagaccttttatttttgagggaatttttaaatttatactctatcccagaaaaatggctatctctttttttgagaaattttatacctcacaaaagcgcttgcgtatgagacggagggctgtgcacaatcgccattttatttcacagaggatttttatatttagaggttatcccagaaaaatggctatctctttttttgataaa

SEQ ID NO: 36346 - DNA, 987 bp, Heterodera glycines
  unsure (1)..(987): unsure at all n locations
cagatacagatcataatagaaagagaagtaaccgagcgtatggctgtaagaggaagagaaaggctggacgtgacgaaagaaagaggaaaagtgccggaggggatgatcggaagcggaacaagccctgagggagtgaatggaagggatacagaaaagctggaagagacaagaggacgaataatcagggcaatatctgaccggatgaatggaaggattgatggaatagagggatcaatgccggagcaaaagaatgaaggaaattcggatgaaaagccaaactcgtccgccggcaatgcttctccctcctttgcacattatttctcttccggtgctaaaaaaccttcaacaactgcttcatcctcatcctcatcatcgtcgtcatcttccgcgaagcgttcgtcctcctccgccccaagttccgccgctaccgtaacctcttccagtacagtagcaacatcttctaaaacgtcgtcttcaaaaagctcatccgatcaccggcagaagaagaacaaaagctcaaagtcatcagcgtcttcatcttctgcatcatcatcctcaacattgaagggtaatgaaaactaattgctgtgaaaagtaccaagtaatttcaatttataaaattttttttttaatttccctaataagctaaaaggctcccagacaatccgtcattggacaatccgtcagcaaatttattttaatgtacaaaattaaattattaacaatttaaataataatttgtttattttgtaaatgggatttttaaataagttcatttcaaaacccttcaagtttagtggatgcaattttagcagatttttaacagattttggtcccaaaattagcaaattttgacaatttagctaaattaattattaatgagcgtttaattttgccttaggctcttccccgctaaacgagtcgtccattgccacggaaatgtccaaaaatggtgngaaaagcgcttcttcggacagacaaagcagc

SEQ ID NO: 36347 - DNA, 666 bp, Heterodera glycines
tgaaaaaaaaattgaaaaaattaaaatttaatactcaaaaattttactgtcagctaacaaagcaaagtccaagtttttacggaaaaataaaattacgcagtggcagaaagtgctcaacgaggaagaagaagcggaagggacacagcccgggacagagccgacgaatcagtacatccaaacgacgtttatccaccgggacgcgaatagttggagagagaatcggacccacaaaaatgaacaaccaatgccaccacagatgatgaccgcgagttcgcgcagttcacccgccttatgttggcctacgttcggccccatctgttggcgcttgcccatgtgactgtggacaacgaaaacatcgactgctccgtggacgatggtcatccccgttgtggggaatatccaatggaaaagcctttccattttttggtggtcgaagactcgtaagttggcacaacatttgagtgacataattttttcattttaaaggcgttccggtgccgctgtgtatagcattgaacgcatgcggaattggcacgccggcggaagccgagcgcgcacaatggcacggattgaagctgcccttttggagtaagagagaatgaatgctgcgtttgttttcgcttccattgtgtcccccttttgcagtgctttgtcccgtcacagtgt

SEQ ID NO: 36348 - DNA, 1261 bp, Heterodera glycines
  unsure (1)..(1261): unsure at all n locations
tttttcaacaatccaaaaaaaattgaaaatttaaaccccacccgcggcgcaaaaaattatagtaatttaaataggcataccaacaaaaagnctatttttttgccttttcacaagagaatttattaaaaaaggnaaaattcgccttaaattaatgttttgaaagtttgaaaatgtttattaaaaaatttcaggatgaaatacaattaaaataatcaaaaagaaaaaaaataaattaatttttctaaataaataaaaaacattgtcagaggcagtgcctgccgaaaaaaaagacaaaaaattttttgaaaaaaagccaaaaaaaattgaaaatttaaataaatttaaaagtgaaaaaaattaaagtaatttaaataggcatattttaaaaaagcctatttttttgccttttcacaagagaatttattaaaaaaggcaaaattcgccttaaattaataaggtgaaagtttgaaaatgtttattaaaaaaatttcaggatgaaatacaattaaaataattaaaaagaaaaaaaataaatttatttttctaaataaataaaaaacattgtcagaggcagtgcctgcctaaaaaatagacaaaattttttcaaaaaagccaaaaaaaattgaaaatttaaataaatttaaaagtgaaaaaagtaaaaaagcttacaacaccttcgattcccaggacgtctccgttccaagtactaagaaggcccaacgttgcttaacttgccagatcggacgggatggcgtgctttcaacgtggtatggtcgtaagcgaaaggacagcaattaaagtcatttaaataggcatatttaaaagagcctatttttttgccttttcacaagagaatttattaaaaaaggcaaaattcgccttaaattaataaggtgaaagtttgaaaatgtttattaaaaaatttcaggatgaaatacaattaaaataatcaaaaagaaaaaagaaaaaaaaaataaatttaaataaatttaaaagtgaaaaaaattaaagtaatttaaatagtgttggagtgttaaagaatttgaatttggcgcgcatcgattattgattaatgttgtgacgtgtcaatccctcccccttattcattttgctattttacattttgtactgcatttgacctccgacataaattgtgttttattattttattgtgtgtccgacattgagacacaacaattggcgcagtcagcagccgtgcttcacccattcgaagacacaccgaactgcaacccaacctcaa

SEQ ID NO: 36349 - DNA, 311 bp, Heterodera glycines
ccggaaaattttttgtaatttcgttctgatttgttaacagattttcaccaaaaaatgccaattttgcaattaaaagccaagcgacttttttttcgcttttaaaaacgcttttttgcggggcccttcttccaaaaataacagatttttgtccaaaaaatgaccaaattttgccataaattttatatttttttgtaaaatagttaggccataaaattttaaaattatgagtttgtttaaggaatcagaacaaattttggtcgctaccccaaaatcagaacatttctgataaatcagagcagatcacacccctg

SEQ ID NO: 36350 - DNA, 978 bp, Heterodera glycines
actgaaaatccatccttaatcgtagtcgtcctatcctccgcttcttctggttgtccttccgccccaacatcctttttccctttcattagagccctctgcccctccccccccccgcccattcatcgttattaccccgggcaaatgcacaacaaaaagcagccaacgcacaacatggcccaataggccgaaaatgtgtccacgactaacttgtggagctgatctgctgatccaagcacaaaaagtccgtgtgtatttatcgttctgcagactgattactcactcctccgctgtccctctctttctctctctctctcactcactctctatttatccctctttctctcactctctcgttatctctctctctctctcttaaccgctgattttgtgagcattggcccgccggtttaaaatgggaattaaatatgaaatgtctgctgcacagtgagctcactcattccatccacgtcacacacaaaaaatggaaatgataataatttacaataattcttacaacaattaaattaattgggaatgaatgaatgggcggaggtgaggaggcaaaaaagggtgtgcacgaagaaaggctatgacccgttttggaattgcataatcgggcgaaaaactcattgggcacggtacgacggggcagggaaagaaatggtttctccctcactaattagttaattgggtgaggggggtgggcgaatccgaccagtgatccccatcaattagcagaaaatgatcacccaaccccgatcattcgatttatcctgtttattcacgtccaatttgggtgaacgaacgcaatgaaacgaataatagccaatttttttttcaaatattgctgctaaacattcggagtcccaattaactaatgggaggaggagctccatttagtggatgtagtggatgtccatgcatgtacaaaaattggtcaccagaaaattgaataaatggcgaaaaatgttcgagtgg

SEQ ID NO: 36351 - DNA, 198 bp, Heterodera glycines
tttaattaaattaattaattagtttttgccacaacatggcaatttttgttggccactcgcttcatggtcggcttgtccattggtggcactttggtagttgtctgcagaatttttagagcatcagaaatttgaagaaatatttttgcctatttttaaaaaaatgaaattaaagcctttatttaatcttagaattaagac

SEQ ID NO: 36352 - DNA, 1088 bp, Heterodera glycines
ttttagtgttttcggggttgctgatcacgaatctgccatttattttgaccaatttcgaataccggatccgaactcgaacaaaaaatcgaaaattcattttttgttcgtatctttacagattgaccattttttggttttgaaacggtttttgtctaaggttaacgaccccgaaaacacaaaacaatgttttaagagaaattttaaaaaaatttaaaatttaattctcgaaaaatgttcgagttcaggttagggatacggaattggccgaaattgtgtccggattcgtgctcagcgcctcaaaacacccctataaaagtgtttaaaaaatttttagaaaaaaaaattaattaaaaaatttcgggaccaatgatcttcacaaattgccaaaaaccacagaccacgtccctgcaccccacgcttcaataccacgggaaagtcaacttccgatttcttaatttgtttcttctcgttggctgccacgacttctgatttcttattttgtttcttctcattgccagcaacaaccacttgaagctgtttctcatcggtggtagtcatttcagagagagtcggacagaaatttttaaacgaatggactgaatgtttaccattaataaacaccgatttggaaagcgatagtcaaaaggtgttaattgcaagactaataagtaatcagaaatcatcagggcgtgtatcagatccaaacaaaggcaggtcaatgttcatacgaagtaatatgcatacaaaaagccaaaccgtatctgtttgcttcgctagtttgatttaaaaatttattcaacaggaattgagttgtgtaagtaaaaaaattttgatcccatctacctaattgtgtaattttatcgttacatactggtaattaaatcttaaatctctttcttggcatactgctattttttaaaaaccggcgaaattagaaattaccgtacttggaagttaccgtacttctaaaataaagccccgccgggggctttattttttaacccccagttaaagccacgggattgaaatagccacttaagccaaaaaattcgatatcatagaaaaacctaggctcttttctctttaat

SEQ ID NO: 36353 - DNA, 1333 bp, Heterodera glycines
  unsure (1)..(1333): unsure at all n locations
cgaaaacccccgggtattactccgaattgcataaaaacaactttttaatctcttttttttatgggaccaataaaatacatgattaccggagcccttattttctttgactgtagtatagaattagtgccgcttaaaaacagtaaatagtggttttgtaattctgcgctccgaaagggggggggcaaattacagaattaccgttgattggttctgcgtgttcccttattagctatttgacacaccatcccagaaatgagctcctgtaccagaaaagatttgcatatgtggctcagtggtttttgtaagatagtaagggacaaagggtggtggttcgagtccgttgtgcaacatgaatattttcatttatttttgtccaaaatattaaaaaatcacgatatttgggaattatttttgaaggtttttgccaaccaaattggataatcttggtatctttcgaaagctcttgataatgaaaagctttttctaagcaaatgctaagcgatttggtgtaccagagaaaagttatgaggctttaaaattttgtttttcttataacttttgaaatagagcattaacaaaaataaattcagcattaatcgatgcagaatttttttctctaacgataaacaaaatttcctgtggatctaacatatagaaagctaaacatagcgaagtaaatgttgtttttcctaataataaaaatattagatagtacgccaaaaggagacaaaaaattagagaaaaaaagataatgtttttctctggcactctctatttattggtacacatctcgttttttcggacggtgtgttaagaagtatccgaaaaaataaattttctctttttgcacgttttgggcccaaattcttaaaatgggaccaatgatctaagcgattgccatatatttatcacaataacttggcaaaaatactcgcctggtccgtgacatcgctttgaaagtcattttcactattatgtaattgacgctctgcaattttccataaaataaaaaaattttatttcttgaaaaatgttcgaatccgggttcggggtccggcgcggctattgcaattgtggcaatagtaacttttttgagtcaatgtacatgacatttttaagagctcactaaagatacaaaatgttaccaatgaggcagcagcggatgcatggagcgaatcatgaggaatctacgtttaagtcacaccttcaagacgaagtgagacaaattctgctcacttgngaaaacgaacaccggaacaatgatttgggaaattgagccatctttgaaancgtcagtttcccaaaattagttcacagctcttattcacgcata

SEQ ID NO: 36354 - DNA, 1070 bp, Heterodera glycines
aagtcccggtttggccagtttgatcgggacgggaaatcccggctttttcccggttcccagccaaaaagtcccggtttttcaacccaaaaagtcccgatcccggtcttgcccaaatttcccggtcccgctgcacactattcaaaataattggaaaataatttttcctttttaggaaatgttaaattttgtgccaaaaatttattaaaaaaataaataaaaattcaccaaaaattcgcctttgaacaatatcctcttctttcgtctctcatgcacataggcaacaaattttgaggcctataaataaaaaaaaatataaatttacatttacattttgatttttttcaattttaatttacatcgattggtgctgtcggtgcctgcaacatggccttctcctcttggactgaaaaaagaataaaaaagatttgttaaaaattgttttacccaaggcttacaaattttaaaatggaaaaatcttcgtttttagggaaatattaatattgaagttaaatttatcaaattatttataaattgttatgtaaagttttttcaaaaaataaattatttgaaaatgaaaattttatctcgaaaatttttcattttttattgcattattataatattttttaaatttaatataactaaaaaaattttaaattttttccagcaaccttcttgcatttcctgcattaattttgagaattgaattcggagtttatttaaagaatccatttttaggggtaatttttattttttatttttttgaagtgatcccatttttagaaggaaaggttaaaaatgcctatgaaatttgaacccattttcacaggtgaaagaagtaaaaaatattcccatacattgtgatgagcgtccaaatattttaataaaacaaaaacatagagaaaatgtgccaaatttatattgaaaaatgaattttaattttgtatttatattatattttaattttaatttaattttttatcaataagcaatgagaataaatatcaataataaaaataaagaatgaaaaaaagcataattagtttatctctgtatccaacagagaaaaa

SEQ ID NO: 36355 - DNA, 1035 bp, Heterodera glycines
  unsure (1)..(1035): unsure at all n locations
acgtggcgaagagtgtagccgttttcacgctcctcctcctccgcacgccacttgaataattcgtttagcaaattattttgttcattccgtttaccttgagatatttccgcgcaatggtgctttgcttccctcgcttctcgtatcccaagtggggaacgatagcaatgcgttcatttcccatatggccaatgtcacgaagaacctcatacaagcagactgaaatattgatttatttaaataaaatacaaaaaaattaccgggattgtgattgaatccgtaatgtcggcacccgtcttttgggtgaagagttcacgcatcttaatcagtccatgggcaagaatttgaacgtctaaatgttgaaatcattattttatttatttatttattttacctgttttacagtagtcggcgatgacctctcgcagatcaaagcgagtctcacggttttccgcataccagctctcgagggcctttctgtcgtccggcaacatgcttccagggtggtaactttcgatgggcggcaaattgtccaagacatttccgtagttttccgcctaaattaataattatttgaatatttaaaattagctcaaaccttgttgaacccgtgcgggaaatattttttattctccactccttcaatcgataagccaaaggtcttcacaaaggatgccaatttgattggaatcaatttatagctgaaaacgaaaataattagtttaaaaagggtaagtccgatttacctgtccctgaatacggtacgggtaattgttccccttttgctcgtcgacatctctagcagatggtttccctgtcgaaccaattttggccgaacacccatgcgcaacatttcaccgaagattaggatgtggtcgtaacgtgagcctaaaattatgggtggattttgctccccatttgtttgcgcttaccggcgtgtgcgtaggcgtacgtagtgaccgaaaccggcttctcgccttcctcgtcatagcctatgaagataattgttctccngcgtcgttatcgtcgctctcatca

SEQ ID NO: 36356 - DNA, 607 bp, Heterodera glycines
actcggccttaaaaacaacataatgtgaataaaccaaagccgaaactcaacgaagccaaattgtttttcgaagcacaaaattaaagtccaaaaagtctcaaaattttctaagcccgaaactctgctgccccatgttttaagcgtaggccgattcacccacacagccaaaagtgtatcatcatcgtcattttatacacgaacactcaaattaataacgtatctctccatctgtagaagactgagtaacgatacatttccggtgcatatgtttagggtcactgcacgctatttggtaagacttggatttaaggggtaaagcaaaaacacgtttaatggttctaaaatgacttataattaatagatatcatcatttttttataaaaaacttggtatttcccggtgaaaagcaaatttttttttagagacattgtatcataggtaatttaagttaataaattgcgctaaaaaaccgccgcacactcgtttcgactttttgttcgaattcgggtccggggttcggaattagtcgacatggatgccggattcgtgatcagcgatccaaaaaacaccaggaaaattaaaattttgaattttttttttccaaaaa

SEQ ID NO: 36357 - DNA, 529 bp, Heterodera glycines
ataaaacatgaacaaattttcactttattgagtccgctaacttccaacaaaatccaaacaattcaataacaaaagatcggtaaacaacaatttccgatgatcgcaaaaagaatcatttgagtgggatgaaacgcgaactgtgcgttgcgccgattccgggacgaccgtgtttgacaggcttgtacgtaatagaaaattcgcccaagtaatatccaatcatctcagctcgaatttcaaccttaagaaaactttaatcataacgaatagaaaccgattccacacaaaatttctgggtatagtagatggtttccccctcttttgagaaattttttttttgttttcaagtcatgaaaacatatttccaagggttttcggggtcgctgatcatgaatcaaggatctattttggtcaattccgaatcgccgcacccgaattcgaacaaaatacgaaaacacaaattttttaaatttcgcatttttggttaaagcttcgtttaaaccatgaaatacgaatttaaaggttattagtg

SEQ ID NO: 36358 - DNA, 1116 bp, Heterodera glycines
gagagtgccagggaggtggagggggaggatgaagcataggagaactccgagagtaagagtgaggaaaagccgaaaatagacatgtgtgagtgaggaagcgattgtatgtactttgtgtgatctttctgcctgcttctgatggtggtgggtggatcagcggatgaaaagccggggctatagcagagggggacgaggtcatccctttctagctcttccgggcccttcccttcccttcccttcccttcccttcccttcccttcccatcgcttttctcttggacctcttccggctcacaaatgctttctctgctcggattgaccgcctgtgaattgtaacaaatcattgccatagacaaaggcaacaaaaggagaagcgaaaggatgcgggacattgacagaaactgacggaaaaggcaaaaaaaaattgggggggggggagaagcgaaggcaatggacgaccgaagcgacgcattcattcggccgacagccgaggcacagaggcggaaaatcgccgcgccaatgccatcggcggtgatgggatgtcgccatgtgaacggacaattgaatttggccaattactgcgatgacttttggccattaaacggtcagcctaatcggattcgcactttcattagtcctcgtcccatcatcgattggcaattgccattctttcgaattaatttccattcattttttcagtgttccgatcgattgctttcgaagtgtccaatcgcaaggaaaagaaagggaagggacagctgtcctcggaagagtttttcactgatctgctgattttcacgcacttcccatgtttttgcccattcaccgcttaaaacaatgggcagcgatcaatgcgatgaactgatcacacccccgcgggttggcttggatcatccgcggcggaagacagatcaattccaactcattttttctttctctctgtttattcgttttatgtatgtttcttccttacaaattaaaataaaataagaaattctataataaatggaatatttttaatttttggttgtacggtcttagttgtggcattaaatgccacggcgacgactcgtatcgtgctatggatgagtttggtctatggatgagtttggtctat

SEQ ID NO: 36359 - DNA, 914 bp, Heterodera glycines
ttatttttaattagccaaaaagtacaacatccctggccttgctgaccaaatgtttggatgttcccatttcaaatttgcgcaatgttttctttgcatatgcccagactcgcctttttgacttggaggtgaaacttaagcggatttaaatgaagttcttattcaaactagggttccgggtgtcgagtccaaccaggtcttgaaaaattttcataatttttcaaaaaaataactatttacgaaagagtttataatttctatgtattaaaataaaaatattttttcgaattcgacagtatttcaaataatgttttcaaaaaagaaggacttttccgttttgggaccaaagcttgaattttttttaaatcaacagcgggcgcgtgtaatttctaaagctacgcgccaaaattatttcggaggcataaatgccatgtcacaatttgagctaagatttcttcgaatgggtctgcaatcctactcgcccgttgttgattaaaaaaaaattaaaactttggccccaaaacggaaaagtatcgaattttcaaatggtcgccttttttgtccgttaatgcagacagatattttaaattttattaaaacttttttgattcgctttgcctggtccaaaaagcgaatgtattcggtagcgatgcgcagggtgtgaattttgctcattttgtccgatggcattgaggggacaatgcgtcacaactgattgtaagcctcattcaactcctggaatggtactgaatgcacacgggccaaatgcaatgagattcgtgatacattttcaggtaaagttttatttagctgctctttgaaaatccaacacgaccccttcccgacaaagagaaaaaattttgcgtattattatagacatgaagcgacccacttgaacaataagtggtcccaaatgc

SEQ ID NO: 36360 - DNA, 427 bp, Heterodera glycines
aaaaaacccaatctatatataaatttttaagattaatttatgatcagaataatagatctgcatgtttattgagggggaaattccaaaatatgggcctaaaccgggagaaaaatagcaaaaataggggtaaaaatggcagattcggagctgtggtcgcaaatttaaaaattttttcattaattatcaatactctcacccttttcgaagcccttttaaaacaaaattaaaaagattgtcctggtttggcggtgccgaaaggcaaataattataatttgtgacgtaaaaattcattctttttgaatttttaggattgattttggaaatgatttgtgaaggaatcccggctatatttttgatttttaaaacagcttatttcgcggtgtgctttttccaaaaaactggggaagatagggggttgtcaggcgg

SEQ ID NO: 36361 - DNA, 794 bp, Heterodera glycines
aatgaatagcattaaaacaacaatcttctttagaagcggactacaacatcaaaacatttggggttgtaatgtacgctttaagttagtttttcaatggaaagtgaacacaccatcctgctcatttgtcagccctactcttcctcctcctcttccaccactgtttttctgcagttatgccctcttcccatcagttcttctcattgatgagcacaaaaaaggggccatttgtgtctcatctcttccattcggaacccaacatgaaagtaggcgggacaacgcatctcatcacacggagaaggtgcccataaattcattagttcatcttcgattccttctcgaagagacttcccctccgaaagcgaagaatgggaaaaacatagagaaaggcgaaagtggtgaagagccatcgaagaaaccacccaaagagcaccgacaagcctggatttttgttagacttcgaaaataatttattgatttgcgcaaccaccagcgcagcttaagctggtttttaaataatgaattggatgcatacaaaaaaggcaattgggtaatttttgaggaattttaacatgttttttttacgtttggaaagtgtaaaaaggcaacctgccatgaacagcgtgatgacaaattagtcaccaacattcgataacgcgtctgtataagcggtccataactagaacttaatagaaagctctcttcgttaaaaaatgaatttattgatagggtaccagaattttggacgattattaaaacataacagataaaagtactaaccttataatgtttttaac

SEQ ID NO: 36362 - DNA, 1010 bp, Heterodera glycines
tatcaaaaaaagagatatccatttttctgggataacctctaaatataaaaatcctctgtgaaataaaatggcgattgtgcacagccctccgtctcatacgcaagcgcttttgtgaggtataaaatttctcaaaaaaagagatagacatttttctgggatagagtataaatttaaaaattccctcaaaaataaaaggtctattgcgcaccgccctccctatcatgctcgagagcatttgtatgtgtataaaatttatcaaaaaaagagatagccatttttctgggataacctctaaatataaaaatcctctgtgaaataaaatggcgattgtgcacagccctccgtctcatacgcaagcgcttttgtgaggtataaaatttctcaaaaaaagagatagccatttttctgggatagagtataaatttaaaaattccctcaaaaataaaaggtctattgcgcaccgccctccctatcatgctcgagagcatttgtatgtgtataaaatttatcaaaaaaagagatagccatttttctgggataacctctaaatataaaaatcctctgtgaaataaaatggcgattgtgcacagccctccgtctcatacgcaagcgcttttgtgaggtataaaatttctcaaaaaaagagatagccatttttctgggatagagtataaatttaaaaattccctcaaaaataaaaggtctattgcgcaccgccctccctatcatgctcgagagcatttgtatgtgtataaaatttatcaaaaaaagagatagccatttttctgggataacctctaaatataaaaatcctctgtgaaataaaatggcgattgtgcacagccctccgtctcatacgcaagcgcttttgtgaggtataaaatttctcaaaaaaagagatagacatttttctgggatagagtataaatttaaaaattccctcaaaaataaaagtctattgcgcaccgccctccctatcatgctcgagagcatttgtatgtgtataaaat

SEQ ID NO: 36363 - DNA, 535 bp, Heterodera glycines
ttcgtgatcagcgacctagaaaatccctgaaaacttattttcattaatttctaaaacacatttataggaatttgaaaatgtatattaaaagtaacccgtaaactgcacaagtaccaaattttcttataaaaaattttctaagaatttttccttgaaaaatttctaagtttgaaaaaaaaatttttgtaatttctgcggcgagcttttgtcccggcgagaggcgagatttcgggaggcgagattttggcggcgagattccggcggcgagatttggggtgatttcttatcaattttttcggccagaaaattttaatgggcaataaaaaaaatttcacggattttggtaatagttcagtttgcaccccccccccatttttgaaatttaaggggtttttgggattgcggatcacgaatataacatccatttgatcaatatcgaaccccgaccaggggtgggcgaagctcggcttagtactcgaagccgaagctcgaatcgaagcccaacttttttcgaagcacgaagctcgaagttcga

SEQ ID NO: 36364 - DNA, 884 bp, Heterodera glycines
  unsure (1)..(884): unsure at all n locations
ttatttctgggactttttcagaaatcagaattaanttctcctatggtggcccaaattttaggcccccagccacagccccttgcttctcccagttttaagtcttggatttgtcaaataaattcaagacttcaaattaataatcaaaaattctcttaaaatttttttgaacccaattcaaaaaaggaaaaaaatttgcagtcaaaaaattattcgaatttctccaattttgtttccataatttccgaaagttattcggtatcataatgccaaaacaaaacgaaatcgttttaaaatattcctttctggacttgacttggtttcttgatatcgaagctgttttctacgctatttctaaaacggttataccaaaccccagatttttgaatccggttttcagaaaaaatgccttgtggtgaaaacaatatttcacatttcactccataactttgtgagttcggcacggatcgagaccgggataagaccattggaaagagcagctcgagctctacaagaaggtatggaaagaaaaaatagttatttctgggactttttcagaaatcagaattaattctccaatgtggcccaaattttaggcccccagccacagccccttgcttctcccagttttaagtcttggatttgtcaaataaattcaagacttcaaattaataatcaaaaattctcttaaaatttttttgaacccaattcaaaaaaggaaaaaaatttgcagtcaaaaaattattcgaatttctccaattttgtttccataatttccgaaagttattcggtatcataatgccaaaacaaaacgaaatcgttttaaaatattcctttctggacttgacttggtttcttgatatcgaagctgttttctacgctatttc

SEQ ID NO: 36365 - DNA, 1045 bp, Heterodera glycines
  unsure (1)..(1045): unsure at all n locations
ccggaaggattgcgtgcgattgttgtggcggagatgcgcgaagattttgcgccacaaatcctttcggttcgtttcattgcgtccgtcgtttcattctgcgaattccgtcggtgttttgcccctttaatcggacgacaaaaaaaagtttcactttgctttttgtattcattttgttttgccattttcgaaatttgtttcatcgctttacttcagctgctgcttttcgcttttcctttactttttgactttctttttcttccctctttccttcctttgtctcttctcttttcttcctcttatctttttccttcccatctttctcttcttccttcctttgtctcttctcttttcttcctcttatctttttccttcccatctttctcttcttcccgcttttgtctcttttcttcctctttatcttttttccctctttcttcttttgtctcttctcatttctccaatttcttttcctccttttgtgtcacaatgtttccacgtctctcttcttcttgttcgtctctcgcttttgtgtgtgatcgctgttcagagcccattttgccaaaagaggagtccattttgactgtcggcaaatgtttcttccatcgaaattgtttcttttgcagtaagattgttaaattgcttacctacaataattgccattttctagtttatttattatttcaaaattaatatttttaagatcaaaaacaatgcggccgcgcgctttccttggccgagtacggcgtccaccaaagcgaagtgaatcggggcaattatttttgggcaaaaattaatgtgccaattagcgatgccattgacccatcatttgcaggtattctgtgctaattgttttgtctcgctgttttctgttcaaagggatgtttctatttcttatcaatccgaaaaaagtgacggcggatgcaacggaaatgccattaaaaaaaacaaagtggagaaggcaattgtggcacaacactacgaaagacaacttcgaactgtccaattgnngggacgaagagggacacggagaagagcagcaggaaac

SEQ ID NO: 36366 - DNA, 1358 bp, Heterodera glycines
cctcggcagttcctcagggcggtcctcaaacagcacaatgcggtacattcccggatagagccgatcctgttaaaaaaaaaaatttgccaaattatgcggcagaaagcattttcaaaaatggcactgacccaatggttttggacatgcgggacatgctccaccccgtacgcttgcccatcagggtcaatgccggcatgcagcatcaacccccggaccgcttcttgcattcgacccgggctggacagaagacgattcagtacttcatgatttgcgcaaaaatccggcctcctcatcactgctgttgcagcagcggacggcacgttaataagatgatcactgctgctgctgctgctgctgctgcttacgtccccttgttggcattgttgttgtgttgcaatcatttttgtcaagtcatgatcagtgtaagaacgggcggcaatcaacgcgtggaacaggcagaaatggtcaccgacattccgtattcggatcaactgcctctcgttgtaaccccagtgctgataatggtggaagcgcggagctgctccaaccggcggtgcaatgcaggtgatgacaatttgaaccggttcactgagcaacagggatcgcttgctcattcctccgccatgcacgtcttcgtctccgtccgactgtcccagcttttccagttcacccatcagagtgtcggctgtgttctgctcaggtggccgtatcggtagcacaatagggtcagtcaggcctatatgatgatgatggatgttcgatggggacatttgccaaaaaaaaaaaatgagtaccgtttccatccagaaaaattccaatctttgtcactcgtcgtcttgggttttgttgagcggcgccgccaccgtcttgtggctgctcctcctcctgattcctagactgctgttcgttctgctgctgctgctgctccgcattgcgtattgctcgtttgatgatgcgctcaaatgcgtcgcggagagcctcgtccggcctctcatgctgaccgttcagcacaaactcggtgacgtgccgctgcagtgcgaaacgctccagccgatgcacatagtgctgcttctcttcatacaattggtcagcagtagcgccgcctttttcatcatcatcatcagcttccggattgctggcgttgttttctgcttcgcttcggcggtcattaccactgccgccgccgccgccgccgccgctgtcatctttgttgttgttgttgttccgctgtgaattacctgctgctgctgctgctgctggtgctctaccgtagcctatttgcatacaatggtcgacttttgcgctgcttttgctgtactgatcagcatcatcaaactctgatgaggaggaggagcgct

SEQ ID NO: 36367 - DNA, 1281 bp, Heterodera glycines
tttaaattacaaaaaagggttgtgggcctgtgaatcaatggctgagatttgtttggcggttaatcgttgcatggaaattgcttctcctaaaatggcacgttttctattcgaaggaaaacgcattttcatttggatggttagtttaaatattatttatcattttaattaatttagaaaggaaacgggcgatgcgattgccaaaatgcaaaaaaacgggcacatgaattcaaaaatggacagttttttaaaggcttggcaaaatgcacggttttaagggccttctcgcaaagctggaagaaaccgggatttgcttacctataccagttttttctaacactgaccgcatatcgctacttacctaaagattaaattctaaaattaaatcttacgactaatgcctgcacatttttttgcccgatggaaaataaattgctgaaatgtaaatttaataaaagcttttgctcaaaactataaataaaaatcatgaagaaaagacttaaaaaattgaaaatatattgaaaataaaatattttatttatattttatggaatttgaaaatatattgaaaataataatatttaatttccttatttttatttttcagttgtttcctgctgcgtatggcctgtatttgtccatcttcaccaagtcgccatgtttcagtagcatttacatcgcttggttctcgaacccgcacattggttatatcagtggttccgaggaaaacgtaaaaaaatgctttcacgactatttggtttataatgacctatattaattgggtgctaggtaatgatgctcaagagtctcgactcgagaaaagtctcgggttttttggtctcggaaaatttttggtctcgagcatcactagtgttctgcctttgtttttttaatccaattaaatttaatttttttttatcattcaatacattaaattttctttattattttcaaaattttttaattttaaaaaagatatgtaaacttttaggcattgctggtcacagcttatttgaatctagataacttgcagaattttgctgactgtgatatttttttggtttgagcaaagttatgattttgaaaattttcaaaattatcgcctacggtaatatgtttaagacttattttgtaaaaacaatgtcttgaacccaataaaactcccaattagcagaatttaaaagttcaattatttgaaaaaatatttgaaatttgactttcttagataagaaattaatttaatcacgatttatcgattgttttctacttctgaatatataatac

SEQ ID NO: 36368 - DNA, 1033 bp, Heterodera glycines
  unsure (1)..(1033): unsure at all n locations
aaaaagagataggcgttttttccaaaatttttgccaccaaactcccccagaaagaaattggaaaaaattaaggtcggcgctatcattccgaaaatgtggttggaattcttcagactgatgatcagaaaaagagataggcgtttttccaaaattttcgacatcaaactcgcccagaaagaaattcggaaaaaattaaggtcggcgctatcattcggaaaatgtggtaggaattcttcagactgatgatcagaaaaagagataggcgtttttccaaaattttcgacatcaaactcgcccagaaagaaattcggaaaaaattaaggtcggcgctatcattccgaaaatgtggttggaattcttcagactgatgatcagaaaaagagataggcgtttttccaaaattttcgacatcaaactcgcccagaaagaaattcggaaaaaattagggtcggcgctatcattccgaaaatgtggttggaattcttcagactgatgatcagaaaaagagataggcgtttttccaaaattttcgacatcaaactcacccagaaagaaattcggaaaaaattagggtcggcgctatcattccgaaaatgtggttggaattcttcagactgatgatcagaaaaagagataggcgtttttccaaaattttcgacatcaaactcacccagaaagaaattcggaaaaaattagggtcggcgctatcattccgaaaatgtggttggaattcttcagactgatgatcagaaaaagagataggcgtttttccaaaattttcgacatcaaactcacccagaaagaaattcggaaaaaattaaggtcggcgctatcattcggaaaatgtggttggaattcttcagactgatgatcaganaaagagataggcgtttttccaaattttcgacatcaaactcacccagaaagaaatcggaaanaatagggtcggcgctatcattccgaaatgtggttggaattctcagactgatgatcagaaaagagataggcgtttttccaaattttcgacatcaaa

SEQ ID NO: 36369 - DNA, 991 bp, Heterodera glycines
caaattttctgtaacgttactgttatgtccgtacgcaagctaattcggtcctgtcaatttttaggcaaatactggtttttgggaaatttattaaaagtcaaaaaggtttaaaaagaaatgtttacgctcaaaattaagataagcaaagtaaagttaaaaaggttttagtgagtttgatcgcttcaggcagggcacctgagattggaaaattgtgggtagaattgataagaaccgacaaataaaaaaaggacactgaagaaattaatcgaatgattgtgagagttgagcatcgatcagaaacactttgtgcatacctattccccttcttatgtagcgtaaacggcaaataaacgaagtccatcggttcctttgttgttatttcccttttcatcaatcatttcattgtggggaaatgtcgataaaaaggccaagagataaccaaacccatcgaacgcagcggaattcatttttgctttttttacccgtctttcctattccccccccccccccccgagggttcactttcccattcattttgtttttctttggcatttctttgttcctttctggcatttccatcttttaatctttccaatttgctcagatgcgcctttctccgccttctttcccccctccctctcctccccctcccccgcttttccactctcttctgtcccctaagttcttcctcctccgatcactccccttctcctcccctccaaacaaattcgtcttcttctgtcctcgattcgaattctgagtccaatcgcctcctcctcgacacttttggacgctttcacaattacctgcgcgtgtctctcgtcgaaaagtgcaatttgcgctgtctctactgcatgcccgaggagggggtgcccctctgtccctcctcctcttacctcggcgccgctgaaattgttcgactcggtctgccggcaatgaaacaaacggaaaatgcttttgctcaaacatttgtccgttcagttcgtctttt

SEQ ID NO: 36370 - DNA, 811 bp, Heterodera glycines
tctgtcacataaatgtaataatccgccatttttttgccaggacatttggtctgaacgtgccgatcggatggcggacaccagcgccctgtacaacaccagcgacatcggcgaacgcaaatggctgctcgatttgctgatggaggagtcggacccggactcgggcggcgaggagcacatcacggagcaggacttgaaggaaattgtcaaggtttggctttggactgaaaatttccatcaaaaatgccatagaattgccaattattgaacatggttttattgtcagattcatcacaagcgcaggaagttccaaaaggagtaccacaggtgcgtcattttgttggcacattttgttttgtttttggtccggggattgggaattgcttaggcgtaggcagaaaaattaggcgccacaaattttaagattgtattaaatttaaaaaatgcaatcgcttgaaaatgaaggatttttggtacttccgtgttttgctacctcccacctccattcgaaaaagttttaaaaattaatatttttggggttttcaaggtcactggtcatcacaaaatgctgtttgttttgacactcttaatgacacctggtcatagatttaaccaaatatctatgatttttaaatttttcgtggctgggggtgtagcaagacaaggaagtactggatttttaagtggaaagagctgtccaaaaaagtatttcgacgcgataatttttaggagcacatttaactcaatgataattatactttgagcacattaattggcaatttaaaatgttgcattcgacctgtaatcccgtaaa

SEQ ID NO: 36371 - DNA, 868 bp, Heterodera glycines
gggcagtgttcattgatgttgtggtggtttgacaaatgattttcttgtttttatttaaatccttccttaaatatgtgtcctgcattgagtctgtgaaattcagatgaaccgatttaccgatgccatttgggattggaacaaccaaggcaagcagtggaaggacatcaaacatttgtacgaaaagtcggaggaatgaatgtaaaaagactacgcaaaaataggcaacaaagaatcagacagacagtcaaacactttgatttttgtttcacctgacaatgagaatattcatttcttgttcaatagaggaataaaaagttgattttaagtgtacgaacttattatacgtaattaataaatacgaagccgattttcgggcctcgcaaaggatcgacgattttggaaaataaatcggtttgaacggttttggaggggctttgtttttgaaattgtcagcccggttcggctgatttgaaaatcacggtcatgtaaaaatggtgaatagcagggatgcgctaggtttcgcatttcacctttcgcattttttggcgtttcgcatttcgctattgattttaaatttggaataaaattttaaaaaatgatttttgctttatgattttaactattaaaaagttgtataaaaaatttcgcatttcgccttttcgcatattttagcttttcgcatttcgcttttttttcatttcgcatttttcagtttcgcaaatttcgctttttatttttcaatttggcccatccctggtgaatagtgaggcgagtaaaatttaggccttgaattcttaaatgttgacaatttagcgatcgaaatttccagcgtttctctcgcggaaataagcgcgtcgctcttccgttt

SEQ ID NO: 36372 - DNA, 1117 bp, Heterodera glycines
  unsure (1)..(1117): unsure at all n locations
ccccccccgccncttcagaattttgaaaaaaaaataaaataataggagactcagaattttgaaaattttttataaaaactgatgacaagctaatgtgataaaacaggttaattcttttcctttcagtatccctgcaaagtttggggcgcttctgataagtttctgaaaaaaaagttaagcctaaactttttggcctgtttaaaaaggaattaaaaatttttaaaaatttattcatctccctttttgatagaaaaagcatcagagtgcctaaactagcatgtaaataaaatttggtgcgtttcagagcatttctgaaaaaaatatttatgaattaattatgcaaaaataaataaaaatttctaaaaatttgatcgtccataaataatttgtaattgatcaggggctcaccaaattttgcagggatacgtatcggaacactacaaatgcttactaattttcctagattttttaaacccggtgaaaattttttgcagacaccaccacttttgcacttaaaaaaatttcaaaaaactttaaaaattcatagaaaatttaaattcataggtactactgctaaatcaacgcagagacgcctttccttgacctttttaggcccctgcaaaatctggtgcgcttctgatcactactcgaaaaatgagtgattgaattttcactaaaaagttaagcctaaactttttggcctgtttaaaaaggaattaaaaatttttaaaaatttattcatctccctttttgatagaaaaagcatcagagtgcctaaactaacatgtaaataaaatttggtgcgtttcagaaccctttctgaaaaaatatttaagaattaattttgcaaaaaataaataaaaacgaaagactcagattttcgaaaatttttttgagccagctagctcggcgctcatttcagtgtaagttagtcctttaccggggagtatccctgcaaagtttggtacgcttctgctcaattagcaaaaaatatgagtgatcgaattttcactaaaaaagttaagcctacattttttggcatatttaaaaagcaactaaaaaatttttaaaatttaataattttcctgcaccgaaggtactcactcggcctcttcgc

SEQ ID NO: 36373 - DNA, 1267 bp, Heterodera glycines
ttttttatcataaataatttatgcctgtgcaagacactgacaaattttttcagatttttgaccattggcgccaaaaaacactttatagcgtgcgccaaaatggccgcgccaaaatggccgcgccaaaatggccgcgccaaaatggacgcgccaaaatggacgcgccaaaatggacgcgccaaaatggccgcgccaaaaaagctcgcgccaaaaaagctcgcgccaaaaaagctcgcgccaaagtgggcggattgcgaaataagtaccaaaaagtcacgtgacgattgcgaaatcaatagggatattacgaaaaagagaaccaattaatcagttttgattgacaggtgacctaattttgggaccatattgcgaaatatttggaccaaaaaaaagtcacttgaagattgcgaaatgaacagggaaattgtgaaataaggaaccaatcaatcatttttggtgataggtttgcaaaattttttgagagttttttccgtcctattttatttattcattttcaattttatttttaaattgaatttaaataattaatttattgtcaattcattaatttatttatcgtgctgccattataaattaaatttgcacttacaattccattatcgattaatttgcgctgcggcggcatcgcggcgcggggcggggagggagggcggggagggggaggggatgataaaaacgcacggttttatcaaattttcgaaataagttttaatttcaggatcagaaaaacatcattaaaaaaatctaatgatttgagaaaataaaacctcccaaaaggtttaggatcaaaagataagggatttggaattaatttgcaaacgaaaaattgaatttccttcacctgtcactttggtgacaagtggatgattgatgaccttctgcggcgcggcgcgggagggatgagcaaaaaaaaacaccgcggggatttggggaatcggatttggttgaatggcaacttcaaagggggtcctaaaggttttggatggtcggcagcatcaaaggaccgcacccctcccataggcacggatgtgcgggaaactgtccggggcggcaacatcaaaggtttcacccctcgcataggcacgggtttgtgctgtaaatacccgtgcacaaaccgtgcgcttttggtgctttatactactcccgttttttatttttgaacccatttgcgtatttaagaaacgcactagcactattttattttttttttccatttaaatttttttttctttgtttaagcacaaat

SEQ ID NO: 36374 - DNA, 693 bp, Heterodera glycines
aaaaagtacaattttaaaaggaattccctttttctgactttggcatttgtcggcgggaggcggaggccaaaatttatttacgtcgtttcggtggcggagggattgaattgatttcatttgattttgatttgattttaactcgaattggccggtaatttgggaaatttggacctttgtgggctttcttttggtcatttcgaatggacaaagcagcggaaagaaatttattgccttccattgaaagagcagcggaagaagggagccgtcgcacaggcggagatttgacgacggaagaagtggcaaatagccgagccaatgaccattcgacgccgtcggcgatgacatttgacgagggggggggggagcaaagggggcaaaggcatttatgggcggggaatgcttttccttttcaaatgctttttcaaagaatggccaattttaatttcaaagacaatcaaattttattaaggcaatatgttttatgtttgcatttgcacatttttcattgtcaaaggctggggattcgctctttttgtgtatttttgctgaagcgttcagatcaaaaaagtgaaacaaaaaaccgggaaattttatttcgaaaaaatctttttcataaagtgaccagaggtgtcatgacaactcgtacaaaaggcaactcttacaattgcttaggttaagcctaggctataggct

SEQ ID NO: 36375 - DNA, 794 bp, Heterodera glycines
agcataaacaaaaaaatattatttcattatcatttgactttggaatataataaataaagttaaaatttattttatcatgaatttgtgaaaattttagttatttcaacaacttaatgaataaaaatataactttatatatttcttttatttatctcctgcgttttatcttaagaaattattgtaaactcgcttttatatttttttagattattttttgttgctttttactttttttgaattccgtacattctggttgaattaaaccgctggacatttttttaaatacttgtttctatttcgtcgctcaattttattaattaatatttaaaaattttattctttaaattaaattcaattttccccaatttattaaatgcaatctttcagaaaacttttaaaaataaaatcgttgaaaagtttaatattaagaacattcgccgcttcgcggccgcaggactggcgcttagcgcccgttttttaattttttgggggccattcggcagcttcgcggcctcaggacgggcgctttgcgcccgttttttaattttgtggggaacattcggccgcttcgcggcctcatttgcattgttgttctaaggtatataaactagcgtgtggcacagtaattgctcggtgtagacagtatactttttgtatatatgggcgggcgctgacatgagcgcctcgcgcaaaggacttcgtttctagtgcgtgcgcgtttgataagtgataagcaagtgcattcggccgctttgtggcctcagacggtcgtttgcgtccgtttcttaattttg

SEQ ID NO: 36376 - DNA, 702 bp, Heterodera glycines
aaggaaatcaaccggcgggcaatctcagatttatttggccaaatacaaaaagccaaaggtcaaaaaaaggaccaaaaataaacaaaaaaggaaatgaaaaagggggagaaaaatgcaacagcaaaattagtattttcccactttaaatatcgcaatttcaatttcaaatgctctctcttatcgaaacactttcccgggcaataaatgaaagaaaagtgaatgtttggttaattaataaagggggaggggtcatcagatggcaaacaaagtacgcatttaggtattaatgagcactaatgacaagccaaacaaaaaacaatgacaaacgctgccgaacggtcgaaggaaaatgagaaaaacactcttttaatgagtttggcatttgaaaaaacctaaaaccctgagagagagaaagaaagaaaagaatggaaaatgaagaaatgtagaaacaattatttggggggtttcgggaaattgggcccatacaaatgaacatttttacaaattgtcccttcgcgcagtcgacgacgacccttttgtgacacattccgccgatgaattgcgaaaatggaaaggcggaaaatagcggtcaaaattgggggagggaaggggggaacttttagaagaaggctcacttatttgaaaacaaataataattaagtggtggtttcggtagacgacgcatttgagtgagtgattttg

SEQ ID NO: 36377 - DNA, 668 bp, Heterodera glycines
tgcttaatcaggattaacattaaatattactgtaacagaatcgtctcaccccctggattttcagattattacaacaaacaggcgatttttttttgttgataacagtattaaaaatgaggcaatgcgaaaaatgatttgaataatgcaaaagtgaattctctctccatcccgcgcccaaaaaaaaaggggaaaaagttggaatggaatggaaaatttgaaaaaaaagcatttgataatagaaggaataaatagacagacggatggaattgcccaactttcaaacccaaaatgctcaatgacaacaaaatcccctacccattgttataacaaccatttgaaatgttggacattgtacaaggccccagacaataatacacacaatgaatgtgaatgggttttgaataaagacaaaacataatgatgggaagaggaccaataatggtgggcctttttcaaatgtttatattagagttgattaatttataatgaaacggggtttttgccaagaattttaaattatttaaattttagattaacaagagtgcaaaaataagggaataatggatttttgtaaaaaataaaaaaaaacgaaaagatgccccaaaaattttaataacaacaccaatggagattatgtttttaataacaattacaattaaatccccccc

SEQ ID NO: 36378 - DNA, 760 bp, Heterodera glycines
tattatgagttcgagaccggttgactgtttttccttcttcttggatttttatatgattaataagatttttgaaaccacctttacccattaatagagaccggatcttccgaatctgccgggccgggctgatattttcagaagcgaccggtttccgggcccggcctctcaaaacccggtcaacccggatttttccaaaaatcgtcgggccggttttgccgggcctggtaaaacccggtatcgggcccgacccggtccgttctctagtttgtaataataatttaatgattccgatccctcctctttatcccacccccctggctcgttttgggtatgtttttttaagtggcgaatcttttaaaaatgacaacaaacagcggctctcaaaatgaagctaacaactgttaagcccaggccaaggctagcctatgtctgttggcctttcttggcttattatggccaatggtcggtgagtcgtgcttttggcactttattcttccctttttgttcaccctttgcatgcgctgtcttctccgctgctcctttccctcctccgtctcctcctcctcaacttttgcgcctttggcactcattccattcgaaatttttcaaaacgaagatgaataaaataaaattttaatggatatttttgttaaagatttaattactaccttttcttcaaataatgtacataaataaatgagtcgcctatttgtcgcgtaggatgataatttattatttgggaaacaatgacacaaaaatt

SEQ ID NO: 36379 - DNA, 1344 bp, Heterodera glycines
aaattataaacttcacaaaaaaaattactaatataataattgatgaatgaattgttaaaatattttcgattaatttaggaaatgcttttcaacgctaatcattgccaattaaaaaataatagcgttggattgattaccaaaacgaggacaaaaatatgtaaatataggacaatgattaaatattacaaagaatttcatttcctcaggaccaacataaaaaacgcaacaacaaatttatgaaaaatgagaatatctttttaatatgccaatttttttttacaaaatttaatcaaagaataatatttcgtaataaaatataattccttctgatcactgccgacccggcagctgaaatcaatgccaatttgacgcgccaaatttagcggcacttttgtgcaggcggcgattggcggtaaaacggccacgggacagccagtgaatttttaatggaaagtcaaaaccgggaccttggtactcagttgtcccgttttttcagtaccaggtcccggtcccgcttcactctaatgagaaggtaaatacatttgagtactaattgcggtcaagaatctctcagtatcgagaactaattttttactctcggtagttgttgtaagaaaaaagttcggctccatttttgaaaccattctaccaagtacaaatataataccacacaaagttattcaatagagggtaagccgattggaaaacttaacttgcacccggcgccgagcccggcttcttctggacgggtaatacctggactcggtttttgcccaaacacacggacccatccaaccgaagatgaaatcaacctactgcaaaaatttattggtccatttatgaaaccattgacttcgtaatataaataaattaaataattaatagctataaaatgagtgtttctcatttttttaaattttggggtgccacaacgctgaacactttaattaattcgcgggtaaaaggaaatgaatactctgttaaatgagaattaataatttaaattaatgaaaaaatgtaattatagcatcttggtaaaaatgaaatgaattctctgaaatggatttttggtttcttagtaaattgtccattttaatttccccaacattttttaaagacgtgctgaatcgttaacaaaacaacttgtttttcgattacatgccctttaatgagatttttaattaacttaattagttatttgaaatttattggctaactttttttctttaatcaattctggcaaaatgccaagacaggcgaaaatagagtttttaaaatgtttgatttaattttcaagttttcagcattgaaagaccgaaaaaataaaattaaaatatgcttctt

SEQ ID NO: 36380 - DNA, 952 bp, Heterodera glycines
  unsure (1)..(952): unsure at all n locations
ggctaaaatctacttaaaaaattttcatttttcctataaaaatcagcggcgaagggacaatcaatcaataaacaattaattaattaattaatcaatcgacggacactttcatttgattcattgtcattaatcacagtttcacaataactaaatacttttatttaaaacacaaaccatttttattgacgtatttgaatttatcctaaattttgtggtttatttgtgcttttccattctattattgtccattaaaaagtgtatgtccgtaatgagttcgaatgccaatgaacagagcgatggtttgtcgttgtgtcctttttacattttaatttaattaaaaatttttaaattaaataattgtccaaatatcaaaaactatgaaaagcgtaattttgcagaaatattcgccaccatcacaatccatgaccaccaccaaaaacaacggaatgagcagcggcaaattgacattcggctgatgcgtgccgaagaagtgcaagcatgtgccgaaataatacgagatgcttatttgggtagcacagcacaaaccagggatggcatggaattccgacttccagtttctggcatttttggtgtcagaattccgatttccgagaaattttagatataggacttccaatttttgaaaaaaaaaaatcggaatcgaatttttttttttgacaattcaaaatgtttaatttaaaaatgtgaaaaattttcttaaaaaattggcctaaaatcgcaaaaagttagcaattttcttacaaatgtactaaaacaagttaattgatttgaaaaagatgatgaaaattattgaataattttttcaagcaaatatatataccaaaatatttttgaaatttcacctttcactttttaatttatnnggttctattttaaaaattgcctattaaagagctagaaatttctttatattttacaaaattccaacttt

SEQ ID NO: 36381 - DNA, 1680 bp, Heterodera glycines
  unsure (1)..(1680): unsure at all n locations
gggaaagcagttaatgtcctcgacccaagcagcatagttttagcatgtggctctcctggtgaggagtttagctgtgccggcaattatgaaattttggtttatagagaagaatccgatttagaagaagcgcccagttcatacgcatttgttgcggttctgcatttttcttttgttgcggaaagatcaaacgcattgctgcggttctgctttttaacgcattgctgcgaatttcaccgatttcgtcccactgctaacgcattgctgcgataagtgaggacttggtaccgatttattaacgcattgttgcgaacgtcttggacttcgaaacgccgaattttatcaccgccgcttagagggatgaccgaacacaacttcgagcagattcgccggactaattcgtcaattatacacgaaggaaatgtgcaattcgccaacgaaatggatgaaaacgaaattcggcgtcgacttcttaaagtaatgatgagacaagatggaagtgcagatttggcgagacatggcaatcagaacattggccacggagaaaacgaaaggccactttttgatgaggcccaacggccagcaattccgcgacggacaccaccaaatccacactcattgatgcagagtggcaaccaaattcatcagcgacataacagtcaaaatattgccacaattaaccatcggccaaacggattcgaagacaacgagcgacccgttccaaatccagggcttatatttgacggcatgatggcacaggccattcgaagcatggatggtttttcatacacaatgacgctgaacacaattccgaatttggacggcagtagaggctccgattcggtgaacgcctttttcaagcaatttgatattgcgaatgaagaatggcctgaacagaagcgagttcgggcgctgcgttccaaatgttttggcaaagctgagagagctttcaattccgcggttgctgaaaatcgccatgactaccaactgatcagaacatcgatcattcggcaattggacgacacggacgccaaacaattgacggcgtttgaccaactgatcaaaggagtttggcttcggccgaatgaaggcattgatcagcttggcgaacgtgtttcgcgcttggtccgttgtgcatatccggggctcagcgaacagctctacgacgaatattcggccatgcatttcattagggcactccctaactcagaattggcaatgactttggagatgactcgtaaaccgggtgcaacattcgatgagttcatcgcacaagcagcacgagccgaggcagttcaaaatgccgcacgaaattcttggcgaaacagccaaaacaacggctgtttccaaaaccaacgaaggcatattgtttgctataattctggccgagtcggacacacttctcgaaattgctattcacagccaacacatcagacgcatcagttcagtaaaaactgcaatctccggtcgacaccaccaccactattgaatcaacaaaatgacgaaccgccgaaaaagggaaatttgttagttggcgccataaacttggaacaccgtcccgagattgagaaattcttcggaaaagcaacgaatgagtcggataagggtcgatttttggaagaaagcccggcggntggtaaaattttggcgaccaaagtttccggtgttggacgtaagttggat

SEQ ID NO: 36382 - DNA, 1164 bp, Heterodera glycines
aggtcccccccatttcgcccgcaaagggcccaaaatgtcggaccaaaagcttaaaaaacaacaacagcgaaaatcctaacaaggcgagtggtcagagcgttgtcaaagccaacgtcgattccccacccatttgcgattgtcttcaaaacgagtgtggcgcggcgtacaactgtgactgaaagacaacaagctattaacttgaggaaacgagcaccatcacggctgaggttgcggagaaaagacaagatttgaatgctgttcctgtccgcaggcggatcaatttggagacgcaacgcagtgagacattcaataggtcgcaggacacgctccaattgaagatcagaaagctgaaaatttttttgtgaacagtaaaacagccagaatcacctgagttgagatacgcataacttgatgaagaacacacgaaaacaaactgactttctaagaggacaactcaaatataagatttgattcaatgatatataacaaataatgttgagcgatctaacagttaaactgaacttatcaaagcaaccaaactgattacgggaaacatccccattattctattggcttaacgaggaactcagcacctaattgacagatgaaaagattccgtgatccattcctacatggataaagaaaatggatagtcagaaaaagaaaacagggtgaagaagcgaatgtgtataaagtcatcttcgaaacaaaacacagcgagcacggaacaccatgacgggcaaatgtgctttgacgatgaacatcggtgtgtcggcaatttggttctcttcaaacacgacactacggcgacggttcaacactacgcgaatgccaccaacagccgcttcgggacattgtatacgtcgaccactcaggcaatgtttccggacgggacatcctcaatcggttcaatgtaacagcacatcatcagaattgtgctaaaaaaacgtggattgaatgtaaatgaaaaccagaaatgaattgtcgtataccgttagatggtcttctcgtagaggtgtacttcttgccgaccacataattcggcccttggatgcgcgctttcatttcgcccgcgccggcaatgatgtgctcaccggactccctcgaaatgcattggaccatcgggtccgacttggcaaaacgtttcagtccttcgaccttaaa

SEQ ID NO: 36383 - DNA, 1003 bp, Heterodera glycines
gaaatcacacaaaatgtttaacccaaacatacaacaaaccttttttgacaaggtgaaataagcatttttaatttcttcttttgacgccgtcggtggaacgttcaaaatttggtaaaaacttttgctaaaacttattttacattaaaaattttcgggttttaatcaaaccgtttgcgagttgtaaatttgcgaaaaatacgcatttctatagaggaagcaccagcacaattagggtgtgaaaaagaaatggaataattaggaaaacgcagaattaacgcatgggaagaaaatggacgaaaatgcatcggaaaaagacgacgaatcaacattaaataagaaaaagggattacaggacacaaatcaaaatcagcaaataattttgtattcacaaaattagcatttgcatttgcaaaaggaaaaaaaaaagttgaaaaataaaataatacgccaaaatttaaaaaaaacgaattatttaaagaaaagtcaattgattttggagtttcccaaaattaaattcggcattcaaaaaaatttgatcatttttagacaatttctttgcaatttatgccaaaatgaattgaatcgaggcgatatatcgactaaaggaatgtggagccaaacacatctttaataaaaactaatttttttttgagattttttggagctaattcaaatcaaaaccccaacccctgcccccgcgactctgacccccgcccccgtgaaaagccaccaccccacggggctcgaaccctaatataacatactgtaaagagcattttctttttttttctttaatgaaagacaaaattaaaaataaatcaaaagcaaaaatggatgcttcctgatcagtgctaacaaacagccaaacagcaaagaatttgtgattaaagaggcatgggacacaacgaaagcagagagccgaatgagaaaagaagctattgaatcatgctggttgatcagaataacagcagatccgaaagtctcgagtcaaagcacatttttt

SEQ ID NO: 36384 - DNA, 850 bp, Heterodera glycines
ctcctagccctggctgggccttttttctgaaatccaagaaaactcctagccctggctggacctgttttttctgaaaatccaagaaaactcctagccctggctgggcctattttttctgaatatccaataaaactcctagccctggctggacctgttttttctgaaaatccaagaaaactcctagccctggctgggccttttttctgaaaatccaagaaaactcctagccctggctggacctatttttttctgaaaatccaagaaaactcctagccctggctggactgttttttctgaaaatccaataaaactcatagccttggctggactgttttttctgaatatccaataaaactcctagccctggctggactgttttttctgaaaatccaagaaagctcctagccctggctggactgtttttttctgaaaatccaagaaaactcctagccctggctggacctgttttttctaaaatccaagaaaactcctagccctggctggacttattttttttcctaaaatccaataaaactcctagccctggctggacctaatttttttcctaaaatccaataaaactcctacccatggctgaacctgttttttctaaaatccaagaaaactcctagccctggctggacttattttttttcctaaaatccaataaaactcctagccctggctggacctatttttttcctaaaatccaataaaactcctacccatggctggacctgttttttctgaatatccaagaaaactcctagccctggctggacctattttttcctaaaatccaataaaactcctagccctggctggacctatttttttttctgaaaatcca

SEQ ID NO: 36385 - DNA, 653 bp, Heterodera glycines
ttaaccgacagatgccttcaacagagggacggagaatctcgatcgacaaagtaagcagtgaatgaaatgatatgttcagagaaataggctcaaattgggagggattatgatcaataattggggaaagaaaacaattaattggccaattccgacaatttaacgtccgaggccccctcccccctaattaggtgaacatcaccgaactgtttccgttaggcattgagcgcatcgagaagagcaagcagcagttgctgaagagtttggcaggtgggccaacgaaaggagattttggagagaaaacttataaattattaagtgggcccaatcaaaaaggtgggtgaactgtgctcatccgtcaacccatccaaaacgacaacagattatggacacgtccagcgattttggcgtctgtgtcagagacagttttggacagcgaaccattggaatttgaaagttcatttgttaaggactgtttcatggccaagaatccgaatgagtattgcttcgacaagaaagagtcagttcgtctgagctgttgactccaaatcccaattttctgagtgcccccccccccccaattgtcagatgccaaccccttttggtcggagcaaaggcaaccaaatcgctgaggaaatgcaccaaccggatagact

SEQ ID NO: 36386 - DNA, 577 bp, Heterodera glycines
tggggtaggaatttcaaggacaaaaaaagggaaataatatggaattataattaaattaaattttgttttaaatttttagccgatcatttggcacataagcaaaatgagcagaaggaactttgggttaaagttgacgaattggaacagagacaaacagcggattcggaacagtggaacaccgccaaagaagggattctggtgaaaattgatgaggtcgacacgaatgggcaatttaattttaattagaaatatttaaatgatttcttagagatcgagccagaccggatccggtaccggattttccggaatccgttccggcgattttttggaaatagggattgactggattatgagagaccggatccggaacccggtcgtttttgaaaataccagtccggtctggtccgacagatttggtaatctcagtctctcatatttctattgatgattccaattttgttcagcggttgcttcaagcggagttaaagcatcagaaactgctgaccgaacacaacgcactgatggtgaaagtggccgagatggaaaaggaaagaaatgtaaaaggagaaaaaaatga

SEQ ID NO: 36387 - DNA, 1083 bp, Heterodera glycines
ttttagaatgtgtctgttaaatgcaaacctgttgtgaaaaattgttataactccattcagagaagagatagaaaaaaaataaaaataggtttagagagcccgtgaccagctgcatcggatgcaagtgccgccgttgctgtacgcctaacagttggtgagcaatgacggaaaattgcttaaaaaagaaaccaaacaaactcatcaattgtttgctcccgttgacaaaccgaagggtacattggggcaatggatgttgggctaccgtatcagttattaaaattgttgtttttcaaaaaggatactaaaactgggataacccattcagacactagtcaaaaaaaataataataggcttggactaccatactaattagaatttttagaatgtgtctgttaaatgcaaaactgttgtgaaaaattgttataactccattcagagaagagatagaaaaaaaaaaaaataggtttagagagcccgtgaacagctgcatcggatgcaagtgccgccgttgctgtacgcctaacagttggtgagcaatgacggaaaattgcttaaaaaagaaaccaaacaaactcatcaattgttagctcccgttggcaaaccgaagggtacattggggcaatggatgttgggctaccgtatcagttattaaaatttttgtttttcaaaaaggatactaaaactgggataaccccattcagagataagtcaaaaaaaataataataggcttggactaccatactaattataaataataaaacgaagaaaatgcatttgatgcaagttttgtcaaattgttacaatcccattcttacacgatcttgtcagacaataacaatgtattctgaacacatgaggtgcatgggcgcttgtgttgctacttcagaaatccttcatagcctaatcgcaaattcaacaaggcataagcaatgtaaaaagttcaatgtttttaaaaattgtctcaccacatactgtatatgattattataaagttttaataagaggttttcattaaattgaaaaatgaaaatatgccacggggggagaatgttcatttgccgttcactatcacaaaatgaaa

SEQ ID NO: 36388 - DNA, 549 bp, Heterodera glycines
ttggcaaaatgccatttcattatgcaaaacacttatttttgccaggctgataatccaatattcccttctcaatttgtcctttggccagtgaattggccaattttgtgccggaagggataaatgtgcgcattttatgccttccgggcacaattaagtcggccaacgcgcgaatccattggccaatttgggttcatttggccatttggccccttttccccctaattttattttctcacattgtatttaccaaaatttccattgtttttctgagattgcaacaaaatttacagttttaaagaaggccaaaaggggggggggatgccgaaaaagtgcaaaaaaaatacagcgaaaaaccaatcgatgggaaaaacgattagggaaaagttgtcgaaaagggaggacgaacggacggactcactccatcaaaataataaatctctgctgctcattcaatcacaatcataaagacggtggcggtgtccccccggcgaagtggcgaaacccccgccaaacctccccctaaatacccccccccccccaattcctcca

SEQ ID NO: 36389 - DNA, 954 bp, Heterodera glycines
ggtcaaaatggcggcggttggttcgccgctgcaactcgccaggagctgaccgactccatcaccatcccgtccgcctgcacgaagttcttcgtggtctcgtcgcacgtcggcaaagagagggtggccatcatcccccaccttggctacgagaagcgtgggaagcagagtgccatcgcccgcaagtacctcaagtggcgtgccgaggaagagatgcgcgacaacggatggactcttcgccatgtggaaagccctggcggcgagtacaaacatggcaacttcctgctggacggcatgctggagcggatcggcgaggacaaaaacttggcgattgaagtgaacgggtaaagaaacacttgccaaacttatgctaatttttctcccttcaggtgttattggcacgcgtgcccgcactgcttccccgaggatgacgcaattgttggcggtggagagacggccggtgccattcgagcgagggatgagaagaggattcggcaaattgcgcgggatttcgaggtggagatcgtgtgggagtgccagctcggccgaatgctggaagtggacccgccaatgaaggcattcttcgacaacacgcccgactccggcccgattgacttccatgatgccttcttcggaggtaatttttcccatttttagttaaaatatgcaaattttgtttacaggtcggactggcccagagtggctcggagcatcgatcatcccggacaaagaaggacaggctgggcgaaccatcaaagtcaaggacttcaacagtctgtacccgtccaggtagaaaataaattaaataatcacaaataatcaataattaaggaacatgttcaccaactaccccgtcggtcatccaaaggtcatccaaatggacaagggacgtcactggactgcgaaggacacattgtggacgacgacggcgtgaaatggaggcatcatcaagtgctt

SEQ ID NO: 36390 - DNA, 919 bp, Heterodera glycines
ttcatgaggtcacagatttggtagtggtgggtgagcagtgccgtttcctgcccatccggcacaatgcgcagcggcggaggcgaaccgatgggcaacaggtcgacgggtgttgaacctatcgccaaaaaaggcttatttaaaaaaaaattttaaaattcattgggtggccgaatttaagtcagttatttcttggaaaaaaaattgaaaatttttgatttaattatttatgtaaagcccaaaccgattaataaacaaaatcatggattcgttcgttcagcagaagatgcaccactactttccaccccaaaccaaccctcgaaaattttattttaaaatttttaaacagaaatttttaaaaaaatatgtaagaaaatttttttattggaaaattttaagaaaaaaaaaattgaaaaaattgtcaacgatttgtttgattttttttgaaaaaacttagctaaaaattctttcttcaaacttcttataaatttttttagactttaaaaagtttttcgtggaagagtggataaaagggtaatttgaaatttataaaaataaaattaaaattattatttattaaattttaaatttttgtacggcttgtcgacggttgctgctgctgctgctgctccatgatgatttcgcattggcattttggctcttcatttgggctcaaaacagtgatgctgttgcaggtggttgtggtggtggtgttgagcacatccatcggccgaacacagcacaattcattcggcggaacaaacgctgagaaattaaattaatttaaaaaaatgtttttaaaaaatccaaaattaaaaaaatatataaaaattgaaataaaaataataataataattccattttgtaattcaagaaaaatttaatggttgaaaatggcaaaaaaatgaattaaattataaaa

SEQ ID NO: 36391 - DNA, 975 bp, Heterodera glycines
tagattagactacaaaaaattgaaaatttcgaaatcatgtttcccactcccttctcccaggggtcatgtttcccactcccttctcccaggggtcatgtttcccactcccttctcccaggggtattattttgtaaagtctttttttccccaataaacttttcataccccattttcgcaccgtgaatgttatttttattgaattctgaaccggtttgagtagattagactacaaaaaatttaaaatttcgaaatcatgtttcccactcccttctcccaggggtattattttgtaaagtcttttttcccccaataaacttttcataccccatttttcgcaccgtgaatgttatttttattgaattctgaaccggtttgagtagcttagagtacaaaaaattgaaaattttgaaatcatgtttcccactcccttctcccaggggtattattttgtaaaaagtcttttttcccccaataaacttttcataccccatttttcgcaccgtgaatgttatttttattgaattctgaaccggtttgagtagcttagactacaaaaaattgaaaatttcgaaatcatgtttcccactcccttctcccaggggtattattttgtaaaaagtcttttttcccccaataaacttttcataccccatttttcgcaccatgaatgttatttttattgaattctgaaccggtttgagtagattagactacaaaaaattgaaaatttcgaaatcatgtttcccactcccttctcccaggggtcatgtttcccactcccttctcccaggggtaagtctttttttccccaataaacttttcataccccatttttcgcaccgtgaatgttatttttattgaattctgaaccggtttgagtagattagactacaaaaaattgaagatttcgaaatcatgtttcccactcccttctcccagggaattattttgtaaagacttttttccccaataaac

SEQ ID NO: 36392 - DNA, 802 bp, Heterodera glycines
catgctcccttttgcgaaattttgcttttaaattgttatttcccgtttagtatttttcggtactgaaatgtttttttcactgggactcagttgtccaggtgctcagatggcgtcggtttgacttaattccttgatttttagactcagctcgtcaagagctttcgaatgatactaaatttgtccgaatttgacggttttaaatggtcaggagcccccattttcactcaatttttcgagtattaaaccggttcaaaaaccggttttttgccatttccgcacctcaggagtatttttcctgagcattacaggccacgagagaacgaatggtatcaattttattcattttttttgtgggtggtagactatagtacagcctcaaaaagttttgattctatgacttcaatgaatgatttgaaatacaattggtaaaatcaaaattagcgcaataatgcgttatttcacttgtattccattagatttttatgtttgattttctgaattttgaaagtatttttttcctaattttccaactgatgacctcgaatttttctgaacgatgtatttaaactagtttgatatttcttttcttatttgttattaatgttatggtgttaaaatgtgtcaaaatgtttattaaattactacattttttattattttttaaactcgatttaactcactgataacttaagagttcatcttaaatcattattgatagtaattaaagaataaaacataactttttcttactaataaaatttattggaaaaattcagtaagatatttaaattcaattaaaatt

SEQ ID NO: 36393 - DNA, 1171 bp, Heterodera glycines
atttgtttgctcttttatacgatttatcaaatttttataaatttttattcgttttatataataaaaacattttgatattataattctattatctgtatgattaattatatttaaattaggtcatctttttcgcaattattagagaatagtaattcctttaactgaattttaaaatataattattattttaaatatatgagctttcaattgttaaaaaatattgctttatgggggtattaatttactttgaatctcggcaatacttttacaactaaggcgcttaatttaattttcttttttatatcaataaattttcactgaatttctaatttttcttctctttcgcctcctaaattatttattaccataccattaactaaatttgtattttttttgtcaatgattacaactgtaaatgatgagaatccaaattttttatatattaatataaaatttattttgatttaattttagcttatcacttacatttacgaaaatttagtttagcaataatacacacggataatgcaaagaatttattaacaaaacaaaaaattataaggaaaaagaatagaatagcctttcacccttcctgcaaaagagagattgtaattaattaattaattattttatcttatataataatacaaatttaatattcagaaaatttttcagttcattattaatttaaaatgtattcataaactaaaataaattaagcaccaaaacagcaaaataaaaaaagagaaaataaaattgaaatcaaaaatgaaaaacaattaataattaaaattttagaaaatatttaaataggtaaatcaaaactttcgctcattattcgtattataaacatttattttcgaagataatttattaagttggagaggataaaataaaatcataacctatataataaaaaagtgtatttatttttttaaaaatcatcgcaattgaattgggagttttttctggaaatatttattcagtcaattagaagacaaaaaaattgaaaataattatgtctatattttaaaaattagaaaactagtaacattaaacaaatctaatattttttatacatgacgaggattttcaaaatattaaaatcgttcgaaaataataaaaatgaaaaaagaaaatattatgaaaatatcaaaaaataataatacta

SEQ ID NO: 36394 - DNA, 931 bp, Heterodera glycines
aatatgatcccacttaaaaagagtaattatatgaaatattcttttgaatttttattagagaattttattgatgctcaagtaaatttttgttattttgacgcacataggtaggaaaatgaaacgacttaaaaattatttccagtaaattacaaatagcacaatttaaaataaacatataaatttcaacaaaactgttaactgatgtcgtgtaaattcatatttcattttctatgcagaatatataaaaaataaaatatctacaaaaaataattaagcaattccgaatttgaaaagggacttgaaagtataatataaaaaaaaatcctcagaaatgcatttatatatttcctattgttggaatgcagtcaaataattcggcataaatatgatcccacttaaaaagagtaattatatgaaatattcttttgaatttttattagagaattttattgatgctcaagtaaatttttgttattttgacgcacataggtaggaaaatgaaacgacttaaaaattattttcagtaaattacaaatagcacaatttaaaataaacatataaatttcaacaaaactgttaactgcccccgtgtaaattcatatttcattttctatgcagaatatataaaaaataaaatatctacaaaaaataattaagcaattccgaatttgaaaagggacttgaaagtataatatcaaattgtggcacatgcgcaacaaatggctattcagcaacaggcaagcgaatgccaaaaccctggatagactttgccaacttcgttcttttcagcaattggcagcgtttgcccatgttgcggctgttcaccatcaccagcaacagcagtcggctgcggcctcgtcttcggaaagggttaaccaacagctgcagcatgaatggacggcgtaattttttggaaaatttgccattttca

SEQ ID NO: 36395 - DNA, 911 bp, Heterodera glycines
  unsure (1)..(911): unsure at all n locations
atcggtttttctgaaatacccagataagtgtctattcttctaaaaaaaatcatgaaaaataggtcaaaagcaaaaagaaaagtacctaattgtgattgttggttgacaatggaatagtaatttatttaatcaaaatgtgaaatagttggcattaaagaactcaaaaaaaaagaaatatttaatggatgaattaaaattggcatgattttcatattttaatgtgtagctaaatatagcatatttaaaaatggaaatcaaataatgttacttcacattttgttgctgaccttcgtcctatgtttcactttgatttatgattattgagaagggcacaaataatttacggcaaaatgatgaccccaaaaaagcttaaaacccaattgggtgatgcattattttttgaaaatttttagtcggcatcttagagggtagtttttcttttttatataaatattaatgattttctgaaaactcaaaaatcctcatgaaaataccgaggggatgccttatttttgaaaaattttaaattctcttcccagggtaattttttcttttttaatatatgtattaaagaaatatctcgaaattccgagaaaatgtcgataaattttttacagatgccccgtccttttcacttttgccaattttgttgcaatttttttgtgcttcagcatttataaaaaaagattggaaaagagcaaattcaattcaaaaaatatttctgttctttttcactttgttgggtcatcgttttaattttaaaaaataaattgtcaaacatttatcaagttatgctccgatacttcttgttaagtacattccaagaaataataatgtcataattttgtgttatggggtttcataaaagttctttttgngtcatcattttgccctgaattattttatcccct

SEQ ID NO: 36396 - DNA, 1282 bp, Heterodera glycines
  unsure (1)..(1282): unsure at all n locations
gtccgctgccgccgcgtcctatttgaaccancagctcggtgagtgggtgcggtgatttgtgccatgaaattagtgcgtttcggatgatttttcatatcctacgtacgaataattgggaaaatcgttacccatttatcaaattggtggccttatccgttaccgtatcacctttttgcatggccgaacgcaactttgattacagtataccaataggtcgaatgctctttttaaacgacaaaaaagtcaacggaagcactgggtgaatggaagggaaaattctcgggaccggcaaaatttaaaagcatgtttcgcgggattaatcgtgtaggatctcgtccagcataagaacttgttgagataactcattaattgcatgggactcagagctccgttgcttaattaatatttttaaaattaactccggctaatgtctctgatcttttcgtttcattatttaaatcattcttcaccaattaaatggtcattaatttgtctgttaattaattaatcaatcggatgtcccttcaaatttccacttttcgctgcttcctaattcgatttccttcatccgtccctcctttcctttcttcctctcgttgtcagtgtttctgttccatctcttttttggtgatcactccgtctttgtccgtgtccagcatttgttccgccaccgtgtaaatgaactgtttccactcggcaaagtccaatttgccgttttttggcgctttgtccgccgcttcggcaaatttcgccgcttcagccggcaaagtcgcgctcatctgacaaatgccgtctattttgattctgctttttttctcttttcacttgttccactgatatttctccgccatttgcgtcgaatattggcactttaaagcgctgtgcaaacggcacactttccaaaaagtccctcagctccgtcagactcacttcgccatctccgtttttgtcagccaattccaactgattgaagcattgaaaattatttcatttcatttaatttaaccaattaaatttaatacgcaattccaaccaattaaatatttatttgaattttacgttaaagggaagaatgggaatgtttgttgcttcttgccgagcttcttcttccttttctccaatggcaaagccaaacaaaaataatgcgacaaaaagcacagaaaggagagacattttggcaaaagcgaataggatggatgttaagagaaaatgttattttggttattgactcatttatgattcatggtataccaaattttgtccaagtaaaattttcttttgt

SEQ ID NO: 36397 - DNA, 758 bp, Heterodera glycines
gggaatcctcggtgggcaaaaaacgattttataaaataatttggaaaatttattcatataaaaagaaaaataaaaaatgaaagggccggaaaaaattgaatttaaaaggaaaagacggcacgacaatggtgggcattgttagttggcattggatctataatattatatgaaaaggctcccaaatgaaatttgtcattaagtgggaaagtgagggggggggggggaaatgccaagaaaatgtcactaataaattaaattggcggagagaaacggaaagagaagaaatatccatttggcttttgacaatttttgctcttttttgactttctcttttttacattaattctctttttttggcttttcgttaatgcttaatggaaaatgcactcgcattttgggggaggcgaagaattggcaaatgcccaatttaaagcaattcaattggtgacgaattggctaatttattttaaatgctaaccttttgggtttaattcaatttcgaatgggttggaaacaattgccaaaatccgaggcgaaagtgccagaagtggtaattcgatccacccttaaaaatcaatgaaaatcgcttatgccactggaaaaggccctaaaaatgggagcagattcagcaaaaggcgccaatatgccaattgcctcccccggggcttcgtccaatgtgccgacacccccgcgggcgctttgtcggaatgcccccgggggcgtcgcattctctccttctcttttcatgcccttataaa

SEQ ID NO: 36398 - DNA, 803 bp, Heterodera glycines
tgaaaacataaatcttgttatgtttaagacacaaagtcaattaaataggaaaataaaacaaattatggcaaaaaaattcatttatataaaacaaaaaaatgaatgacaaacaattccaaaatttccgcacctaaatttccgttccaacaacaattcgcttcatacacatctgaactgctcgtgcaaccgttcgccatgcattatccgacgcatgtcaaacttccgcaaattgaccgtcgaataggcaaagtcgaagatgcgttccatgaacattcggccagcagcgattgccatttggggcccatagccgccgaagccgcacaattggaagaacgactcgtccatcaaatgctcgccaatcactggcaaattgtcgaaagtgttgaagtcctcgtaggagttccaggcattgatcaccttggacagaaaggaaaacttttttcattgaattttttgattttaatttaggctttgagttcattactcgggaaaagatttgttcatcaactgcatttttttctgtgacctttgacgaaaaaaacctacaaattgtaagttttaagaaaattgcatccggcataattcttgccaccactccaaaatttgatcgctatttctgcgttacatccatgacacttctgcaactttagcgttctccttgcttttttctagggtatggcaccgacccttcgaggtgagaaaagtcggagtttttcgggctcagctaggccggagtcgaagtccgggtcggggtggaccaaatcggtcagagttggggttcggagtttttcatttttgccttt

SEQ ID NO: 36399 - DNA, 923 bp, Heterodera glycines
  unsure (1)..(923): unsure at all n locations
cgctgcaaatcctcaattttttatttaattttcatttatgaaagaatatataacatatttttattaaaataaaataaaagagaattacattgaatggtttaatcacatgaatatgtataaaatagcgaatttatcgatttcaatttaagcatattgcaatttttattgctttgtttattatataattttaatttaaaaaaattctaaaaaatctgcataatactgcttgtcaccaattcattcatttatgccttattaataataatcatcataatttatgaatttcctgtaaagttaatttctttgtttttcatattactggttgtcaccaaattgtttaccttttaggcattatttattaatacaactcatattgggctttatataaagccaaaactccgactaagaaataaataaattaggaaaaattaaaagcaaaagcaaaaattaaaattaataaaatttaatttttattaaattttgatttaatattaaattttggacattttaaattcaaaatttgtcggcacattttttgactttttaaaaagaactattctaatgatttggattttaaaaaaaactttgaaattgacgaaaaattataatagtttgaacttttggccaggaccaagttaaaaataaattaatttttatctaattaatttaagagacaattttaaacccatttttatcatgcttttcaattagaactaattaaatttctcataataaaattatttaaaataatttttacaagcattttccccattcttgcatgttttcagtcaaaattaattaaaattttcattttagacacattttttttctcatgctcttncagctatttttgccattttccattttgtgcggattgatggaattaactcaattacaattgtcacagcaaatctatcccatcg

SEQ ID NO: 36400 - DNA, 1038 bp, Heterodera glycines
agggctgtgcctatcgccattttatttcacagaggacccaccccgggagaggttatcccagaaaaatggctatctcttccctttgataaattttatacacatacaaatgctctcgagcatgatagggagggcggtgcgcaatagaccttttatttttgagggaatttttaaatttatactctatcccagaaaaatgtctatctcttttttttgagaaattttatacctcacaaaagcgcttgcgtatgagacggagggctgtgcacaatcgccattttatttcacagaggatttttatatttagaggttatcccagaaaaatggctatctctttttttgataaattttatacacatacaaatgctctcgagcatgatagggagggcggtgcgcaatagaccttttatttttgagggaatttttaaatttatactctatcccagaaaaatggctatctctttttttgagaaattttatacctcacaaaagcgcttgcgtatgagacggagggctgtgcacaatcgccattttatttcacagaggatttttatatttagaggttatcccagaaaaatggatatctctttttttgataaattttatacacatacaaatgctctcgagcatgatagggagggcggtgcgcaatagaccttttatttttgagggaatttttaaatttatactctatcccagaaaaatggctatctctttttttgataaattttatacacatacaaatgctctcgagcatgatagggagggcggtgcgcaatagaccttttatttttgagggaatttttaaatttatactctatcccagaaaaatggctatctctttttttgagaaattttatacctcacaaaagcgcttgcgtatgagacggagggctgtgcacaatcgccattttatttcacagaggatttttatatttagaggttatcccagaaaaatggctatctctttttttgataaaattttatacacatacaaatgctctcgagcatgatagggagggcggtgcgcaatagaccttt

SEQ ID NO: 36401 - DNA, 764 bp, Heterodera glycines
tagagaaaaatcaggagaattttatggaatttatttggaatttctatctaaaaaaggaaaaaagttattccagaatttctggaaaaattcgaattttcagaaaaaaattcataactcggttttgaaaagatattctggaaagataaaatactacaaaaatccgcagttttttgctctattatataaattttatttggcatttttatcatttttttaagaatttttataaaaataaaagtgattttgagattccagaccaaaggggggagcacatgatttttgagttgagaaattttttcaccaaaaatcttccaaaaacatgtctttaggggttatttgggccgatgatcacgaatacatgatcacattttacctttgacatcgttaagacctcagaatccctgtgtgattggggattctggacatgttctgagggggggggggggagggggcaggttcgaatccggacggtgtaacattatttttctgtgcatttttacgttattttcaatgattttaattaatttaaaatattttgttgagttaataaataaaaaattatatttaatttaatttttttttgataaataaattttataagtttaaattaattttttttttaattaatagaatttcatgtattttttaattaaatttgttaaaaaatattttgattttaatttaatgattctgaggtatcattttgaggattgtcacatttaattgtaattatatgaatacatattaaatgtcccgccatataa

SEQ ID NO: 36402 - DNA, 795 bp, Heterodera glycines
ttgttttcttctttctccaatgtcagcaattcgttggtccgttcgttcgtcaattcgaatgggtcaatttccgttggttcaaaaaattcaattcgaatgatgaagcaggcaaaagaagaggtggcatcgagaaatttctaaaaaaatggaaaacggaatcaaatgcaatttttccaaaaaatttttgaaaatattgccaccatacctctttgaaacttttgatcattcttttggtttctgaggtatgctcataatcaagacaactcaattgctttggctttccattttttgtcggagtccatttggataacgcttggccagcctttgcttttggcctatcatcagcaattgaatcgggtaacaaatcttcggaatcgattgaacccaactgattgcaatcggtgaaaattgtcggtgaaatgtgacgacgcaaatcgtccaaatgatggccaccggaaacagtcaaatggcgaatgtttggcgcaaaaatgggccaaatttcatggacacaaaaatcccgaattggctggacaatgccgttgttgtcacgatgcaaatcatccaaaaccaaatataaatccatattggtgcctttctcaaaaatttgccggttggaacgaagaaattcgatgacagaatggtcaatgtacctgaaagggaatcatttagctatatcatttaataattctttgaattactcaattcgaaggttgttaaagcggattttgatgggcaacggattgctcttcgtaactacagatacaagttttgttccattcttggcaattctgattt

SEQ ID NO: 36403 - DNA, 93 bp, Heterodera glycines
aaaaaatttttttttttttttttttttttaaaaaaagaaaaaaaaaaaaaaacgggggggggggggggggttttttttttttttttttttttg

SEQ ID NO: 36404 - DNA, 970 bp, Heterodera glycines
  unsure (1)..(970): unsure at all n locations
ttattgatattagtgaaattgaaatgaaaaatattatttttgactgcgcggcgcaaatgtccatttttactaggcggcgcaaatgtcgcggcgcaactggctgaggcgcaaatggcgcggcgcaagtgtcgactttgctgagcggcgcaaatgtccatttttgctgtgcggcgcaaatggcgcggcgcaaatgtcgcatcaccaaagggaaatgtgtgaagggttcgtcttcgctcatgggtaataatttgaatatgttacagatgtttaacaataaaaaataatcactatgccatgagagcgattattgaaagatttttattaatttccttaatatatgacgtaattcgtcaacctgcatgtgtatattgagaatttatagaaattttttctgaaaaacgaaaatttttttttgaaaatatatccctaaaaattgaatttttttttcaaaaaaacagatataaaaaattaatatttaaagtactaaatgtgattctaagcctattttggtcatttttgtggcaaaagaagcgaatgcaagaaattagagttgcacgggagcggaaattttgataaaatacgggaccgggactttagggttaaaaaccgggatttttgcctggtacaagcggaagaaacccgtgactagtcatggtcccggccaaaaacgagactaggtactcgtctgtacgttttttcagtaccagtccctgtcatgaaaattatttatttaaattttatatgcgaattaaactaaaaacatcagaatgctgtttgagatagaagaaatataatttattagatagataaaaaattatacttcatttgtttttaatataaaaataacataaagtcaattcacgaaaaatacgaaaaaaccattgctcaaatgcagaatttgatanataaaaaagaataatttgtctaataataagataataatatanaatttaataattatgtttaattc

SEQ ID NO: 36405 - DNA, 1005 bp, Heterodera glycines
acatttcaatcactgggactcaatccaccaacattccaatcactggcactcaattctcctacatttcaatcactgggactcaatccaccaacattccattcaacgggactcaacccaccagcattccaatcactggcactcaacccaccaacattccaatcactgggactcaatccaccaacattccattcaacgggactcaatccaccagcatttcaatcactgtgactcaatccaccaacattccaatcattgggactcaatccaccaacattccattcaacgggactcaacccaccaacatttcactggactcaatccaccaacattccaatcaacgggactcaacccaccaacattccaatcactgggactcaacccaccaacttcaacgggactcaatccaccagcatttcaatcactgggactcaatccaccaacattccaatcattgggactcaatccaccaacattccattcaacgggactcaacccaccaacatttcactgggactcaatccaccaacattccaatcactgggactcaatccaccaacattccaatcaacgggactcaacccaccaacattccaatcattgggactcaatccaccagcattccaatcactggcactcaattctcctacatttcaatcactgggactcaacccaccaacatttcactgggactcaatccaccaacattccaatcactgggactcaaccctccagcattccaatcactgggactcaatccaccaacattccaatcaacaggactcaatccaccagtatttcaatcactgggactcaatccaccaacagtccaatcaacgggactcaatccaccagcatttcaatcactgggactcaattctactgcatttcaatcactgggactcaacccaccaacattccaatcaacgggactcaacccaccagcattcaatcactgggactcaaccaacgcagcatttcaatctctgggactcaatccaccaacat

SEQ ID NO: 36406 - DNA, 1082 bp, Heterodera glycines
attaggtctttgttgcatttaggtgcttgattaaaataaatatcatggtaaatatatgactttgacctcattttatgattttttgagaaacaaattaacgcttcatttttgaaatgttttttgtgtatgtggttttaagaaataatcaaactttgcatttctttttccacgtataaattgttcttaaggtacaaccaaattttcgcgcaattttttcttcaatttctattttcactttcattttgaatttttcgggaaaattgctctttcactttgtgaaagtgctcaattattctcaccttttccaagaaaattttttggtggaactaaaaatggtaaaatttaaatttaatttgtctaaaaatagaaatttaatttgtctaaaaatggaaaatttaatttgtctcccctcctaaaacgtttatttcacttacaaaattccctcttctattcgaaaaccatggcacgtgatgtgcccaattgcttggcaatggcacattctattttgattttactttctccaccaaatccttttttgtctttgtactcttgaatcatttcgtcatactttttaattatttccattttctctccgtcgtcccattctttgctttgcttttgtcttttttccgctgttttctgggttttttgtatgaggttatttaaaaatccatcaaaataaaaatttttgcctataattttgttcaaaatcaaccaaagttttaaatattactatcttagatagcactaaggttttctattagcttacaaattgacaaaaaaattgaaaatttggttatccataaacagtgctatgacaaagtattaaaagtgcaaagaagctacattgtttaatggttaatttatttaaattccaaaaaacagcaaataactttttccattttgcgttaattttatttataaaaaaatgaaaaactacgctttcgagacccgcttttgtagccaaaattataaatgcttcttcttcatagcctgctgaatgccagagtcatcataacaaacaatggtacttttccgttttggggctagagtataacatcattttttaaattaacagcggt

SEQ ID NO: 36407 - DNA, 848 bp, Heterodera glycines
  unsure (1)..(848): unsure at all n locations
tatatnaggaaatgaaatatttaaatgccaatttatttctttttgtgcctattccagcaacaactgatggatgccgccaattcaactgtccgtgcgctgcacacactttgccaagtaattttcagagaattaatttggccatttaaaaacgcaaaaaaaaatctttttttccccactgattttgaataatttttttgttcgcttattgcttcgctattcaaatttaagttgctccaaaagaaaaatttaagagaaaaatttgctttatatttttaaggccgttaaaaatttggatttttaatgatttttaagggtcagtcaaaattttcgagatttcccggccaatttttcttcaaaagtctcatgcaaaaaaaaaaaaactaattaaggcacgcaaaaagtacaacgaatgcgtgcaaaagggctgtggtgcggcggcggcggtggcggagacggatttgcaccaattcattttctccattttcaacgccatcaaagcggacatcaaacggggccgtctggcgctgacattgtccgttttttttgggattaacctctaaaaattggggaaaaaaacaattaaatttatcatcgctaaaataaaaattttacaaaaattctgtaggtagtctaaatgtaagcaaaacggaccaggccgttttcgcgccagcccaagtttttgtggactaaaactttttttgtttccaaccaaatcaaacaatcttggcagcattcaaaagcccttcacatgctctattagcagtacaaaaagcaaagattttcaggcctgtaaaaaagttatttaagaaaaaatttcgactttttagcataattttcatgttataact

SEQ ID NO: 36408 - DNA, 946 bp, Heterodera glycines
ggggtactcaaacaattatgggggagcaaaaatccaacgcagaattaaagtacaggctatagggaagctattccggaaggattcggtctccccataaatctgggcgcatcggttcggggggactgccccgaaaacaaaaaaatcgattttttcaagtgtccgtttggggtactcaaacaattatggggagcaaaaatccaacgcagaattaaagtacaggctatagggaagctattcccgaaggattcggtctcgccataaatctgggcgcatcggttcggggggactgccccgaaaacaaaaataaatcgattttttcaagtgtccgtttggggtactcaaacaattatggggagcaaaaatccaacgcagaattaaagtacaggctatagtgaagctattccggaaggattcggtctccccataaatctgggcgcatcggttcagggggactgccccgaaaacccaaaaaaaaattttttggataaaaattatttaaatgaactgactagataatatttaaaataggtttttctcttcctttcagtatccctgcaaagtttggtgcgcttctgatcagtttctgaaaaaaaagttaagcctaaactttttggcctgtttaaaaaggaattaaaaatttttaaaaattttattcatctccctttttgatagaaaaagcatcagagtgcctaaactaacatgtaaataaaatttggtgcgtttcagaaccctttctgaaaaaatatttaagaattaattttgcaaaaaataaataaaaacgaaagactcagattttcgaaaaattttttagagcaagctagctcggcgctcatttcagtgtaagttagtcctttaccggggagtatccctgcaaagtttggtatgcttctgctcaatagcaaaaatatgagtgatcaaacttcactaaaagttaagcctaaatttt

SEQ ID NO: 36409 - DNA, 964 bp, Heterodera glycines
ttgttattaataaaaacaaaaaataatttttttaatttaaaaaaaaaataaatttaaataaattaaaacgaatcttcaaattaattaaaaacagtgaaaataacccaaaaatgcatagaaaaataatgtacaccgtccgggtccgaacctcatcaaaaaaaaaataatttaaatataattttttatttattaactcaacaaaatattttaaattaattaaaaaatgtaaaagtaagcaaaaaatgcatagtaaattaatgtacaccgccgggattcgaacctgccgccccccccccagaagatgactcagaatccccaatcacacagggattctgaggtcttaacgatgtcaaaagtaaaatctgatcacgtattcgtgatcagcggcccaaataacccctaaagacatgtttttgaaagatttttggtgaaaaaatttttccattcaaaaatcatgtgcacccccctttggtcccgaatcccaaaatcacttttatttttatatctttttttaaaaatgagataaaaaggtcaaataaaatttataaaatagagaaaaaaaatgcggatttttgtagtattttacttttcccaaatagcttttcagaaggtagttacgattttttttctgaaaaatcgaaaatttccagaaattctggaataacttttttcatattgatgctagaaatttcaaataaatcccataaaattctccttatttttctctatttttaaagctttattatagttaaatcgatgaaaccatcaccgagttatgaattttccaatattcacccaaattcccgatggccaaaaaattgccaaaaaataaagaattttttaaaaattccaaaaattctgaaacttaaaatagacatcatattcgtactcagcaccttattttaccccagaaaaatatttttcacccccatttttgctcacaaaaaaaaatttgaaaatttct

SEQ ID NO: 36410 - DNA, 1021 bp, Heterodera glycines
ttattaaattttaaaaattttttaattgctttttaaatatgtcaaaaaatgtaggcttaacttttttagtgaaaattcgatcactcatattttttgctaattgagcagaagcgtaccaaactttgcagggatactccccggtaaaggactaacttacactgaaatgagcgccgagctagctggctcaaaaaaattttcgaaaatctgagtctttcgtttttatttattttttgcaaaattaattcttaaatattttttcagaaagggttctgaaacgcaccaaattttatttacatgttagtttaggcactctgatgctttttctatcaaaaagggagatgaataaaatttttaaaaatttttaattcctttttaaacaggccaaaaagtttaggcttaacttttttttcagaaactgatcagaagcgcaccaaactttgcagggatactgaaaggaagagaaataacctattttaaatattatctagtcagttcatttaaataatttttatccaaaaaatttttttttgggttttcggggcagtccccctgaaccgatgcgcccagatttatggggagaccgaatccttcgggaatagcttccctatagtctgtactttaattctgcgttggatttttgctccccataaatgtttgagtaccccaaacagacacttgaaaaaatcgatttttttgttttcggggcagtccccccgaaccgacgcgcccagatttatggggagaccgaatccttcgggagtagcttccctatagcctgtactttaattctgcgttggatttttgctccccataattgtttgagtaccccaaacggacacttgaaaaaatcgatttttttgttttcggggcagtccccccgaaccgatgcgcccagatttatggggagaccgaatcctccgggatagcttcctatagcctgtactttaatctgcgttggatttttgctcccataatgtatgagaccccaacagacactgaaaaaatcgatttttttgttttc

SEQ ID NO: 36411 - DNA, 897 bp, Heterodera glycines
tttgttcgactgcggggtgggattcgaaaattcctttaaatgaatgtcaaatttgtcatcagcgacccctgaaaacctagtaattttttagctttttcgcgattttttcgtccccttttaaggtgtttttgatttcaaattttggaggcttgtaaaacaggacagtttatgcaaatggaaacaaaagaaaatgcataaatcaaaaaccaatagaaaaggaggaaaaatttggcaaaaattccaacgaggtccaaaaattttttgggaaatcggaattccgtgccatccctgcttggtatcatcatccgtccatcattcgatggcactaaaacatgaacacaatggacccttcgccaatgccacatttgtccatggttttttcggcgtcagcatcatcataccattgctcaacatcctccacacgcatttcttgtccacatttttcggcacatttaaattttttgacgagttgaactatgctgaatggcatttttgttgggtaagccttggtgtacgcctccctgattttgtgtttcaatgttgccaaaatgtccgttcttttgaccataatgtactttttgccgaattttttgtccggcaaatactccacaaccacttcatactcggacatggacggtaaaaaagaaaaaaaagcggcaataaatcttttttatggataattatgggaaaaaattggcgttctgtcacatttactttttatctttatttctctcacttttacgtactatctcttcattcttaataatgtaaagaacaacatttacttctctccatataactttttttctatgcatacaagttgcaccaaattttgcatatcgatagagaaaaaaattctgcatcaattaataggtcaagttaatattaaaatgggtc

SEQ ID NO: 36412 - DNA, 889 bp, Heterodera glycines
ttcccccccccccttttttgctttcagccgtacaccgcctcagcgacgccttcacaatttgctcttcttcaccgccgtcgccccagccgatccaatcgtctctccgtttacagcacgacggcggccaaacacccccacccccttccttggccaatgcactgttcgtttgcccttcgactcgccactgtttcccccgttcgcttgtcttccccctgccactgttccctcgctcgctttccctcgttcgctctctgcttcatcgccgcgtcgtcgccctttgtcccgatgatgaccggccatcagataaaacgccattctcaccatttcaatttgttgcgatccatccgcccacatttgtctcttcttcgttttccccccgtttttgctttttcattctattaatttttgctgaacatttaacaacaataaatttgtcttacaaatttcttgtggggagggaaaaactttccttgcctaaggcacgaaaacaacaccgagtttctgcccccttaatcaattcgaatcccggggatcggggaatagcctattgatttcggcacttcaaaattgcgggactccccctcccgctgatcggaacaattttctgatcagtcccaaaggactcaaagggacaaattcgatcaatccaattttggactgatcagttgtaaatttcgcctcatttcaatttgttgtctgattggctttttagccaggctccgattgccccatcggaaaacccgttagcttttcagcgaccggtccatctcatttgtttttcgtggttacattgttggcatttctgaacattcccttttccctttttggaatctgatcaccacgcctgatccacctttggaccctctgctcttcacgccaaattgccttt

SEQ ID NO: 36413 - DNA, 935 bp, Heterodera glycines
  unsure (1)..(935): unsure at all n locations
tttctccaatgtcagcttntcgttggtccgttcgttcaccaattcaaacgactcaattggcgatgattcagaaaattcaaatntaattcgaattatgtagctggccgaagaagtggtggcatggagaaaggcctaaacaatgggaaacgaaaagcaaatggcaattaacccaaacacatttcacaaaaatgtggacacacctctttgaaatcgttcagcaatttagtggttccacactcagaaaaatgccaaaaagacaattgctttggctgtccatcttttgtcggagtgtgcaaccatttggacagcgcttggccatcagttgcatttggcccatcatcaccaatcgccgtgggccccaaagtatcggaattgattgaattcaattggttgaggtcggagagaattgtcggcgaaatgtggcgacgcaaattttcaagatcaccattaaacttcaaatggcgaatgtttggtgcaaaaatgggccaaatttcagcggcaaaagcattccaaattggctgtgtatccttgtctttagcgtaaagacggaaaagcaaatccatgctggtgcctcttttgtcaaaaatttgttggttggaacgaagaaatgtgatcacggaatggtcgatgaaactgaaaaggaatcagtcaaaatgatttgtgaaaatgaacaaagtctttgtgatttacctgatccaaatgtcctcaaagcgaattttattgtgcagcgaacggtccggcaatggaaaatatttggaattgccaaagccattccgaaccaccagtttcgttgctgttttcattttggcaattttgattggtctccaaattgtcaattctgtttggccatcgaaatgtttgtcgaccaacgcatgaaacggggcgaaaccattgccaatttgaggccnngagttgacgagactctagaggtcccc

SEQ ID NO: 36414 - DNA, 322 bp, Heterodera glycines
ttctttgccaaccaaatgcaacataggatggtgtcattcgatagccctatgtatcctctattagcctgcaaaatttcgaaaaatttcgttaaggttcaaaaaagttatggccagaagaattcaaaaaaccaaattttccaacttttttggctcgaacttttttgaacttgacgaaattttttggaattttgcaggctaatagagcatctaaagagctttcgaatgataccaacaatgttggatttggttggcaaagaaaaaagttatagtccaaaaacatgtgttcatacgaaaacggcccgtacgaaaacggtctggcccc

SEQ ID NO: 36415 - DNA, 885 bp, Heterodera glycines
atcaagctttcttttaatgccaagaataggcattcacttaagtgattttttttgaaaaaaataaacttttcccatggtgacaatctttgcaaacagacgacaaaattctccaaagtttagaaagatgaaaacattgttttgcgttttcattgtcatcttttaggcgtccaatcaatgatcatactcagttttttaggccataactttttacttaattggtcagtgcctaaaaattatgtatcaaacgaaaacttaaagtctctgggacctaaacaaatactgacattatgaaaatacaatgagaaaacagaagctagcttttttgagtatattcaatataatttttgtctgttacctttatcccaaaatttagttatcgaaaaaattctacaaacttttaacctttagtttgataccaagaaatgtaggcattgaccaattaaaaaaaaaagttatggcctaagaaactgaggatggtcactgattggtcgtttaaggcgcaatagagccctaaacatgtctttacaggtatcctaattaaaaatagtttaaaattagcgcataaattggtttcggcgtagatttttttgaaaaaaaaacttttcctatggccacaatctgtacagctgtgcacacagacggcaatattctccaaagtttagaaagatgaaaaacattgtattgcgttttcattgtctgtttttatcgggaggccgaccgaaacaggaaatgcaatgcaaatccgccaaaaaattttcggaaaatttatgcgggaaaataaatccgtcccccgcctaacacaacaaaaaaaaaagaagcacaggaaaaacaaaagtaaaaataatattattgttgtaaatatatatagaggaaattttaaaatat

SEQ ID NO: 36416 - DNA, 1058 bp, Heterodera glycines
  unsure (1)..(1058): unsure at all n locations
tcactaaattaaaatttgcagcaatttttaaattgatccttagttgtacattttttcatccaaggcaataaatttacattgtcatctccttaggtgaaagcgaatttagcagaatttatgattatatgtacgaaattttcttttttacgtttctttttttacttgtttgaaaattattttacatttgcactttttataatcgcagaatcagcaaaatacattcattactttgtagataattaagtaaacacttggaatttcgaggatttatagacgttcataccttttacatatttttactttctaatatcgttaatacatttttttgaataagttgtttaagaaatatatttttgatttgtatatggtatgataccatttttttgcctttgtaaaaagatatgtattttcaaacatttatattttaattgcagataatttaaaagaaattttatttgaaatttaaaatcattcagagaataattgattcggtgctttcggtgtgttcattctcgctatttgaacatttgtagatttcatttacgttctttttctttttaagtttttatttaataatattttaattttatttatcttaatatatgctaacaatgagctttattgtggtaattttttaaattgaaaatttacctcacattttgtaattattattgaaaataaaaatggaatttataaaagttgtattaataattatatttttaggtattattacagtaatatttatttcgaaattggaattattggcattttccatccatccaaacccatcaaatgttattttcttatatacagataattttttggttatttattaaaactattatattattatgatctaatttatattcgattcagtttatatcaccaatcaaaatcagcagttacctttagtaataaactatcaaagtatttttttgtttaataatattgttgtttatgtttatttaaataaactttgtgctttctttaattaattgaaaatttttatattaatttatatttaaaccgantttaataatttaatggttccattctta

SEQ ID NO: 36417 - DNA, 727 bp, Heterodera glycines
aataattaacaaattccattttaattgtcatcaaattccttttccgtttgtccattcttttccattcattcttttttgtttttgcctttgttggccaatgcacactttactgaacgcacttttttggtcaatttggcgacagcgttcacctaaataaatcgttggaagtactgtaataaaaggagatagggagggtacacgttagcgaaacttcgatcaaaaatgaaaagcgtagctgagcgaaactgaccgggaaggtgacggcatgacaaatcagacgacggcatttggcacggccacgaacggcactgatcgaagtgcaaccgacagaagcaacgccaatggcattcggcgtagactgaacctgcgtcataatttattttagaataattaattggttattgaatgcaaattcgaatagcattatatggcttttttcgtttgcacaaacatttttttctagcttgatttttgcgttttcttctcgttcttctcgtctgtgttgttctcgtcgcttttggaaccacacctgaataaaaataaatttttttaaatttggaatttaaattcccctaattacttgaatttggtaaaccgtaatccccgtctcccgtgccaattcctcgagcataaaaatgtccgggtattttctctcctcaaatgcgcctttcaaaatgtccaattggtcggacgaaaggttttgcagtttggtctttataaaatagaa

SEQ ID NO: 36418 - DNA, 988 bp, Heterodera glycines
ccgacaaattgttggattattattctagacgattttttttatttcctcaatgcttgactatcgcctttttgtttggcaactggtagaaattggaagtgaaaaaaagtttgtttgtaactatttacaataaaaatttatgtagcatttctaaaaaggatgtaaaaataagttcttgcgtaatatttttatattgtgtgttgaagaatttgagtctgcttctgatgcaagtggaaaatttttcagcttttctcgaaaagttttttcccagaaaaaggatgggacaaataaaaaactaaacatctctcatgaccaatttaaatttccttacattttgggtttactttattatgctggcccatgaaaaaatgcagtttttccggtgccaaatttttgtgaattttcattcggcgcgtcataagcggattgtttggtggcaaatgcaaacaaattttgtgtaattcgaatgcgctaggcgggctcaacatttccaaatgtatcaacaaagggtctatctccactctctggcaaggtatggccagccaaagcagagtggggcataaacaagaattttttaatctttggtatttcctctattttgtgcctgctctacatttatgtcttgtgccaatatgcctattgcaacagaaatttattcagctttcccgacaaattgttgagataattattctagacgatttttttatatctcaatgcttaactatcgcctttttgtttggcaactggtagaaattggcagtgaaaaaaagtttgtttgtaactatttacaataaaaatttatgtagcatttctaaaaaggatgtaaaaataagttcttgcgtaatatttttatattgtgtgttgaagaatttgagtctgcttctgatgcaagtggaaaatttttcagcttttctcgaaaagttttttcccagaaaaaggatgggacaaataaaaagctaaacatctctcatgaccaatttaaatttcctta

SEQ ID NO: 36419 - DNA, 1269 bp, Heterodera glycines
  unsure (1)..(1269): unsure at all n locations
taaattttttatagatttttaaatgtttgattttttttggcttaccaaaacttcatcgancctggttctttctattctctttcaaatcgccccaaatttttttacagcttaactaggccctattaagcttatttccagaaaatctcgcatgaattctcatttttaaattttttatagatttttaaatgtttgcattttttttggcttaccaaaacttcatcgaacctggttctttctattctctttcaaatcgccccaaattttttttacagccacgaggccgcgaagcggccgagtgagtaccttgggcgcaggaaaattattaaggaggagggttcattatttatttatttttgcaaaattaattcataaatttttttcagaaactgctctgaaacgcaccaaaatttatttacaagttgaataaggcactctgactcttatattatcaaaaagggagatgaataaatattttaaaaatttctaattcctttttaaacaggccgaaaaagtttaggcttaactttttcagcgggtttaaaaaatctagaaaaattagtaagcatttgtagtgctccgatacgtatctctgcaaaatttggtgagcccctgatcaattacaaattatttatggacgatcaaattttttgaaatttttttaagtgcaaaagtggtgggtgtctgcaaaaaattttcaccgggtttaataaatctaggaaaattagtaagctttttgtagtgctccgatacgtatctctgcaaaatttggtgagccgctgatcaattacaaattatttatggacgatcaaattttttgaaatttttttaagtgcaaaagtggtgggtgtttgcaaaaaattttcaccgggtttaataaatctaggaaaattagtaagcttttgtagtgttccgatacgtatctctgcaaaatttggtgagcccctgatcaattacaaattatttatggacgatcaaattttttgaaatttttttaagtgcaaaagtggtgggtgtctgcaaaaaattttcaccgggtttaataaatctaggaaaattagtaagcttttgtagtgctccgatacgtatctctgcaaaatttggtgagccgctgatcaattacaaattatttatggacgatcaaattttttgaaatttttttaagtgaaaaagtggtgggtgtttgcaaaaaattttcaccgggtttaataaatctaggaaaattagtaagcttttgtagtgttccgatacgtatnctctgcaaaatttggt

SEQ ID NO: 36420 - DNA, 956 bp, Heterodera glycines
tcatgaaaattgtaaattgggagattattggggacttatcatctcggtcctccgcaaacactgattcagtttatatttagaggataaggagttgaaatggtggaattccaaaaaggtgaccaagaaaattgtaatcgaagattattggcgattatcagctcggtcattccgcaaacactgattcagtttatatttcgcgaagaatgagctgtaattttgcgaattagacaaaaatgatcataaagtaacaaatgagagaatttcacattctgctaattaggctttaaatataaactgtttaagtgttgcagacggatcaggttgataagcgccaataacctcagatttactattttcgcgaccccactttttgaattctgacattttcagctcattacgctctaaatataaacagcatcagtgttccggaaggatcgatttgaaatcgccaataacccccaaattacaatttcctacagtaaacttatacagatcggatcaggttgataagcgccaataacctcagatttactattttcgcgaccccactttttgaattctgacattttcagctcattacgctctaaatataaacagcatcagtgttccgaaaggatcgatttgaaatcgccaataacccccaaattacaatttcctactgtaaacttatacagattacatttggatataagaaattgaaatattgagaatatcacaaaagtgatcatgaaaattgtaaattggagattattgggacttatcagctcggtcctccgcaaacactgattcagtttatatttagaggataaggagttgaaatggtggaattccaaaaaggtgaccaagaaaattgtaatcgaagattattggcgattatcagctcggtcattccgcaacactgattcagtttatatttcgcggagatgagctgtaatttgcgaatagacaaaatgatc

SEQ ID NO: 36421 - DNA, 917 bp, Heterodera glycines
aatgaattaaattacaatttgaatattggctttctgctgaaggattgcaccttcttcaccaaaaaggacattcttcgcctttacaaacgctttcatgcgctgaacccggagaaagtgccgggcaatatgcaggggaatcaggcatcaattgtcaaactgacatttgaggaagtcggcaaaatacccgagctaaaggtgccgattccgtttggtactaatgtttagggggtaatagaagcttttgtgactgtcgtattttttacatacggtaaagcattttaaaattattcaaaaattacgaaaattcttgaaaatgatcagatgattctgatcaaaattaaactcaaaaaattgctcttgagtgacatggccttagttcaacagtacaaaagtgtgggtacttttccattatgagaccacaagccaaaatttaaaaaaatcaacaaaggggcgcgcaaattccacattcccaccgcataaattaacaatttgtgtgtatgcctccaaagtaatgcaaccgcgcgccttgtgggatttgcgcgcccctttgttgattttttaaaattttggcttgtggtcataatgggaaagtaccaaagtgtggataagccatgaatgaactgtataaatattgtaaaatgtcgtattaattttgacttgattaaattttaagcaaattcacgggatttatgcctctttagcctttttaaatcgccctcccacaattaaggaaaatccattcagccgacggatttgcgaagttttctccgaggatggctgtggcaatttgaccttcgacgacttcctggacatgttttccgtcttctcggagatggcaccgcttcagcttaagctcaaatacgccttcagaattttacggttttgtctttggcatgtcatgtttctgtgattttcaa

SEQ ID NO: 36422 - DNA, 940 bp, Heterodera glycines
agacaaatactaggacctcctatcagttaggcaaaatatgatcgcttgttgtccaattgagagcgctttcggaaataattgcttgaacaggtaataatgagaatgtcattttttaaacaattctacaagacaaatactggacctcctatcagttagacaaaatatgaacgtttgttgtccaattgagagcgctttcggaaataattgcttgaacaggtaataatgagaatgtcattttttaaacaattctacaagacaaatactggacctcctatcagttagacaaaatatgaacgcttgttgtccaattgagagcgctttcggaaataattgcttgaaccggtaataatgagaatgtcattttttaaacaattctacgagacaaatactggacctcctatcagttagacaaaatatgaacgtttgttgtccaattgagagcgctttcggaaatgataattgcttgaacaggtaataaagagatagtcatttttttaaaaaattctacgagacaaatactggacctcctatcaattaggcaaaatatgaacgcttgttgtccaattgagagcgctttcggaaataattgcttgaaccggtaataatgagaatgtcattttttaaacaattctacgagacaaatactggacctcctatcagttagacaaaatatgaacgtttgttgtccaattgagagcgctttcggaaatgataattgcttgaacaggtaataatgagaatgtcattttttaaacaattctacgagacaaatactggacctcctatcagttagacaaaatatgaacgtttgttgtccaattgagagcgctttcggaaatgataattgcttgaacaggtaataatgagaatgtcattttttaaacaattctacgagacaatactggacctcctatcagttaaacaaatatgaacgttgttg

SEQ ID NO: 36423 - DNA, 821 bp, Heterodera glycines
atcaaatttaagcatccaaattatttcaaattatagacgctcaatcacatagaaaattaacattctccacaccaaccaaatcagcaaacaaaacaaaagccgcaatcgtcgtcggccgtcttctcgcctcccctccccctcttgcgcacccccgcctactccttccccctccctccctcattcctccccgttacctccctctcgcaccctctcctctccctcactcactcctctcctctcctctccctccccctacctcactcctcctcgttctctccctctcccaccctcgctctccctctcttctccccctcgctccacctcctccgcctttttttttgtcaatcccttcccacccatctcctgaaacataccaaatatgtaaatcacttcccccccccccccctttggcgtcttcaattgtctcttttatgtttttacgtcaatacataaatttgttgaaaatgcgcaattgcaaacggatgacgaaggcctccccctccttccgatcagccgacccttccgtttcccccccccccctcctaatgctggcaaagtttcgcctttaaaagacgccaactgtttattcattgtttattatttttattagccattcatattccaatgccattcccagggtgtcggtctctctctctctctctttctctttcagtgggaaagatggcgcgccgatacaaaaagcatggcatagacaaaggatgtggcacagcaaacaatttcaaaccgtttaaaagcttgacgatggtaagacaaactcaggacagttgatgctttatgcatttcgttgagatgaaaaactt

SEQ ID NO: 36424 - DNA, 749 bp, Heterodera glycines
gtatttactcatgaagattcttcttaattgtaattgaattatgaatattcctgtctgctattttcattttcatttttcgtaataaattaattaattaatcaccgtgatcaccaccaagcgaagacgaacctcttcataatcactggagaacctctccttctctgctcctagtcaaatgattgacctcaccacatttactcaccacctcttcctaccactgagcctgactcattttcctttcagatgtacctcttaatatcactgaaagtacctcctttacccgcagtggcacctcctctctgccccgcccctttccccccatttcctatcactgtctctctctccattctctttatcactatcactccgtctgaagctgctgcccattgcataaacaatggccaacataccatgcaaatccccgatgccgactagaaactacacagacgaggactggaaccgcccgactgagtcgatcaaaatttaataacggccgcgaagcggcctaaaagcacaacaaaaatcttaaacgggcgcctagcgcccgttcgaggccgcgaatcggcctaaaaaggccacaaaaaagggcgcgaagcgcccgtctgagtccatcaaaatttaataacgggcgcgaagcgcccgtccgactcagcacaatttaaaaaacggcgcgaagcggcctaaaagcacaacaaaaatcatgaaacgggcgcgaagcgcccgttcgaggccgcgaatcggcctaaaaa

SEQ ID NO: 36425 - DNA, 931 bp, Heterodera glycines
tctagagtcaaataaaaaaatttttcttaataataaatcactaagcttcttcaaattaaaactataaaataataagaaaagattaataaaggacctatatggataataattattattcattcaactcgattttatatttcaaaaatattgcagtacattatatgatcgttttggcttctcaggccaaaaatgtgtgagagttacatttctatttgaaaataataattttaaataaagaaggaaaaatgctttaaagataaaattaaccagagataaatctattaatgaaaaaaatcaacaaaaaaagaccagtgaacgcgagatttaaataaaatttccagttaaatatagcactgaaattaaaaaataatacactatgaaaatataaagaaaaaaataataattaatttttaaatgtgaatttagtttatactaaattaaactctaataaaaatattaaactccaatttattagaataaaaattaatatataaattaatttaatattaatacatttaaacaaaaaaaatataaaataaaatttatttaaaaaagtattcaacatcataaataaataaatatttaaacaatacaactaaatgtaaaattatatgtaaaatatggtagaaaatattaagaaatatcgggatttataaaaaaatatacataaaaaataatacacaaagaataaaataaaattcatagtaaataatatatcggaatatatgagaccagagattgtgagatacgctgctcaacccatttaagaagtgatcaaaataatgaaaaagattaatttgaatgtttatttataatatttattgaaaattttaataaaatattgattcaataaatctattcaatattgcagatcacttcaacagtaaaaaaatgcattaaaccaaaatgattggatctcttcctatgatca

SEQ ID NO: 36426 - DNA, 524 bp, Heterodera glycines
attaaaaaatgccttaaaaatatttttttttatttaatttaatttcaatatttttgttatgatttataaattaaaatgaattgcgttcacttgaaacatgctattgtcccggacgaatcttcaagtcctccgcacattcgacattcaaatctgagtcgggccaattcccgttcgtgccgcataaattttttggacattttgcgatatttcattttctgtaatttaaatttgcttttaaaagtttaatgcaaaatgcttctaggcttacatttgcctttgcctggacccatggtaaaataaaggcaattacagtcattaattactgtttgtctgtcctattgtgatcaaatattttcaaaaattgattcaaaaattattaaaaaagatatctaaatgccgtatttactgaattattactcccggggttctattttcaacccccctcgaaagggggttctaaaagaggggggggggggtactaattcagtaagtacgttaatttataaaccttaaattttcataaa

SEQ ID NO: 36427 - DNA, 641 bp, Heterodera glycines
ccgcttccgggtagatgttaaaaaaaaaaatttcttagtttgaagaaatggtgctaggtcgatccacaaaaaatctcagtgtgggcgatccacaaaaaagctcagtgtggctcttccactttctctgcgtgaccgatttcatcacatgagtcactttgaatattcactcccttgacgaggcgccgcccggatgaaagtactgcccagcgacacccacggcactctcagatttgtcaattgatctgatatgacaatcacttctcggcacttttctccatttgaactaaacatagccttgacatcttccgtgccatcattgcttacgacaacgagatggacgacgacgacgctgagaccgaaaatttgagaatgaaaatgaacatctgccggtgatgggccgcaaaatgagcaacaattttgtcattttcaagtctcttatatatgcaagactgaaaactcgagttgcattgctacaatcattcactttttcctccctttgtgtcaacaagtgccaagtgagcaaaagatgagactcagtgttagaggattataatggtaaaagatatgccaaatccaaaacgaaagcaagtaatagttttgtctggactctgtcccgtgtcatttttagtcacttgtctttg

SEQ ID NO: 36428 - DNA, 984 bp, Heterodera glycines
  unsure (1)..(984): unsure at all n locations
tgtcgggggtcggggcggnggaggagctccaattgtcgggggtcggggccccngatcggggaatggccaaatttttttaacccaaaaaaaccattttttttttaactgctcgtaaatcttcttttcttcactttaatcatctgctgatttcgttagcgccagtaagagtgagtccaagtgggcctttaaacctggggtttccatttgtttttatttataagaatattctgattttgggggggggggggtagtgactaaatattctgatttcttaaatatacttatagttttgaaattttatggcataatgtcacatttttcaagaaattttaaggtctgccgcaaaatttttttgatcttttggtcccgaatttactgaaatttataattttgcattttcctccccaaaattatcaaaattgataataggagactaaaaatataaaatttgatcgaataaattggaaaaataactgattggaaaaatgttgctaaatgttcatatttttgagactaaaatcttattttgggcttggtgtttatattttgaaaatttttcgatggaagccctggtttaaaaagaagtggaaagaagtggggttaaaccaggggtgcgatctgtcctgatttatcagatttgtcctgatttggagggttcaaatctgataaaatgaaagtgtcctgatttgtcagatttgtcctgatttggaggtacccgaccaaattttgtcctgatttcttaaataaactcataattttgaaattttatggcagaatgtcactattttatcaagaaatataagtttacacaaaatttggtcatttttggacaaaaatctgttaacaaatcgcattaaaaattacaaaaattttcccggcggagcctatcgacgccactggacgcacctgtccatctcgcaaaattttttgaagaaacgcgccgcaaaaaaagcgtttttagaggcaaaaaaagtcgtcacttga

SEQ ID NO: 36429 - DNA, 407 bp, Heterodera glycines
attttttcttctcaaaactattcgcgctaaaaaattatttttatcgaaaccaactttagaaccatcgcaatatactcaacatagggtctttgattaatttttacacccctgctacctaagaagcctcaatacaaactctttttttgctcattttagtgcctattcgatgatttttgcgcctatctaatgcctattatgcgatttttaatgcctttctacgtgcctatttcgcggatattttgtgcttaaaaatcgcatccctaataagatccccggcacggattgttatccccaatcgaacactagtggatcactattttttcgttaactaaataatccccccgatccgtagccccccaatataaagccaaatcatatttgctgcgctttttccacaaaaaaacact

SEQ ID NO: 36430 - DNA, 888 bp, Heterodera glycines
  unsure (1)..(888): unsure at all n locations
gaaagagttgcttacgcgcatccaaaagcgaaggatggagccaattaactcgtcctgtgaccccaatccttgcgccacggcggacgaccttcgccaattgccttccttcttcaaatcccctcaaatccgatcttttctccctcaaatccgttctctcttctcttttcatccccattttcctcctccttttcccctcggttttctctttttatcaaaattttactaaattttctatcggaattttctttactcaaaaggcaagtgaaacgatttgcttctgctcctaaacacacaaattgcttcttaaatcggccactgctttatgggacgggcttttcccatttcgaacccccccccccccgatggtctttacgttcgtttcagcgggttatgtgaagtcaaatcgcgcaactttggacagaaaacgatacgcaaatataaacagcagaactttttaattttaaaatacacaattatttaattaatttaatttacatttctttttttagtaaattaattaatttacatttttttagcaaattaattaatttacattttcgtttttaataaattaattaatttacattttttttaataaattaattaatttacatttccttaatgaatttgattaatttacattttcgtttttaataaattaattaatttacatttccttaatgaatttgattaatttccaatgccaaagtctgtcctcttttcccttcccccattttcttcttccgttcctttcattccgttccgtttcctttattccttctctcaccaaactcttttcttctgctattaaatttcatccaaattcgacaaatcccttccagaagaagcctgttcccctcaccgctttcagcngggaatctcccaatc

SEQ ID NO: 36431 - DNA, 874 bp, Heterodera glycines
gagtcctgagaatcattccatgaaaaaatgtgtatatcttattacttgttagataaattttctatgtttctatcgctctcaagcttgatacgaagggctgtgcgccgcgttctttttattgttctgatattttttatatttaataaattttccttataaagggctatctcttttttttgaaacattttctatggttcaaacgctctcaagcgtgaaactgaaaagcaaagtttcgaggacattttatttttcttataataattaaatgtaatatttgttccatataattggttactatttatattttttttatatttctattttactatcactctcgatgctttatcacttttagaaacacctagttcatattatttatcataatgatttgaaattgatcacattttcttaacacatgggtagctctttttgtactaacttttgtatacaccgaaccgctcttgtaccatgactctgcaagtcgatttccgagttcattgtattattttttaaaatataaatttaataacatattacatttaaatatttatttaattgccttttatgcttgacatgaatgccacaatcgcgatctcgccactgctcactccgccatgttgggcctctaattctcgacgagttctcgtccggaatccattctcgccaccaatttctcatctcatataatgtgccaattgtgaatccttaattaatctctttattattaaaatttaagacaataaatcttaattatggtaatacattgtatcgactatcagtttgacccgtgtgttatcaaagcccatattatgcgctgcgattgcgtcgcatgccatcgcattgctaaacatgtaaataaaattctaagatgatc

SEQ ID NO: 36432 - DNA, 588 bp, Heterodera glycines
gtgctaattagccttgtcaagcccatcaaccagcagctgttcggccccctccctgttgagttggccaatgtccaattgtacggcgatgcctttcacacgtgccataatggcattgtacagttggtctccaagtagcggaatggccaaaattggcactccaaattggacagcctcattgacactgttaaaaccgcaatgggagacgaaggcgcgcattttgggatgcactttgaaattgaaatttaagaaaatttatttaagggtaattaattttagtgcactttttgctaatgtttttaattaaccaattactaattgatcaaataataattaattttcgggtctattccagtttattcgtccaatcagtaactttctttagttttttggcaaggactttttctaacttagtcaatgcctatattgttgattcttggtatcaaacgaaagctaaaagtctaaggaatttagaaactcaagaaaacatcaaaatcttcacatagaaaatagcaatgagaaaatgcggaattcagtttatagtaaattcaagaataattttttgtctattgcatttagcccagaatttag

SEQ ID NO: 36433 - DNA, 992 bp, Heterodera glycines
aaagactttacaaaataatacccctggggagaagggactgtgaaacatgatttcaaaattttcaattttttctagtctactctactcaaaacggctcagaattcaataaaaataacattcacggtagcgaaaaatggggtttgacaagtttattggggaaaaaagactttacaaaataatacccctgggagaagggagtgggaaacatgatttcaaaattttcaattttttctagtctaatctactcaaaccggttcagaattcaataaaaataacattcacggtgcgaaaaatggggtttgacaagtttattggggaaaaaagactttacaaaataatacccctgggagaagggagtgggaaacatgatttcaaaattttcaattttttatagtctaatctactcaaaacggttcagaattcaataaaaataacattcacggtgcgaaaaatggggtttgacaagtttattggggaaaaaaagactttacaaaataatacccctgggagaagggagtgggaaacatgatttcaaaattttcaattttttctagtctaatctactcaaaccggttcagaattcaataaaaataacattcacggtgcgaaaaatggggtttgaaaagtttattttgaaaaaaagactttacaaaataatacccctgggagaagggagtgggaaacatgatttcaaaattttcaattttttctagtctaatctactcaaaacggttcagaattcgataaaaataacattcacggtgcgaaaaatggggtttgaaaagtttattggggaaaaaaagactttacaaaataatacccctgggagaagggagtgggaaacatgatttcaaaattttcaattttttctagtctaatctactcaaaacggttcagaattcgataaaaataacattcacggtgcgaaaaaatggggtttgaaaagtttattggggaaaaaaaactttacaaattatacccctgggaaaagg

SEQ ID NO: 36434 - DNA, 948 bp, Heterodera glycines
  unsure (1)..(948): unsure at all n locations
ctaacgaaaaaaattcttagcccaaaaaatggctatctcctttttctcctggggatttgaccgcaaacttggtaccaacatttgccttctctagtctggctctaccaaacactcacacgatatttgaaatgctaacgaaaaaaattcttgccgaaaaaatggctatctcttttttctcctggggatttgaccgcaaacttggtaccaacattttccttctctagtctggctctaccaaacactcacacgatatttgaaatgctaacgaaaaaaattcttgcccaaaaaatggctatctcttttttctcctggggatttgaccgcaaacttggtaccaacatttgccttctctagtctggctctaccaaacactcacacgatatttgaaatgctaacgaaaaaaattcttgccgaaaaaatggctatctcttttttctcttggggatttgaccgcaaacttggtaccaacatttgccttctctagtctggctctaccaaacactcacacgatatttgaaatgctaacgaaaaaaattcttgcccaaaaaatggctatctcttttttctcctggggatttgaccgcaaacttggtaccaacatttgccttctctagtctggctctaccaaacactcacacgatatttgaaatgctaacgaaaaaaattcttgccgaaaaaatggctatctcttttttctcctggggatttgaccgcaaacttggtaccaacattttccttctctagtctggctctaccaaacactcacacgatatttgaaatgctaacgaaaaaaattcttgcccaaaaaatggctatctcttttttctcctgcggatttgaccgcaaacttggtaccaacatttgccttctctagtctggctctaccaaacactcacacgatatttgaaatgctaacgaaaanaattcttgccgaaaaaatggctatct

SEQ ID NO: 36435 - DNA, 964 bp, Heterodera glycines
ttgacgacgtatccgcaacaaattcgcgacttggactgtcctatgaggtgaagcagaaagtgcaaagcaaatccaactcatataaaaaacttaaaaaacctaaaagaaaaacatagaaaaatcaattttcaataattattaaaggtaaaaaatcgcatttaaagcttttggcgagtcttgaggattttgaactttttttggataattaatacactaattgtatttaattacctaactgaaaaacaaatcattaaattaaatttcaggtggtgcacacgttcagcaatttctgcttcaaatttagcgaagtattcattttttcctttttttcattaatactttgtcttcgttagaatccgtacgcgcttaaatatgcctatgttttggccaatttatgcgagcgacccgagttggacgccgaacgtatcaaaatggcactgattgaacagtgtgccgaagtcgaacttagcggtgtcatatgatcgaatttgaaaaacgcaatttgactgatattaatcctatcgaatccattttgattaaaaaatatccgaaataaaaagcaagtttttacattttataagttttaataaatatgttgactttttgggcccaattttaaaaatgaggaatataaacataacattcaatatttaaaacataattacaaaaaaaaaagttttattatctaaaaaagatgttttaaaaaaattttcgtttgttatatgtcaaagaaatttgatggtgggaaaatcgcagaaatggatctacagaagagaacttttttcaaattcaatcccaaatatgttggaaatttaagtggatattacacataaaaagagattacaaaatttcaacaaaatggcttttgtatttgtatgatgagtgtagtacaacagtctcttcagcctaatttcgacgacccctaaaataacccaattttaggcattttcattttaatattttg

SEQ ID NO: 36436 - DNA, 1720 bp, Heterodera glycines
agcaatgagtcataactaataatcaaatttttttccttttcgcgccttctcattacacacacagatttaatctgctgcgccttttgttaatgagatgactaaaaaaatgtaaccagcagaggcacatgtttatctttcaaagatatataattcacccccctgaaactcataaataataatgaaaaccaaaattttaaatattttgacaaaaatgaaacattttttaattccaaaattccaaataattattcttgaatatataatattttagaaaattatctggtcagttaaatggcaagaaaacagattaaattaaaattattcaaaaagtaaattttctgtataaattttatatttttaaatttctattaaaaattcgtgaaaatttttagttttaatttatttaaaaattattttaatttatgaaaacacaattctattcctcatttctttttaacaaataaatgtccacgcccgctttatgtttggttgttgttcaataagttcaccacacattttccattcattccaaaaaacccaatttgaatcggcgccaaaacaaaatgaccatttttattgcccggggcactgtgtcacaaaagtcaattaacacataattaataaacaatcaatcatcattctctcgtcaattcatgcaacaataacaacacaaatacgccaccaccggcgctttttgccgcccaatttgattagttttgtctctgctgttgttgtttgctctgatcggatcacgccttgattgattttgggtccccgggggggcattcaatatttttttttttcctcattttatccccaaatggcttaatctctcccccacccaaccagccaacggcttaatcatcggcttttccattccattacacacatggtactaattagtctaccggctgctgtcagatctgcgcaccaaatattgttgctaccaaccgagccgttaatgggaaaagctttggggacccccgccgaggggagggataagccctcatttatcatgttagccatgtttaagccctttgtttattcccattttggggataggggcccaacagttggcgaaaaaacatccgcccggaaataaagggctttctttacctgcaaaattttggtttaaacaaaatttgggtgaatttttcccaattttttagccaagttatcatttatttttaaaaaatgatataataaaaagggaaaattcggttccaataatttttaatttgttttttatttttatttccattttaatcttatatttatttattttttgaattcttaacttattttgattgagtttcatttgcttttcaacaaatttaacaattttggtaatatttttagctgaacgcttaattatatctatttagcttttatttaattattttcctttttaattcagctttatcattaaaataaaatgcaatttttatttacgaaaatcacaatttttatttttgtttccgttgcgttttgtgccaaggattctaaaaaagcaggcgaattggctgttgctttgttcaaattcatctacaacaatgaaaaattatgtgagaaaatagaataatttaattttatctaaaatttaaatttttatataaaatttccttagaatttcaaatttttctcgtttaggcggtgatatttttggcaattcctcttggctaccggcacggcacaactgtgagctcagatgccgcatgga

SEQ ID NO: 36437 - DNA, 887 bp, Heterodera glycines
taaaaataaacatcagattcgtgatcagcacttaaaattagcctagaaaaaaattattaaaaaatatttcaggggggtggcaaaacccataagtacctcaacaaccccgtttttctagttcctaaatttttatgctgttgtgaaaagaatttgaaaattttgttgacgtaaaaatggggtgaacctcgtccagcatttgcttcaactccgattgggtgggcgcttcaaatgacgaagttttgtgcggtgccattgctaacagcgaatggtggtggtaatggtgaggcttttgaatgcgatgatgagcagcagaatttggcggcggcggcgggggacaatggcgtgaagaatttggtggcagtgggcgcgatgaacgcatttcaaattctataataaaaatagagaaatattaaaatttgaatttgaaaaatcagtgggattttgtaatatttttaaatgggaatgcaaatgaggaggttttcgacatttaaacaaatatcaacagaaaaattgcaatgagaaaattcggaattcattgaaaataatttttttatctgttgccctagcccagaaattagttatataaaattctatagactttaagcttcaagttgataccaagaatggaggttatggccttggaaataggatattcattgtttggacgcataaaatgaactagagccatttaatttgaacgtttattggaatgaggtgatgagctattctcattaatttacatgctagtttggattttaatggggcttacttgctaaaaaagcaaatttttattttaagtgtaattggcgtttaaacattttaaatgcatttagttggcaaaaaaactgaatttttgatcaaatcccgccttttatatagcttctaac

SEQ ID NO: 36438 - DNA, 1067 bp, Heterodera glycines
tcctatcatgctcgagagcatttgtaacgtaaaaatttttcaaataagagatagtcatttttctggatataagataaatttaaaattttctgtgaaattaatggcggattgcgcaccccccttcctatcatgctcgagaagcatttgtaacgtataaaatttctcaaaataagagatagtcatttttcttggatataagataaatttaaaaattctctgagaaattaaatggcgattgcgcaccgccctccctctcacgctcgagcgcttttgtaacgtataaaatttctcaaaataagagatagtcattttcttggatataagataaatttaaaaattctctgagaaattaaatggcgattgcgcaccgcccctcctatcatgctcgagagcatttgtaacgtataaaatttctcaaaataagagatagtcatttttcttggatataagataaatttaaaaattctctgagaaattaaatggcgattgcgcaccgccctccctctcacgctcgagcgcttttgtaacgtataaaatttctcaaaataagagatagtcatttttcttggatataagataaatttaaaaattctctgagaaattaaatggcgattgcgcaccgccctccctctcacgctcgagcgcttttgtaacgtataaaatttctcaaaataagagatagtcatttttcttggatataagataaatttaaaaattctctgagaaattaaatggcgattgcgcaccgcacttcctatcaagctcgagagcatttgtaacgtataaaatttctcaaaataagagatagtcaatttcttggatataagataaatttaaaaattctctgagaaattaaatggcgattgcgcaccgccctccctctcacgctcgagcgcttttgtaacgtataaaatttctcaaaataagagatagtcattttcttggatataagataaatttaaaaattctctgagaaattaatggcgattgcgcaccgcccctcctatcatgctcgagagcatttgtaacgtattaaatttctcaaaataagagatagtcatttttct

SEQ ID NO: 36439 - DNA, 718 bp, Heterodera glycines
accccgactcgtactaatttttcccaactcgtactgccccaactcgtaatggtaccccgactcgtactaagtttcccaactcgtactggtaccccgactcgtactaagtttcccaactcgtactgccccaactcgtactggtaccccgaatcgtactaagtttcccaactcgtactggtaccccgaatcgtactaagtttcccaactcgtactggtaccccgactcgtactaatttttcccaactcgtactgccccaactcgtaatggtaccccgactcgtactaagtttcccaactcgtactggtaccccgactcgtactggtaccccgaatcgtactaagtttcccaactcgtactggtaccccgaatcgtactaagtttcccaactcgtactggtaccccgaatcgtactggtaccccgaatcgtactaagtttcccaactcgtactggtaccccgactcgtactaatttttcccaactcgtactgccccaactcgtaatggtaccccgacccgtactaagtttcccaactcgtactgccccaactcgtactggtaacccgactcgtactaagtttcccaactcgtactggtaccccgactcgtactaagtttcccaactcgtactgccccaactcgtactggtaccccgaatcgtactaagtttcccaactcgtactggtaccccgactcgtactaaatttcccaactcttact

SEQ ID NO: 36440 - DNA, 932 bp, Heterodera glycines
  unsure (1)..(932): unsure at all n locations
ttttcactcaattaggattacttttaatagggcttcaaaagcatctaatatttggaattttttcacgaaaatttcttcagaggttgctaagtgccggctttgtgaaaaccaattagcgtgtaagaaatcgtgcacaaaaggattgtgggggcattttaaagcgaaacacgctaaagaatttgaaaactatttgcaaaaatccgacccgtcaacggtaatacaagcttccttttttattgaatataaaaaaattcagaaaaaccaaggcattacaaaattttttggcaatgaagacccacaaaaaaaggcggatgaacaaattgcaaggctgatgataagaacgaattgctcttttttatttgttgaggcaccggaattacagaatttgttctctttagcctatccgaaactccaagtaataattttctcccatttttactagtgaaataattttttaagcttcgcagcaaagattattttcggagaaatgtaattcccaaaatggccgatgaaattcaacaaaaaattgttcagggaattggtccggattttttttctgtgacctctgatggatggtcgcaaattacaaaatcacccgcactcttaaggttctctattccttttcatagtttataaaaacagactttagtgttactgtacaccatataaatcaacaatttgtacgcgccgattttgtacttgatgtgattccaatgacaaatcacacaggagcagacatagcggaagaaattggaaacgctcttcggacaaatggattaaacccagaaaaaattatttgtttggttcgtgacaacgcaaaaaacatgataagggccacaaatatttgcctgagttggcaggactcatttccaaaattcggtcttggngtactttttttcgtacaaagtaaggnctgtccttgctccgcgact

SEQ ID NO: 36441 - DNA, 710 bp, Heterodera glycines
taaagcctaaaaatatttaaatttagggtcatttttaggcggtgtgttttacggttttgatgcatttttgttaataagttttgggcaaaacgccatgcttttccaaaaatacttgtacttactttaattgccgctctttccttcaagttttgaagccgatcacccaaaatttctcggacagcttttgcctcctcagtgtcattttttccttttgagtttttcccttgggccttctccccaattttttgaatatcctccgacaaatttccaccatattgtttagaataaaccttcaaaacttctgtcatttcttcgacagaactgcccaaaattacttccaacaaaatctccatttctgacacctgagcatgaaaagggcaacaaataaaattttattcgcctctcaaatggacaattttccgatttagggaaattttcgaaaatttattcaaaatcataaatgatatggtaatcccctggaatgtgggaggaaaaaacatgtttttaccttcgtttgatgcttcaaacatgggtttctatatccatatttcgtgttttatgtccatgttttggcattttgtccatatttatatcggtgctgtgacgaagtgtcagaggtatcgatgtggaagtatcgatgtgggccaagtgtcaaaagtatggatgaggggtaatcggaagagtaagggcatttcagtacggaagagtta

SEQ ID NO: 36442 - DNA, 989 bp, Heterodera glycines
tgcctatgggaggggcgcagccctttgagggtgtttcccgcatgaacccgtgcctatgggaggggcgcagccctttgaagttgccgccccgcacgaacccgtgcctatgggaggggtgcatccctttgatgttgccgccccgcacaaacccgtgcctatgggaggggcgcagccctttgatgttgccgccccgcacaaacccgtgcctatgggaggggcgtatgacaaacccaaacctatgtgactcctttgaagttgccgcttcatggataagcatttccccaaatcctcgcgggtgtttttttcattttcccctccacacgctgcgcagcgccgcggaaggtcatcaatcatccgtctgtcaccaaagtgacaggtggaggaaatcaattttttttcttttgcaaattaatacccttatctttttgaaacctttggggcggttttattttatgaaatcctaagatttttttatcatgaaattaaactctttgtgaaaatttgccaaaaccgtgcggttttttttgcatatattcccttcgccgcgcagcgatgctgccgccgcgcaaattaatcgataatgagaccgccactctcatccgctccgtcgatgcgccgcgattccgagtcgtgaaaaaaaaatcgataagcaccaaaattgtcaatgaaattcgaattaattgtaagatatagaaacattaattggacaatagttgaataaataaaaattcatttaaataaattaaattgaaatttgttttctgaaatggtcttttttctctcccattatttgataatctgcctagactttacgaaacttttagaaatatttatttcttgggataaattatcaaagggttttgtaaggaattagaaaaaatttgacaaatccgtaagtctttcgtgtaaataaagaatatgtatacaaaaaatatcaaggaatttttttctaaacgaaaataatgattcactactcattttttattttt

SEQ ID NO: 36443 - DNA, 974 bp, Heterodera glycines
attgaatcatcgtggtgaattaatttgaattttcatattttcttcgatatttaaaattagtcaattgttaaattcgttaatcatcttataatcgggaatataatttttaaaaattaatttttttcagttatttaaatataaaaaataaaatatttaacaattttgaattgtttacattcatcatttacaatgcaatatcatttttatggccttttttaaccttatccccagcaggcaatcccaactagttgttatgttatgtaccaatgttatttatttatttatttatttatttatttattacaaaaacaaacaaaatcaattgaacacacaaatttttgacatttactacatctctttttttacggaattacataaaattaaatcaaaaattttttttaattttacaattcgtccgtcattaagctatacatacacaaaaaaaacccatcgctcccaccgattcattaattattccatccatttttgtccccattatctttcctgtccaatctcgacgatgtccagcagaagcagcaattgtgtgtcccctgctgtcctcgccctccgcccccccggaggatgtcctttctccgctgccatgaaaatccattccaaatggacattaccctgcttatgcccacccaattgtcatttttaatggatggcataatccattattatggatattgtggaaagctaagccccatttaaatgccaattattttgatctacgatttgtgtagcattttgaagtttcaaattcatttccatatttgaaaaaaaaaattattttaaaaatttccgcaaaagtatttattaaaatataattttaaaagaattattaaaattatttttaaaatgctattttagcttttagttttttttgaatttttcaacaacagaccggatttaaccctttttaaaattagagccaaggttaaagcccctattttttgtaattttttcacatg

SEQ ID NO: 36444 - DNA, 478 bp, Heterodera glycines
actttttggttagggttttagaaaaaaagttaggggccctcaaatgcacgaaaaaatgagaaatcagccgctgggactcagttggccgcgctgaatttttctctatagttttcccggattctcctcaaaaagttgtaagacccttccactactttcagggcgctcccggccttcggccggaagaaaatggttttagcaacgaaactccttgtcaatataacatatatagtaactagggtgctcagttggctatggtgtgcatgcgtggcttggtaatatatggccctcatttgttattttaaaacattaattgcattagtgtgatgttttaaagcgctatcgcgctatgggacgcggcttcgccgcgtcgctaggaagtgatgtaatttagaaattcatcgcagcctcaggacgggcgcttcgcgcccctttttaattttgcgagagacatttgaccgcttcgcagcctcaggacggg

SEQ ID NO: 36445 - DNA, 1255 bp, Heterodera glycines
tttgcagcacgtctcttctctgaagacgacgtgcactttagcgattcgttttgtgcaaaactgaatttggccgatgccaacgaacagaaacagcaggaggaggatgaagaggaggatgacgaatcggacaccagcgacagcaccgcaaaagcgggcccatccacgggcggacttgcggccaaagacacattcatcaagtgggcatcattcattcataatccctatttgttcatattcatgttagaccccaacgaaatgaagaagaatgtgtatctcttgggccatcaaaatacaaagaaaaaattcgacaggcccagccctaactagaaaaacgaaattttttttttgataggcctgggaattgaaagcccccaaaaaatttcaattttttttttttttttttgcatttcttcgcccttcctccatggttatggatgggcctgcaatcaaaaagttgaaggaaaacggaccctaaagaaagctgacgaaatctccctttcgctctctccggcactttcaaatttaagaaatcgaaaaatttcgcgaaaattttagggcactaattattattcatgctacctatttttgttgtttaattggtagggcagcaacttttagtgacgaaaaatcccgaaatatttaactaaaatagtgagtaaaaatcccaaaataggggaaccgcccacttcggcgcggccacttcggcgcgggtatttcggcgcgaggttttttcggcgcgggctttttcggcgcgggctttttcggcgcggccacttcggcgcggccatttcggcgccctatataaaatggctttttcggcgccgaaaaaaattttcaaaatttttttcaaaatctttagaaaaccatatcaaaagcaaaaaatttcctgctgtgaactacaaaaacactaattttgagaaaaagttaaaaaaaattgttttgcagtgttgtgtaccatcgaatactggtcagtttggaatttgtaagtcaaattcaatataaatattcgaaatttgagtccggggttctgaattaggcaagcctatggtcagattgtgatcaacaccctcgaaaacccaccgaatagtaattttttaccaaaatataaaagttaaattatgcaccacaattctgcaccattgcttaccattgcattagcacgttactttgaaagaaaatggcataagttatatgcacaatgaaaggcaaattaaggtttttttgaaatttttttgggatttttaaacattggcgc

SEQ ID NO: 36446 - DNA, 986 bp, Heterodera glycines
cttaaattctatgggaagttttaatattcaaaattctctcttctaagttaacaaaacaaaaaattttttatgaatgtacttaacgttttttcgattttttaataccagtatttatttaaaaaactccaaccagtcgaagacaaaagttgtaagttaatctcaacatgatccaatcgcctcaaggcatgttcaatctataagaaaagattcaaaatccagtaatattgcagaatgggcccggtagtattgcagaattgcgattccaagttaaaactttctctgaaataaatccagtaaaaaaaattgctaaattgcgaatctgacttagattttgcaaaaccatcgaattatttatgggtttctgttttacctttttaccgcaatttttcagtattatgtattacccaaaatcccatactgaggaatgcccatgctcaccttgtcttcactggttagcataatagcccatttggtcactttcttttccagtcgttcctcttctttatttacattcatattttgttgagaaacgattgaagttagtcgtaatagagattaaccaacaattaatctattaatttgatacaagttctaagtcccagctatggtcttattatcatcttttcgtgaaaatttgttcactatagttttatgcgttgcagatcagtgatcgcgaatccgaattccatatacagcccctaagaatcgtgccgaaattttttttaaatactgcactaaaaatagaaaacaaaattccaaaaattttttgtttacgaaaattttattcttttttgcatcattcaaaaaaggggtcctaccatcgggtatatgtattaccaaaattatttattatttttgattaaaaattgtcgaatagtgttccactccgtaacacatacatatgtacataaataaataataatgcacaaacaaatttatgcaataaataacctttaaacatatgcgaaatgtctattctaataaat

SEQ ID NO: 36447 - DNA, 970 bp, Heterodera glycines
  unsure (1)..(970): unsure at all n locations
aattttgaaaaaacgtctatctcttttctgctcaccactcacatgaattccanccacatnntcggaatagtagcgacgaccctaatttttctggatttctntctgggcgagtttggctctgaaaattttgaaaaaacgtctatctctttttctgctcaacactcaaatgaattccaaccacattttcggaatagtagcgacgaccctaatttttctggattttctttctgggcgagtttggctctgaaaattttgaaaaaacgtctatctctttttctgctcaacactcaaatgaattccaaccacattttcggaatagtagcgacgaccctaatttttctggattttctttctgggcgagtttggctctgaaaattttgaaaaaacgtctatctctttttctgctcaacactcacatgaattccaaccacattttcggaatagtagcgacgaccctaatttttctggattttctttctgggcgagtttggctctgaaaattttgaaaaaacgtctatctctttttctgctcaacactcacatgaattccaaccacattttcggaatagtagcgacgaccctaatttttctggattttctttctgggcgagtttggctctgaaaattttgaaaaaacgtctatctctttttctgctcaacactcaaatgaattccaaccacattttcggaatagtagcgacgaccctaatttttctggattttctttctgggcgagtttggctctgaaaattttgaaaaaacgtctatctctttttctgctcaacactcaaatgaattccaaccacattttcggaatagtagcgacgaccctaatttttctggattttctttcttggcgagtttggctctgaaaattttgaaaaaacgtctatctctttttctgctcaacactcacatgaattccaaccacatgttcggaatagtagcgacgaccctaatttttctggat

SEQ ID NO: 36448 - DNA, 1025 bp, Heterodera glycines
  unsure (1)..(1025): unsure at all n locations
aatagtagcgacgaccctaattttctggatttctatctgggcgagttgggctctgaaaattttgaaaaaacgtctatctcttttctgctcaacactcaaatgaactccaaccacattntcggaataatagcgacgaccctaatttttctggattttctttctgggcgagtttggctttgaaaattttgaaaaaacgtctatctctttttctgctcaacactcacatgaattccaaccacattttcggaatagtagcgacgaccctaatttttctggattttctttctgggcgagtttggctctgaaaaaacgtctatctcttttctgctcaacactcaaatgaactccaaccacattttcggaataatagcgacgaccctaatttttctggattttctttctgggcgagtttggctttgaaaattttgaaaaaacgtctatctctttttctgctcaacactcacatgaattccaaccacattttcggaatagtagcgacgaccctaatttttctggattttctttctgggcgagtttggctctgaaaattttgaaaaaacgtctatctctttttctgctcaacactcaaatgaattccaaccacattttcggaatagtagcgacgaccctaatttttctggattttctttctgggcgagtttggctctgaaaattttgaaaaaacgtctatctcttttctgctcaacactcaaatgaactccaaccacattttcggaataatagcgacgaccctaatttttctggattttctttctgggcgagtttggctcaaaacgaccgattccccttttgaagtagctaaaattaatttataaaattaaatctagataatttaattaaataaatattttaacacataataaattacttctattaaaaactttttaataagtaaataaatattcttcgcctaaaattccctcgccttttgtcgtgttttcgtgcttcttctccaattcactgattttttccanaaacttttgccaattgatctgctgaagctt

SEQ ID NO: 36449 - DNA, 936 bp, Heterodera glycines
aaaaaaattcttgaatttgcttctgaattttttaattttaacccgaaaattactttttcgaaaattttgcacaaataagaggcgaagaaattcaacgaaatttttattaggattttgatttaaaatgttgagaggtttaacaaatttgtacactgaatgttggatcgtcaacaccaatgagaaatgactaacagaaaagagggagaaaagggcgttggtttaggaaaatagcttataataaaggagagacgagcagacgatgagtgagagaaaaatagtggtaaaaatggtcaactgctgcattggcagagtcagagaggggtcacaaagagttcgcacagcatcgaatatttccttcattttgggcgtcattcttccccactgcacttctttcttcggtttaattacccaagtttgaggtacttggcgtgtcctgcccataatatctgtggcatggaataaattttggaactgcgctgcctaacggcggtgcttaaagtgcgctaaaaatgatcaaatgattatcaatttttatttttcttaattccaaaatgaattcgaaacgcaaaaatttaatcataattcatgtggtaaaaaatgcatttaaaaataaaaaaaattcttgaatttgcttctgaattttttaattttaaatagaaaattactttttcgaaaattttgcacaaataagaggcgaagaaattcaacgaaatttttattaggattttgatttaaaatgttgagaggtttaacaaatttgtacactgaatgttggatcgtcaacaccaatgagaaatgactaacagaaaagagggagaaaagggcgttggcttaggaaaatagcttataataaggagagacgagcagacgatgagtgagagaaaaatagtggtaaaatggtcaactgctgcattggcagagtcagagaggggtcac

SEQ ID NO: 36450 - DNA, 752 bp, Heterodera glycines
aagatttatttgtggaatttttggtcggagattttgttctgtatcattttcagcacaagggtcatacgatgaacaaggggggggggagggtgtctagtgatgtttcaatattttctccgagtaagtttggagaatgggagggggggggggtagggttgggggtccggcggtgccgttaggcgcctccgggggaaaatttcaggattttctgaaatcagataaaatggttgttgaatttttaaattacacaatccgaaggcaatgaaagcgaattttgttgggcagcgtacgttcgggcaacggaaattcagcacgttcaacaccgacaagtaatttaggttttggtccaattcccttttcaattttgacattcctccaaattgtcaattcgctttttccatcaaaatgtgcgtcaactaaaccatcgaaacggtcggaaatcagtgccaattttaggccgagttgaggacgattaaaatgaggaaaaatgtccatccaaacatcgctgcaaatccagctgaaattatgaaaatttgttaaaaatatttgtgtcagtgaattttagaattaattttttcatagttttagaatgattttccaatttcaaactcaaaagggtacccccatttagagcccggcgcaggaccggatcctgcgcaggattttgcagggtcccaatccgcaatcttgcattttttggaaaaaacaggattgcaggaaagatccggccggatccggtcctgcaaacattt

SEQ ID NO: 36451 - DNA, 1178 bp, Heterodera glycines
  unsure (1)..(1178): unsure at all n locations
gaagccgcgcatgcactagcaacgaagtcctttgcgcgaagcgctcatgtaatgcatattcttntcatctctcacaattatactgtctacaccgagcaattactgtgcaaagcatactgtctacaccgagcaattactgcgcgacacgctagtttatatatatatagagaaaaagggggactcgtcttaaaaactaatttgagtcgaacggctgtcgggaggggtctgaaagtagtggaagggtcttacaactttttgaggcgcatctgggaaaaatacgggtttttctcttcggtggccaactgagtcccggcggctaatttctcacttttgcttgcgtttgaaggcccgtaactttttttaaaggacagggagcggaaaattcttgctggtaggattttaagttgaagtgttttctaattttcaaaaaaaattccaggcctctacctatacttggaagggctgcagaaattggcaacttttcagtaccaactttgcccagttcagtccccgttgaataactcattaggctttgacctgagcgcagggtggccagcagacttattgtagagctcggtgagctcgattttctgaaatttaaaaatttcgaaaattttcaaaatttttcgagctaggcctaaaaaacggttttcgggtttttgaattttaggaatttttaacgaattttcccagaaaaacggagaccacttccaaaacatagtttttcgagctctatcgactggtatttttttcggaaaaatttcgattttttcccggaaatagaaaaaaattttggcctgagcgggacatttgagtcccgggcccataactcgtcaggagttgattttagcgaaaaattgtcttagaacatttttgtagagctttcgaaactctatcgaatggtgtactataagtctggaaaatttcaaaaattttcgagctaggccccctagaaattttcgaaattttttttgtgggccaaaatgggggtgaaaattttttttctgggctattttgaggtgctgagtacgattatgatgtctattttaagtttcagaatttttggaattttttaaaattcgaaaatttttaaaatttttttggtccttggaaatttggattaaaatttgaaaattcataactcggtgatggtttcatcgatttaactataataaagc

SEQ ID NO: 36452 - DNA, 1179 bp, Heterodera glycines
  unsure (1)..(1179): unsure at all n locations
tgctttcatttgatcgtatcgctttatcatttcaatcttttcataattgctatatcacgaacaaatgcnttctganatattaaatttaaactcacgaaaaacaagtatttttacgcttattaagctaattttcggttattaatgcctattttctaggtttttattttagaggctaaaaatataagccttatttgtagattggtttttgtttttaggttcgtcattaaaacaaatactgagtttagaaatgttttttgaccctctcctcagaaagttgtatctttttctcttatttgacttttaaaagaatggattagaaatgaaagacttgatagcctctcagattagaaatttcaaattaaaatttctcatgatttttctcacgaaaaattagaaaattaaaaaatcattttttatggaaaatttccgtatatttaattattattttttgctgaaattcacgaatgaatgagacacaaagatatgaaaaacaagaaatatttctttataaagaattagccaatcctaaagaatgggttccatggtactgagcatgaagtaaaactttgttttatgttgttacgtcatctaaattcattttttttaaattttcggaataaaatacaaaaaaaatttttttttttgaagtacaaacgacttgaaatcagattagtgttcacaataagcaccacgaaaagcccatgataccatttcttagcgaaaataaaattgttaatttttaaattttttctttaaaatttgttattttaacttaccgactcccaattccctttgccacagtgaaattgtgcgaatgcttacgcccaattccttcgcaatttccctattaatttcttcgtacggtcttttgtcttttgccgcggcaaattcccttttcatttgtctaaatttgttcacaatttcttccttttctttacaattccgaatgtgttgttctaaatttatttttaatattttttaaatattttttctttttttccaactttttcgcgttcggttgggaaattgatggtctgcattttccaccgtttgaaattgtttctgtcccttcatcaacagcagaaaaaggtgttttgcaaattgtccccgtgaatttttgatcaattttttggtgatcattttgccgttcttcgcatatttccattttttcacatttca

SEQ ID NO: 36453 - DNA, 879 bp, Heterodera glycines
ttattttttgaagtgagtcaaacaccctattagtgctttgctgtgccgagaaccggcaggcaatggatggctttcaatctgcaagaaattagattggcaatatgtggttgtaaaaaacttttgggtaatgaattattttttgaagtgagtcaaacaccctattagtgctttgctgtgccgagaaccggcaggcaatggatggctttcaatctgcaagaaattagattggcaatatgtggttgtaaaaaacttttgggtaatgaattattttttgaagtgagtcaaacaccgtattagtgctttgctgtgccgagaaccggcaggcaatggatagctttaaatctgcaagaaattagattggcaataagtggttgtaaaaaacttttgggtaatgaattattttttgaagtgagtcaaacaccctattagtgctttgctgtgccgagaaccggcaggcaatggatggctttcaatctgcaagaaattagattggcaataagtggttgtaaaaaacttttgggtaatgaattattttttgaagtgagtcaaacaccctattagtgctttgctgtgccgagaaccggcaggcaatggatagctttaaatctgcaagaaattagattggcaatatgtggttgtaaaaaacttttgggtaatgaattattttttgaagtgagtcaaacaccctattagtgctttgctgtgccgagaaccggcaggcaatggatagctttaaatctgcaagaaattatattggcaataagtggttgtaaaaaacttttgggtatggaattattttttgaagtgagtcaaacaccctattagtgctttgctgtgccgagaccggcaggcatggatggctttcaatctgcaagaaat

SEQ ID NO: 36454 - DNA, 1005 bp, Heterodera glycines
atgggtgcgctgtgtacgatgctctggaccccatcaaagtggagacccttgttttattcagcctctcaaagatgaacctatgaggaggaggaggaggagaagaagagggcaacagcaacaacaacaaaataataataacgatgacgaagacgatgatgataatgatggtaacgaggagggagacgacgatcacggtcatgatgctgataatgaggaagaagaagaagttggaacaaatcggtcggtcagactttgctttttcgacgctgaaacgtcccaagatttgccacttcaactgcgtacaaaggttgtacagaaacatgttccgatgctcattattgccgaaattatctgcgaagcgtgtataaatgaaggaatttcggttcattctggtgttggacaatacgcaaatgggtgcgtgtgcagtcctcctgcgggaccaaggggacgtcgctggtgttctcctccgtttctgaatgcacctggggatgacagtgctctaccagccaatgtccactacaatccacgaagactgtttttccatagttttgacgacgctaccaacaatgacccggtggatgattttatcaattttctcatcggaagtggcccacatggtgttaaaacaatttgtttatcacacaatggcggaaaatacgacattcatttaatactggaggcacttcaccggcgcaatttaccaccaaagcgtatttgcacaacgggactaaaaattttttcgatgactttgaaagggaaccatcaacgacacgtgatctttaaagactcgctgaactactttttctgtgaattggatgcactgccacggacatttggattgaacgctgaagttgcaacagcaaaaccttttttcccttatctgttcattcggcgtgaaaatttacatcaaagattgcgtggtttaccggccaaagaattttatcagcctgatcacatgaaagcatcctagtaagaatcctctacgagttggtgggaggccgagaa

SEQ ID NO: 36455 - DNA, 593 bp, Heterodera glycines
tttctcttgccggcagcgacgacgaaagtcaacaaccacgcccaaagaaaaagttcaaaattccgaaacgacgctcagcactgttacgacccatcggtcagcagcaaagtccattgcaaggacaacacaaacgccgcaagcaactacaagactcaggcttacgcaagttatttcaagccatctcggaccaacaaggaagcagcaaggccaccacaaaggtcatcgaggaaagccgagaaatgcagaaggcaccacgtcatgaacagatcgagcacgaacaacgaatggtgaggaaaggtcaacaagaagcaaatcgacatcttcaaccgaaaaagcggcagcaaaaagaaattcaagaagtgccacattcaacaacagaagagcaacaacgagaaaccaaacgccaacaaatcgaaagacaacaaaatgacgaacaacgtgccatcaatcaacaaacacgcagtacggcttggctagaattggcacgacaatttgactacgatctgatggatcagccggatccaacagagaaacaaccggaagaaacggatcagccaacgaaatcaaagcaacaatcaacaaagaacaaagag

SEQ ID NO: 36456 - DNA, 957 bp, Heterodera glycines
aaaaaagactttacaaaataatacctcccgggagaagggagtgggaaacatgatttcaaaattttcaattttttatagtctaatctactcaaaacggttcagaattcaataaaaataacattcacggtgcgaaaaatggggtttgacaagtttattggggaaaaaaagactttacaaaataatacccctgggagaagggagtgggaaacatgatttcaaaattttcaattttttctagtctaatctactcaaaccggttcagaattcaataaaaataacattcacggtgcgaaaaatggggtttgaaaagtttattttgaaaaaaagactttacaaaataatacccctgggagaagggagtgggaaacatgatttcaaaattttcaattttttctagtctaatctactcaaaacggttcagaattcgataaaaataacattcacggtgcgaaaaatggggtttgaaaagtttattggggaaaaaaagactttacaaaataatacccctgggagaagggagtgggaaacatgatttcaaaattttcaattttttctagtctaatctactcaaaacggttcagaattcgataaaaataacattcacggtgcgaaaaatggggtttgaaaagtttattggggaaaaaaagactttacaaaataatacccctgggagaagggagtgggaaacatgatttcaaaattttcaattttttctagtctaatctactcaaaacggttcagaattcaataaaaataacattcacggtgcgaaaaatggggtttgaaaagtttattggggaaaaaaagactttacaaaataatacccctgggagaagggagtgggaaacatgatttcaaaatttttcattttttctagtctaatctactcaaaacggttcagaattcaataaaaatacatttcacgtgcgaaaaatggggtttgacaaagttattggg

SEQ ID NO: 36457 - DNA, 1091 bp, Heterodera glycines
caactctccgctcgcttgcgcctgaggtaggcgcacgcagctctccgctcgcttgcgcttgaggtagacgtacgcaactctttgctcgcttgcgcctgaggtaggcgcacgcaactctttgctcgcttgcgcctgaggtaggcgtacgcaactctttgctcgcttgcgcctgaggtaggcgcacgcaactcacccctcccttcattttagctagtggtattcaccatgccgctgacattggcaactgtcgttcgttgtggcccgaaatgaggggagggcgataaaagtgtgaaatggggagaaggagaatctttccattgaaattgctgacattaaaacgataataagggcacttttggcatggcttacataagtttatgtgaatttaagtaaaagtaaaatgggtctcacgggacgagtcgaaaacaatcgaaattcggaagaaaaattaaaaaatgtcatatcaaattaattaattaattgcgtaaaatgcgtaatttgtggcatttcaaaaatacctgcaccaccgcaggcgaatgaattcgccgcactttttcactgatcgcggcgggaaagcattcattcccccgccggggatttccgccggaaaccagccgtcgtccgccgaagagtccgtccccaaccgcccccccccgcccgaccgatcatatgttggcggaatgttcccacaccgccccatttgccctgaggggcgttgtttatagccaccttctccaaagaaaaactaaatttcaattttaaaaatattttaatcattcaattgatctctaattatgtcttccaaatgttagctgcaatttcgacgataaatgacaacggtaaaaataaatattaaattaaaaaatgaaatttaaaatttaagcgtaaattttcatttgatttacaccgaacggtggaggacgacgctgaagaagaagatgaatggacttatgaatatgtgacagacagcggagaagagggagaatgggaagaagaaagtgaggaggaggaaattgaagtagaagagaaagaggagaaaaagaaaaaggagaaagagaaaaagaaaacagaagatgagaaaaagaaagcgg

SEQ ID NO: 36458 - DNA, 730 bp, Heterodera glycines
gaagtgttcgagctccccataaatctgcgcgcatcggttggggggggactgcccccaaaccaaaaaaaatttattttttcaagtgtccgtttggggtactcaaacaattatggggagcaaaaatcccccgcagaattaaagtacagactatagggaagctattcccgaaggattcgttctccccataaatctgggcgcatcggttcggggggactgccccgaaaacaaaaaaatcgattttttcaagtgtccgtttggggtactcaaacaattatggggagcaaaaatccaccgcagaattaaagtacaggctatagggaagctattcccgtaggattcggtctccccataaatctgggcgcatcggttcggggggactgccccgaaaacaaaaaaatcgattttttcaagtgtccgtttggggtactcaaacaattatggggagcaaaaatccaacgcagaattaaagtacaggctatagggaagctattcccgaaggattcggtctccccataaatctgggcgcatcggttcggggggactgccccgaaaacaaaaataaatcgattttttcaagtgtccgtttggggtactcaaacaattatggggagcaaaaatccaacgcagaattaaagtacaggctatagtgaagctattccggaaggattcggtctccccatgaaatctgggcgcatcggttcagggggactgccccgaaaaggcaaaaaaa

SEQ ID NO: 36459 - DNA, 1242 bp, Heterodera glycines
  unsure (1)..(1242): unsure at all n locations
tttttcatttatttccccgccacttccgacaaacaatgagtaataatacaacaagcattgaaaggaatggaaagaagagctgctgagaaattacaattattcgcctttattaaatgccaaaggatgatatgaaaagggcaacgtttttatttatcaataaaaatggcatttcaattattttttaagggattattaaatcaattattttgcaatttttttaaaattaaattaaaaaaggctttgaataaatcaacttcagctgtcttaataaacattttgctgacagcagcagatccgtcctctgctgcacactgattttcttcttcttaggctagcaaatgtctctccccgtcccttggctaatgaaagtgttttctgttgtggccaatcactcggctgtccggcaaatgtctgttggccatgttttcggctctattattctccagttggccacatacgccagcccaacacaggtggttttgcctatgagtcggtcggtcggttgtccaatggccatttggccaaatgatcgattcgcttgtcatccgtcgtcagatgtatggccatttcgaagtttgcaatttgaaatgaaagaaggcatcgctttgatatatttatgataagctttaacaatgtttataagcgaatgcttttcggatttgtgctgaatttgtaaatggtcattctgtaaaattcaaaaagtgctgaaacgaaagatactccaattcatgcgaattttgaaaagcagtcatcaaaaatatccgtaaaactttgaccaactcatttttgaccaacttatttttattgttccaacccattgtttttttttggattggaacgtgaaaatcgaggtcaaatcgatgaattttgaggatttttttggtgtttctcaactcgggaatgcttttttgtagacaattggccgcgtttctcgccgtttaacaattttatcgttaaaaataaatttattcaaaattttaataattaaatttattttaatctttgtattcattaactgaccaaagggaccaaattcatacaaaaagtaaaaattttaacggtccataactaacgaaattttttttanaataaaagtaagcttagaaatataatttgtctaaagaaattttttttggaatttttaataattttaaaaaatggttcctgtctgctggtcctacccaggtttactcgcagctgagagtaggttaacccttacctcattcttttggtacgggccca

SEQ ID NO: 36460 - DNA, 1551 bp, Heterodera glycines
gaatctgcgcccagtaaaaatggaggcgttgtgttggtcagttttggctccgcggttccgattcatgaggcggatgcacatgcagtagcattcaaaaacattgtggtctacctgttttccgaccagtgcccgcagatgaacatgatcgtcaaaaggggcgaacgtccgccaattggcacgggcggccaatgcaaaaaaatgtcggaaaagatgtatctcaaggcttggcttgaacaataggcacttcttggtattaccgaaatgacgctctggatcaaaagaaattaaaaggatggttcttttaaatatacgaagaaagcttttgagccagctaagacaaaaatatgcacaacaacaatgcgttcgccgagagatgctggccggcgcctcattgtgccaaatcacttttatgagtccataatcttttaggtcagctttggagtgtacagtcacgtaaaatattaattgttgtatagtccactacgattgtttgtttaatctagatcaggatacgttggagggaatatgccgaaaccagtcgatgttccagttgataattctctagcgcaatcgtgctgcctagcgggggatgcgccgaaggcgctgaccccgctagttagcttaataaacaataatttaaatacattttgccacaaattaataatattaataacgcgctaattcaaacaccatgtcggccgagaaaaagccgaaatgatggtttaaatagtttttcatcctcatttagcaagtaataattaaatcaaaagcgaataaaataaattttagttcctatagatataaattaaataaaaataaggacaattagctaaaataaaataattggcttggtactgagacttaattatattacttaattttaaaatacatttcgccaaaagcaatataatggcacaattttaaacaccttgtcggccgagattttgatctaaattacgcaaataaggctctaagcgttatttatgctgctagtttcgacctttatgatacaaaactattattttaataaattaattataattcatgggccatcaatatttattttggacagaataacataaataaaaaccagcactgagtctcaattgtttatggcatttattaaacacttcgccaatgcctatacaactcaacaaattcaaacaccatgtcggccgagaaatctcaaaatgaccttattcaaccgttttggcttacaattagcattagcctaataagagaaataatttaaaaaaaaaaataaataaataaatttggataaaattttcaaagattaaagctaaacttaagtgaaattcattaatagcccaacttattgaccctcttttcatttctctcaaatcgttgtctcttgcatccatttatgctagcactagcacttagtttaatgtatgcgtcatgtacattgccccgccttcttcgcacccatcggtcaataaatccttctctccttagccattcattttctgtttttcaccttgctcattttatgaacattcttttcttcctttctctcttagattaacaaaa

SEQ ID NO: 36461 - DNA, 1225 bp, Heterodera glycines
aaaggaagggcaaaattgagggggcacaaaaaccccccaggggatgcacaaataaggggtttaagccgaggcgagttggtaaaaaaattttcttaaaattcaataaggattagatggtggtggaagccatggaaaaaaaagaacattatgtaatttacccaaaaatagaaattcgcaaataatgtaatttaattttaaatggaaaaacaaaaaacaaaacattttaaaaacaaaaattacatataacaataagaaaagaacagaattgttttataaaagtcattaaaatgagcaatcgagaccgattaaattggttaattgttgctaattagtcattaatgtgttaattgcaaattaattgtctccaatgttgcgtggaatgaacatgatgcgtgtttcagataaatcagctgatcaatattacaataaaaattcaaaatatcatttctcgtttgcatcttgtctttctgcaactgaaaattttattttttgtaaattaatttattaatttatcgttcaaaattattcatacttaagaaattcaaccaaaatttcatattttattgacttaaacaaacctataaacatcaatcctaaataaaacaaactaaataattaaacattaagataaacaaaaataaataaattaagataaatattaaattaatgaatattaagataaattaaatcaaattaattaattaaacattaaaataaatccaattaaattaattaacattacacctatccattcgattttttaatttttaaatgtcatctaatatgctaattgttgcaaaaatataatgaattattttgcgtttcttaaattaagccaatctggtccataaatattaatataaaaaatttttcaataaaaattattattacatttaaaaaaataatattttcgcattttgtctaatacatttctttcaatgtcgatcaacaaaagtcgtacagtttaacaaacaattttatttttgtttatgcgttttgccaacaaaaatattatttttgtccgtccgtcccccggcccaatcggcgcgcacttttgggcgatcagagatttgatcatttttgtgctgcagctcaaccgatcaacaatgagtgagatcagggcagtataaaagaattgcaaatttgaaaacaattttctaacttttcttcgactcattaacccccaactaattgatcaattacaaaatgtcccctctccgttgct

SEQ ID NO: 36462 - DNA, 1188 bp, Heterodera glycines
aatataatacaaaagttttttgaactgaaacttttctttctacatttatttgcccattctgataaattatgcaatgctttatgcataatttctgtatctgctcttgctttatagcatatatacaatttaacatcatcagcatataattttattttcactcctgatggcaaagcatcaggaagatcgttaatataaatcaaaaatagtaaagggcccaggacagagccctgggggacaccagagccaacttttttatttgaggataaagcatccccaattttaacacgaaaagtcctattactcaaaaagctttttatccacattaaaagtttgccccgtataccaattttttccaatttgtataaaagtaagttatggggcactgagtcaaaagctttctgaaaatcaatataaatacagtccgcattttttccattaataattgcatcataccaatcttccacaactgttattagttgacttgtcgtagacctatttctaacaaaaccaaattggtattccgaaattttattgttttttaggagaaagttgtaaatattttggctaagaattctttccataaccctgcaaagtgagcaggttatagaaataggcctataattttcaggattaaatttgtccccttttttgaaaagaggaaaaactattgattccttccagatatctggaagagaaccagagtctaatgaaatcctgaaaaggtcagtaataacagttgctaatgaaggatggcaatttttcaatgttttatagctaatattatccggagaagttccatttttattcggaagttttcttaaaagtttttgggtctcaatgatgttaaattctatatctgatataaagctttgattaacaaaagtgttgtccaagcttagaaagcctggatcaacttcagaattgttaaacgaatttacaaataaattggcaaataattcacatttttcttggtcattatgatagcatttgttttcagaaaccaaattcgatatttcaaagggattaacatcatatttttgtatatattaaaaaattgaattttttccctttgaaatagccttttgttcaagttgagaatgaaatttttttgttttgtatttttatgtgtaaactaatgctatcataaagtgcccctttttgtgggtcgattttacacagcttatatag

SEQ ID NO: 36463 - DNA, 935 bp, Heterodera glycines
tcatttattttataataaaaaataaataaaattgcatatcatcttcattttggaagtgattttttgtaattagttttgaatttcgcaaagaaaaaaaaataaattttcaaagttttattatgcaaaaaggtggcaaaaaaatttttctaatggaagacataatttaaattattcatttgattacaatgaagtttatctgtttattatttgtcttttttatttttttgatttttgcttacaaataaatttcgaatacattttaattgaatttatttttcattaatattttcaaatcataaaatgaattaaaataatttaaaatataatgcatttgccggaaaatgtaagctagacaacaatattttagttcattcataattcaatcattattaattttataaaaataggttatttaaacaaaagttaacaaatatgcaattttggtataaaattaaatatattttgtataaattggatgaatctattaaacaatttgctaaattacacaaaaaaaaacatttgatgaataataatgttttaatttcttaaaaatgaaatatttcttatttttaaccttttttatttttaatcaattattggtaaatgttatgatgtcattggaaatatttttttaaattcatttttataaacaaaattattttttgtcataataaattatgatgcttaataatgaaaatatttaccaacaaaatcaattataatgcaaaaaaagttaatgcttttcatgaaaatattattaaaatgatcatttcgttaatcataaaaaaggcaatagaaataaaataatacataatatataaaatatattttaatatattttttttctgatttatgttagagcgtcaaaataccgaataataattttagacaaaaatcattgtgttcaaatgagttgtgccaattcaaaattcatt

SEQ ID NO: 36464 - DNA, 1007 bp, Heterodera glycines
ctaagaaacaagaaataaaaattttcaaagatttagtgattaaaattagactttcatatttgattttgctgagttaagcagttaaggcgaacgaaaatctgaaaaattcatataaacttttcacaaaaaaaaaaatcgttttcaggtccacttggggtgctaaaattttgatcatttcatatcactcaagtgagctgatcaatttgtgtaatcagcatcgaaggttataaaaccctgaaattttcagaataattttttatctttttttagttcttaatattatttgtgaggtatgcctgataagctcagtcagcctaatttgtaagggcagtaggtgaaacacgaaaaataaaatttaaaccaacatagttgtgggtaatttttcccatcaagaaaaaaagtatgcaaaagtacacttttctcctgttagacagaaagcatcgaacaagcactacttaagtatcaacatacaatcattattttcagtttttggaatacagaaaactttatagaaaacgcattcataattttttctcatttttgacagttctgatccaaaagtcggtccgcaaatttcgcactacgatttttatcatcaatataatctcttaacaaatattctaataaatatgaaaaagtttagaaccaacatattcctatatttcttaacattcaatttattggtatagctcataaaatatattaaattaatttaagaatactttaaagtaaaggaatgcgcaaccaaaaacaacaataaaagttattgtacagggtgcggaaaaaattcccgtccttttttaagttcattttttcatacccatttaacattgacaaacaaatttcttgataaaaacaaacaaaagatagtaataagccggaaaatcacaacaaatgttcgaaatttcccccattggccgagattcaagcatcataagcgcttccgaaaatttgcagtaatagtcgcaccccatttatgctgtttttaacgatgccaattattacca

SEQ ID NO: 36465 - DNA, 1151 bp, Heterodera glycines
taggtattttgcataacggatttcttttttatggccaccccctcgattagagtcccccgccccggccctacgtggaaaaagtaaagtttttttttttatattttaccatggtgcgtggagtcctttttgaattaaaccgaccaaaacgatttatttaaatgccctcttgaatcctatataatttttgtcacaagaaatagatgaatcatggtaccgcttggtaagcctaacattatgttagaatatcaaatttcgaaaaatttctaagatttccgaccagcacagtttcctgtttgctttttaattgccgatttcgatggtaatgctcttcaatgattaaattatttgtttaaattgaacctgaatttccgtgtgcgggtacaatttcttcaaccgttgcaacacttttgcctcatcacactcgtacaaattctagataagaaatacgattcaaattctgtataaattagacatttagaacacaattcttcaaccgattttttgggtaaattaaaggttgaaaaacccatcatttgctgactgctggtgtttttggcacagggacattttggcgacgccagttttatttagccataatttttttgtggccgaacaaattttttttttttaatttttgcaggataagagagacagttaagtgctttaaaatcataccaagtttgttatagttggttgacaaataaaaaaagttttatacgtttgcgccaaaatggccggaataaaagtggccggacccgttgctgaccgttttcaaatatttatgttcaaattgatttgaaaatataggtttgaaattataatgcatatggaaaatgctgcaccgaatgcattgggtccggcgctgaactgcttgctccccttgcggttgtcgtcatgtccttcgcctcttccgcctcatggcgcagcacatcgacaatggaaaagcgctgagcaggcgacggatcttgcacgggatcaggtgcatccatcatcggaatgtccagatcatcgtctagatccatggaaatgatgccttacaaattaagtagactgtcttgttgctaggcactaattctttctcttgctgatgaaaaattttttaggtaattaatttttccaactttaattttatgtccatgttatgtttggac

SEQ ID NO: 36466 - DNA, 491 bp, Heterodera glycines
tttgtaagatagtaaaaggacaaagcgatgagggccgtggaggttcgagtccgttgtgcaacatgaatatttttatttatttttgtccaaaaaatttaaaaaatagattttcggaaattattttggaagctttttgccaactaaattgaaagatcttggtatcattcaaaagctcttgatgaggagaagctttttctaagcaaatgttgaacagtttggtgagttagaaaaaatatatgggtgttctaaacttgtaatgaacttgagcatagacaataataatcagcatagaaaaatgaagaatttttttctctatcgatatgcaaaatttggtgtaaattgtatgaatagaaaaaaagttatatgtgccgaagtaaattcgggttttctctattaacagagataaataaatagtacaccaaaatgagagatgttttttctctgcattctctatttattggcacatgtctcgtttttttgaaacggtgtga

SEQ ID NO: 36467 - DNA, 526 bp, Heterodera glycines
tgaaaaccacattttacaacccatttttggccaattctttaaggcgggttttttttgttcaaacgcgattttctcgaaaaaaaagtgttgtgacattttacaatccgcggctcaaaatgtgcagaaaagatagagctttcgaatggtaccggtctcgttactcaactctcgatattcgcttgccaacaaacccgaaagcagttagcccccccgttatttttatatatagataactaggcgtcccggtagatggctgcgctttatagaaagccgagcctatcccgtcgagttgtagccagtaacggggtagatgcgtcaggttgttagtgcagtagcagctgacgaaagatgcgtgtctggatgttcgtgcagcagcagctaccggtaacagccaagcctagccgttcacccccaccccaccctacgcggcatgcaaaagaattgatcaggttcgtattgactcggtacactcgctcgtcgctccgcttcgctccgctcctcgctcgcgcacctcgaggggcagggc

SEQ ID NO: 36468 - DNA, 609 bp, Heterodera glycines
cacaattttatttttaaaacccctcaaataaatattaaatatttatgaagcatatgactaaattgttaaacctaatattttaatgagcatttcttaatattttttgaaattatagccaatggcagaatttacggaaaacttagaacagaagaatagaaggggtgccaaaggattttacgttgaccctgcccttgaattacggtttttgtccgcgggcgatcgaaacttcgaactgatcagacgataccgctttcctgatgaagaaattgatttcatttcaagtcttgtaaaggatgaccttcagccaaaacatggcaataaaggaaatccaattcctgttaaactacaggtttaagttggttaaagattttgactaattttggttaaaagggattttttaaataatttcacatgtctctattttagggaaattaattacagttcataaattttttttttaaattttgagttggccctataaaatcaaaatgatcattgagaaaaattattttataactgtttttaattggtttttgttagtttagcctaaattatttatcatagaaaaattttttggttggattttgactacttttgctaaaatggatt

SEQ ID NO: 36469 - DNA, 836 bp, Heterodera glycines
cctgcaggtcggtttttcatttgatcacttttttctgatcatttttccacccccaggccaaaaaagccgaaaattggcaatattaaatcgcctttgctctacacgataaaagtgattttagtgatttgagcagttacagttcgaaatgttcacttgtcaattatataccatttcttcggtattttttgttcatcatttactatacaatagacataaaaacaaaataatttttggtttgatgaaaaaaataattttaataatataaattaaaattaaaggttatcatgaaataggtttggtggagaaatattcttttaggagttgttttcaaaaatttttaggttgatttttataggaaatagcattttgatcgttttcgcttgaaaaaaatttaaccaaaatgccggaagtaattattagggatgatatttttatgcaaaagcatattttttcctgagctccccgtggattttggcagtttttagggcctaaaatatcatcctagtaattatattcgagtcaggtactagattcatgagtcatgattagggttataaattatatggattaacatatttttctgcgcatatgctatgaagaaaggggctcaaaaatagcatttgccaattttgcgtttttagtccatattttggccatttttggcaaattttcataagaaaaatgcaaaaaagcgaaaaatacacccctaaagatcgacttttttggaaatttaaaaaaaaaacacccctaaaaagagaattttttcgaaatttcggaaatttttttagttattttgtccacttccgaaaattttcgctgaaaacagaatgagatta

SEQ ID NO: 36470 - DNA, 751 bp, Heterodera glycines
  unsure (1)..(751): unsure at all n locations
ttttttattggattatttttaattgttnaaattgaaaaagttggagcagaaaagaaaaaattggaggaaaaaacatttgacgaaatatttggagaaaaatgggaacaaaaagaagaagaaaatggaaataaccaaaataaaaatgaacagaaaaagcgagaaattattgaaaaattcaataaaattaaagagaaaattaagcaaaaagggggaaaatattcaaaaaacgaatgggataaaattaattcgaaaatagcgaaaacattggggacaaatcgccaatacatttacgaatggatcaaagaattacgattgtacaaatggcacaacaaattgaaaacggatgaacaaaaaattgaatgtgtgcaaaaatttattacaatgaaaaatgaatataaacaaaaaggaagaaaatactcgaaaaaacaatggaacaaaaattatgcagaaatgtgaataataaaataaaatcatttagccaaaccaaaattttgttttatttattgatttttattttttttatacgatagtgtccaatcttctagtgtccacttttcggtgtccaattttctggtgtccaattttccggtgtccaatttaccggtgtccaatttaccgggagcgtgtcgatatgcgctgccggaaaaatctgtcgaaaattcgcagacggaacagctttggcttcctccatgaattgctttacaaacgcagcaaaaagattccattgataaatagtatagggaatttttca

SEQ ID NO: 36471 - DNA, 974 bp, Heterodera glycines
aaaacgttcaacatcatcaaggttttgaatcgatactgagcggggcacaactgggagcggattgatgcgaaagctgaaggtgttttctggtaaatctgctagttgtgtaaagcagctgcaacaggctctgtcggcatcacttcttttgcagtagtattaaatgtcgtttgtttggtaattgttttgttcgcttcttcaagatgaggtggagatggttgtatgactggtggctttacaattgttctgttcgattcttcataccgaggcggtgactcaagtatcggtgaaggttttggtggtgttttttgtttaggaggaggtggtggtggttttggaaccgttttcgcgggctttagcttagacgcgggcgtagtctttacgggagaaggctgttttactgctggtggaggagaactaggtttgaccagcggaggcggtgtttttgtcctggtagtagtggtagtagtagtagtggtaggaggagaagccgttttagatggaggaggagaaggaggagaagccgttttagctggaggaggaggagaagccgttttagccggaggaggaggagaagcggttttagctggaggaggagaaggaggagaaggcgttttagctggaggaggagaaggaggagaaggcgttttagctggaggaggaggagaaggcgttttagctggaggaggagaaaccgttttagctggagtgggtgttgttactgatttagcagtaggtgttggaggagcaacaggagcaatcggttgagacggtttagaaacagctgctgtaggggttgctggtataggaggagcttgcgacggtggcttagctggagtttttgctggtttttcgggtgttttttgtggtttttgcagctttgtctcgtcatacaacggtggcgagtcaagcagaattggtgtagccggggctgttttggctggtttttcggggttttttgtgtttttgcagctttg

SEQ ID NO: 36472 - DNA, 354 bp, Heterodera glycines
cagtgtagttttggggtgtcccggtcactaggaaggacttttatgatcaagttggtgtaggagacttttttgatcagcacctaaagttataccagcatgaattagtatttcaaatttttaaataactagaagatagtttttcaggtttgagtcaagacttttttggggcactgtatttgtcttgtttgggaaatattaaaataataaatccaattataattatggtcagcaaatctaattaataaattaaaataattgtattattaattaattaaaatcatttattccgtactgaaatgacccgcctcttctgatcaccacacatttgcctttttgtcacttcgacacagcacc

SEQ ID NO: 36473 - DNA, 954 bp, Heterodera glycines
  unsure (1)..(954): unsure at all n locations
cctagaggagtgtcgttcaacctccgcccctttttgctatggtgcgctcttttgccgaaaaacgtacgatcnncaatgatttttttgaaaagcgaaacttctgactcaaaacacctcaaaccctagagaagtgtcgttcaacctccgccatttttgctatggtgcgctcttttgccgaaaacgtacgatcccaatgatttttttgaaaagcgaaacttctgactcaaaacacctcaaaccctagagaagtgtcgttcaaactacgccatttttgctatggtgcgctcttttgccgaaaacgtacgatcccaacgagcttttagaaaagcgaaacttctgactcaaaacacctcaaaccctagagaagtgtcgttcaacctccgccatttttgctatggtgcactattttgccgaaaaaggacgatcccaacgagctttttgaaaagcgaaacttctgactcaaaacacctcaaaccctagagaagtgtcgttcaaactccgccatttttgctatggtgcactcttttgccgaaaacgtacgatcccaacgagctttttgaaaagcgaaacttctgactcaaaacacctcaaaccctagagaagtgtcgttcaaactccgccatttttgctatggtgcactcatttgccgaaaacgtacgatcccaatgatttttttgaaaagcgaaacttctgactcaaaacacctcaaaccctagagaagtgtcgttcaaactccgccatttttgctatggtgcactcttttgccgaaaacgtacgatcccaaagatttttttgaaaagcgaaacttctgactcaaaacacctcaaaccctagagaagtgtcgttcaaactacgccatttttgctatggtgcgctcttttgccgaaaacgtacgatcccaatgatttttttgaaaggccggaacttctgactcaaaacacctcaaaccctaga

SEQ ID NO: 36474 - DNA, 799 bp, Heterodera glycines
aggaaggatctaaatttttatatgtttattcatttttaaatattaaataaatttttgaaaatttcgctttttcaaaacgttccaaaactgttggccattccgatattggcacagttccctctgatgcagcgttggcatccctcgatactgtacacacacttttgctcacaactgtatttgacacagtctttgcagcgggcaacaagcgaatggcctccataaggcatgaaaaggtcgaaacatgcctgtaattatagactattttcacataaaattagcatcaaaattatggagtatgttaagccgtctgttttttaaaattgtccttttttgacataatttttcaatttttttcctaggtgcccttaacggcaaggccgggccaaaaaatccaaataaggatgattttttcgacaaactttgtttccaaaccctgccatagctcctaaattttccacggcggagtctttggattggtatggattaagaacccggaaaatgtgtcattattcaaataaaatttacaatcttaaatcgaaatttcaatgtaaaagcaataactataatccgaattcagtttggaaaaaattgctataataaatttattaattacttttaaattttagtttttcttttcaacatgccttcgatttaaagtcatttgcctgcagtttgatgacaaattctgaactttggacaaataatatgaggataataatggtgattagtagtttcattagagcaaccaaatctattaggtctaataaatttataatttaattaataaaatttctttttt

SEQ ID NO: 36475 - DNA, 853 bp, Heterodera glycines
cctgctgccgtcagcttttactgctgctcacaggttaattcgacttgttaatcccatttttctggatttgctgttcaattttggattttggtttaatttgcagatcacttttttaaacaaaaatataattacaaaaaattcgcaattaatgtgggacgtggaaataatagttctctcatagagcagaaattttattttataaaatcataacaaattcactaataaatttgagagattatttcataatatagttccctaacttttcactgagttaccggttttatctcttatttgttagttttaaattaagttttggccgcaaaacaatgccttgggaaaccattcaatttcaagagatattatttaaaccaaacccaaattgtttattcgactaaaccaaaagcccttctgaaaaagtacagttttttgaataatacaaaatgaaatacaatttcaaaatttgcatgggtagggcttgcgtcggtatataccgtatttcttgaattatagtcccccccccccagaaaattagagtccccctctgacataaaacccccttttgagggggggggggggggggtctgtgtgtaactatgttgcacgtggttccttggaaattcctctggaattactccctgaatatcttctattttcttatcactcacaaatcactgtgggaaaattaagatgatactgatgattagcgttcttgttcgattttggcgctagtgcgatatttattctcatggtacttggaaagtactcaagaagtatttcgatttttgtaaaattacaccatcagctgatataaagaaaagcattcttgtctgtccttttccaattatattgccca

SEQ ID NO: 36476 - DNA, 923 bp, Heterodera glycines
  unsure (1)..(923): unsure at all n locations
ctgtactttaattctgcgttggatttttgctccccataattgtttgagtaccccaaacggacacttgaaaaaatcgatttttttgttttcggggcagtccccccgaaccgatgcgcccagatttatggggagaccgaatccttcgggaatagcttccctatagcctgtactttaattctgcgttggatttttgctccccataattgtttgagtaccccaaacggacacttgaaaaaatcgatttttttgttttcggggcagtccccccgagccgatgcgcccagatttatggggagaccgaatccttccggaatagcttccctatagcctgtactttaattctgcgttggatttttgctccccataattgtttgagtaccccaaacggacacttgaaaaaatcgatttttttgttttcggggcagtccccccgagccgatgcgcccagatttatggggagaccgaatccttccggaatagcttccctatagcctgtactttaattctgcgttggatttttgctcctcataattgtttgagtaccccaaacggacacttgaaaaaatcgatttttttgttttcggggcagtccccccgaaccgatgcgcccagatttatggggagaccgaatccttccggaatagcttccctatagcctgtactttaattctgcgttggatttttgctccccataattgtttgagtaccccaaacggacacttgaaaaaatcgatttttttgttttcggtgcagtccccccgaaccgatgcgcccagatttatggggagaccgaatccttcgggaatagcttccctatagcctgtactttaattctgcgtgggaatttttgctccccatnaatgtttgagtaccccaaacggacacttgaaaagatcgatttttttgtttcataaatatttttt

SEQ ID NO: 36477 - DNA, 885 bp, Heterodera glycines
  unsure (1)..(885): unsure at all n locations
tttggaatattgttcaattttcccggacaaacccgcgtctgaaaaattccaaggaagtattgggtttcctgatataaaatttcaatggccgactcagtccacaaggatagaaaaaagaaatagggatttttggaaatatttttcaaattttcccggacaaacccgttctggaaaattccaaggaagtattgggttcactgctatataatttcaagggccgactcagtccacaaggatcgaaaaaagagatttggatttttggaaatatttttcaaattttcacggacaaacccgtactggaaaattccaagaaagtattgggtttcctgatatataatttcaagggccgactcagtccacaaggatagaaaaagaaatagggatttttggaaatatttttcaaattttcacggacaaacccgttctggaaaattccaagaaagtattgggttctctgatatataatttcaagggtcgactcagtctacaaggatcgaaaaaaatgattgggatttttggaaatattgttcaaattttcccggacaaacccgttctggaaaactccaaggaagtattgggttcactgctatataatttcaagggccgactcagtccacaaggatcgaaaaaaatgattgggatttttggaaatatttttcaaattttcacggacaaacccgtactggaaaattccaaggaagtattgggttcactgatatataatttcaagggccgactcagtccacaaggatcgaaaaaaatgattgggatttttggaaatattgttcaaattttcacanacaaacccgtactggaaaattcaaggaagtattgggttcctgatatataatttcagggccgactcagtccacaaggatcgaaaaa

SEQ ID NO: 36478 - DNA, 748 bp, Heterodera glycines
aaggacattttgtaatcacgcatccaaaactctaaatcgcattttattaaacaaaatcaagcattgcaacatatttctcgccgccaactatttttctgagcaattgcggcttagaaatgagaaatttatacatttccgaattttgttgaaaacataagcaatttgtaaattataagtaaatgaagaatatttccgtctggaccaattaattaattggcaattcacagtttacccactcaattaatgtgaagggagcgagacaagcacaaaagaaaataatggagatcaatgagcaaagaaaagggaaaagcattgaaattcaaacgtagaaatccaagcatttttaattttcccatcaatcagcgcatttccgctacggatgtccccttgggcaaatggacttcgccaattcgtcccaacaactaaaatgtctccatcacacctttgccctaatgaattaattaggcaattaattagcaaaataattccccctaattacctttataatcacttcgccacttggttcgattacgctggtcaaaaagcgatttgaactcgatgaaatatgaatggatttgttttatcccccacaattttatcctttccgttggattccattcgactggcggtgttcaccgaatccccaaaaaggcaatagcgcggcatcgtcagaccgacgacgccgccgactgctggccctgaaaatgccaatttgggagggaatgccaaattgaaagggaagggaggg

SEQ ID NO: 36479 - DNA, 923 bp, Heterodera glycines
ttattctctatgccagagaaatgtctatctcttttttgcgagaaattttgtaccatacaaatgttctcagcatgggcagaggggcgcggagagcaatggccattctattctacagggaatttttaaatttattctctatgccagaaaaatggctatctcttttttgcgagaaattttgtaccatacaaatgttcccagcatgggcagaggggcgcggagagcaatggccattctattctacagggaatttttaaatttattctctatgccagaaaaatggctatctcttttttgcgagaaattttgtaccatacaaatgttcccagcatgggcagaggggcgcggagagcaatgaccattctattctacagggaatttttaaatttattctctatgccagaaaaatggctatctcttttttgcgagaaattttgtaccatacaaatgttcccagcatgggcagaggggcgcggagagcaatggccattctattctacagggaatttttaaatttattctctatgccagaaaaatggctatctcttttttgcgagaaattttgtaccatacaaatgttcccagcatgggcagaggggcgcggagagcaatggcaattctattctacagggaatttttaaatttattctctatgccagaaaaatggctatctcttttttgcgagaaattttgtaccatacaaatgttcccagcatgggcagaggggcgcggagagcaatggccattctattctacagggaatttttaaatttattctctatgccagaaaaatggctatctcttttttgcgagaaattttgtaccatacaaatgttcccagcatgggcagaggggcgcggagagcaatggccattctattctacagggaatttttaaatttattctctatgccagaaaaatggcta

SEQ ID NO: 36480 - DNA, 940 bp, Heterodera glycines
  unsure (1)..(940): unsure at all n locations
tttgtctaatcagaacgactgtganaaaccataaattaaactgaacagtttctggttcggctcatttctttgtaaccacacaacgggtggaaaaccagaaattaaattgaacagtttctggtttggctcaccacttcccctttgtctactcagaacaactgtggaaaatcagaaattaaactgatttacatggttccgatcgcagatgtatcatattggtaactttatggttgtttttctggtcatgtttctggttttgctcttttcttttgtctaatcataacgactgtggaaaccagaaattaaactgaacagtttctggttcggctcatttctttgttaaccacaacaacggtggaaaaccagaaattaaactgaacagtttctggtttggctcatttcttttgtctaatcagaacaactgtggaaaaccagaaattaaactgaacatggtttcgtctcatttgttttgtattggtaactttatggttgtttttctggtcatgtttctggttttgtcttttcttttgtctaatcataacaacggtggaaaaccagaaattaatgaacagtttctggttaggctcatttctttgtctaaccagaacaacggtggaaaaccagaaattaaactgaacagtttctggtttggctcatttcttttgtctaatcagaacaactgtggaaaaccagaaattaaactgaacatggtttcgtctcatttgtttagtattggtaactttatggttgtttttctggtcatgtttctggttttgtcttttcttttgtctaatcataacaactgtggaaaaccagaaattaaactgaacagtttctggttaggctcattctttgtctaaccagaacaacggtggaaaccagaaattaaactgaacagtttcgggtttggctcatttcttttgtctaatcagaacaactg

SEQ ID NO: 36481 - DNA, 989 bp, Heterodera glycines
  unsure (1)..(989): unsure at all n locations
ataacccctaaagacatctttcttggaagaattnttgtgaaaaaaaattttccactcaaaaatcctggtcacccccctttggtcccgaatctcaaaatcacttttatttttataaaaattcttaaaaaagtgataaaaatgccaaataaaatttatataatagagcaaaaaactgcggatttttgtagtattttacttttctcaaatagcttttcagaaccgagttctgaatttttttctggaaattcgaatttttccagaatttctggaataacttttttcatatttatgctagaaaatccaaataaaacccataaaattctcctgatttttctctatttttaaggctttattcctgtaaaattggtcaacacttaggctagatatgaattttcgaatattcgaccaaatttctgagggccaaaaaattgcaaaatattttcgaatttttaaaaaattctaaaaattatgaaacgaaaaacaaaggtcatattcgtaatcagcatttcaaaataccacagaaaaaaatttttcaccccccttttcaacccaaaaaaaattttcaaaaatttctagggggcctagctcgaaaatttttgaaaattttcgaacatgtagtacaccattcgatagcatttaaaaagctctacaattttgctctaaggccatttttggctaaaaccaacccccgacgagttatgggcccgggactcaaatgtcccgcttaggccaaaaaatttttctatttcctggaaaaaatcgaaaattttctaaaaacatcactaatcgatagagctcaaaaaacgatgttttggaagtggtcttcgttttccctggaaaaatcgttaaaaaatcataaaattcaaaaaccgaaaaactgaattttaggcctagctcgaaaaatttgaaaattttcaaaattttaaaatttgggaaaatcgagctcattgagctctacaataagtccgctggcgaccccctgctccgag

SEQ ID NO: 36482 - DNA, 870 bp, Heterodera glycines
  unsure (1)..(870): unsure at all n locations
gctttttccaaaaaaattntcgggaacaggggtcttttaggggccgataggcaccgccggggaaaatttttggattttttaatgaatttgttaaaaaaatttcgaaaatttgcgaccccccactcgctgcgaaccccctcccccacctcttttacaccggcccccccccttcgctgcgaacccgccccccgctcgctggccccctttgcgagcgagggggggggggggagggggtccgaccccccccttaaaaaatgtattttatgaatatatatttaaaaatggattgaaaaaaagttacgcagtgccaaatgccgaggacggctgcggcttctcactgctgcaactttcctcctcttcttggccggccgagtgccgcccccgcggcgactttgacttttctctctgtccgccgtcggcggtgcttttcgtttttggcaagccgacgacagtgccggcatcacccgcccttttgtgatgtgacaaagtggaggagaacccgcgatttgttggttgacctgaatttttggtttaagaaaagcaaatttcctttcctttattgccctgtcctctcaaaagcggtcccattaattagtcttgggggagttatttggcatttaccgaatttaattgcacttgccaccccttggggcttgggtggtacgtaccccttgaccgctcggactgttccatggactcacccgtcatttcgtcactgtccatcgattgagcatggtgtgcacagggcgccgtcgttgctgaggttgccgtcgtcgtcgtcgtagacgttgcgactgatgacagtgacgtgttgtcgccgtttccggacagaaagttgctgctgaaaaacggcaccgccagcaccaacaa

SEQ ID NO: 36483 - DNA, 590 bp, Heterodera glycines
gcccgcccctccctttctctttccattcccacggctccttctgtaaccgatgaagcagcttcacccttttgaagctgcaaaatcgttgtcgacaaatttggacgaaagatgaagctgatcaatcaaatgaacagttcgttcgccgattttgccgattaaccaaatggagttaattacactccgcggcagcagacacccgtctcccctcccccccccccccggaattatcacttattagtctctgctatcctcctccaatcatctcatccttcatcccccccccgcttccttaaccattctatttcatcatttggcattcacaagaatatcgccacctctcccccgccccctttctccttttctcccccttcgtttacccccccccctctccctccctcacccttttcgcccaacctttcatgatttcccattttgtcaaggccatttcccatcagccccttcgcccattcattattccgcaatttatgggtgtgaagattgattggagaaaacgttcgaacgaataatgggcgagaatgggaaaagcagaaaaagaaaggaccaacagcacaacaaacagtcgcgacgat

SEQ ID NO: 36484 - DNA, 943 bp, Heterodera glycines
attatggctattttaaaattaaaaaataataattataccatttatataaattaggtccgctcacttcgatataaatgccctagcggacaaccacggcacttccttggaacacaattggcggcgaaaatggatcatattggttcttgtttagcacctagccaaattgaaaaaaaaatgtagtgcacataatatatggacattaattatttgaggaaaaaaacaataattaccggcaaaatataactgccaccgagtggcctgagggaaaatcggcagtaataatggcaaccaaattaaaaacaattaattatgctgagccacaaccgaccgattaatgtcctgagtgcgagacaaaatctgatcaacttcagtatcattgcgcaatttttcggccaactctgtcaagttgacaccggctgccaacagcgcagtgatattgacgccaattgggccttcaatttcgacaccttttaattaaaaaataattaattaaaatattgacgccaattaggccctcaatttcgacaccttttaattaaaaaataattaattaaaatattgacgccaattaggccctcaatttcgacaccttttaaattaattaaatatttatattttatctattgctaatttgattgagcaattttaaattgtgggttccaattaaaattggcattaatccttcaaattgtaattaataatttaaaatgcaccttcaaattcgctggcattgaaactttcaattgcactaggcacatattcggaacagatgccaggaagatgcaggccaacctgaaaatttaatgaatttaggaaaaaatttacccgttcactcattaatgtaatgttctctgcctttgcccaaatttaaaaaaaggggggcgggaaccaaaaatatttttaaggaaaatctgatcttcagggaaatctgtggggtaaaaat

SEQ ID NO: 36485 - DNA, 1065 bp, Heterodera glycines
  unsure (1)..(1065): unsure at all n locations
aaaaactccaaaataggtaataataggtattataaaactcttcttagacacccaaaaccaaggggaaaatgcttttttcctgcttatctgtgcgtattaaatgcgcaaaattttaggtatttaactaaaaatcgcatccctaataattaaataacaacttaaaggttgatttccgatgaaacaatttttttcataagaaaaagttgttttgtctttctctactatacataaacggcaatttatttgtcactcacttttcatgtacattgatcactccgtcatcacaatgctccattccaatcaacaaatttggcaaaaagggatcgctttgaatttgtcgatatggtccggcaaaaacgatgtgcagccaatttgggacattgtggcccagcaaatttggccaatttttgcggcacacattcgccagttggacatcccaaatggtgatttggacaatttgcgtcatctgatttcgccgacaattctcactgatctcgatcagttgatttcaatcaattctggccatttggtgcccgatatggatggcgatgatgggccatatgcaactgctgagcaagcgttgtccaaatggttgcacacgccgaccatcagcgggcaaccgaagcgattgtgttgccgattcactagtggttttgattcagaagcaaaagaatggatcaacgatttcaaggaggtcagtgcagatcgccccacatttcggttggagtcaaatgggcgccaaactgtttgggggctataactccgttcataatttatcgaattgaataattttaatatcattagatagccctaagtgttctatatttgcatacaaaaatttcgaaaaattagttaagcttcaaaaaaattacggtatagaaaactagttttttgaactttttggtcctcaaaaattttcggactttcgtagacaaatggagaacattatttactggctatcggtgatattanaattattcaattcggtcaactatgaaaggagttattccgcaaaaaccggactggcgcccatctggtcgactcgcattcgactggtccgccatg

SEQ ID NO: 36486 - DNA, 867 bp, Heterodera glycines
  unsure (1)..(867): unsure at all n locations
gggacattttgactgattttagcttgtcgttataatgacgcggggacatnnngactgaggggagcttgctgggacattatgacgcggggacattatgacgcggggacattatgacgcagggacattttgacgggcagcggatctctagtgattgcattgcgaaattggcaaaaacagtcgtgataaaaaaaattaatttaaaattagcacaaatttgcttttgccctatgatatcaccgcgacatcgatatggaactgctgctgaaatggagatttttgatgacagcaaggttgggactggaaggcaaattcgggaatggtccaactctcgaattcactgaaattttgaaaagaactaaaatctaagattcgtgttcagtaaagttcggtaaaaaaaattttccgggaacggaaacgagaaaacgaaaatgaacggagcgggattcccgtattattttttaaatgaaaatattatattttaaacatttttaaaaattgtttcaatttaaattattaaatattggcttttattttgggcaaaaaataacttaaaatttaataaattgaattttctggactgatgtgtttaaaaaataatccggtaccaatattttcaatggtaccggaaaaattggtccgcaaatgtctggacgcggttggatttggtttacaaagaaaaaagttatatccaaaaacatgctggcaccgaaacgcgagttgacccaatttttgtgtgcctttgtggaatatctatttcctgtaaaaactttcaaccccaacaaaatccacgaatttctttaaatttaattttaggttttttccatttgtatgcttttgcattgtccaaaatnttttacgattataaaa

SEQ ID NO: 36487 - DNA, 668 bp, Heterodera glycines
cctatctttttggtatcattagaaagcacaaagtcttcttctgctaagatctataaaatctcagcgtttaggcaattacctaaaaagatttgataattaactaattgttgattattttggtttgttactttctttaaatgttccaattctcttgttttctcgtattattacattattcagactttgtgctttcgaatgataccaaaaagatagggtttgttcgagcatgaacaaagttattgtataaaatcaggtaatgtcaattgattagactcataaaatacctttggactcataaaactcgattggactcataaagtgcattagagcccgcttttctccgtgccaataaacacatttgggacaaaggcattgatttgcgcttgaatgtgtggacgcgtaacaacaacaatattgtgcagccactttggagtgtttttgcccgtcaaatttggccaatttttgcgccaaacattcgtcatttgaattttgccaagggtcgtcaacttgaaaatttgcttcgctacacttcgcctacaattctgtccggcctcgacattatttcaattgattccgaagatttgttgcccgattcaattggtgatgatggtccaagtgcacattctgctggccaaattctgtccaaatggttgaacattccaacaaaa

SEQ ID NO: 36488 - DNA, 1173 bp, Heterodera glycines
ctttctgcctcttttttagatgtctccagcaaaattgctgttcctttttctgttttttgaaccatttttaaaaaatttattattatctttttttctcttttatacattaagcagatataaattcatcattaaagctaggtcttggggagggtccggggcgggataaatattctttaagcatttccttaactttttcggccaattccccgatcccgaggtcagattgtgtataggcgttacggtacgcagtaccgacgtcttgtctatactgcttaacaatttcaaatgccccctttgcttcgtcagccaattctcgtcatattaacacatcttttcggtccaaacacttgtccatttcttttctaatgtgtcctattttctttttttcttcgttaattttttcggaaattccttgtacttttctcaccccttctaatagcctaccgaaccatgttttcatactcggtgcctcaggatgacgaactttaattttttctgcctccgtaattgccctatgagatgcagccgcgaaatctcgggcttcagtatttaatctgagcgtatcccgaaatgctttttcaatggtttttctcgcagcattcaattgctgtttttcttcattagataggcaacaacaatcgctatttgcttggccgattgcgaaaccaaaaagtattaagaaaactgttttattcattttattttatttattttttgtcggatttcttttatatttttatttattgtgcctaggtacttttagtaattcgggattttttattattttatataatttaaaaatctcttcctttcgggaggtatccttttcaaaatacttttcatttattttttaattttagaattttatatagataggtggtagttttatttttttaattgtcttattttcagcttggtttatacataatatgatttttgtccctctgatttcaacccttggttttattgtttctgttttttttgttttttctacatcataattattttcattttttattgtaattttttctttaggaggccgtcctctttgtttttttattttttcttcagacatttttattagagaatgaataataaataaaataaaactttatttatactttatggaaagataccaaaaacaaaataactttttaaatacaaaagaacaaa

SEQ ID NO: 36489 - DNA, 970 bp, Heterodera glycines
  unsure (1)..(970): unsure at all n locations
atagatcaatcttatgtgattggggacaccngcttgaaatggcgaggcgaatggtgcgtttgtctctgatgggaaacgctccgtccgcttggaaattcacccggagagtcctcctaaggggggaggagggtgcgttttgggcggcattttcccgcgttttgccgttcgtcgctcctcacaaatcccaattgttcgacgactgtccgtccaatttgcgcggggcgtcgcccatcggacgaactttgttcttgcgcgccttggaaaggttaaaggacagcgaatggccgcgcttctcccaattcaaaaagcacaccgacgaaaaaagtgtcggggcgccaaacgacggattgtctcggcacagtcacttcgccaatgccctcgcgcgggtcgacgtcaaacgaaaggcgcgagtcctcccagtcctggtgcaggttcaagtccacttcctgtcccaaaacatcgaacggagtgagtcaccccaaatgatcagtgatcaatcattggtcaatcaccgccgaatgggcgtgccaaacgacgcggtcaatgaccacggaagtggtgacgacgatggacgaatgttcggccgactctttacccaaatggttatttcgtaatgccatcaattagtgtttgacctcggacggggggccgttggttcgggtcgtaattggcgaagagattggccacaatttgggactgggcatctgcaaaacttcggcattttttggccattaaaaaggggtcgaaacggacggatttggcgacttcgctgctgcttcgactgactggcgaacctttgggcagccgaagaggggaaaaaggggacgaaactgacaaagggcgaaataagcctttaaatgggagaaaacagcgcanaccaaaggaaagtgccgaaaaggagcagcaaaaatggaaggcgaaacggagacggcattttcgggtcgaaatttggcatttcaaacgaatttta

SEQ ID NO: 36490 - DNA, 816 bp, Heterodera glycines
  unsure (1)..(816): unsure at all n locations
ttaaaccntttttgattgcatattgaattatatcaggtccttcaaatttggtatttggactgtagctcttcctgggcactacggcgggtgtttagaatattttttaaatgtaaatccgatggctttagttcaaccgtttagaatgagatggagttaatttaaaattagaaaatgaaatatgaaatttattataaatactaactcgaaaatgcaggaaaacagtgaaagatttagaaatacttcagtgtcgaaatttctttgtgtcgaaaatgtagtgtcgaaattacttagtgtcgaaaatactcagtgtcgaatttacccagtgtcgaaattacatagcgccgcctgcgctagttattattattttttaaattttttggcgtttttgttttatatattttttaattttttggcgttttgtttaaaattttttctttctttcttttccttctctatttctatcgccaaatggctttcatctctctgagcatgtcatcgtttttgaccaatcattaaattccacgctttttgctccattctccaccgattcatttcattttcaaagatttctgctgacattgttcattttattcgatttgtttttataccatcttgtctagtgctcggcatttttgaaagaagcggcggggctggatccagggaaaatccaggcctgggtccatgtccaggtcgggctctaatttgaacccctaaaattccctttggcttttaaaattactttaccaattattctacataatttgaaatttttaggtacttttaaaactactttatcccattttcctgcactatttg

SEQ ID NO: 36491 - DNA, 229 bp, Heterodera glycines
tcttgatccgttcgaatatttaagagcttcctgttgtcactcgaatttttgaattttttgtaatatttggctagatgcacgattttggatttagttttgatttaatatttagagaaaaaaaaaatttttttaaattaaaaatgatgcttttagcttttgagccaatcattagttgatgtaattttatttgcagaataataatcataacttacgctcaaagcttaatcaa

SEQ ID NO: 36492 - DNA, 1257 bp, Heterodera glycines
  unsure (1)..(1257): unsure at all n locations
ttcccacttcagtacncaggtgaataccacgtcagggctttacctgagcgcagggtggccagcagacttattgtagagtttaatgagctcgatttttccaaattttaaaatttcgaaaattttcaaaatttttcgagttaggcctaaaaaacggttttcgggtttttgaattttaggattttttaacgatttttcccagagaaacggagaccacttccaaaacatagtttttcgagctctatcgactggtatttttttcggaaaaatttcgattttttcccggaaatagaaaaaatttttggcctaagcgggacatttgagtcccggctccataactcgttaggggttagttttatcgaaaaaacgccttagggcaaaattgtagagctttttaaatgctatcgaatggtgtactacatgttcgaaaattttcaaaatttttcgagctaggccccctagaaattttcggaaattttttttgggttgaaaatgtgggtcaaaaatatttttctggggtattttgatgtgctgagcacgaatctgatgttcattttcagtttaggaaattttggaattttttaaaaattcgaaaatatttttcaattttttaacccttgggattttgggttaatatttgaaaattcataactaacctcagggtaagtcaattttaatacaacaaagctttaaaaatagcaaaaaatcaggagaattttatggcttttatttagattctctatcatgaatataaaaaaagttattccagaagttctagaaaatttcgaattttcagaaaaaaattctgaacacggttctgaaaagttattttggaaaagtaaaataatacaaaaatccgcaattttttgctctattttataaattttattttagctttttatcacttttttgaaaaaagttatagaaataaaagtgattttgggaatcgggaccaaaggggtgagtataggatttttgagttgaaaaattttttcaccaaaaatcttcaaaaaacatgtcattagggctattttatgacgctgatcacgaatacgtgatcagattttacttttgacatcgttaagacctcagaatccctgtgtgattggggattctgaggcatcattttgaagggggaggnnccannttctaancctnnctntntacattatttttcaaagatttttttcgtntttttcaattttattcatttacctagatggtgagttaataaataaaaaattatattttatttaattt

SEQ ID NO: 36493 - DNA, 941 bp, Heterodera glycines
  unsure (1)..(941): unsure at all n locations
attattgcatcattaaaattattttacgttgccatgcaannaatcaataaacaattcatgatntaaaaataaagaatattattttttgcaaattttttttatactgtaaacaaatgatgaatattttaaaatctttgggattgataattctttggatatttccatttttttatgagctcctagggacttgaaaagtaaaaaaaaaacttagcttaaaattatgtctatcaaattgagaaattagcgaaaattatcgaatttgtttaacgaaattggattgtttttaacttggtttgaagctgctaggatggatttctatatatttttttcttatttcgcgatttatatacctatttccataaaaataagaaaaaaacgacaatttcgcttttcagtttgatttttcgctaaaatgagtaaattttaagctatgttatgttttttccttctaaaatgatttttaataccatttttcgccatttttgaagttttactgtgcgtttagcatatttaagaaattttgaaaaattataccctcaatttggaaaaatctgtccatttttttgccattttatttccatatttcgcgatttttggtccatatttttaccagccctagttataacttataagattctcttttcattatttcttcaatatgtttggcaagccataggtcgagtggacgtaagcgcacaaggtgattcgattagcattgattaaatgggtgctccccttaatgggtatacattttttctggtctccagtcaccgctctttacaatgagacgacctgttcggagtgtccgttcacagtcattccggtggatgagctgcccgtgctgaacatcagcgagtcggaaggagggaatgagtgccaatttgtggacccggccgcctctaacgccttctacttcctctactactacgacggctggacaa

SEQ ID NO: 36494 - DNA, 909 bp, Heterodera glycines
aattatcgaataaaatgacagcagttttattagttttttaagatccatggtctattcaatgatatatccgaaaatgatcataattatcgcagcattcattgacttgctttgttgcccaaatagcgcttcagcgcactttcggtgccaaattgccacaggtgacgaagcgttttggcaaaaacgacacgaaatgcgtctgattggccaacactgccataaatgtgttccatagacagccaaacggtcggctcatcgttgtcccgggcgcgggatgcgatggcctgaagttgtggccaggccgggtcatttggctcaactgcttgtcctttctggtcggtgccataacagtagcggcaccatagtgcgcaaacctggaaaaatgttggaaaagtattagtaaatttgcaaaggtcagcttcttaatggccttatttaatatctaacttttggccctttatctaaatgtggttagatctgatcaaatcattatcattaagtatctacaggttttttttactatttttctcaaaaaattaaataaaatatttaattaatattattttatttattaaattcttcttaacaatttgattggtccaaagactagatctatcttgaaaaagttaatctcagaaattctcaattttttttaccaatgccaatccgtcaatgctttgtccagttttaaggcaatactcaatggtgggcacaataaatttgggctgccgatttgtgccatcaaagcacagtcgtcgaattgtgtcaccgttttttgggttaccaaatcgttgttgaatctgcttacagtagtcgtccaaatcaatgcccggcaccggcggtacggtcggcagaatttcttcggtcttgaaaagggaatcaatattaattaattgtcccaatttatactct

SEQ ID NO: 36495 - DNA, 949 bp, Heterodera glycines
  unsure (1)..(949): unsure at all n locations
cgggctgggtgagattaactcggaggactcggcaataaattttagtagaaatgggttttaccagaggatgagggccccgaaataattacncaaaggggcatttaaaacaaatatctttattgaaaacgcttgtgaatttaacattttttattgtgatcaagtgaaatggtgcgcaaataaattcgaaggatttaaatatgttttcgtttacatactggtggttgcggctttaaggctcgcaaaaaattcatcgagtgttttgtcaatgtcaccaagatcatctttcttttcttcttccgtcttcacttcaacagtgttctgttccacagcgggtgccgtgacgggcttctcttgtacaggggctggttgctgctcttgtggctgcttgtcgacaactgccacttcaaccgtcttcttttgatcatctcccaccggttcagagagcagaatgtcactgatcactttcatcgcagttttggcttttttcaaacgggccccgtcctgcacagtgctgtccgcaatcagtccggcctccaccaattcgagcgcagcttttgcctttcgcttgaggtcccgttcttcgtccacgtgttgaattagcggaatttcacacgactcagagggcaggtcgccatatggaaggttgaacacgcgcgacttgtttttcagtcggaagaagcagtgacctggcaattcgtagaccacatcgaatggcacgaattggactttgtcgatgcgtgtgcaccaaatcgtgaccccctccttcgtaaccattgtgtcgacctccacttcagttgccttacatgagcggcagcggccactctcgtcaaacggcaggaaccgtggagtggacagacgggggccgctaatcgtcaggcccgatgttgtcacggtaatttccgcttcgccaagaatttgtcggagcaagccccgcttgtcgctcatgttg

SEQ ID NO: 36496 - DNA, 920 bp, Heterodera glycines
taaatattatatataatattataaaaatgacttttcattttcttgttttaatgaatcccttttaaatttagatggctcaattgaaaaaagcacggcacgaatatctggagctggtgaaagtgtttatggacgaattggaagaggcggatttgtttgaagaacaaaatgtggcaagagtgtgcatacacgaggccgggcacaccctcattttgtggttcttaagaggatcggaaaaatttttggaggtaattgaaaatatttttgtacgaaaataagctttgtcgattagatttgcgtagtgccggacccaaacggagactatgatggctacacggcgagtgagccacgtgccgaaagcacgcgcagccagattatggcagaaattgcgtgctattatggaggcaagttagcggaagaattattttgcgagaaaagtatcggccacagcgacgacatgagacaagccaagaagctgaagaaatggcgttaattgatgcgaactgtttgtgacacggaaattttgtcttttcgataatattatgtatatgaagttgtacattttgctcacaaattcgtccatttcaattgcgttaatatacaataattggtaatactttagatggtacaccccccttttttggaaaaaatttttttgttttaaaaaatcatgaaaacatgttccaaagggtgacagggccgcttatatgaatccggcatcgatttcgaccaattcctaatcccggaaccgaattcgaacaaaaagtcgaaaactcaaattttcagttttcatattttagtctaaatagtataaatatcttctgttacaatatttagggttttgagaatgtttccgtgtatttaagcaaagtttgaaccaaaaacgtgaaaccaaaaaatttgaattttcgacttttggttct

SEQ ID NO: 36497 - DNA, 1012 bp, Heterodera glycines
cagagtttcatttattttcccttcaggtgccaacaacctttacttttatagcccgtagcaaatggggacatttttgtaattttgaacaattttttttaaatttttcgggcaaaagcttttaatatttgtaaaaatatttcgttggcactaccggagcaatttatagtgaagaaaaaacgacatatttttaatggatttttctggcatgactgacttaaattcgatattaatttttaggcaattacagccggtgaagaagaagccaattcagagacgcattttggacaattagaaactcagaattttgtatacgaattgcaattaggatttgccacggggacggcgaatcgttgtttccacgcaatttgtgtctctttggggcccgatcgtcaattggacattttgtcacgtttaataagcacaaatccctggagaatcgttcttgctgccgaacaaatcccatgcataaatgaattgtcagcaggtcgcgtggaattggcacttttatttgagctgatcttcactcacttcggaattgaaccgaccacggaattgccttatcgacaattggttaaaagtttgggacaaaatacgcttaattaatcgacaattttaagttaggccgaatcgggaaacacatgggcgaagacttgcaggaagggtcgactccgaaacggacgcggctgaacgatttgaccaccgaacttgccgaaaatgacgaggtaggtcaaacaataataatgccaattcgggacttcgatcttaaaggcatggaacaaattgcgagcggacatggacttgattcagtcaatctccgatttgtatgaaattttagtcacacagaaagcattggttttaatcatttatcacagaaatgttaaatgcattcgtcatttgtatcaaatgaaaatcttggagcggcgtgttctaaattttctgaggaaatttgctgacaatgcgaaggacgatggacagcggaaaattgcgcaaacaaaaggcattcgctcgaatt

SEQ ID NO: 36498 - DNA, 871 bp, Heterodera glycines
  unsure (1)..(871): unsure at all n locations
gatttgagtcccagagattgaaatgctggtgtgttgagtcccagagattgaaatgttgtggggttgagtctcagagattgaaatgctggtgggttgagccccagagattggaatgccattgaaagttggtgggttgagtcccagtgtctggaatgccggagatttgagtcccagacattgaaatgctggtgggttgagtcccagcgattggaaagcctgagaattgagtctcagagattgaaatgctggtgggttgagtcccagtgtctggaatgccggagatttgagtcaccgagattgaaatgctggtgggttgagtcccagagattgaaatgctggtgtgttgagtcccagagattggaatgtcattgaaagttggtgggttgagtcccattgtttggaatgccggagattttagtcccagagattggaataccggagaattgagtcccagtattggaatgctggtggcctgattttcagtgattggaatgtcattgaaagttggtgggttgagtcccagtgtttggaatgccggagattttagtcccagagattagaatgccggagaattgagtcccagtattggaatgctggtgggttgagtttcagtgattggaatgtcattgaaagttggtgggttgagtcccaatgtttagaatgccgcagatttgagtcccagtgttttggaatgccggagatttgagtcccattgtttggaatgccagagatttgagttccagtgattggaaagcctgagaattgagtcccagagattgaaatgctggtgggttgagtcccagtgtctggaatgccggagatttgagtcacaagagattgaaatgctggtgggttgagtcccangagattg

SEQ ID NO: 36499 - DNA, 661 bp, Heterodera glycines
agagaacggaagaagggaggaaaatgaagagaaaggacgttgagaggaaataatataggaaaggaagagggagaagaacgtgaggtcagaagagagaggaagggaacaagagaagaggaaagggaaaagaggaaaagacaccgcaacaaagaagcagagagaggaggagcgggaggaggaggagaaggaggaagaagaagaagattgagaagaagaggagaaaggtgggcgaggggagaagcaaaccgggcgagcaacagctctttcaaattttgaagagcttctccctaaagagtgcggtttccccctccaaaaaaaaattcaccatttttttgaatgcttttccttttctgtgccctcccctcccatcttattttaattgggacctccaacagcgacgaattcctttgctgctaaagaattgccattttccgtcccgtgcccttctttgccccccccttttactgcccccccccctccaattcggtcattgtcaattcgtttttgttccattttgttttccactcactttacaactcttttcccacaattttcgctttccttccgccgatttctatcgatggccaaacgatccgatcagaacagatcggacggatcagctttgatccatccggcttcaccttctctctgattgcccacc

SEQ ID NO: 36500 - DNA, 1060 bp, Heterodera glycines
  unsure (1)..(1060): unsure at all n locations
aacccttcggattggcatatatttccgacaaaagctctttcaatttcaccaatttgcatagattttgacgccattctgtcagcttttcctcccgaattaccccataaacactttcctttatttcttcaattttttcctcaataatgagttttatttggtcgtccatagataatatctctgacaaataatttttaaaatttttgaccgattccattaaataaggcaatgaaagccgcgcctcgtaacactgggccaaaagggtgcctgatttgtgctccaatttcttcaatagaagctccaaataactgcattcaagttgtttttctaaataaaacatcattaatttaattaattgggtaattaataagtcacttttttaataattggtattggattacaatgaatgtcttattagtagggctgggaatttaagtcacgaaataacaccaaaaagtcataaaaacgccaaaaagtcacaaaaacccaaaaaaaaaggatggaaattagctgatatccataaaacctagagaccagaatttttaaactaccgggaccgaggctcaggcttagacaattgaccgggcccaagtcgaccggttcaaaaaaagcctttaaccgtgaggtacgtggcttttttcaaaatttgttgaatattgttttaaaataaatcttttattttagctagatagtcgtaaaagtgccatgtttgaagcttttaacaaagtgaaaatatttttaagtcattttaaggccattttgagtcagcagaaaaaaagtcattggacttaaattgaaagtcctaattattaggggagaaaatggtttttattatttcgtactgaaaattcgccaacttttttcccttctcaaccgacggacctaacttttgtaaaggattttgtcattaataatttttgcttcaaatgagccttttgggcaattaatagggctttaaaaaatttttcgtaaaccctaaaaaataactcatttttcatatttactttttattaattctaagagtttcccccaatttttcttaccaaaatgcannaaatttcgg

SEQ ID NO: 36501 - DNA, 828 bp, Heterodera glycines
ctttatattttttaaatatttgtggtttagtggttagagtttcagctgtaataggattctttgtcatgagttcaacccctgttgtcgttttcctctttttatgattccccccccccccccgcaatccatcactttgtgatggcatcatcgcatttccctccccccccccaccccaagacattatgttgcgcggtcgctgctttgtcttgcgcgactttcctcaaacggcgcccgatgaagcggcaaaactcaccttttacttcaatcaaatgcattctccgtttttggatgctgaaggaattcaagtaaaaaacttttgaactaaaagagatttcaaactttgttgacgatgtttctttgtgtcttcaatcccttcgggcggattcgttttttaatatttttttaatttttggttatttttccgtgtgcataaaatgcttagttcagagacaagtcgtggcttacatatcgcaaaacagtgaagacttcgccacctttccacgcttttatttgaacaaccacacgtggtacagaatcagactgaagaagcgacgcatttcaatgctttcggttgttttttgagggaggggggggagaaatcagagcttacaaaagtgtacaaaatactgtagttttaagtttgtggattcttgggttggtttttaccatttaataagcaccaaccaaaatgaagatttcgaatcaattttgcgttttgaattacggccacaaaaaaagtctgagaattccgttgcattcgttgaaaacagccaatgttttttattttgtaaaaacagaaaatccttaaccccttccccattccctccc

SEQ ID NO: 36502 - DNA, 1256 bp, Heterodera glycines
ataatgatggtctttttgaattgttatcacataatttcaaaattattaaatacctattgaaaaagggtttatgtaatattttttaaacagatattaattttgaattaaataagtattaaaatataaataaacgtttttaaatgaacgatagtcataatcgtaatatttttgcttttataaataaatatttgaaatagaaacttttttaattaattcgatttatgtaactggttgttccaccacagttccgccgacgttcgcaattatatttaataattaatcaccaacgtaattataaaaatgatttttgggtcttttccgatgataatttattgcgataaatatgttgtataaatttagaaaaaaaataaacaaaaaattgttgcaagaccagtggaaacaagattagttagatgaaaaataacaattagcataaaattattaaaagggatttcttaataaaaattaaattaaattataatagcacttttaaatcgatgtttcttaaaaactaactttttataattttaattaataatttactctcataatgcaagaacgattagtatgttaatgatgttagaaaattaaccaaataactttttggagcaaacaaaagttaataaactaaatcaaaaaatcgttattattaaacaaatttgtgggttctttcaaataaattaaatcgaaaaaaaaattaattaattatgaaccataataataattattattattattaatattttattatgttgtcaaattaattaatccaataatattcttttagctattttctgcccttcccttctgaccaaaaggggggggggacgatgccctggcgatctgtccaaaaaaaactcgtctcaatttgcaaaaccgagttccccccggctaagattcgaaaatgactaagaaaattaacctaaaaaccttgcacggggacttcagacacactcaaattccgagaaataggactttttcgagtttgtctaatgatcttcgatctttttgaacgactatcaatacatcaccacgttcataatatctgtatttacgatgtaacctgcaagaagaaagaactgcacaaaagacaataaaaccttacccttatcttgctatatggctcagacaacggactagatttacacttgtatctgtgtaactgagtctacacacaataatgccaatgctgaatgcttgcgaactctacatagattgaaaacatgctactaccgaatcatgctgattaagtatat

SEQ ID NO: 36503 - DNA, 1197 bp, Heterodera glycines
cccctggggggaggggagtggggaacatggttttcaaaattttcaatttttttttagtttaattttctcaaaacggttcagaaattcaaaaaaaaaaacattcacggggggaaaaaatggggtttgaaaaatttaattgggaaaaaaaagactttccaaaataatacccctggggagaaggggagtgggaaacatgatttcaaaattttcaattttttctattttaatctactcaaaacggttcagaattcgataaaaataacattctcggggcgaaaaatggggtttgaaaagtttattggggaaaaaaagactttacaaaataatacccctgggagaagggagtgggaaacatgatttcaaaattttcaattttttctagtctaatctactcaaaacggttcagaattcaataaaaataacattcacggtgcgaaaaatggggtttgacaagtttattggggaaaaaaagactttacaaaataatacccctgggagaagggagtgggaaacatgatttcaaaattttcaattttttctagtctaatctactcaaaacggttcagaattcaataaaaataacattcacggtgcgaaaaatggggtttgacaagtttattggggaaaaaaagactttacaaaataatacccctgggagaagggagtgggaaacatgatttcaaaattttcaattttttctagtctaatctactcaaaacggttcagaattcaataaaaataacattcacggtgcgaaaaatggggtttgaaaagtttattggggaaaaaaagactttacaaaataatacccctgggagaagggagtgggaaacatgatttcaaaattttcaattttttctaatctaatctactccaaacggttcagaattcaataaaaataacattcacggtgcgaaaaatggggtttgaaaagtttattggggaaaaaaagactttacaaaataatacccctgggagaagggagtgggaaacatgatttcaaaattttcaattttttctaatctaatctactcaaaacggttcagaattcaataaaaataacattcacggtgcgaaaaatggggtttgacaagtttattggggaaaaaaagactttacaaaataatacccctgggagaagggagtgggaaacatgatttcaaaattttccattttttctagtctaatctactcaaa

SEQ ID NO: 36504 - DNA, 1580 bp, Heterodera glycines
ccttttgcgatcgactaattttcctcagttagtcgatcgcaatgctcaaccctttccttgcttttgccttttcccttaacacacttccttgaaaactgttgatccaatctatgtttcattgtttgtcaaaagccgtgcaaaacaatcgcttcggttgttcattttttctcggaatgtgtaaccatttgggcaatgcttggccagcattgcatacggcccatcctcagcaattccatcggtgcatagacgaccagaacacatgaaatccaattgattgagatgtgagagaattgttggcgatatgagacgaagcaaattgttcaaatgatcgcgaccggcaaatttcaaatggcgaatgtttgtcgcaaaagtaaccaaagttcaccggtaaaaacatcccaaatgcgctgatggacgccggtggtttggttatgtttatataaaggcacattcaaatacaaaatggtgccacttctgtcccaaatttgcttattgggacggataaaggcgagcacagagaatataaaaatgctttaatagatacaaatataaagtttaaattaggtaggtattcaattgaagaaaatgaaagcgaattttgttggacaggtggacggtcggcaacggaaatgccacaaatttgccagcgtactctaatagtttcggtttcggttcatttgccgttgcgaattgtgatggtttcaaaattgtcatttccgtattcatcaaagtgtttgtcaaccaaagcctcgaaccggtaagaaagcaatgccaaattgagatttattaataaaaatgtaataaaaacgaaaaatacaccccctaagttttgtgaggagcggaaaactaaacccccgacgggttcgggatctgccatttcaatttactcaatgatttttttcagccaatttcaagagtttttaaaatttttggattttatcaacaaaaaaatgaattaacaatttggcgattttattttaaatagcaactcaaaaattttcatttattgatgcaatggatttattttcaccaaaaataaccttcaaaaaggaaccaaaaaatgtcaattatcctatttcactccaagcttctataaaggaaaaagcaaaaatctggaaaaagctcaaagaaaacccgaataaatacaaacctttatataattcaattagcctacacataaaaattcagattagaaaatttcaggagcgcgaagaaaaaaaaatttcttgacaaaatcccaaaaatatttacaaatatattgaaaaagattttcaaagatgggaaacccctctaattctttatgataacaaaacaattatagacgacggagaaaaagcagaaatttttgccagacattttgcatcaactttccaaaattccaataattatcctcaaccacccaaaactttctcaaatagtcttaattttccgacactttcaactttgcaatttaatgtcatagacgttcttgaaattctaatataccttccaaataaaaataacacctcgccagacaatattagtttcaaatttcttaaaactatgcacttaatcttagctaggcacctgacagatctgtt

SEQ ID NO: 36505 - DNA, 1260 bp, Heterodera glycines
tatgttaacccggcgcaaaatttactggcgccaaaaatttccgacgccaaacagtccataggactatacaaaaagagacaaaaaacgatcacacacttgcagcatttacgcagttgcatcatcgtgttgttcaggctgatcagtgacggggttgagcccttcatcagatgggtgaaattgcgctccaaaactgcgcggtaatattttttctggatgttggagagttggaccttaaaattagaggggatttcatcacaaaaaattgcagagtagtgccattgtctttgtggcacccacacatcaaatgtggtaccgaagttgcgcattttgccaaaaattttttaaaaactgtcgaaatgtgggtgggtacacccttgacacgggtcggggtcactttggcgcggaccatttcggcgccgcaaattttgaaatgctataacttttttatttgtcagttagctttagccaatctggcatcatttgaaagctctatgtgtgctctatatttacatgtaaaaatagaaatgaatgattcaaaaataaaaaagttatgccacgcggcgccgaaaaagccaagaaaaagttaatttttgaggttttttggccataacttttttgtaaactgacgaaattttttgaaattttacaggctaatagagaatctgaagagctatcgaattataacaaaaatttttaatttggttgatcaggaaaaaagttgttagcaacggcgccgaaaaggccggcgccgaagtgggcggttccccttgacacacccaaaaagtgccttaattcaggtggatatacccttggcacaccaacaacgtgccttaattcggatggttacacccctaacatagcctaaaaatgccagaatgccggtatatatacatagtttttgaaaaagatcgggagggatcccgatgaaatccggtcccgattaatgccgtagaaggaaaaaaaggatcgggaaggatcccgagaaactcccatgggatcctgatcccgtctaaagcgaaaagtgccggaatgcggttgtaactccattggcattggcaccgctggcacatgcctcaatgattgtttcctccttgggctgcagttccttctccacgtcctccttcaaccgtcggagcatcatcggtttgagtatctcctgcaacttttgcacttgctcctccgtttggcattggccaaattggtggagaaaagcctcggaattggcgaactgttcaggctccaaaaagttgagcaacgaga

SEQ ID NO: 36506 - DNA, 1303 bp, Heterodera glycines
acagccccttgcttctcgcagttttaagtcttggaattgtcaaatagacacaagacttcgaaataataatcataaattgtcttagagtttttttgcacgcaattcaaaaaaggaaaaacatttgcagtcaaaaaagatatttgaatgtctccaataatgtttccataatttgacgaaagttattcggtatcataatgacaaaacaaaacgaaatcgttttagaatattcctctctggacttgacttgggcatagatgtcgaagctgttttcatacgctatttctaatacgggttataccgatccccagatttttgaatccggttttccgaaaaaatgccttgtggtgaaaacaatatttcacattgcactccatacctcagtgagttcggctcggatcgagaccgggataagggcagtggaaagagcagctcgagctctacaagaaggtacggaaagaaaaaatagttatttctgggactttttcagaaatcggaattaattctccaatgaggcccaaatcttaggcccccagccacagcccgttgaatgtcccagtgttaagtgttggatatgtcaaatgaagccaagacttgaaagttaataatcaaaacattcctattcagatagctgccaaaattttctatagaagccctccttttaaacgaaaaatgcgaactttgaactttccgactttttattttatttcttctcacttttcatcgtttcattgactttttatgtacaaaggattaaagatcgccaaatgagattacgaatttgttgatgctagctgacaaatgaatccgaatattatttaggcgaaaaattgggctcgaattttggcccctgctgttgcatttgctcctacaacattttcagctcccacagctattttcgatcagcccattacaccgaagttgaatggggccaacaaaatgagcaatcggctcaatgggggggggggggagggagacaaataaacattacacatatcgcatccattgacaccataattttatattcctctgacaaatgaatgaatgtttaaatgattttacaaattaaaaaaaaatttaatgggccaccaaattaatttctgttggctatattaatgaaaatgttatttttactggattttttttatttcaaaaagctcattaatctcaccaatttggcaccctaaaaaatgtcggaccatccaaacgaagcggagcgaaatttgaagagaatgtgagccaattttatttcaacttcaaacattattcggcacttttccagtcaccaagaagttgccagtttggg

SEQ ID NO: 36507 - DNA, 928 bp, Heterodera glycines
ttttcattttattcctatcttaattcccaaaaacaattgtaatgcaaatttttgaggcaccttggataacgcatgaaggcgagtgattagtggaattcattagtttttacggaaaactaaaaacaaaaaatcctaaatctttaggaaagcaactgtatatgtttagaggagctaattggaaaaaaactttaggtggcagcattttctctctcgacttccaccctagcggatgtaaactcgcaacagcaggacaggatccttctggtgctggtcttctgattgtgtgggatcttggctttctaaactgcccacccgattcgaaggagttcaattgcagtcaattaccattgacacgaattccccacacaagttgtacactttaaacagtcactgagtcgatttggggatgggtttaaagggcgacccttcttcctttaaatcagtttccaatggggtttacccccacccccccgctagtgagatagtaccaaatactatttcttccctatgctcagtgaccgttttggatggtatttgtgtctttttttaacaaattgcatttctggtaccataaactgcgttcgatggtcaaaacattctgctaccatcagtcgattggtctgtgctggggatgactcgatgatttgcgtttacgaatgcgtcggtgtctattcaagcgaaggatccttcagcaacagtttggaaatgcctacgtgtcaaaagcgaaatatcgaaagctatcgctgcacacacaaattgttggcttaatttttcctaaattatcgtctcatttggcttaggtatggccattccatcgatgtgttgcacattgactggtcttcggatggacgctttcttgcctcgtgctctttggacagcacaatgtaatgaatttgcttatattaaatgggacgcaaaaattgtaaca

SEQ ID NO: 36508 - DNA, 992 bp, Heterodera glycines
  unsure (1)..(992): unsure at all n locations
tttattatataatttaattattaaattatactataatatttattatattactaattacttttgctaaataaatataaacattttagaatttattcaagtgttttgattatattatcaaaataattttatatttctttttttattaatttaaattagcttttagcataagttaaataagaaaaaaacatttgatttgtctaatataaaatgaaaatataaaaataaatttcaaaattatttcttttaaaatcacctttaattaatcattttcatattttttttatttctcctttgcccatgcaattaaaattaatatgataagaaatagccgaatttctgtttttttaaatcgaaataatcccctgaaaatgtttaaaaactgcaataccgaaatttttgttctcgaaaatcccaaaatgcattaatatgcattaaaatcttaaccaaaatccctgtctcgtaaacggttctaattcatgctcataaattttttttggaataaatatttataaaataaattaaaattttttttaacttattacttctcatttgtttcctattattttacgtcaaataaattttatatttattttatatggttcgagtggagttggaatttgtttaaggagtgtacttttaatagtcgcataattttttactcgactaattaattgcgctctttcaattcgatttttgaattggctgcgattattttgtgcttctcatatggtaacgtgtacaaaaaatgataaaagtgaatttgaaattattaaattatgtaactaatgaatttttaatttaatttttatttttgaatttttttatttctctttttatctaaatcaaaattatgcatcttcgtcatcaggcatttattgttgccattcacccgatgtgaactgtgnggcattatcnnagaaatttgatccgaaagtccatgtgtagcaaaatccgaccctcattttcatttgcaaatataaaattttttttat

SEQ ID NO: 36509 - DNA, 1039 bp, Heterodera glycines
  unsure (1)..(1039): unsure at all n locations
tctttcacaatttttaatggtaaatgtttagaattctgtgggaccgaatcacaaatttattttccttttgacgtaaaaataaattattaaaaagaatgttactttatttttacaaacttagtttagctaataaacatgaagttactcaggaagaagcttaagttcataggaaaatgccatcaataatcgactaggaaaattttaataattttgtgccataagaaaatacaaagaaacaagaaagaagaggaaaacccgaagaaatgttgtgcaataaaaaaatggcaagaaggttgtgaagtcgagaagcggccgagccagaaccttctaagaaaagtaaaagacagaaaatccaaatgagaatttgcggaaaaaagggcagaggccttattttttgggcgtcttgtcgattgaagggtgggggtggagtagggggtaacagtacgcgttgccctattatgaattgggttcgtccgctcccccacaatgttttatgctgcaggcttagcgaatgcgttctcatcggaaccaaagcaaataatggtccatttttggcttgcacaaacgaaatagtcggttgcaactgccacttgaggccagcgtaaatttgaccgatattggtgttaatttaggaagcgattagatttgtataactccgataaatttggtatattatacgaaagcacttagtgagctcattataaaaaataagggtgaaatcaatccattgcgatctgggaaatttggagccctatttttctttaatttttggttttaaaccgagacgaacccattgtatcacttgagtcaatgcgagtggatccaagcgcctcttttattttaaatttataatcattctttgttttaatgataaaatgacagttttatcccatttctttctgatataacattttctactggtgggtcgtttggtaaatagatcatctaacgtaaaacaactggtcattatcangtcccaagcgccccggcggctggtcataagtggctgctgtaaaaattataaaaattaacatatcgg

SEQ ID NO: 36510 - DNA, 987 bp, Heterodera glycines
ctgagagagagtgagggagagaaagagggggaaagagggaggaagaaaaggacataaggaaaagagagagggagatacagagaggaaagtgggagagaaagaaagagggactgagagagagtgagggagagaaagagggggaaagagggaggaagaaaaggacataaggaaaagagagagggagatacagagaggaaagtgggagagaaagaaagagggactgagagagagtgagggagagaaagagggggagggagggaggaagaaaaggacataaggaaaagagagtgggagatacagagaggaaagtgggagagaaagaaagagggactgagagagagtgagggagagaaagagggggagggagggaggaagaaaaggacataaggaaaagagagagggagatacagagaggaaagtgggagagaaagaaagagggactgagagagagtgaggaatgatgaaatataacactacataatgagagaaaaaatgagagataatggatgaaagagcgagagtgagggaaagaatggattgtgacaacaaagtgagttaagagttagagagagacaaaggaaagacataaaactaaggcgagagagagagaagaaagagagaaataaggaagagggagagaaaaaaagagagagaaaggggaggaaaatgatttgggaaaatgcttttcattttttaaaaattatttataactaaaagagaaaggttggggctccatgaaatggcgtctgttattttaataatttaattttgtgaccttttagtattattatttaatttggctatatgatgtttaaattacatttcttggaatggccccatttaattgtacaatgaaattaaaaataattttattaaattttataagaaaatgccaatttttaccagcaggttcggcaaatttaaaaaatgtgaacagccactcgtaacggaggaaataccaagcccccccccccccattctattgac

SEQ ID NO: 36511 - DNA, 942 bp, Heterodera glycines
  unsure (1)..(942): unsure at all n locations
aaaagagatagccatttttctgggataacctctaaatataaaaatcctcntgtgaaataaaatggcgattgtgcacagccctccgtctcatacgcaagcgcttttgtgaggtataaaatttctcaaaaaaaagagatagacatttttctgggatagagtataaatttaaaaattccctcaaaaataaaaggtctattgcgcaccgccctccctatcatgctcgagagcatttgtatgtgtataaaatttatcaaaaaaagagatagccatttttctgggataacctctaaatataaaaatcctctgtgaaataaaatggcgattgtgcacagccctccgtctcatacgcaagcgcttttgtgaggtataaaatttctcaaaaaaagagatagccatttttctgggatagagtataaatttaaaaattccctcaaaaataaaaggtctatttcgcaccgccctccctatcatgctcgagagcatttgtatgtgtataaaatttatcaaaaaaagagatagccatttttctgggatagagtataaatttaaaaattccctcaaaaataaaaggtaaattgcgcaccgccctccctatcatgctcgagagcatttgtatgtgtataaaatttatcaaaaaaagagatagccatttttctgggataacctctaaatataaaaatcctctgtgaaataaaatggcgattgtgcacagccctccgtctcatacgcaagcgcttttgtgaggtataaaatttctcaaaaaaagagatagacatttttctgggatagagtataaatttaaaaattccctcaaaaataaaaggtctattgcgcaccgccctccctatcatgctcgagagcatttgtatgtgtataaatttatcaaaaaaagagatagccatttttctgggataaccctctaatataaaaatcctctgtgaa

SEQ ID NO: 36512 - DNA, 665 bp, Heterodera glycines
gcaagatatcatgataagtctccttaggccatgggctaaaggaattccctcagttgtcttttgaccatgcctctgaccttacaatatgctaatttttttattgattaaagccagaagaaatttcatcactgcttgttcattacctagcgaatattaggtaacgcaacagataaaaccttctaaagaattattatcccctttgcttaaaggtattggactaaaaccatacatatttacgggaaaaattttactgcttccgaccggaaagcgtaatctactcttcttgtagaagagttttgtctgttttcgggattaggcgcaaaattaactaatttgactctccaaccgactgactccggacgatgtgctcttcctctcgcacaataaccgtccccgcatacgcgacccaatcttgccccatggagagcctggtgttggaatgcacgcgacggcaagagaattttctgtggaccaggacttttttgcggtgggttgaaagaaccacccatgagataggcaatgataccgcatccaatccccaacgactcgaataggccatagaggaatgaccgaaccctctctgcccgctttgctgcagaactgtacgcggagctctgtcatgccaaaagtgaccacacttctctgacttcccatatcctccgctg

SEQ ID NO: 36513 - DNA, 1208 bp, Heterodera glycines
agcagaagcgtaccaaactttgcagggatactccccggtaaaggactaacttacactgaaatgagcgccgagctagctggctcaaaaaaattttcgaaaatctgagtctttcgtttttatttattttttgcaaaattaattcttaaatattttttcagaaagggttctgaaacgcaccagattttatttacatgttagtttaggcactctgatgctttttctatcaaaaagggagatgaataaaatttttaaaaatttttaattcctttttaaacaggccaaaaagtttaggcttaacttttttttcagaaactgatcagaagcgcaccaaactttgcagggatactgaaaggaagagaaataacctattttaaatattatctagtcagttcatttaaataatttttatccaaaaaatttttttttgggttttcggggcagtccccctgaaccgatgcgcccagatttatggggagaccgaatccttcgggaatagcttccctatagtctgtactttaattctgcgttggagttttgctccccataaatgtttgagtaccccaaacggacacttgaaaaaatcgatttttttgggttttcggggcagtccccctgaaccgatgcgcccagatttataaggagtccgaatccttcgggaatagcttccatatacctctactttatttttgcgttggatttttgctccccataattgtttgagtaccccaaacggacacttgaaaaaatcgatttttttgttttcggggcagtccccccgagccgatgcgcccagatttatggggagaccgaatccttccggaatagcttccctatagcctgtactttaattctgcgttggatttttgctccccataattgtttgagtaccccaaacggacacttgaaaaaatcgatttttttgttttcggggcagtccccccgaaccgatgcgcccagatttatggggagaccgaatccttccggaatagcttccctatagcctgtactttaattctgcgttggatttttgctccccataattgtttgagtaccccaaacggacacttgaaaaaatcgatttttttgttttcggggcagtccccccgaaccgatgcgcccagatttatggggagaccgaatccttcgggaatagcttccctatagccagtactttaattctgcgttggatttttgctcccccataaatg

SEQ ID NO: 36514 - DNA, 1179 bp, Heterodera glycines
ttcatcatgcttttcctctccctacagtttacagggatggctatgtgtgcatcagtattctccacccgccgggcgacggaccgtttggcattgagagagcggcagaacgttggcagcctgtgcacacggtggagtccatcgtcatctcagtccaatcaatgctttcggagccgaactttttgagccctgcaaatctcgaggcactcgtaagaagagcattcgcatggaatgaatattttttaactaattcccctctaatttcagctgatgtttcgcgtcaatccccagcggtacaatgagagggtgaaacaatgcgtgaaggagtcgaacgtggcgcttgaaagtgattaccgcgatattccaaacgatggaggaggacgccgtgcatcgatctaaccttgaaactgtgatctttttcatatgaaactcgttttgattgtacataatacgaatcacacacattgtccattcgttattaccgcgatattccaaacgatggaggaggacgccgtgcatcgatctaaccttgaaactgtgatctttttcatatgaaactcgttttgattgtacataatacgaatcacacacattgtccattcgttctcatatgtatttattaatcattgtgtaaaattaaagaatttaataacttcgctttttctgataaaaaaattatatatccaggaaaaagcctagaatttgaaaatttgaggttgggaatcaggccgggataggattcccaggattcaaattctggaatttgggtcgaaattattaaaattaacataaaaattctcaagaattttcgaataattcgtatggtcgggaggccttacttacacgcataggtgacattggaaaatttgagatgttgcaattggtggaaaaaagtcgggatctggatcagattccgggaaaatccacatgcggaaaataaactttaaaaacgtagcatgcaaaaatcgtgtaaattgttaaataaacgcaaaatgctctattccagtttatgcattcaatctgctttttgtaaattgctacttttcagttttatttatatttgcttttcaatcaattcgaggagtttcatgaaacaatttggcgaatgcccctaataattctcaccaatgagcggtgataaacgagcgtttcgaaatgtttaatgattattttaaattaccc

SEQ ID NO: 36515 - DNA, 633 bp, Heterodera glycines
cttttatcaaagtgtttgagattttggcggatttttaaatttctccatttattagttaggtaaattcattcattaaaatttcaagatttccgccaaaaaatctgaatttgtaatttttagggtttcttttcatttcccccctaatcattatccatcctcctcttaatgcctggtctgcacactttttacgatggcagccttttgctcgcgcctttggtccctttctttggtctcgacacggataaggtcactcactccgcgtcttttccattttgtcacttcaaatgagtttagttgaatctcttcttttgccaattgctctccgttttgctcgcttttgcctttttcaaacttttcccccctcggaagtcctccgatcactccgttcggttgtccattctcgcatttgttggaatagcgctgtgttatttttgctttggaaggtcagtcaatgaatgatgcaaaatgagaaaattttgttactattattattcgaatttgtttgttccctctgattggtttacctcattcgaaatttcgttgattaattttacatttttaatccttcctcattttgttttcaattccttagttcagggccatcaaacacatctttcgactactcctcttcag

SEQ ID NO: 36516 - DNA, 976 bp, Heterodera glycines
atctgctcccccccccctccatccagcagctgtcacatcactgatcactcaaaaattttcatgtcggccatcaaaattacatgtaaatttgaaaaggcaaaacccccaataggtttgggtttcgaactccccaatttaataattaattaatttgacccccttcacccccacaattatctgaccaattagcgcccccccccctccggttaatcaattagtcactaattgactcccgccctccagccacctgtcacttctaattagtgtcaggttgctacgaaggcgtatgtgttactactgtaatcctacataaacaattttttgcttcattataagtccgtaaaaatcgtatcgatccaaaaaaatggattacggactgcggatccgtaaaaatacggatccggtccatacacgaactctagtccttaatggtttatattatcctgcaaaatttcaaaaaaattcgttattcataaaagttatgacctgagaaattcaaaagtttttttgaacacttttgggcataattttattgaaacttaacgaaacggcaaagaaaataacaacaattttgcgaatgcgaaaccatttttttattatatcaaatacaaataattaataaattttacaaatctcgaagaagttcaagagtcatctaagaaactcatgccgaattaccccggtgacaatatatatggtaaattcaatgggaaatggaagtgttcggaagtttttgattttatttaattatccaattaaatctgcatacttattgtattatgtatatatatatatatttatatttatatatattgattgtattcaaatcatacttttcttcaggatatagttataggcaaaataattgctttttaattttatgattaatttttgaataattatttatttaaattttattaacggaagtattatgtaaatttttataaataaagctagtgtttcggaacgcgaatga

SEQ ID NO: 36517 - DNA, 411 bp, Heterodera glycines
aacaccttgaataaaaagccaccggcaaattggccttaagccgtccgtgcgttgtgtgcctcatcgctgctttttcttgcctccctggggcgtcactcattcattcaatattcaatctcgaccctccccgcccgtcgtcgttattcattcccgcccctccccgccattcacccatcgtcgtcacactctttgccctcccccctcccgcgccccctcccattcaatttccgcacattttccacccggttaaccaaccctttcccccttccccccccgctgggggaagggatggacctcttctgccgctgcttcttctccatctatttcttccgctgtttggttactgcaataaacctctgcttcttgtttcatccctctcaaatacattcttattcattcattcaattcatc

SEQ ID NO: 36518 - DNA, 994 bp, Heterodera glycines
  unsure (1)..(994): unsure at all n locations
tgtttaactttgtagaatttatggattgttgcattttattagcagtttatcaattttagagtctaaaaatgagaaatgtgaaaattttgtattttcgacctttgttcgaattcgggttaggggtttgaaattggtcgaaatggatgtcagattcgtgatcagcgaccccaaaaacccccggaaaattgttttttatgccttttaacaaaaaaaaatttatggggcctaaactgtatatcctgtaaaaactagtataaaagcggttgctcttccaccgactgggcacacttgcaattaaacaaaaattttttttttttcttgagaatgttttacttaatgtcgcctctttttattttgttaaaatttaataaatttttgaggaaaaaaggcaattgaactgaaaagtgtcaaaaactttctttaacaatttgcgccaacaaaatgtcagaccgccgaagagaagcggaggaaaaaatggcaaaagcaatgtaaaatttaaaatgccaattttcaattttaaattttgtttccctttttcttcagtttcatctctgccgactgttggctttcggtgttcgatttgctctctccgcgtaaacttggcctcggagttgcactgatcagtcaccgatttgacttttacgtcgatgaacacttcaaaacgcgcaaatgggcgctgaaatttattggaattggaagcaaaattggaaagaatggcaccaaggaaatggaaattaccaattacaatcgaaaagcattgccaattcctcaaattcaaatgccacgcaaagtcaccggattcgaacgcatcatcatcaagtaaaattggcgattattcaaaagatttaattagacaacacttcccatcattttcagtttcatcgaccaaaatgccatcgcttttctccngcattttcgccaactttttcgccgtctgtncaattaatttggacatttatgcgcacagtgaccgggcatttcgggagttcatttt

SEQ ID NO: 36519 - DNA, 865 bp, Heterodera glycines
aataaaatgtatttatttgtttagattttgtttattttccatttatttttattttattatcaccaattttaaatattaaaataattttatagcctattttcaaaaaagttatgtccagattctcaaataaccaagtttttttttacattttggttataaatttcttgaaacataactaaatttttgaatttttcaggctatagaaaacacgtatggctaccgaatgaaatatacattaaaaatttggttggtttagaacacagttatatcaaaaaattttttgttcgtttttgactacgtcataacttggactccaatttatagttgctaaaaactttcaaattaatggtgtaaaatgttatccaaaaagcaacaatttattacacttttatttgttttattatcaatagtaaatgataatcgttgatattctaatttattaatgcataaattttaacaatgtaataatatttttctatttaaagctcttttgaaggagtcagttttttccatttgctgattataatatatatttttagaaaaaattggttttttttggttttcgtttgaatacaattatttttttctgttttggttttgcttcattttttatctcatgtcttatagacttttgctttaactgcagattgattcgtatattcaatagatttgtatttaataaatatttaaaaaaataaaataaactaacccttatttaatttataattattgttatggtttaaaatgtttgccattttattgtagataataagtttacaatgcataaattttaataatattaataattatttttttatttctatttttctctctgatagctcttttgaagggttcattttttttc

SEQ ID NO: 36520 - DNA, 1393 bp, Heterodera glycines
  unsure (1)..(1393): unsure at all n locations
ttcatttaagaaaatatgaccaggctgtggaatcaacaaatttttgaaaaattaatttaatcaaattgagaatttgcaaaagaaccgttgactttttaataaaaattattaaatttttaaattccacatatattttcaaacagatatttatgcttcaaaaattcgatgaataaaagtatttataaaatcaattttatttatttcaaaatcattaaacaaatttagtccaaaaataatttttatgggatgctaagcgaacggaccctcaaaaacttcaattgagcaattcgaagagagaaaggttttattagtaaagttcgtcatattttgtcaatcggtaattcaaaaaacacaatcgcttctgtaccagaggtgtgacaactctcgccaaactcttgctctcgtcttttctgagacaagtcacacccctgttcagtacccaattgcaattttaggtagccaagcttcaaaagtgcgcagcgttttatcccagtccacatccgccgactgttcacgcacacggcagttaatgtgtacaaaatttctaaaggttcattctgctgaaattgctgaattgtgcatacatatatttgttggtcaaaaaaagcaaaaaaatgggcaaaaaataatataatatttgaatctatttttgtttttatttttgaatagtgcaatttattgaagaaaaattggcaacaattataacgacagaagaaatagaaacgaataatagacaaaaaagcaatggtaagatttcttaaacacttttctcagaaagtggcaaatatttattctttccttttttaaatttttttcttcctgatgtaattttatgcgctgaatatgaattgatacttatttttgctaatcattagggttcccaattatattgagataaaatcgcaaaatatgtccataaaatacacccaaaaatcgcgaaatatggacataaaatgacaaaaatatggaaaacatggatatacaaatccgtcctaagaacttcaaaccaatcaaaaaaaaataaccccgcaatatttcaaaaaacgttaccaaattaatcaacatttcgccgtttatcatcctggcgccacaaaattcgaagaacattgctatcttgtagtccctctaagcccccattaaccagacattagcattttttgacattaaaaaccgaaaattttgactgtctttttgcctagctcaaaagtgtgaaccttaagcgcttttgtgttgctggtgcaaatggatgtcacgccataaaaaaaatatggccagaagaattcaaaaaaccagattttccaacctcttnggtcataaatttgttcaaaattgacgaaatttttttgggattttgcagattaatagagcatattatgagctttcgaatgatacc

SEQ ID NO: 36521 - DNA, 606 bp, Heterodera glycines
ttccttatcattcgtcatcccccacttttcttcgtataaaatgaataaataaaagtcatgggggaggggcggataaatcaaggcaaggcaaaggtcaactccaaatttgtaaccaacaaacaattaaccgaaggtaaacccatcattaacgctgtgaacataaaacaaacaactgcgaatgaagaaatctccccgaactgatgaaccgaaaagcattttgatcagttaataataactttacacaaaatatcacaattactcactctgtcgtgagtcataagcaaaatgaattgaaacaaacaaaggataaacgaaagaaaggaaaagtacaaaggtaaaatcgaaacatacataaatagccgttttagtggagaaaagaaaagaaaagagagtgagggatatggccgaccacgagcatattcaacgaaagaaagagaaagagccgtgggaaaggggggagggaattgtgaaaaaagggggggggggggcaacgccgtccccccccccccccgcccaatccataaaatgcctccctcgtcccatgtgcagcacttttggctttgtcacaatgagtggggcttggtgagaaatgaggggggggggggg

SEQ ID NO: 36522 - DNA, 381 bp, Heterodera glycines
aaatattttcacttaatttagaattgatcaatttgcaaattcattacgcataattaaatttttgtactattatttttggtataaatttcttttaacttctaataaattgttaacagaatagcattaaaattttagacggatagaagccattttaagagaaaaaaagatatttaccaattggttggcatcggaagagcacgcggactgattaatggggcaataaaagtgttttgatgggaagtttcgcgaaattgggagagtgattgagtacaaagtgagtactttggcggcactgtcaacattcgttgtaataattcgctggaagtggcaaactttcgccctccgaccatttgccgtaaatgtccttttgtctacgaatct

SEQ ID NO: 36523 - DNA, 983 bp, Heterodera glycines
ctctgggactcaaacctccggcattccaaacactgggaactcaacacaccagtatttcaatctctgggactcaattctccggcatttcaatctctgggactcaaatctccggcattccaaacactgggactcaacccaccaactttcaatgacattccaatctctgggactcaatccaccagcatttcaatctctgagactcaattctccggcattccaaacaatgggactcaaatctcccgcattccaaacactgggactcaacccaccaactttcaatgacattccaatctctgggactcaacccaccagcatttcaatctctgagactcaattctcaggctttccaatcactgggactcaattctccggcattccaaacaatgggactcaaatctccggcattccaaacactgggactcaacccaccagcatttcaatctctgggactcaattctccggcatttcaatctcggggactcaaatctccggcattccaaacactgggactcaacccaccaactttcaatgacattccaatctctgggactcaatccaccagcatttcaatctctgagactcaattctccggcattccaaacaatgggactcaaatctcccgcattccaaacactgggactcaacccaccaactttcaatgacattccaatctctgggactcaatccaccagcatttcaatctctgagactcaattctcaggctttccaatcactgggactcaacccaccagcatttcaatctgtgggactcaaatctccggcattccaaacacggggactcaacccaccagcatttcaatctgtgggactcaaatctccggcattccaatctctgggactcaacccaccagcatttcaatctctgagactcaattctcaggctttcaatcatctgttctaagcgtagctgtcgctctaacacacttttcttcagatctttgactattatttctatttctcat

SEQ ID NO: 36524 - DNA, 932 bp, Heterodera glycines
  unsure (1)..(932): unsure at all n locations
aataaaaataatgaaagaaataattcggaaaattttggcaaaaatgttgaatatttagccatgcaatcgccaaacctgcctccagtcaaagtttttgaagatgatttggatgagaacgaacggaagttaagggaacagatcaataaattgaaagaagaattggaaaagacggaagaaaagaaaaaggtgattgagaagagaagaatggagcaaatgaaattggccagggttgatgaagtggtcctggaagatgaagaggatgaagaggaggaggaaccaacctcaaaaaagtcccgtcttaatccgacggcgacgaaagaaattgtgcaaaaaataattaatgaagaattggttgccaatgatttggtcatgatcgatccaagagggatcaatgatcgaaatggaccggaagatgtgatcgaaagtcggagaattgaagatggaataagagcaaaaaataggagtgtaaatgaaaaagcaatgcgagaattcgtgatgacgaaaacatcgctcgatcatgcaaaagaaattaggacgagagcaatgaatgaagtgaaatatgctgaaaagccaactgatccgtcaaggcttttgagaggtgaaattcgtgcggcgaaatggacatttgcgaaaagcaaacgaaggcaattccgcctgaagggaaacgattggtgatcaaccaactcgaaacttccgaagaagaggccaaaagaaagcaattttgtgcgcgaaccccgccaccatttcaaaatctgatggcacagcagtgggctcaaaagagagaaaaagcggaaaatgaagtgataagcccagaaaagttggaaggaattttgcaaaaaatcgaagaaatgaaggggaaatgaatgtgatttgtgaagaagtgaaagcgttggtgaaccnatggtccgtgagcagtgattgtgaacccggca

SEQ ID NO: 36525 - DNA, 838 bp, Heterodera glycines
gtgccgggtgccgcggggtaagcagtgctggttcgtttcatcacggcaccgaaccttttggctagtcagcaatcgttgcttaacttgccagatcggacgggtgcgcatgattccactgttccaagcaccccaccaaaagcaaaacgatataaccaaaatataaggaaaaattttttaaaaaattttttctccatcttcctttttgatactaaagcatcagagtgctaaaattaagttgtaaataaaatttggtgcgctttagagcactttctgaaaaaaatatttatgaaacaaaaaaatcgattttttcaagtgtccgtttggggtactcaaacatttatggggagcaaaaatccaacgcagaattaaagtacaggctatagggaagctattccggaaggattcggtctccccataaatctgggcgcatcggctcggggggactgccccgaaaacaaaaaaatcgattttttcaagtgtccgtttggggtactcaaacaattatggggagcaaaaatccaacgcagaattaaagtacaggctatagggaagctattcccgaaggattcggtctccccataaatctgggcgcatcggttcggggggactgccccgaaaacaaaaaaatcgattttttcaagtgtccgtttggggtactcaaacaattatggggagcaaaaatccaacgcagaattaaagtacaggctatagggaagctattcccgaaggattcggtctccccataaatctgggcgcatcggttcggggggactgccccgaaaacaaaaataaatcgattttttccagtgtcccgttgggggtactcaaacaattatgg

SEQ ID NO: 36526 - DNA, 465 bp, Heterodera glycines
tctttgtcaccaatccaacaattttgctatcattcgagagcccttcaaatttttttataatttttcaaactaatagaggacacttagggctttcgaatgataccaacaacgttggatttggttgacaaagaaaaaagtggcgctatattgaaagttaccctttttgaaaagtttttcaaaagggggacccttttgttttgcaaaatttttttgtgataaaaaaccatgataattttttatccggggttttaaaggtcgctaatcacgaatctgacatgtattttgactaatttctaatccctaacccgaactcgaataaaaatcgaaattttgaatttttcaaattatgattttttgttcaaatttagattaggaaatcggaattgatcaaaataattgaaggattcgcgatcggggacccctataacccaagatcaataaatttttatgactatcacaataaaa

SEQ ID NO: 36527 - DNA, 1027 bp, Heterodera glycines
  unsure (1)..(1027): unsure at all n locations
cgtccgatctggcaagttaagcaacgattgctgactagtcaaaaggttcggtgccgtgatgaaacgaaccagcactgcttaccccgcggcacccggcacggtcccccgaaggaatggatttaattaaattctctccttcggggattttttattaaggaagagagttcattatttatttgtcttttgcataattaattcataagtatttttacagaaactgctctgaaacgcaccaaattttatttacatgttagtttaggcactctgatgctttttctatcaaaaagggagatgaataaaatttttaaaaatttttaattcctttttaaacaggccaaaaagtttaggcttaactttttagtgaaaattcaatcactcatttttcgagtagtgatcagaagcgcaccagattttgcaggggcctaaaaaggtcaaggaaaggcgtctctgcgttgatttagcagtagtacctatgaatttaaattttctatgaatttttaaagttttttgaaatttttttaagtgcaaaagtggtggtgtctgcaaaaaattttcaccgggtttaaaaaatctaggaaaattagtaagcatttgtagtgttccgatacgtatccctgcaaaatttggtgagcccctgatcaattacaaattatttatggacgatcaaatttttagaaatttttatttatttttgcataattaattcataaatatttttttcagaaaatgctctgaaacgcaccaaattttatttacatgctagtttaggcactctgatgctttttctatcaaaaagggagatgaataaatttttaaaaatttttaattcctttttaaacaggccaaaaagtttaggcttaacttttttttcagaaacttatcagaagcgccccaaactttgcagggatactgaaaggaaaagaattaacctgttttatcacattagcttgtcatcagtttttataaaaaattttcaaaattctgagtctcctattattttatttttttttcaaaanttttgaagggc

SEQ ID NO: 36528 - DNA, 1047 bp, Heterodera glycines
  unsure (1)..(1047): unsure at all n locations
attatatttgtttaatcttgtaatcttttttgagttatttttttattcccttgtaattgaaaaagtctgcccatttaattcttctcacctccattagcaaatggtcgtccattccatttgctatggttttttccttctcttgtcagcgcagcttttcccatgccacacgactttcaatgtgccgttggcgtcaatgtcgaataccacttttgcacctgcagagatgacaaaaaaggacattaaaaaaatcgtggaatatttttatttttttaatggcgagaggaacaaagactcgggatcccgatcgatcccgatgaattgaaaattgctcggaacggaccccgaagtcgggatcgagattttttaattagggctaggagaaataaacaaaattggttaaaattaaattttcttcggcagcatccttggccaggatgaagcttcccattgaaaattttatttaagccttaatcccccaccttgtgcaaaatgagagagtgcacttggcattctcacaggcggcacgaacacgaaaaaatgcttcagggctccagctgagcatgtacccgtgctgacgcatgaattccgcaacgaaatgatcgaccggaaatgccaaattttaaagattgatgaaatatcaaaataaggactagataactgcaaccgctttttttgcgacgcgttttttcaaaaaacttggggagggcacaaaggggggaggagtcggcatagccgataaccgcagtcgttttaatgaaatttgctaacagatttgtgtccaaaaatcgaccgaccaaccttacccaaaatgacaaaaaatctcgctaatttttccaaaatccataaaattataatacaaatctgttaaaatatggtcaaaattctcaattttcagaaaagaggtcgtcgcctaggacgacgtacccccatgntcagacatttgcgccgcctatantcgataacgggtttaaattttgtgtttttttcaatctttaagtcataaacagcattagttttggactangcgaaaatgtccgccgcaaaggc

SEQ ID NO: 36529 - DNA, 597 bp, Heterodera glycines
ataaataaatactttttgtctcctgcagcacaaattttgtaaaaccctcgaaaaataagcattttgggacacaacccaaaaaaggtcttctgattcccccatttttaaaaaaattatgctcttcatctttcagctttttgtcatcaacctcctacttttgttgtacatattagcatttggtccgtctcatgtgttccgactgcgcacatttatgtatttgcctcttaatttaacataatttatttacgttcatggctaattaatttttatgttcatggctaaatcgttgctctcccctctattagtgattaatttatgctctctaatacatcatcataataataatttatggacagcggtgccccccccccctccccctcttttcacactcattacggatttgctatatgtatgtatgtgtgtgttatgtgtcagggaaaagcccctccggcgacggggccaattctatggccacaccgattccgtcaattattcattatttgttgttatgttgttctacatacaacacatttgtacacatatttgggcctgcctctccgcctttcatctgctccatgttgtcatagttgtcccccc

SEQ ID NO: 36530 - DNA, 1012 bp, Heterodera glycines
  unsure (1)..(1012): unsure at all n locations
taaaatatgctccaaagatcgtgaaatattcacataaattttccaattgagggtgtaatttatcaaaatttcttgatatatgttcggcatgtagtaaaatgttccaaaatggttaaatgtggtagtaataatctttttaggtgaaaaaatcacgatactgcttaaaatttgcgcaagactggatcggatgggggtgggggcacagtcaagtgaataatttgcgctttctttttggtcttttccccccttcccatccgcccaaaaccaccacagcattgtgaagcgccgctgctgcactctgctgatgatgatgatgatcaaacaataaaaatgagtgattgatcattattagaaaattgagggagaggggagcaatcaatgtgccgacccgatcagtgatcagatcactcaaagaactgcagagagagagctagagaggagagagagagagagagagagagagagagagagagagagagggagagagagagagagcttttggcagatctgaaaaaacccagcgccgccaccaaccaaaacaccgattcacaaagcaaacccatcaaatccctttcaaaaaataacaacaaaaaccagaacgctgataatgataacaatgacaatgatgatgcaaatcagcagcatgaacaatcacaaatcaaacaaaaatcgaaggcgcaaaacaacctcaagaaagacgaaaaacagtccaatcaagcacaaaatcaacaaaatcaacaaaatcaacaaaaacaacccaaacaactaaaagacaacaaaaacaagaacgacgagcaagcacaaaagcaatcaaaagacaacaagaataaaagaaacgaccaatcacaaaaacaaacaaaagacaacaacaataacaanaacgactatccaacacaaaaacaaccaaaacaaccaaaacaaccaaaacatcaaagaaaaaaagcttcccnnnnccancaatcctcatccctagaagttgtcatcgtcatcgtcatcagcagcagtagcaaat

SEQ ID NO: 36531 - DNA, 911 bp, Heterodera glycines
aaatttttttaaattaatttcgtgatttatttgttagcttcgaacaaaagaatttaatagaaaataaaaaaaaattatttcgaatatttttttggttgattaaattgtgagaatgattcaaaaattttaaaattttcaataaaaataaatatgcattgtataaaatttgaaaatgagaaaataatagaaaatgagtgtgattggattggcttattcatcggtcaatttgcgttttttggttcctttttcttctcccaccgtcaaatcaatggccaaagtcactttatcttcaattttgtcgtaaaatcctttgctcgggtccatcaattccttaatttcactaatttattaaactatgaaaaaggattttgattgccactcaccgtagaagtaatgaaaagtgggaaccgccacaatttattattaaaaactctgtctaattggaaagtcaaatccttcgttccgctcttttgtgaaacaatcaccgtaaaagtaatgaaatatttgaatccccggtcgttctcttccttgttaaaaacatggtcaatttttttcgttaaatcctccgttccgttcttttgtgaaacaattcgtagggttgccgaacattcgaagctccaatttccatctttggtaatcaaaattaattaatgcaattaaaattctcaattttcaccattcgttggagggacgcacaaaaggtaaatgcccaaatatttctctgtgctgtcatttttctttgtaatctgtgcaagtattttccacggaagtccatttatgaaaacatcggtgccactgtttcgcctgctccccactccctctcgcgcaaattccgaaaatttctcaatttccaacgccagggtccctctgttgcctttggctatgttccaatcagaaattcttcatgccat

SEQ ID NO: 36532 - DNA, 1053 bp, Heterodera glycines
gggtcttccatttgctgaaccctctccaaagattgcactctgtcgatgagtttcgaagtgccgttctttcgtccgattttttggttgtcggccatttctcattggatgtgtgtcatttttacccaactcactcagttttaattcgaactttttgcttttgagggccttcctttgcctcgttcttaccacgtttttctcaacacggcttttaaattggcaaactttcgctcgtccgtggcttttgccgtcgttctcaaccgcgcattggcacttggccaaatgggcttcgaaagtgacaaccaagttcacatgtacaccttttacgaggatagtccgtccatgggattaattgcgtcgacggaaattcagccgaacaatgcgaaatcgcaagaattggccgattgggtgaaggggcaaattgaggggaaatttgctgctaaaatagtgcacgaattggaattggaaggtgagtaaatgtgggggaatttactggtacttttttattataatttgatgttttttatattttgattttttttttgtatcccccagaaactctcaatttttcattttttcccctcgtattttccctatgatttgccctccctttttctgttttgtcccatttcccctcctccttttggcacagatttggaaaatgccggcaaatccgacgctctcttccgccgtttgtcctcttcctccgccactttggtccttttctcccattcgcttggccttcgttcgcttagtcaaagtcaaattgcgctgcgaaatgtatgaatgctggggaatccctccgtaaatccgcttccattttaagtttgtcaagatttttcatcattgtccaccgtttttggaaaatttagagcggcggtcgatggcggagggtttttttgttgcgtcgtccctttgtcaaatgttaggcaaaacccaaaaaaatgcgaattgagcgttgaacagggccaaaaaccaatccaataaaaagtcccatttgaatgggttttccttcccctttaattgggttttggggttgcgaccaattttcaaaaa

SEQ ID NO: 36533 - DNA, 954 bp, Heterodera glycines
ttcatgataattgttttataagcagcagcaaatggcatctaaaaatgctgttggcactttgtttctatcctccggcaccttttttgaatttggcacaaagtctttttgtactccgtcatttcgtgggtttggcactctgtttgcccccccccccggcattgtccctctctccgttcttctcatccctgttgctgttgctgcaccaatttggtgctgcccttcgcatccctcacacacttccaaatgccttggctgtccctaatttggccattcaaagggattcggtcgcctcgtagcgaaaggcatccgaccacctcaaaaggggtaattaataatcattagtgtcaaattgctctcatttttccaatttttcttacccgcgtctcccaccgattgtaattgtaaaatacaaagcagcgcataatgaacaaacggttgacaatctgtttttttaaagaaaggatttcacattataccagttaattacgcaaaattttccaaattttggcccctatttatttgctttatttgaattatatgccaaactcacccattcctcgccctctcggtattgtctgccttggtggacacacgtgccatgggttgcgcgacaatcgatgggcccgaacaatgccaaaatgccagccaaaatggcaataattttgaaagcaagcgattgatgcattatttctttagtttttctaaaaaatatatttatttaatttaagtgtttaaaatgcttttcttttgaagcttttggcaattatcagtgagtataaatatttcacaagtgaaatttgaccaaagaatcattcgctggcaaatgaattttttgtgttcaaagcactgacaaattgacgaacacaactgacggattgccacacgcttcccactcaaagtttttggccctatttttggtcgttggcttatgctttttgtccatgatcaatcatt

SEQ ID NO: 36534 - DNA, 923 bp, Heterodera glycines
ttaaaaaagctgtatatataaaatgtatcaaaatgttcgcgttacttactatctaaaatttcttctatgtacattttaatagaggatatgccgaatccgctaatggcgttcactaacgtaacctaccagggatgggccaaatcgaaaaagcaaatgcgaaacgcgaaaaaccatccctgtaacctaccaccgtcattacttaaatgtgagaaggaaatgcctggggcctatttcaattcgcgtcgtatctctgatatgacgtcgatcgtgcaaatttttatcaattttatcgtttcacgaagtcacatcgaatttattatgatcaacgtacaaataaattttaaaaacccaaaagtaaaaacgttacaattaatttattaattcaaataaagttaataaacattgaattatattttaaaaaccaaaagatttatttatgtttttcatatcattaaaaagaggagagagcatattctataaaacaaaaaaatttaatgtgtattaatagttaaaaatttatttttatgaatttttaatcttaaatgatcagaacaaatacatggattgaaccacatacatataatagaaaagagttaaacaatgtgacgtcatatcagagatactaatagtgaaaattagagaaattaatttaattgcgtttaattaatatttgtactttgtgatctgtcagcagagacatttaaatttttatgtgtccataaataccgatgatccctttcttctagggaaacacatttttccttgttttggtgataaaaaagcttttctgacaaaattctgtaagtcaaattaaaaaacctattcaatttcaaataattcacatttgttttccattttaatatttgctcagcttttttatgtgagtaatttttaattaattaataaaaccaaaaagctaaaaa

SEQ ID NO: 36535 - DNA, 327 bp, Heterodera glycines
gtcgacaattccttggcaagcgttcggcgccccttggtgaagccgcggtcgaatgagcgctttttgcattcgagtccactcttaatgataaaagggattaattaaaagggttaaaaacaagtgaattgactgacaatgagactattatcaagaaaatgtcaaatgttacaatttatagtacccaaaaatgacattttttgcaatttttttgtaaaatcaattatttgggactaataaggcaatctgttgttaaactattgaagcatagatttaacgaagatgttcagattcggattcgaaagttcggaattggtgaaaaaaatgatt

SEQ ID NO: 36536 - DNA, 684 bp, Heterodera glycines
ttgccgaaaggtcaattcaatggccaaagggtcgtcggattcacttaaacggaaagtcagtcgtaaaggaaggcttcatttgtcaggaaatgatggcaacgcacctttggtgggctctaaacaattctttcttaaagaaaattcgccaatttttttcgcttttcgtctcaagcgatgcaattgcgtcaatctgtaaaagataaattgtttttttggattttaaagttttatctaattttaccacgcattcggagccaacgcccaaagaacgaataaaacggcgaccaacggcaagaaaaaggccgaagccaaacgcatctttgagacaaatttgttggcacaacatttcgcacaattcaaaggcggtcgattgcgagtccgaaaataaaaacggattaaataaattttaaactgaaaaggaaaacgaacgattggcagtgaaatgactcggccatcggtcaaatgaatcggcacaaacatttgggcgtcgtcgaaaattgagcagaacagttcaacctaattacgaaatgcaatcaaaatgggtttctgatttatttgattgaatttggccattgttttgtcaattaccgtatccccccgaccagtaccgtatttagggggggggggtacacggggtacgtaccccccccgcgaacctacggggctgggcgaaaagagaagagg

SEQ ID NO: 36537 - DNA, 919 bp, Heterodera glycines
  unsure (1)..(919): unsure at all n locations
ttcaaatttttaaaaccttaaaccagtaattttttacaaaagaatgaaaaaagcattttttttataaatttcaatttttgacatcaaaatgttaattttaagaaaataaattatttcattgagaaaaaaattgatcaattgtaattcacaggtattttaaacataaaaaattttgaataattatttttggatttttcaaaatttttaattgtaggaatatattttttgaaaatttcaattttttttaaatatggtttctatgtttctatgcggttaatattgtcgttaggattactgttgttagttacggtgtttttttacggttttccccacctacagtacttcactcagtcgggcaaaggggaaacgcgaatcagcggcttttgtggcgacggtaagtttattattagtagagatcgatctgtacctgtggatccaggcctggtttttcctggacctggatttttatccaggaaatccaggtccaagtccaggcaaaaaaacacgaaaaaacctggatttcatggataaaatttatttcaagtgaccgatgtcttttcatgttttcaaaaaatgattaaaaagattaaaaacagtatattattgtaaataagatatttttaggtgtttcccaagcaattaaatgtttttttcaaacatttgtttgcttttaaaacaaatttcaaaaaatccaggtaaaggtatggatcaggtctcgaggagcctggatttttcctggacctgtattttatccaatatggaatccaggtccaggtccaagcttttttcaaaatgtcgagctgtaattattagcattatgataaaattaatcatcacagataattggaaaaaaactatncaacatttacagtatctgtaataaaattatttgtangcaagttcggaaaactgtactgct

SEQ ID NO: 36538 - DNA, 902 bp, Heterodera glycines
cggaacggattagcatcggggttacgagatactttttgtcctaaaaagagatagccatttttctgagaattaattcacaatttccgcagctcttagggtaaggaaaaaattttgaagaggctctccggaacggattagcatcggggttacgagatagaaaattgtcctaaaaagagatagccatttttctgagaattaattcacaatttccgcagctcttagggtaatggaaaaaattttgaagaggctctccggaacggattagcatcggggttacgagatagaaaattgtcctaaaaagagatagccatttttctgagaattaattcacaatttccgcagctcttagggtaatggaaaaaattttgaagaggctctccggaacggattagcatcggggttacgagatagaaaattgtcctaaaaagagagccatttttctgagaattaattcacaatttccgcagctcttacggtaatggaaaaaattttgaagaggctctccggaacggattagcatcggggttacgagatagaaaattgtcctaaaaagagatagccatttttctgagaattaattcacaatttccgcagctcttagggtaatggaaaaaattttgaagaggctctccggaacggattagcatcggggttacgagatagaaaattgtcctaaaaagagatagccatttttcttagaattaattcacaatttccgcagctcttagggtaatggaaaaaattttgaagaggctctccggaacggattagcatcggggttacgagatagaaaattgtcctaaaaagagatagccatttttctgagaattaattcacaatttccgcagctcttacggtaatggaaaaaattttgaagaggctctccggaacggattagcatc

SEQ ID NO: 36539 - DNA, 887 bp, Heterodera glycines
catatcatccaagggaaggggtgccaactccttgcccaattgtctatcggcatacggatgaagcgcagtcgacatccaaggccgctgagctaatggaagttgatgaacatgatgatataatgatcatcgaaccacagacaagtggacaggcagttgatgccattctcacccaagcccaagtggccggtgaaaaccaagctgacatgcttggtttggtgtcggagtcttgcatcccgcaagaaccaatcgcgcaggctgatgatgtaatcttcgtcagacctaagacgccaccaaggcgatcactgcgcgtgcaaaaaaggctttcagcttctgttagccgttcgccttcaccggcgccaaaacgacccccgccagcaaattcgctgggaatggcaacgccgatcacacggcgttgctctgcatttcacaaggggtggcaatgcgctgcagcagcagccaaacatttcccggaatattgtgactccgggaaactcggtgacaaaaaatgcgccgattgcggtgcacatctcttctcacatgaagacagtaacatttgctgccggaagggaagagttgtgctgccaatgcttaacccgcatcctgacgagctcaaagagctgattgtggggaataagcaatcccgtgaagggaaagaatttgtgcgacacatgtcgcgttataacaacctgttccaatttgcgagcgtttccgctggcaacaaaccaagccctgctggcggtccgatggccgttattcttaacggagaattccatcgccgcataagcagcatgcaggctggaaacactcagattcctggttttggccagttgtacattctggaccccagtcgaggctatggaacaacgccaaaacaccccaggtttact

SEQ ID NO: 36540 - DNA, 939 bp, Heterodera glycines
  unsure (1)..(939): unsure at all n locations
gaggaagagaacacaccgtacgactttatagccaaaataagcggtggatttgaagtaatcttcaggaaagaacgacgagttgccaagacgagtgttgggaaaagaatggtgttgaaacaacggcagatgaacggcagcgaaaacaataacaacgcttatcaaaatcgcgaaggtaaaatctcggtcactgaaaggccagccaaattaattttaattttgttagtgatcgttccccttcttgttttcccacataaatgaaacttgtttaggtaattttttgaaaaaaaaattattttttatcaaaataagcaatttttaaatttctttttggctaagcgatactggtgagaggagcggaatactgcactcgtttttttaatatttgtaattgtttttcagttgaaatcatgcgttcacagaagagaaacattgcgatgcctccaattgctgaggaaacttcgttagtgcaccgaagtgagatactgcaacgattggaccaccaaatgcgcaaaaacccgaacttcgaaaatcgaataaaatcaatgctgagagtttggacggacgacatgtcatcgccggccattggcacttcaattttggagttagtcacttggcacgaactccccctttttagggtggtgccttccttcccattcatcctacagcaagagggaaaaggtcccaccgaaagaaaatcattcactcactggtaataaattgggatgacattttggcaaatccataaaacttagtttgcgcttaattcgctcacataagcacgaaaactcattttccaacttggtttgnggattctgtgatgatttttaaatgcctatttttgcaccttttagggttcttgtgncaaatgccttggcgcctattttcatannattatttaancaaatancatanaacgagaaatatgacccgaaaaattcc

SEQ ID NO: 36541 - DNA, 850 bp, Heterodera glycines
catgaaaaaattttaaagatttttgtttggatttttcatgacttggactcggtttaaaaactaggactctgacccggctttctgtacccggcaataccctgacccggtatttgcccaaatacccaggcccgtacccctaatttaatatacgattttgaagttttttaaattaaaaataaggctacagaaaaaattgaaaaactctcgcctctcgtcctctcgcctctcgccaactctcgtgtttttggggactctcgcctctcgccaaactctcgctctcgtctttttggggactctcgcctctcgccaaactctcgctctcgtcttttctgagacaagtcacacccctggtacgtaccccgtgtaccccccccccctaaatacggtactgtacctccttttgcaggtcctgcttctgcaggatcagctgctggttcttctccttgacctccttgcacttcttctccaactcctccaccccggcctgcttcgtcggccgttgattttgctcgtcctccaaccgcttgcgcaaaatctgaaaaaataatggaatttttccaattaaaccgatgaaaatttctgggataaacaatttgaaagaaaaattgccattgttctctctgtcttctacacctccaccaacgcgaagggagaaaagaggaaaatttctgcaaaaatggcaacaacttttttttaaaaataattttttaaaaattcacaataacttcccccaacggcgcctatcggcaccgcctgccccaaaaaatacccttaattttaagatttaaccaaaaaactgggcctttttcggcttgaaaatctgttaaaaaatgggaaaaattccaatttt

SEQ ID NO: 36542 - DNA, 947 bp, Heterodera glycines
  unsure (1)..(947): unsure at all n locations
tctgtgtttgattttttaaataatttaatgcgttttttggcatttgtattacatacatgaaagttgaatttcttcgaaatttttctttaaaaaatccacttttttacaaattgtagaaaaagagaaaaagatttgaaaggaatcgaacccgggggaggggggttccccgatttttcttaaaaaacaatttataagaaaattaaagtcaatttatttttttattttttttatcgggggcagggaggatgagcttctcctgcgaaatggcaaaatatgcactgaatccaaataaaaatgtccaacaacattttatttttcaattgtctgtaggtgggctccttcctcggcgcgtgtgccatgtttccgctcgtcaacattttcaaggtgttcaagaagcgggacccgtgcacttgagattgattgaatatgatgaaggcaattcagtcaaaatcagagtttcgtcacttttatccccatttttgcacacaatttttgcgttttcacattccattcgtttcttttaaatttttgtcccctcttattctatatgtgccaatatgtaatgtgatagtatttaaaatgcctcaaaataatctaaagaaaatcaattttttatcttaatttttccaaaataaatttaaatgttcttgttgatgaacttgatcaaacttagggatgaaatgaaaatgatttcagaaagggtctgtgtaatcgtntttggcgccagcccaagttttcggactataacttttttcattgtcatccatatccaacaatcttggtgtcattcgaaagcttaacatgtttagaagctatttctaagctattgcttcgcgattaaacaattaccaaaaaagttataacatgaaattgcaaaaaagtcaaaaattttgaagttttttcttaataactctttttaaaggccaaaaattttttttgttttttgt

SEQ ID NO: 36543 - DNA, 1181 bp, Heterodera glycines
tttttttaatttatttaaaattttattgtagattttcattcagtattttggaaggttttaaacccgtcattattgaacgcctttttctttcgaaaaaaaccaatataattattgcttatatgcaaaaaaaatcaaattaattctatcttattttagaatctaatattttttcctaaatttatcaagatgaatagagtcggagaaattttatgaaaaaattcaaacgctttagatttaagcgcatgtaagttttttcaaaattaaaaatttaaataaaccaacataattcgtatatttgaaatgacaataaatgaatgtgctttttttctcttaccatattccacttgcccatcctcttcattatgctcctgctgctgttcagtcttgacatcattgacatgcaaaaactgacaacactctccggagtggatccttccgacatctctgtcgggggggggggggggggggcgtcggtccctttgcttccaaatgactcactctgttcacaatgtaatccaacagttcaaaaatggccattgtcttcggcgttaggtcgtccgccgtctgttcctcctccgttccgttcttttccattttcacatcgttcggatggaccccgaaaagtttggcgtactctctgcgcgacggggccgggattgggtagcggccgatgacgagttcgaccagcgaaagaccgaaactccaaacgtccgattggacgctgtagcgggcgccggtcaaacgttcgggctgaaagaaagggaacaaatgactttcgaatttgctttttaaatgcaacagatgaattccggcatgacccatcccctctcaccgccatgtacgagcgcgtgccgacgaaggaattggccatgctgtcgattaacatgcaggagactccgaagtcgcacagtttgatctcgccctggctgttcaccagaatattggacggcttcacatcttcaaaacacatcaacaacgacaacagttttagcacaaatgccgaaaaagtcggaccgacccctgtgcaaaatgttgaactgttccttcagataggtcagtccgttgatgaccgccaccgctattcggcccacccatttctcctcgacgcgaccgaccgattgaagcactatgtccagggaaagaccgtccatgaattccatgcaaatagaaatgtcattgtt

SEQ ID NO: 36544 - DNA, 1480 bp, Heterodera glycines
  unsure (1)..(1480): unsure at all n locations
ccccatttttcgcaccgtgaatgttatttttattgaattctgaaccggtttgagtagattagactagaaaaaattgaaaattttgaaatcatgtttcccactcccttctcccaggggtattattttgtaaagtctttttttccccaataaacttgtcaaaccccatttttcgcaccgtgaatgttatttttattgaattctgaaccgttttgagtagattagactaaaaaaatatgagtgatcaaactttcactaaaaagttaagcctaaactttttcccaaagttaaaaagcaattaaaattttattcacctccattattgatagaaaaagcatcagagtgcctaaactaacatgtaaataaaatttggtgcgtttcagaaccctttctgaaaaaatatttatgaattaattttgcaaataaataaaaacgaaagactcagattttcgaaaaatttttttgagccagctagctcggcgctcatttcagtgtaagttagtcctttaccggggagtatccctgcaaagtttggtacgcttctgctcaattagcaaaaaatatgagtgatcgaattttcactaaaaaagttaagcctacattttttggcatatttaaaaagcaattaaaaaatttaataattttcctgcaccgaaggtactcactcggcctcttcgcggcctcgtggtgggccttcgcccccccccctcccacgcccttcagagcacgacaaatatttcaacaaaaattttgaaaaattgactagagcaatcgaacgctaacggacgacctaatggaaaaaaatccccgaaggagagaatttaattaaatccattccttcggnggaccgtgccgggtgccgcggtgtaagcagtgctggttcgtttcatcacggcaccgacctttttgctagtcagcaatcgttgcttaactttcagatcggacgggtgcgcatgattccactgttccaagcaccccaccaaaagcaaaacgatataaccaaaatataaggaaaaattttttaaaaaattttttctccatcttcctttttgatactaaagcatcagagtgctaaaattaagttgtaaataaaatttggtgcgctttaaagcactttctgaaaaaaatatttatgaaacaaaaaaatcgattttttcaagtgtccgtttggggtactcaaacatttatggggagcaaaaatccaacgcagaattaaagtacaggctatagggaagctattcccgaaggattcggtctccccataaatctgggcgcatcggttcggggggactgccccgaaaacaaaaaaatcgattttttcaagtgtccgtttggggtactcaaacaattatggggagcaaaaatccaacgcagaattaaagtacaggctatagggaagctattccggaaggattcggtctccccataaatctgggcgcatcggttcggggggactgccccgaaaacaaaaaaatcgattttt

SEQ ID NO: 36545 - DNA, 1427 bp, Heterodera glycines
ccgcttaaaaaaacaaatcaaatttgtttctttaatacagctcattccggtaattcacctcatacggcttttccccagtgtgcacacgccgatgattgaccaaagtgttcgaatgcgcaaatcgctgtccacaaaagtcgcactgtttttttttaaataaatgaaataaaaattaattttaaaataaaaataaaatgaatgaaaatgattgaaaataaggggaaagacggaaaaaagttccaccttttacaaccaaatgctaatccatatacacccaaaaattgcctaaatttttaaggtcgaagcacaaccaaattttaaattcaaaatttcaattttcaactcacctcatagggccggtcgcccgtatgaatacgccgatgacagtcaagatgattctgttgagcaaaggccttgtcacaaaactcacactgttttttgaaaaaggaaaataatttaaaattcaaacatccaaaatccataaaaaagaatttgaaaatcaaatcccaaatcactcaccccgtatggcttttcaccggtgtgcgtacggcgatgattgtgcagagtttgacaatgcgcaaatgttttcccacattcagcacactgtttttaaagtaaaaaaataaaataaaaaatttattttttaattttttaagcgttttttgtccgtcttaataattaataaaaaaaaaatatttttaattaattcttattttactcctaatccttaattgcatcaacaggcatttattattgctattcatgtgcaccctttcaattctgatgacgtgccaaaactttttggacaatatgcgcaaatctttcctttttcgtttgccattttcggtttttgtgccatcggtctttgctgctggaaaaatgtgacccataaattcgggatttggcattttttcagcaatattttttgtttttactcaccaaaattctgctcttctttcctcccaatgccccctcctcttcatccctttccccttccaattcgtccaaaaattcctcctcttcttcctcctctttttcttctacctcattctcttctccgacaaattcctcctccttttcttcttcttcttcctcctcttcatccatcgtcccttccaattcctccaaaaatgcttcccttccatcctcctctccctcttcttcctcctcctcctcttcaacaattgattcttcctgttcgtcctcttcctcctccttttcctcattctcttccccatcatttgcctcctcccctcgtcctccattctctccttcttctcctcctctgccattttcttccttttcctcttccgtgttgttgttttgttcaaatttctgcttcaaaaattggtcgacaattgctttgatcagcaaaagtgtataaggcaaacagcggcgatcagaagaaatgccaacagcaaaaaatg

SEQ ID NO: 36546 - DNA, 1562 bp, Heterodera glycines
actagggaagcaacttttagtgaaaaaactttttttttgctcatttgttttgaagaaaggagctcaaaaaacgcatttctgcgttaaaattttttcatttggacgtcacttttcgtcactggaaatcactattttggggttttgtcactaaaatagttaaaaatcactattttggcgttttgtcactattttttcactatttcgacattttttggaaaattctttaacaaaaatgcaataagaacaactaaatatcgcaataattgttttttattcttaaatttagacttaaaatatgccaaaaattaaatcaaaatcggccagctttcgggaatggattcgaaggatcggaggaactgacttttattcaacaactggcaaaataatttattgtcaattatgtgaacaacaggtaactgcgacaacatccgtcgaacaacaacaactaccaataaaaaattcacagattccttgcacgcaattcgcgcatctcaaacaacacaacgaaacggtaaagcacaaggcaaaattggaacggaacaaaggaggacaacagcagcaatttttgacaacaccaaacaatgttccaaatcaattcaaccttgatttgtgtgaagcctttgtctcagctaacattcctttccaaaaattggagaatgaaaaattcaaattttttttgggaaatgccccatcgttacacacttcaaaaaaattacttgcggttgacttttgaccaggtcattcaaaaaacaaaaccaaaaacagtaattcattttagacaatagagaaaattaagaggtattttaggcatttgcctcttctttaaaaaaaaataattaaatgtaaaatgccattcctaaataattaccagccctagtaatgagcaataagtgtcggtgttttgcctttatgctattgattttgccgtttgtccactccgcttttctgcttctccttttcaatgtctcttctccctttcgttggcatttatctttccattctcccaacaacaataataataaatccatccattctctgtgccgttttaccaacatttttgatttttccatcactttcttagcttctttgaattaaattttattgcctattttttgtatcaaaatatctaggcaaatttatatgacaaaaaatcactaaaattattattttttatccgaatgtttagttaatttgagcattttaactgtgtaaaatttaacgaatgtcaaaaattacttgtaaatatttaaactcatcttggaaaaatttaattcatattattttgtcacattcctttatttttaaatattaaaaaatttaatttctttatcaatatgaaaaattaaaacttttttttaatattattttcggtgttttataataagattatgcacaaatatttaggggttgggtaccatgcataacattcatttccctctttaattagaaatgacaaaacctgacactttggcagaacgaatgaatttgttgctaagcactggccttggtgcggatgtgtactttttagtcggagaagcagacgcaaaagaggcaaatgtgaa

SEQ ID NO: 36547 - DNA, 1259 bp, Heterodera glycines
acgtagttgtccaataaggtacttggactttccgcagtaaaatgtggtacaaaattttgaaactgtcccgcctcacggcggggcttaaaagcattgtactgcataattaaaagctaaaataattttcgtatatttttcacaatttatttcaaaaacccaaaaagaatgattcaattttgaaacgaaatagtgcacaaaagggagggatggttagccgaaaagaggaatttttagaaaagagcgcccccatctgatattcccatttttccgttccacaactggccaaaggcgactgtgctcattgacacgtagttgtccaataaggtacttggactttccacagtaaaatgtggtacaaaattttggaactgtcccgcctcacggcggggcttaaaagcattgtactgcataattaaaagctaaaataattttcgtatatttttcacaatttatttcaaaaagccaaaaagtccggaaccaattttaaaaactaaaatagtgcacaaaaggggagccgccgcacggcggggcttaaaagcattgtacagcataattaaaaccgaaaataattttcgtatatttttcacaatttatttcaaaagacaaaaaaaatgattcaattttgaaacgaaatagtgcacaaaagggagggatggttagacgaaaagaggaatttttagaaaagagcgcccccatctgatattcccatttttccgttccacaactggccaaaggcgactgtgctcattgacacgtagttgtccaataaggtacttggactttccacagtaaaatgtggtacaaaattttggaactgtcccgcctcacggcggggcttaaaagcattgtactgcataattaaaagctaaaataattttcgtatatttttcacaatttatttcaaaaagccaaaaagaccggaaccaattttaaaaactaaaatagtgcacaagaggggaggcgccgcacagagggggttataagcattgtacaggataattaaaaccgataataattttcgtatatttttctcaatttatttcaaaagacaaaaaaaatgattcaattttgaaaagaaatagtgcactaaagggagggatggttagacgaaaataggaatttttagaaaagagcgcaccccgtctgatattcccatttttccgttccacaactggaaaaaggcgactgtgcttattgacacgtttttgtccaataaggaacttggactttcccctttaaaatgtgggacaaaattttgg

SEQ ID NO: 36548 - DNA, 1351 bp, Heterodera glycines
tattgataagaaggacgacgacgcatccgactttaagccggagactgtgcgggggcatgcccgagtctgtgcgccggttcaacgcagccacttcggactcgatctcatcgatgtccagtgggcggtcgtcaaggggcttatccgtggacaagtattcccgcacttgacctggcacattcgccatcatgatctcgttgacttcgtcgtcacgtgtcaatgtgtggagcgagaatcaaacgattgagcagctccttgtcattgccaaggagttgttggaagttaggatagacatagtctatcagctcttccttgctcttaacgaggaactgcggaggaatccagaagtgctctccggtttctccgagcccgatttggcggcacatttgcaagtacgcttgctgaccttggcccagtctctggttgatggtcaatttcatcgtggtgaattgaccaaacaacggagacgtttgaaaacaggctgtcacctgagcggttaagccttcatgaggcacgaccggcagcgactgtttgaagtcaccgctgaaaatgaccgtttttcctccgaagaggagatccttgtgctggcgaattgccatctctttgcacactcggtcgatgacctcaatcaccgtgttgtgaagcatggtgatctcatcaatgatgatgagttgggcctcacgaatccgacgggcaaagaagctctccagcggaatgcttgggagtttgtctaatgacacttctctacccagacgaaacgtggaatgggctgttttcccatatggcagcaaaatggctgcacacccagtggatgccgtagcaagcactttgtaggtgtatggggcctttcgcaagcgcctaataatttggccaaacaggaatgtctttcctgtgcctccatcgccgtatatgaagaaacggcgggggacagtcgaatccctagggttcgactgtattgccaacaaaacagcatcaaagaccttctgttggtcgctgttaagtggcggaggggtatttggctgtggacgaggatttggttgccctggaggcaaattcaaatcatcatcgccaaagaaaaactcttcaattgccgcgtcagtatttttggcaattgaagttggcgggtctggcaggctaaaatgcacacagcttaagttaaagcagctgtgcagccgccaatcaatgtcggctagggcttcaagctcttctactttatgctgtgccagagtaataatgccttgcggattgtacatttggtctttgtacttgttccacaattctatggcattactcggctggccatagaccaggatgctcacaaaaagccatctcatctgatctggccagcgcgaca

SEQ ID NO: 36549 - DNA, 594 bp, Heterodera glycines
catcgcaaataaaaatttacgaccaattcttccaacactttgcgtacaaaacaatataatgtattgtcctttctccgtcatagcacttgggtaaaaatgaaaaaggtgtggaatttcacgcgacggcgcaataaacggccaaagcgaaggtaaacagcggaaggaaatgggggaaaaggggaggaaaagcggagggaagggacaatgactccccgggggaggggggggggggcattggcggattaacgacgaaccaaacgaaagtgcgggaggaggcaaagaagggcacactgtagggtgggcaattaccaattgataatggaaacagcaaagtcgaaaagtggcacacacacaatgccatcccatggcaatgccatcccatcccatggcaatgccatcccatgccatgcccattatcccttccctttgtcccccccccctttcagtccctctttctcatcgtcattggctcgctttgctcgtcccttactccgtccttaattcgttgctaaattcgtgccaaatatgtctttgtttgttcagcttctgcccatctgtcaattcccttcctaaaactttccctcatttctcccc

SEQ ID NO: 36550 - DNA, 690 bp, Heterodera glycines
gttggtcctcaaaatcgttaaaactatttttaaaccagcaatcagaaaatggtaaaagaacgtcaaatataaaagattgaagcggatcacgcgcggacgtcttcctccgcccttcgtctcgccccactacttgctccgtcttcgcatgctcccttttgcggaatttagattgccttcgattttgggtgtttttgagtttgggagctcagataaaccattacccctaagcctaagctgaagcctaagcctaggcttaattttgaatttagtcgcaaattaaattccggttttttgttcgagtcatggttcggtattcaaatttggtcaaaatggatgtcataactgtgttcagcaacctcaaagccccctataatatgttttcgtttaatttaaaaattttgagtttttgttcgaatttgggttcggaattttgcaaaataaaggtcatattcgtgatcagcgccaaaaattaccatagaaaaattatttaaaatgtcttttgggtgctttttatagtgcggtcacttgagtcccagctaagtttggcactccaattccggcacttttcagcctgaaaaagggcaagcgcgcccctaattctatttttccaacccatttcgaacctttttacatcgattctgaccgtttttaagcatttttgagtttggggcctatgatcaatatttacca

SEQ ID NO: 36551 - DNA, 926 bp, Heterodera glycines
  unsure (1)..(926): unsure at all n locations
ctgttgcactcagcgacgagtttttgtttctcggtgaggaaaagtctgcagatctttagaaagtcggcattcttcctaaatttgtttgcctttccattcactccacggtgcttttcttactgaaacacttcggccaagtcgggcttccgagaatccctaacaaataagtttgaaatgcatttaatgtaatttatattttaattatatttactaaccatttaagaattttgtcataaaaattatgcaaaaacgtaagatgaacatttaaaatagtctgaaagtgatccgcgattcgtctgatgacgtgtttggaatggagcaattttttgttcattcttttttcacagtcattcaaatgcctaaatgaaataggtatttgagaaggtatttataaaagaaaatgacaaataaaacaacaaattgcgacagttaaaaacggcaaaatcacctcggataattgagcccaatcagttgcaatttcataacataagcgcgttgtttctgataaatttctaatgcgacttcgtgcaatttccgcagccgcaaattctgataaaccaataataataattgccataaatgactctgtctgttgtttgtcttcgattcgtccattttgcccacctctttttcgtccgtttcgctgtattggggaattgggccaaaatgttccacaaaaaggcattgctcctcctccgcctcagcgcatccattctttgagctgatcaaactgctcgttttcgtcggttggacagtcccattttcagaagaatgtccgggctgacaatgagtggcccgggggcgggtcgctggcgcagcctttgcgggaacattttctgtcggatggcaaaggacgatatttgccanactccgaagngattctgaaacatttagtngaattcgaattaaaagaaagcaaaggaccc

SEQ ID NO: 36552 - DNA, 980 bp, Heterodera glycines
aggggtattattttgtaaagtctttttttccccaatcttcttttcataccccatttttcgcaccgtgaatgttatttttattgaattctgaaccgttttgagtagattagactagaaaaaattgaaaattttgaaatcatgtttcccactcccttctcccaggggtattattttgtaaagtcttttttccccaataaacttgtcaaaccccatttttcgcaccgtgaatgttatttttattgaattctgagccgttttgagtagattagactagaaaaaattgaaaattttgaaatcatgtttcccactcccttctcccaggggtattattttgtaaagtctttttttccccaataaacttttcataccccatttttcgcaccgtgaatgttatttttattgaattctgaaccgttttgagtagattagactagaaaaaattgaaaattttgaaatcatgtttcccactcccttctcccaggggtattattttgtaaagtctttttttccccaataaacttttcaaaccccatttttcgcaccgtgaatgttatttttattgaattctgaaccgttttgagtagattagactagaaaaaattgaaaattttgaaatcatgtttcccactcccttctcccaggggtattattttgtaaagtctttttttcaaaataaacttttcaaaccccatttttcgcaccgtgaattttatttttattgaattctgaaccggtttgagtagattagactagaaaaaattgaaaattttgaaatcatgtttcccactcccttctcccaggggtattattttgtaaagtctttttttccccaataacttgtcaaaccccatttttcgcaccgtgaatgttatttttattgaattctgaaccgttttgagtagattagactataaaaatatgagtgatcaaactttcactaaaaagtaagcctaaactttttcccaaagttaaaaagaatt

SEQ ID NO: 36553 - DNA, 870 bp, Heterodera glycines
  unsure (1)..(870): unsure at all n locations
ctttctctgctaagtctgttttttacagttcccatggtaacaaattcttttacacgagggaaagggaggaaagtgttggaaatgcgatgaatgtgtggcctttaagaaggaaagacgcgctttgtgtcttccgtttcccattacgttttattgtaatgatattttcactgacaaaacaatgtttttgtagacattagcatggtttgtaatattcgataatgtgtgaattcgctcgttgctttaacaattgcccgggggcaaattgacgggaaacgaacggctgaaggggccgggggggggtcagtcattcgctcttcgtgtgccttccttccttcactgatgcatttgcaaaatgccggctccgatgccacagccaactcctttgggtccgaattgttttgcatagcaatctgaaacattctgtgaccttctcagagtttgtgatggcaaactgttgcaaaagatttcgccgtctctgtccgaaaatttccccggctccaaagaacggccgcagcggagacagcggaagcagcgtttgtgccaaaccttcaaaaagcaatcgcaaatgaatagagtcgcccttcccacgtcacctccccggcggcgattagtttttcggcttcaaaagcgcgctgaaggcaccttttgcagacagatgcacgacggacggacaaagcagaccgacgcgctgactcaagcggaacacgcggcggaaagaagcggagaacagtcgccggcggagaagctgacgngttgnggaggacacggcgaactgcacgcgatggaagaggncgacggnagggcgagtccgcctcctcctccacttccgggatcggacttgtcaacaattggccaaaacgcccgcctcgt

SEQ ID NO: 36554 - DNA, 668 bp, Heterodera glycines
tccgggaaagttcaagcaagaagtgagccctcaactagactcgaagccgaataaattagattttttcgagagtcgcagtcgagactaattagcattgattccggcattttgggatggttttccaataaatttagatattttttagcacaataattaatttttaactgtaattaatgactaattgatagtgaaggcaggggattaacaaattatcctttccacggttttcccacttttaaattgcccgccgttttgtctccgccgttattcattcaccgataagtacatatgtccactgatacaataaatacaaactttcttacggatcccaacattagcagcagcagcagcagcagcagcataacattggttatgattcgtcacaaaagtgtttatttatttatgcccccgggggtgggggagggaaaaagcccgttatttccccctttattgacataaacaaacaatacaacaaatgccatgttatgctactcaataattggattcccatcaatttttttgattatttattttctattcccatcgcctacgatttttgtctataatctatggtgctatgcgttgatggtgctggtatattgtatattcagtctagaaaactccggtgaggccgtccacaaattcatgacaccgagccacaccaatta

SEQ ID NO: 36555 - DNA, 1034 bp, Heterodera glycines
cgttggatttttgctccccataaataggtttggagtaccccaaacaggacactctgaaaaaatcgatttttttcgttttcggggcagtccccccgaaccgatgcgcccagatttatggggagaccgaatccttcgggaatagcttccctatagccagtactttaattctgcgttggatttttgctccccataattgtttgagtaccccaaacggacacttgaaaaaatcgatttttttgttttcggggcagtccccccgaatttttcaagtttcttttcctttcagtatccctgcaaagtttggggcgcttctgataagtttctgaaaaaaaagttaagcctaaactttttggcctgtttaaaaaggaattaaaaatttttaaaaatttattcatctccctttttgatagaaaaagcatcagagtgcctaaactagcatgtaaataaaatttggtgcgtttcagagcattttctgaaaaaaatatttatgaattaattatgcaaaaataaataaaaatttctaaaaatttgatcgtccataaataatttgtaattgatcaggggctcaccaaattttgcagggatacgtatcggaacactacaaatgcttactaattttcctagattttttaaacccggtgaaaattttttgcagacaccaccacttttgcacttaaaaaaatttcaaaaaactttaaaaattcatagaaaatttaaattcataggtactactgctaaatcaacgcagagacgcctttccttgacctttttaggcccctgcaaaatctggtgcgcttctgatcactactcgaaaaatgagtgattgaattttcactaaaaagttaagcctaaactttttggcctgtttaaaaaggaattaaaaatttttaaaaattttattcatctccctttttgatagaaaaagcatcagagtgcctaaactaacatgtaaattaaatttggtgcgtttcagaaccctttctgaaaaaatatttatgaataattatgcaaaaacaataaataatgaactctct

SEQ ID NO: 36556 - DNA, 1034 bp, Heterodera glycines
agatgccctcgaatgcatgaaaataaggaatattataagctgtcaccggataaaaaatgattcaaaatgtagccagaatatagctttcacctccccaaatctactgttcaatttcgaaataatgaactgtgtacttttactaagatgtgtttatttgaaaaaggttggcctttcaaaaggctctctgaataaaggctcacagaattcagctccaattattttgccgatattagaattttgtacggttaaaataaagattaaaataatgtattagcatttggttttcaaatataaaaagaaaacataaatgacatttgttataacttaataaagcttgacaaaaggtctatctccatttcttgcacactaaataaaatttaatctttatccacccagatgccctcgaatgcatgaaaataaggaatattataagctgtcaccggataaaaaatgattcaaaatgtagccagaatatagctttcaactccccaaatttactgttcaatttcgaaataatgaactgtgtacttttactaagatgtgtttatttgaaaaaggttggcctttcaaaaggctctctgaataaaggctcacagaattcagctccaattattttgccgatattagaattttgtacggttaaaataaagattaaaataatgtattagcatttggttttcaaatataaaaagaaaacataaatgacatttgttataacttaataaagcttgacaaaaggtctatctccatttcttgcacactaaataaaatttaatctttatccacccagatgccctcgaatgcgatgaaaataaggaatattataagctgtcaccggataaaaaatgattcaaaatgtagcgagaaaagaattttcaactccccaaatttactgttcgattacgaaataatgaactgtgtacttctactaagatgtgtttatttgaaaagaggttggccattcaaaaggcactctgaataaaggctcacggaattcagctcccaattattttgccgagtattagaattttgta

SEQ ID NO: 36557 - DNA, 1138 bp, Heterodera glycines
ttacagtaagtaacaaaagtatatgctcatacagtatcgcagaataaaatagtgggtaaaattccaaaaatacaaactttccttacactaacttagccccgtccataagcattcgaaggaacccaaactcttttcccttctatcgctatgagaaatgcctaagctttgattaagatttgatttcctatgaagaaaatgccgaagaattggtgagacttgagtccagatgaagaaatgtcaatgaaaaacgagaacaaagatttaagaatttttgggatttgaatccgatgagaaaatgccgaagatttgttgtaaaaatgattttctctgctctctctatttattgactcatctctcgttttttaggatgcttatatatgtatttaaaactgaagcccggaattctgaaaaagtcgggagggatttggaattggcacccattgataaaaacctgctgctgctttgattacccaatttggtaatgaattcagccattttttgcatgtgtttcgcttttggcttcgtctgtccgtccgtccctttatctcctccaatggttttgttgccaatttttttggttgttcgccgcgactgatcatcaacagccattcttggcccagtccatctcggcactctccgaaccgaccaattcattaactaattaaccaatgcatttattgctttgccgcattcccttttgctccttcagaaattaggaagaaatgaacggaccatttatgaaattatttgcctaattggtttttggcggtggcggcgcaccaatcgcagcatgaaaattgcacttgagcaaaaagcgagctcattttcaggactaaaaaagcgcgaaagaaagtgcaaaatgagaggacattgtgaaatttaattaaatgaagaaaagggcaccgaaagaggcgtatttaagacgaagaaagagggaaagagaaggccaaacagagaattagtattttatttttcatttttatttaagagaattaaaattgaaatgactttcaaagctttgcgtggcatttcgccgtgctccaacgaaaaactgaaggacgaagtgcgaaggcagcagaagaaggaggaggaagaggaagcgaaaaaggtggcaaaggacaacgatggcgaggggtgg

SEQ ID NO: 36558 - DNA, 830 bp, Heterodera glycines
acaccggcgataaacgccgccatttcctccgatgaaagcgattggattccgtcgagagaagcgacagaacgcgtagaagaagccaactgaaaattttttatgagacagacttttgcttcccttccatttattcgtccctcttttgtcaacccaaaggaatgaatattaaaattgttaggcaccgaccgattcgttgtccaacccatagacggaactgcgccgaatttgtgccctcgccgccttttctgcattctaatggaaagaaatttgaatttgcattttaaagtgctaaaagtgggggaggggaagtaaactcccttctgtctttttgcttaaattccaaaattctcatccccgaaaattcactttcgactccaattgcgcaatttgttgtttcaattccgacaccgcctgaagcgcttcggtgtattttagccgttgcatcactgaaaatggacgaaagcgaatgttgatggaatgtcaaaggcactcatttgcccaccgttcttttccttcatttcgctctgtgacacgaccaatttacgctcgttgtctcgcagctcttcgcgaagttcgtgttcaatctgtagttgttcctcaatttaagccatttcattggtagcccatccccgctctctctctttcactatctttcccccatgctctctcactctcattattttcccccctttcaccctctcattcgcaatctctctctttccctccatccctccttctttctatcaagcccatgcatgtgcaaagggaggagcgccgggaccaaatttcttaggaagatccagaaccttctccggggacgacctttattt

SEQ ID NO: 36559 - DNA, 845 bp, Heterodera glycines
tttctttttttatagaatctgagaatttcagaaatttactttcatgtatttaatgaccattacgctatgaattgaataacactttttgatcaaaaagtgaaattttgagaaaacttgaaatgaaaattcccagaatttgttaattgttcaaggattttctatccataattgtctaccaaattcatcttcatttaggtatttcagtgtgttaagaaaatgattcaaaaatgataaaaatttaggaaactcaaaaaatctaggatcaaattcattattttttaaatcatttttttctttttttatagaatctgagaatttcagaaatttaattgaatctatttaatgaccattacgctatgaattgaataatactttttgatcaaaaagtgaaatttttagaaaacttgaattaaaataaaacatggcgctttcttggtgctatcgctgtgccaactgatgatgaggcatttcatcagtcagctcgtgtaaatttgttacaattattttataggtgcaactttaggatacattgcgcactgtgccatggcctcttttttcgtgtgtttacagataccgtaccaattgtaggtgccggcgccatcgttcaactcctgaaagggcatgagactcaacttttgggtcttaagccactgagaagtgtttgtctcgagtctcaagaggtacgaagaaatgacgaaagtcattgccggtggtgcagtgaaaatttgaagttttagcgaaaacctgcccgaacattgggggggaattatccttccctgaggcagagcccatggctcttctatttcgaattttcaatataaaaaataaattgaaaataaataatt

SEQ ID NO: 36560 - DNA, 1016 bp, Heterodera glycines
gaaaaactatgatggaccagcttccaacttcatatccgcttcttgatgattccaccatggaatatttgggataaatttatgaaaaattttttatttaagtattaataatgaaaaaattattaatcggtagattcataaatacataaaataagtgtcttatattttaaatatatttaaatgaatttttcaagtgggtgatggtggtctcttaaacactccaacaccccccccccccccgccccaccaatgttttgtgggcccccgtctgtttccgtaatcattgatcattgcattgggccactttctcagtcacttatttttggacagcaaaataattgttttcatcgagacctttttgctatttatacgagacgtacttaggccaatatttctaatgtttatttgcgaaatttatcatttattaattatgagggcgactcctcaccaaaaatatcggatcaaaaaatgtacggaaggcggcggttcgccgggcatttcctgcgccatctgaaactaatgtgaaaatcgctaattttttggtttcggcatatccgagttttggcaaaggagttcaagaaacttttttggaaaaaatgccctccgggatttttttttaaactttgccttctgatggcaaagtggcaaagtgcgttcataaaatttttgataaaaaacctcccattttttatgtcttaaactttacatcatattgtctttattgtcttctcgtctatatttggccaatggcgtgccaaattggccattatttcctttcccaatccacggttgttgacacacccccacactctccgtccgtagtgccccacttccacccaatcaacccgataattggctgcttttcagccaatgccgccacaatgttgaaattgataagagaaaataatcgaaaagagaaagaaataaacggaatggtgtgatgaggaaaaggaggaggaagataacaaggaaaaggaagaaaatgggaaagagaaaaagaagagagaaagcgagggaaa

SEQ ID NO: 36561 - DNA, 791 bp, Heterodera glycines
ttaataacgaaaatatttatcatttgattttgttaagacttttcaataattattatagcgcaaaatgtagtcgtatacgaggaaattctgtggaaagaaaaggtttaaaaataaattatagatgaactcgaatcttcatgtccaacatattaaaaatattcataaataatgcttgttgaacgccaaaaataattactagagaagaaacactgtaaccgtctcggcagtaatctgcaattttgaaaaaattctgaaatagcccaaaaccactcgccttaataacgaagatatttatcatttgattttgttaagaattgacaataattattatagcgcaaaatgtagtcgtatacgaggaaattctgtggaaagaaaaggtttaaaaataaattatagatgaactcgaatcttcatgtccaacatattaaaaatgtatttttttcaattagtctaattgttacaaattataattttttatgttaggattttgcccaccaatgtttgcactacatttgtcaaaaagctgaaacattattcaagcaatcggattttgcacattgatcaaaatttgttttgcggcattatggaacgtgattagctgctgctaaccgatgaatttgaaatttgaaaagctgtgaacatttaacttaaatattattttaaaatcattttaaattgttcattaggcactccgttgggccgacgaaaagtgccgtcaaaaattccatcgaatgttccgactcgaatcgtcgttctgcgcttggtccggcactgtacaaaattcgtttccc

SEQ ID NO: 36562 - DNA, 1022 bp, Heterodera glycines
taaataaataaattatagagtgtttgcggttgcgggtaactccctgtggttttcgggcaatagccatgttcgcgggtatcagttgctctccttgctgagcagaatgtaccaagtgtcaggttctagggccaaggtgagcaggggaaaagcgcgcagaagtgaaaaatgcacaggtgagcaatgcataagcaatttcagtgctttgacgcacttttataagttcggaatatttagcggagtcactgcaattcattatcgatgcaccacaagctatgaaattatcaaataattatggtaatttgcaaaaaaaaacatttccttcatattgaggaaaacgaatttttccaacaaaataaatttaatttttttttactattttgatttttttaaagttattttcttgtttgtttgtttgttttttttttgcttttagggatgcattttttcaaatttatcttgaaaattccgaaatctgatgataaataatggaagtaaaaacgcgtcttagacgcttaaaaccaagctaaaatattgtgtatatttttggctaaaataaattgcaaaaaaaaaatatttgaatacatataaattcggaccttattcaaatgtctaatttacagggcttccttttttatgtaagaaaaatcgcgaaatatgtaaataaaaatgctaaaaatataagatataaatccatgaaaaatatttatatattataaaaaaagaagcctggtaatttagtattaattataaaataattcataatttattaagcaaaaccattcacgcttcatatatttagtgaaaggaaaatgtttagacttttcaattaccgaaaaaaattttccgtattaacaagcataaccaattagcaattaattacatgccaaatgaacattctgtgtggtcaacttacgtgatagtcattaacacatgccgaagattaatgatgtatttttttcgactgacaagtgcgtgtgtggggaaagtaaaagtgccaaaaattaacttccctattcattgaa

SEQ ID NO: 36563 - DNA, 946 bp, Heterodera glycines
atatatttaaaatggggaaaataaaaaaatatactaaatttaaaatttgtactttcgttcagcttttatagcacttatttcaggcatcggcgaaatctaatcctaatttgttcagattagagattttttggtcaattaagtcatatacatagcatttttctcacagtccaaattgagtaaattagtcacaggaattctctcagcttatttttaatcttttttaaaattcaaattattattttatggattctttgtctgtgggtcctttgtctttgtgggtcctttgtctagatattttgaatgggacaaactgattggctttcaattgcaaaaatttgcttttttgatgaacgcttaaaagttataaaaattttcccggcggcgcctaacggcaccgccgcgccctctcccctcgaccactttccaaaagttttttggaaaaatgcgccgcaaaaaattgttaaaaatctgattttttgatcccgagtgcactaaattgcatgatttgcccatttcctcccaaaattgttaaaaataaatatgggaggcgaaaatacgaaacttgatacaattttaattgattatattgttacactagttatttatgctattttgcaaaatgtcctgatttttgacagcaaaatctgattttttgggcccgatgttctgattttgaaaaattttcgatccgagccttgttgtaaatttaagtagccaaaaaattggtaaatgacaacagtaccttttgagtttggaatttataaccttggctttgacttcacatgaatatggaaaacaactccacgcttattttttgcaaattttttcaaaatttcattattttaggctactaaattacaaattatttttctaaatggcacccgtcaaacaaaaggaaaaactttcctccgccaaccatcgcctcaattctgcaactgatacaaat

SEQ ID NO: 36564 - DNA, 925 bp, Heterodera glycines
gcgcgttcacttaccgctgattttctcctcagcgcgtgggtcggcacacacatccatcgcttcgccattcttgctccaaacgaatttcggccatggtttcgctgcgtagggcaccagcagcttggcctgttcacccaccagcacagtcatgtcgcatgcaaacagtcccttggtgatcaacggcttacaggaggatggtgtggcagcaattggcacagagttcttgctccactcgccttggcccgccgcgttcactgcggccacgcggaactcgtagatgtgctgccgttttacgccgatcacctttagtgatgccaatttttagtgcttttttagacaaatttcaagtatcgtttacccccgaaaagtttttgaaaaaaattcaagccttgaaatttacaagaaattttagaaatttttttataaaaaaatatcaaaaaaaaacatttttttttgaaaaactaacgattttttcagttttgcaaaaaattgctgaaaagtcgcataaaatttttctaagattttctttaaatttctaattgtaaattttaaaaaaatttacggcgagggggggggggggggatgaaacgagggggagggggacgaacggctcatgttttcccccaccttgattcgtgtgtccggcacatcagcttggtgccacgctcgcgtatctccagctcgtagtcagagatcggcgtgcctctgtcgcgcaaacgacgtgtccattggagcatgaattgattgacggtggagaacagtgggttcggcggggcgggacccactggcacatttcatgacgccttgcccagcaggcgttcgtccgcacagcgcacctaaaaattggaaaaaattaatccttattttcacaaaaagcaaaaatttaatatttgggttttttgaattaaaaaataaaacccaaaaa

SEQ ID NO: 36565 - DNA, 1356 bp, Heterodera glycines
ggtgctgggtcgttacttaaaaaccatcataataagaatcaatattcctttaattaattatatgattacaattggaaattacatgagttaattgcaatttgaaagcaaataattatttatttatcccttttatattttattgctttcctcaaattcacacatttttatttggaataaaatttatcgattgttttagctttatttttaaaactgcgatctgtgcagctcttgtttgtcgttttcggctgccgtttttatctgacccaaaaaaattttaaattgataaatttttatttttataccaaaaaaacaaatgctttcaaggtgtgcgattgaccaacgctggccaatctgttgaaacatatactcattattaaaattttctagggtgatcgggatgtcttgatcgccccaacgtgagtgtttcattttttaatgacgtatttccggcaattaaatcatgtaattagttgcgcaaatattgattatgatggtttttaagtaatgacatagcacccaaatattaccataattctcaacaaaaataaaaataagcaacttactggtccgaaaaattcaaagcataaatttcagcatcaatttcgtctgtcgtagcactgttccaaaaactacttcgtttagtttccttgtcgttgaaaaaaatagtccaaggcccaaacagctcctggcagagcaaaagtattgcaccaaaaaattctgtcgatcaaaactcaaaagttggcacaaaaatatgaaaaatcccgtatagtgatgatgatcagaaaagtattttatcatatgatatgaacataaatttttccaaattgaagggtatacctctaagatggctgactacggtatttaaaatggtttagaagaaaaaaagaaccgaaagagcgaaattttccactttttcttgtttgttggcagaaatcaaaatatggacacaaataatagtaatatggacataaatcgtgaaatatggagaataggacatagaaatccacccctagaagcttttaacttagctaaaaatttgtttttcgtgcgtttcagggctcccacagtccataaaaatatggacccaatatcagatcactccttcgtggtgatctgaacatcccagaatacacttaaaattgagggaattttcggaagacattcctagagggttgaaaaaagttcttcccacccgcaccgcttccgccttcaccttcggcaaaatcatcaatcgaatttaaaaatatttcaaattcaatggttctcagttttaatgaatgaacgaatgcacattcattaccattccattagctttgtcagtcgtttttccttctatcgattttatccgatcattaa

SEQ ID NO: 36566 - DNA, 787 bp, Heterodera glycines
cctagcgggggatgcgccgaaggcgctgaccccgctataataaaaaataataattctcaactatgagcaaaaaattgacataatgccataatttaatatccaaatatgttataaatagggcttcgatttttaggtgctaaaaactgccaaaataagtaggttttaggttctaaaaaacccccaaaataggtgctaaaaatgggaaaataggtgccaaaaagttccgaatttaggggtgtaaaatcgaaaattttcatcaaaaagcaaaaatattttgccaagtcattaaggatatacataattttcaaaatcaaaaattatcgtcaagaaaataaaataaataaattttggagataaatttttgagaaatttttcatttcttaggggcgcatttttgaaaattttctggtcgattcttagggatgtattttttgaaaaaatttttgggtcggttcttaggggtgtatttttcttttttattgcatttttgttaacaaattttgggcaaaacgccaaaataggtgaaaataagtttttttaaatttttttaggttttttaggtgctaaaaataaaaacctagaaaataggtgctaataactcgaaaagtagcttaacaacagcccaaaaaaacatgtttttcgtgcgtttcaggccacggggagctcaggaaaaaaatatgtaaaaacctaaaaatcgaagccctagttataaattcaaaaatttaccaaatttcctttgattattttttccacttttccaaattctcattttcaaggacgtccttgc

SEQ ID NO: 36567 - DNA, 1358 bp, Heterodera glycines
  unsure (1)..(1358): unsure at all n locations
gaagaagagcgatggttaaggggccggtgattgggggaagaacggaggaagaacgggtgacctttgaagacaacacctgtaaagagagagggcccacttatcattgatggactcgagaccctcgactgtgccaacaaattacgaacttccgtgctcagtgcttccatggcagaagcgtcaaattcattttggagtcgccgcgagaaaaagtgcggagcagcggcagaacagcgaggagggtgaattggcgacagacaagcaattaaacagacccattaagctaattgcgaacggacaatgatcccttcacaatgggcttcccggcgaacgcaaagtgtcaatttgcaagagaaacgcagagaatcggactctcgcagggagaatacggtagcacgggcaacggccagcaaacggtcatcggcgtactgtaggtcagagagcagatcagagtcagcagtacaactgaggaagacagacattcaaatgggaaaagaatgcaaaagaaggcaatgcgcccacccgtcactgtcgacgatggccatttgagtaccggaagcgatcggaagctgatcagttgaattggccgaattgggtatcgaatgattggccaccgaacagtccgaaatacgcatgccgaacacttcactgatctctgtaatattatcaaccaaatggacgaaataccgtgatcaatggcataaacaacaaggtcggacaacctttgcccccttggcattcccagcggtggtaaattgtctgtccgatgtgcgctttgtccaccattggcccattgggcgaatccctacaaatttggacaaaatgccaataaataacatggagtttgacctgcgcaaagagtaattacattttggaggtgccatttccaatgaaattgtgtgggaaatgggctgaggaggaacatttgtgtccaaatcggtgttgaggacgaaagagcgcggggaagaggggagaaagcattggaggaggaaggaatgctcgatgggagacagccgctgaaagtgtgggatcaacggcttaattagcaaaaaaaatgccgggggataaagcggtggaaaaagcggataaagcaaagactgaccagcgaacgacgtgcggcgaagatgagaaccaccgaaagattgaggcccgtaggggaaatctgacaacaattgggagaaatgtttgactgatcttggcaaatttacgcacagactcggcactgctcatcccgcactgtgcctccncaatctcgagagtgacattctcgagcccaccgagttcggcgaaacagtcgcgctgctcatgaaatcccttagcaaacagagagatcagcgagcgatttgttgtttggattctga

SEQ ID NO: 36568 - DNA, 1355 bp, Heterodera glycines
attagcaaatataataaaaaaaaaataataataaaaatgtctcctaagtgtcaggcagtagcagaaagaatggatattaattctttctctgatgatgatggattgttgacatcgatcgaattagtaattttttgccggggggggggggaatccaacgacgacggagagggaaaagggaaaggtcacgtgtaaaaaacgaaaatgtaaaaagatttattaaaagcaaacaaaaaaaaacaagcaccatttgctaattattagcaattaaacggcgatgggttttaattaatcagcagcgaatgaatgaccggcaaatgagcaaaggtttaaaagtgtacaattccaacggctccggggacaatcggcggacagtaaaatacacaaaaagataagaaaatgccgtcaccgaaaggaccaattgtgccataaaacgtaaaaataataatcatatgcaaatgtgaatcacaagtgtgaatgcgagacagaacatctcagctttgatttggaggacctaatcctacttggagatccctatgtccaagactcaattgaaaaataggtctgccttcttttcctcctccattcccctcgctactgcttctaatgaaagccctcaagaacaaattctctcccaaatccttggtttctccactctcccaaaaattctcccctcctctgatctgtcattttcctcattctcccaaaaactctttccgagacccaatcagggacaacttgaaaccctggacctccttttcaacccctcccccagtgcaatcatcaccgaagccggaccaggcactggaaaatccaaaattatcattatgtccatccaaaaattcttagaattagggaaaaacatccttatcaccacccacagcaatgtagctctctgtcgtttagctagtgatattctccctaatttagacaataattcaaaagcccttctcatcctctctgcctccgcaaaagaaaaatattttcccctttttgagccttttatgaaaaatcttttaataaaaactttagctgactttaatttgcaaaaattaacccgaaaagaagccaaaatcattaataaatataaaatgaatgctctaaaaaaccacaaaaagcagatgaacgttcttctgcagaaatctttatcagagacgttgggactgaaattcccatcatctttatcaccctcagtatgttagaagatattccctctatgttaagtcttataaatatcatattcattgacgaggcaggtcaggcacctaccaatcagattcttcacattctctccctggccccaaatttagaaaaaatccttgctgctggtgatccaaaacagctacaagttcgctcct

SEQ ID NO: 36569 - DNA, 1423 bp, Heterodera glycines
  unsure (1)..(1423): unsure at all n locations
tcaggattggttttagccaaaaatcgtcttagacatttttgtagagaatntaagctctatcgaacggtgtgctatatgcccggaaaatttcaaaaattttcgagctaggccccctagaaatnttcgaaattttttttaggcttgaaaagggtggtgaaaaatttttttctggggtattttgaggtgctgagcacgaatttgacctttgtttttcgtttcatgatttttggaattttttaaaaattctttattttttggcaattttttggccctcgggattttggcctaatatttgaaaattcataactcggtgatggtttcatcgatttaactataataaagctttaaaaatagagaaaaataaggagaattttatgggatttatttgagttttttttcacaaaaaagaaaaaagttattccagaatttctggaaaaattcgaattttcagaaaaaaattcataactcggttctgaaaagatattctggaaaagtaaaatacttcaaaaatccgcaatttttttctctattaaataaattttatctggcatttttatcacttttttgcgaattgttataaaaataaaagtgattttgagattcgggaccaaaggggtgagcataggatttttgagtgaaaaaattttttcacccaaaatcctccaaaaacatgtcattagggctattttatgacgctaatcacgaatacgtgatcagattttacttttaacatcgataagacctcagaatccctgtgtgattggggattctgaggcatcatttgaggggggagggggcaggttcggatccggacggtgtacattaattttctaccatttattttctgtttttcaatttttgttcatttaaaatatttttaattttattaataataaataaaaatttttcatttgaattaaattattttttggtgaaaattttatgaaaaaaaaattttaaagatagatcacagagataatgaatgtcgagtgtgcaccgacctcgcacttgcgctcgagtgcttttgaaactgatgaacctcctctaataacacatagacatcttccttggatagaagatacacttaaaaattctatgagaaactacaaggagatagtgcaccgcccaccctctcaagctcgagagcttatgtaacgtataagatttctcaagagaagagagaggcctttttcttggatataatataaatttaaaaattctctgagaaattaaatggcgattgcgcaccgccctccctctcacgctcgagagcatttgtaacgtatacaatttctcaaaataagagatagtcatttttcttggatataagataaatttaaaaattctctgagatattaaatggcgattgcgcaccgccctctctctcacgctcgagcgcttttgtaacgtataaaatttctca

SEQ ID NO: 36570 - DNA, 733 bp, Heterodera glycines
gtagagaccgagcaggaccggatccggtctggatttttcgggataacgccaatccggtccggcaatttttggaaaacttagattgaccggattacatgattgacaggactatgagagaccggatccagaatccggtcatttttgaaaatgccaatccggtccggtccggcgaatttttgaccggattatgacccagtcaaaactcttggttttgttcattttcctttgttaaaaaaactctttggcttaatgtcttttaactttaaatggtcaaaatttaaaatttttcccccagctgcgcctgtcggcgccgccgggcctccaaaacttttttttttcttaaaaaattggctcaaaattgcgaaattggtcatttttgggggaaaatctgttaataaattgcctttaattttcacagattttcccggatttgaaaatgaacaaaaattgccaatttatgaaatgtttttgcaattagcaattgctcagcaaatgaatggcaaacacatgaaaatttagaaggaataattcggcaaaaatttgacaaaaattttgaggaaatgcaacaaatgatgacaaacatgaaataattgtggattctaaattcgataataaatggacatggatgagacttatcattggatgaaacttagataatttcaaaatttagattgatgatgctttattttgtgggatttgtcaaaggattaaaaacaaattcagagaaattttt

SEQ ID NO: 36571 - DNA, 1437 bp, Heterodera glycines
  unsure (1)..(1437): unsure at all n locations
ttctttttttttttcaaattttgggtccccttttggggtttgatcccctttgggaaattttttcttccttttgcatttgatcaatggatcggttcccattttctgattttctttgcggaatattttataaaatttggtcggatttcaggattcaatttcaaaagcaaagaaaaaataaaaaatatttatgtcataattcattttgaatatcgaatttatgcaataaatgaattgttttattttttgttcgctttttaatactaatattaattttatttgtatttctcttcaataaatcgttgccaattttaaaattgtcacgtaattccggcggtaaaatcaatttttcgctcagatgaaaaaagacttgccgtaaaaaaaaaaaattaatttgttataaattttatattttaatccatttgaatttactcaaagcttcggtgggatgtaaattatttttgaatttattagatcagttgtataaattctaagacattttgcaaaattgtagaccatctagttaaaatttaataactcatttatatttatggcaatttgacattaattatttgatttttatttttcaaaaatttggcgcaaaattacataaagttaaatttatttatttattaaataaaataaattcgtaaacttcctttttttaaaaaagactttcataacattttcacccttaatatggacatagataatttacatagaagcttcaagccaagataaaatatatttttgtccgtttaagacagtccatgaaaaaaaaatatggaatttcattataattttacgccccagtcaaaacgtttccaagattttttcgtgcctggttttctgagttgccgctcgtaacagcagagaccaacttggattatagtcccattcatcagcagagtcaacaaacacgggattggcaccaacattgaggacggcatttgagacagcaacaaatgttatggacggcatcaaaacatcggcacccggtccaatgttagctgagcgtaatgctaacaccaacgaggtgaagccgttgcagcacggaacggcaacctgaaaaattttggaaaagtgccaaaattcgggccctcaaaattgggacggcccaaaccaattatcataaaactctttgtagttttacttacaggaaaatcgtagatggcgcatagttttgctgccagctgttttggccatgtgccagccgatgagatttgtttgctcattaatgcgtcatttacattttggatggcacccggcggaatgtacggctcgacaacccggatgatttgtgangtgtgcgcataatatgcggttcaggctcgggaaagaaagtggctaatccccggtgggaagtttggaccgtaattgcaatgaatgccgaaaaagtgcccgaggtgtaccatatgatggacagcatactgtgttgaa

SEQ ID NO: 36572 - DNA, 519 bp, Heterodera glycines
tagagtgccacgggaccgggaatttttgccaaaaccgggaccgggacttgccgggacctgagaagccgggactgggaccgggacctcgattttttttcgggaccgggaccgggaccgcaagaaaaaccgggaaccgggaccaaccgggaaattttaaaaattcaaaaaaaatttaaaaattaaaaaaaaattcaaattttaatttatatcaagtgaaaataatacaaaattatttggtttttatttaataaattaaattaatgaaaattttcaaacaaattttcttcaattatttcaaacaattaatcatttttggactaaatcatcgaatattaatagaaattcagatttgattttcacatcactttttttcggagcgctttttcaaaaaacttttgggaaagaaggggtccggcggtgccgataggcgccgccgggggaaattttaaaaatttgagatgcaatttgttaacagattttcaacaaaataggttggtttttgcgattattcagatcaat

SEQ ID NO: 36573 - DNA, 941 bp, Heterodera glycines
tatttattattattttatttattttgctttaaaaaattgaaatttatacacaaacacaaggaggaattgaacttgagaccccctttttggtgactaactcacagaccactaagacgaaaaaaccaacttaattgtacttggagcccaaaattgaatcgccgtgagtaggaaatcataattttctattaaccaatcacaaaaaaacattgaggcgatagggcgatcagagaaagagagagaaacgagagagtgtgtgttgttgttctgcttgccttacttatgtgttatgtcgcttttctctacgctccactctccattattctcacactctttcgcttttctttgactcactgcgatctctcattttcactcactcccctgtgcacgcccctcgaggaaaggcaaactttgtgcggttagggggaaacgagtccagcaacagcagcacattttgggaagggcatcaccgaagggggggggcgcggttcagcgatttgctgctgatcagatcacagactgactgatcagagattaattagcaaagggattttgggggatatgtgtttattttttggtgggagagaggaaaggagtgataaatgatcatcgcaatgaatgaatgaatgtgaatgcaattaataaaagaacacagatacggtaggaaaatcgggacgaattcgattttagggtaattaaatgggagggggggggcttaaagggcttatgggatgcccgcgggggtttgttgttgccattcatagcgaaaacttacaattaattaattaaccaattataacctaataaccaatccattaagctaagtgggctaaataaacattaatcactttaatttgggaattgggaaagaaattcaaaaaaaagaagcaaaagctaattttttcgacttgccaagctgttttttccagaaaaactttttctct

SEQ ID NO: 36574 - DNA, 576 bp, Heterodera glycines
  unsure (1)..(576): unsure at all n locations
aatcattcatggactcttttagaacctgttgccgaagaccgtccgaattttcatttattttcgccatgcatttagggaaataattaattggaaatgatgttaatttaattaattaattacgcctaattagcttgggcctttattttgctatttttttatcggacaaataaatatgtaattgcttaatgttaggcattaaatgagcaacaattcgttttcgtgattagcgcgacctttaaaaccccggataacaaattatcatggttttttgggtgggggacagtttagtcttgccgttatagcagggcgcgtatcgaaaatttttcaatcagaacatcaagcccaaaaaatcagattctggggtcgaaaatcaggacattttgcaaaattgcttcaaatcagttatttttacaatttttcgatcaaaaatgtatcaaatattatatttttcgtctcccattattgattttaacaattttgggagaaaatttagcaatcatcaattttagcgcattcggaatcaaaaaatcagatttttaagaattttttgncgcgcatttttccaaaaaactttta

SEQ ID NO: 36575 - DNA, 1067 bp, Heterodera glycines
tgctgatcgctcatggtgccgacgtggactgggaagcgattcttcttttacaccgctactgctcgcatgtgccaaaggcagcacagcaatcggtgaagcaatcatccggaataatttctcaaatttccctattttcagtcacccttctcgtggagagtggcgccaacgtcaatctcggggacagcgaaggagtaacgccgataatgatcacttctcgtttcggaagggtgaaaaaagcaaaacttggaaaaacttggcattttttgtttgttcaggtcgaacctgtgcacttcttactttctcacggtgcaaacgttgaacagatggattacagcggtggctttttgcccgtttttaaataattattgcactaattaatatgtctttttcaatttcagggatgcgatttgctcttttggacgccgccgctgatggccatttggaggtgtgccgtttactggtggacgattgggcagctgacgtcaaccagcaagcgatcgacggtaccacgcctttgatgggcgcgtgcagcttcgggcactttgaaattagtaagaagcaactggtgcataattcgactcaactttctgccccaattttcagcggtttttctcatcgaacatggcgccgacattgaccacgctgacatggacgggtacaacgcgttgatgtgggcagtgaagtacgagaaggctggtgtggcgcgacatttgctagcgatcggcgcgaacgcagaccaagtgggaattgacggtgggtgggcccaaaaagggcttaattgtaatgctccaactgattgactgctctccccctcccccatttaaggcaaaagggcgatagatttggcccaagaaggcagacgtgccgaaatgatcgacctttttcgaaccacagctaacaatgagcagcgggaggatggcaatgcgtaagaaaaaaaagaatttccgatcaaaaaggatatttttgatttcaggcaacaggacgagcaaccaccgcagcaacagtaaatgtgatgtcattgagagggaatcgaattgcaaaaacaatcggacggaattattcggaag

SEQ ID NO: 36576 - DNA, 980 bp, Heterodera glycines
  unsure (1)..(980): unsure at all n locations
ctgcannggtcttttgaaggttttaaatttatttatccgtctttaaattcaaaatgtttgtccaaattgcatttaatcacttcgttttccccgtcataagtcaaaatgttctgcgtttggccacacttttgtgaagttgtaaatcaaattgggctgttccgccgacattaccgttgtgaagatggtctgtctgaaattatttttcccaattttcggctctttggcccggccgactcattgcggacgggcggaatggcgaggacgcgggaggacagcgcaattggggagatgaaacgctggccgacccgtcttaggcattgggccgcttttgttctgtgggcaattgaaagtgagtggcatggctaatcttctgcacaccttcgcttgtccgtcattcgctcccatgggtcgctgttcgtctccacgagaaaccaccggtggtgcaaatagtccaagaaaaacacatcggccactccaaatcggtccctaataagccgaaaaaatcacgttcattcttaaattgcttaattagcacctcgaaatgatcgcgccgtctcctttccctccgccaacgattaaataggatggcgcaaccgtagtgatgcgactcaatttgtcaacagcctcctggtaattgtccacagtttccaacactttgcgcagttcaaatgcgattggatgacgaaagcgggtgatcagtgccatcaaaagattatcccatgggccaccggaatctgatcgcgacaaattattacgcaaaatcaacgctattcgggaacagtttacatcgagcattgagagacaaagtgaacgcgtgagggcgttgtccggtcaaaagtccactataaaggatgaattggatgccggtgaattgcactcgtccgtccctgacataatccaccacaatgtggtggctctctgagcagctgagtccacccatagtcgagattgcgtccgtgcaaaatttgaccgtccaagtc

SEQ ID NO: 36577 - DNA, 1136 bp, Heterodera glycines
ccttccgttcgtccgatcgcttttctgatcacttcctctgatcagtccactttcgcccgtccttccgttcgtccgatcgctttttgatcacttcctctgatcagccaactttcgcccgtccctccgttcttccgatcacttctgattacttcctctgatcagtcaactttcgcccgtccttccgttcgtccgattgcttttttgatcacttcctctgatcagccaactttcgcccgtcccgccgtccgtctttcttttccccgcccaattcgcttctctccaattagtggtgctaattcagcaaacctcaagcaaaatgaactgtgtacattccaagcattcacttgcgacaataacaacagcagatgtcgtcgcgttacgaaacggcgaaaagcaaagggacgaaacggacgcggaatcaatgggagagggaaacggacggaacgacaacggcaccagcagcaacagcagagaagaagcactgatcagactgatcaaaagccacatccgactcggtgccatgtgcggcagcattggctcgttcatttggcacattcaacggcaggtaaaagaggccatggcacggagagaatcattttaatatccatttgaactgttcagattttctacgcccattgtgccaaattggtggcactgttcgctgtcgccgtcgcccaccttctcttcctccacccttttctcgatttgttttcgcgcctcgaaaaatacgccagccaattggactttagcagcgtggacgccgaactgatcagacaaagtgtgcacgacttggccgatgtgagtgttggcacggatttgtcggcttaagtgtcggttgccgcccagcggggacacttttggcatttgtccaaattttgtgggcctttcccccgggccctctcagcacaagcatttccagtacaaaaagaacgtgtggatgaccgtggccgtgctgtgtgtcggactgtccaccagctccttcttcctgtttctgctgccctcgtcgtcgcccgtgcgcaaatgccacgtttatttggtgggtgagacgatgggaaaagggcggagcccaaacaaatgaaatggggcaatcaccagcagacagtgtccgggagtctcgacaacaccccccccccccc

SEQ ID NO: 36578 - DNA, 742 bp, Heterodera glycines
ccagatcggacgggtgtgcatgattccacagatccaagcaccacaccacaagcaaaatgatatcaccaagatataacgaaaaatgttttacgaggtcagctctccatcttcgtttcagatagtcaagcatcagagtgctaaaagtcagcaatcgttgcttaacttgccagatcggacagcactgcatgattccactgttccaagcaccccaccaaaagcaaaacgatataaccaaaatataaggaaaaattttttaaaaaattttttctccatcttcctttttgatactaaagcatcagagtgctaaaattaagttgtaaataaaatttggtgcgctttagagcactttctgaaaaaaatatttatgaaacaaaaaaatcgattttttcaagtgtccgtttggggtactcaaacatttatggggagcaaaaatccaacgcagaattaaagtacaggctatagggaagctactcccgaaggattcggtctccccataaatctgggcgcatcggttcggggggactgccccgaaaacaaaaaaatcgattttttcaagtgtccgtttggggtactcaaacaattatggggagcaaaaatccaacgcagaattaaagtacaggctatagggaagctattccggaaggattcggtctccccataaatctgggcgcatcggctcggggggactgccccgaaaacaaaaaaatcgattttttcaagtgtccgtttggggtactcaaac

SEQ ID NO: 36579 - DNA, 1419 bp, Heterodera glycines
cgcagtgcgtcgccgaggcgggcgcagcaagaatatgatggcagactttcggagacgcactgaggcggaggaggaagcgattttgaggtttgtttcgcattgggttttctttctcttgctctgactaagtgaattttgcaaccctgtcaaaaaaaagttgaatgaatacagagttgactgatgtttgcttatttcgctaaaattttcacaatttttttaggtgtgtggtgaaggagcaaaaggatggacaaagtggtgatcagcagcaattagacgaacaacagctaagacaaaaggtctgtcgccggtggtcattaggcaatcatttgtgacgaattaaaaatagtcattttttggcgaaaaatggattggatacaaacccatgtaaaacatgcctcccaattcatgtttttttgaaaaaatacagccccgaaagtcagtgtgcccttaaacaatttgtttttacgtaattatatgtttatttcagggggcaaatgtggactacatggaaatgggcggggaggaggaggacggactgtccaacggcggaggacgcaaaatgctcaaaatggagtcatcgtcgcccgtcaacaacagcaaggcatgtggttaactgggggaaaatgagccgaaccgtggaatggacggagattatactcttgcatttttagatgattttcattggtccggtcaagcccattgtccaacaatcgccgaccgcacctcaaaagctgcccaaggtggagctgcgcaaccagtccatcatgttggacctttctgatgttggttgggttgggtaaattgggcgttgggcggtgggcaaattaatggacggacacacaaaatcgaaatacggacaaactcaggaaattaggtgaacaggtcgagacataatgagcgagggagtgtcttaggtgttagggtccacattggtgaccattgacatgtaagagaaataaagtcatccgctggaaaatgtggcactgatagcaattaaattttttacagtcaaagactgtttggacgaggaaattcaatccgattggcgactgtcgggtagtcggcagctaatcgacggatagaaaggcatgcagggttggtctactcctttcatttcttgtgtgctatttttgtcgaatttcagagtaatctatcagtagataggtcactccttcgcctcatcagttggcaatgtttctcgatgttccgttacgtccagagatcagtgtcgtcgatatgatggaggcccgcaattacattgcaaaggtgcgttacctctcttattaagtgtatatgttagtaaatgtatcatttttatctgttcggacacgcatatgttcactcggtatccattaaaggggatgcgaattgcagaggagcgggatggttggccgggttagccgcaatcgaggtatggat

SEQ ID NO: 36580 - DNA, 967 bp, Heterodera glycines
tccccataattggtttgagtaccccaaacggacacttgaaaaaatcgatttttttgttttcggggcagtccccccgaaccgatgcgcccagatttatggggagaccgaatccttccggaatagcttccctatagcctgtactttaattctgcgttggatttttgctccccataattgtttgagtaccccaaacggacacttgaaaaaatcgatttttttgttttcggggcagtccccccgaaccgatgcgcccagatttatggggagaccgaatccttccggaatagcttccctatagcctgtactttaattctgcgttggatttttgctccccataattgtttgagtaccccaaacggacacttgaaaaaatcgatttttttgttttcggggcagtccccccgaaccgatgcgcccagatttatggggagaccgaatccttccggaatagcttccctatagcctgtactttaattctgcgttggatttttgctccccataattgtttgagtaccccaaacggacacttgaaaaaatcgatttttttgttttcggggcagtccccccgaaccgatgcgcccagatttatggggagaccgaatccttcgggaatagcttccctatagcctgtactttaattctgcgttggatttttgctccccataattgtttgagtaccccaaacggacacttgaaaaaatcgatttttttgttttcggggcagtccccccgaaccgatgcgcccagatttatggggagaccgaatccttcgggaatagcttccctatagcctgtactttaattctgcgttggatttttgctccccataattgtttgagtaccccaaacggacacttgaaaaaatcgatttttttgttttcggtgcagtccccactgaccgatgcgcccagatttatggggagaccgatccttcggaatagcttcctatagcctgtactttaattct

SEQ ID NO: 36581 - DNA, 954 bp, Heterodera glycines
  unsure (1)..(954): unsure at all n locations
agtaaaaataatttaaaaatgcttaaaagacccagaataatatgatgctgtttcagcaggcataaaacattaattcattcattttaatcgacaggattttattagagaatcatgcagaaaatatttaattatttttaaaactcaaaaaataaaatagtccaattgctcctcagatatatgatgttgtctaggatttccacatgagggggtacggcttaagagaaatagcaatcgttaccggacatttatataaagggtcaatagtaaaaataattcaaaaatgcttaaaagacccagaataataggatgctgtttcagctggcataaaacattaattgattcattttaatcgacaggattttattagagaatcatgcagaaaatatttaattatttttaaaactcaaaaaataaaatagtccaattgctcctcagatatatgatgttgtctaggatttccacatgagggggtacggcttaagagaaatagcaatcgttaccggacatttatataaagagtcaatagtaaaaataattcaaaaatgcttaaaagacccagaataataggatgctgtttcagctggcataaaacattaattcattcattttaatcgacaggattttattagagaatcatgcagaaaatatttaattatttttaaaactcaaaaaataaaatagtccaattgctcctcagatatatgaggttgtctgggattttcacatgagggggtacggcttaagagaaatagcaatcgttaccggacatttatataaagagtcaatagtaaaaataattcaaaaatgcttaaaagacccagaataataggatgctgtttcagcaggcataaaacattaattgattcattttaatcgacaggattttattagagaatcatgcagaaaatatttaattatntttaaactcanaaaataaaatagtccaattgctcc

SEQ ID NO: 36582 - DNA, 1118 bp, Heterodera glycines
aattttcaaattttaagcattgaaacttcaaattttcaaattttttcaattttaatcattgaaaactctaaaaacactaaaattttcaaattttaagcattgaaacttcaaattttcaactttttcaatttttagcattgaaatctctgaaagaatttacattttttatttttttcaatttaatcattgaaaactctaaaagcattcaaattttcaaatttttttaaatttttaagcgttgaaaactcccaaaaatgcgttcttttttcttcgccagcctcgctttggtgctcatttgtgcctccaccactgtttcaaagccccacccgacggtattgtggtcatttttgaaaatgcatttaactgtaattttttttcttttaagcctgccccatctgccaagaccaatgaaaaaggttgctatcaagtgtgctttgtcgttgtgtgcatcaacatttgccctaaggccaaggttggcatttttttgtttataaaactttgggttcagaatttatgtgctaaaataattcaatttaattgccaagaacgatgaaaatggtgctgctgtgaaatggcttaacatttccgtgccaatccccgacgccatttccctgccttcctttaacatgacaaacattacccaaggcgaggagcaggaagaataaatggaagggtgaagagaattggaaggagcataaaaatttaaaatatttgtatgttcaattaagattatttgatgttaatggtttaatatttgagtttttttgaataaaacatttaaatttaaaaaaattgttaggcatttctttatggtgtaattgcgtatatgtattaagaaaagaagatggtttttccagcggttgaatttctgtggccttttttcaaagaattgtgagtcgaaagattttttacacaaattgtggctattagagaccggcgcgggacagaatcccacgcgtggttttgcgggatccctgccgcaatcccgaatatcgatcagacaaaatgtcgaaaccggcgaacagtcccggaccgaccaactatagtacttagaagcaaaacctttccgtcaaccaattcaatagaattcgccgcgactgatgagaaacccatgccca

SEQ ID NO: 36583 - DNA, 963 bp, Heterodera glycines
  unsure (1)..(963): unsure at all n locations
cacaaataatgaccaattaacgtgttgccttcctcttcagaagaacgattgtcattttgtggcaaaagcatgtcaatgatctgatagaaaataataaaagtcgcaaataaaccaatgaattgagaaaccttgactttgcccttctcattatcatacaaataacagagaaaacaatagaaaacggcaagtcgaagacggaagggttgtcgttcagaagtcatcgacagaagcaaaatcagtaaagcgggccttagaaaaggcgtgaaattcaggagattttcattgttttattcatgaaattcttacaattttaacttatcagtatttttgtttttttcttccagctatacacacacacctaacgccgtcctggtcagccactgtggattgtgcaaagaattcctggttggcgtaattggcccggatggtctccgctacagtgatcaccgactcggccaaaacctccacagacacacccaattgtgacagcaaaactttacacagcaaatcgagcattcctgaaacaactatgaaaatataatgaaaatgtgtttcaccagcttgaagcagagatttttgtgctgaatgcgtagtttggtgaatgttgtcaaccggggaaacaagggcacgaatgcattgcaaaatgagcataaaattggcaattttctgagagctccattcgtcgtcgggcaatccgccagaagggacgaaagacgggtcgacctgttcagtcggaaatatgaacgaattggccaactgagtgagttgcttggtcaaactaaaatttttttgaaaggtataatataagaagttgagacttcgcttcgcgaaagccctcttgattgctcgggttcttcttcaataagttgagaataacgaacaaacaatccctcaccccacatactgannaggaanactgntactccgaataaagtgaatgaattaataaancaattgaaatga

SEQ ID NO: 36584 - DNA, 819 bp, Heterodera glycines
atggggcgaggaaacgtactgctcttgctcctcgcggtgggacgaattaaccaggtcaaaattcattttccccacatttctatcccagtgtcaacaatgtcaccgccgttttggatgcaatgttacgcatcaaattgtccgttgtgcccggcccgttgctcagcgtgttcgtgcaaaacattgccaagctgtacaccttccaactgtgcaaattggaggcggacgacgattgggacggaattgaaacgttggacaatttgctcacctccaaattgcccgagtagttttgcatgatttttggtgtgtgaccccaaggaaattatcttttgggaggtccatgttttaaaacgaaaatcagtggcctaattaaaaatcattgattttttcatttggatcatgaggcaagcaactgttttcgtgaatcttgagccgtgtattgtgccagcgctcagggacggtcccaggattttggctggggggggggggcacctccccccgggcgacgacctttttttttttgcttctttttttttgcttttcacacccgttttttatgtggcggtccggcggtgccgataggcgccgccgggaaaatttttgcggttttaaatgcggtttgttaacagattttgtccaaaaaatgaccaaattttgtgattttgagccatttttagcagattttcattaacaatttgtggattttttgaaaaatttagcgaaatttcttggaacatttgggtgaggctaggtctgggggggggggggggtaccagtaaggaaaaacctaaaattttcagccaaaatattattttttcctta

SEQ ID NO: 36585 - DNA, 1884 bp, Heterodera glycines
  unsure (1)..(1884): unsure at all n locations
gcctccgactcgtccgtgaaagccaaaatctccttgctaaggttcgtcgttgtcagcaccgtcccaatgttgtatttgaagccattcccgacaatcaaataggacaacgcgccatcccgccgacaaaccccgatgcgctccattttgacaggaaactccgcaatttccgctggcaggccattttcttcataaaccttggccgtgaattgctgctttctacggcttgtgccgggctggcactcctccaccgcctgctgcgcctctcccgcaccggtagtccgtcttgctgcggcctgcttcagctgctcattcagaaaacggatgcccaaacctcccgcatcccagactgccgaccactttttgtcgtcgcgcaaatacgacaacaattcggcgtaaaaattggccgtcagccaaaattcgtaagttccaagcatttttttactaggactcagtcgattttaaaaagagagagagagagagagcaatgcaaaatatgcgaacgagcctgagggcacaatacagactataaaaaacaagcgagatgtcctacaatttattctcgacctaattcccattgcaaacattttaaaataccccaacacttaattccatccaaaattacacatttcgaatcaaaaagcatttatttaaaacatttaaaatgattaaaagaaaacaaccattaatcgtaaaaacattctttctttctctttcacttctctggtctcgccatttttcttctgtcttctttcgccgtggccgccattcttcgacccatcaaaattgtcgccgcgccattcaccagaaacgacctaaaatgaaattggaatattagcaaaaaaaaaaataaaaaaataaataaaataataataatattttttttgaactgcttgaaccctatatacagctcggacccgatgccttgctgaaagccatgtttctgttttctccttacccctaccaatttttaaattcaaaagcacgtaaaaattggtaggggattttgaaattatccanaattcaccncaaatannnccacgnggaagagctgtntaattgtctaaattttgattcccaaaactaatttcccaaacagcaaatctttgagcttaattaaagcattttcatttatcagtaaaactatggctcagtggtttttcaaatttttttaaagggccaggttcgatgccccaccatgttaaattatttttattcagtttctcattttttcccccgattttatcccgtcccttcagaatttccccgatttatgcaaacctgaaattgggcaaccaaaaaggagagtttggctcatcgggtaccaagcgaaattggacgaggcttttcaaaggcctcagagccaacgggacaaaaagctgaaaaatggataaattaaattttttttttttcttttcttttctctctctcgctcagccttaaaaaatgctaattattttcttagaaataagcacaaatgctttaaaattgcgtaaagtacggagcctgagggcacaatacaaagaaacaaccgattaaggattgatctttaaaaaaaaaaaacaaaaaaattttttggtggttgaaagtaataaggataatttgatcgccagcaaattaaaacaaaacaagtatctcttaaggcgacaagtgctgcaccatggtacaaactgacaatgcctaaaacggttaaaggtcaaaaaaaaaaaaaaattttttttattattttttttactttttccttataaattgcacaacccaagaaaatgctctgaaaactataaattctatattatgggcagcgatgccgaactcaaataatctctatgaattgaatggaaatgtatagcgtcaggcctgagggccaaatactacttaaaaaccctt

SEQ ID NO: 36586 - DNA, 1019 bp, Heterodera glycines
tgcatgtgccgaacgccgtcgccccgttccgctcgtgtttacctctgcaagcggttcaaatgcaacgcccacgagctgcatgtgcttttcaaaagcctagagaaacgccgggacattgtggagcatttgcgctccgtccaactgcgcaccgcccacctgcgcccgtccgtgcgcaattttccggtccgctgtaatgacctgtccatcctggacacccactcggcccccgcgtaccgaggctacctcggcataacggtatttttatttgttttgtttgtcggtaacaaaaaatttaaaggtccggatgcactattacataaagcatggcatccgcttgcgccaccccaacttgccgtgcgtcgttgaatttggaggcggagatcacaaaacttttttccctcttgaaattttgtccattgttttgtagatgtgttcaatttccaattatactgttgtttttaaaataaatgttcaacctttatctcgggagcaatttttggcaattgcgcagcgtggcgtaaacactgagtacaaccccagccgcttccacgcaatcatcatgcgcatacgtgcaacaacaacgactaaaactgtggcagcactggtcttccaatcggcgcgtgtggtcctcaccggagtgccccacccaagcagcgcaaataaaatggcggcacgcgttttgcggcgcatccaacacacacagagcatcccactcggaatctaccaactgcgtgtggtcaacattgtcggcgttcaaaccttcccccagcgaatcagtgtagagcgactccaaaacactctgggtggcacatatgaccccactatttttccagcccttaggtgcaaattgtcgaatggggtcacttgcctaatttatatttcggggaaagtcattgtcactggggcaaagtctcttgatattttgcatcagtcatttaccaatttgtctaatcttataccaaactattttcttagaataaattgattgatcacaatttgtacaaatttcgaaaaaataa

SEQ ID NO: 36587 - DNA, 922 bp, Heterodera glycines
cttaggtctgttaccgtaatcataaatacggtggaacccccccgatacaataataacaattaagttatttttttacctatttattaattaattgtccaccttgcattcgtcacccagcaaaaacacatggggatgatcatcttcactcattgcaaatttgaccggcttccgtgaagtttgttgctttgccacggtagttgtagtagaggtagcggttgtagtagttatggtagttgtagtaggggcagcggttgtagtgcttacggtagttgttacagtaacagtttcttcggtaggcaatacggttgtgaggttgtttaacgaaatttcatcgttctcagtagaaacattttgtgaagcgtcaggcacagagacaatttgctcagatgttgtctgaaaacaaattttcaaaataatttgctatttaaaaaaatttcccattgaaattggaaaattttaatttataaataaatatgaaataaataaatataagaatttcattcagcataaaaaatgttatcagaacttttgaagattttatcataaaatttatgtgcagctgattgtgagtgaagtggcctatttaaatgtattgaaaattttcaattttcaattttgtaatcaaaaacctaattaattaattagttaatcaattagcttatataacaaaacccaattaatgaattattaaaataatatttagaaaattaccggaacatcagacacatttgctgccctcaaattcacatttgatgcaatttcatttgtgttactggtgttgttgctgtccaattcagcgtcattttcaagcagtttaacgctaccggacgaagtgttggattcattttctgattctgctgttccttgctcagtctgtgaagaagtcttagttttttatttttaattaaaaaaaaacatttat

SEQ ID NO: 36588 - DNA, 766 bp, Heterodera glycines
cgaaagaccgggaagaaaaccaccagccccagagagagcgcaaggaggcagccacaacaaccggacaacgacgcaccgacgccacgcacagcgccgcagggcgccccacgagcgcgcaacccacaaagaagcagcgaaccagccaggcgaggcggacacgccaccgacacaaggccacgcagcagccagacacaggcggacacacgggcagcacagagcgggagaccacagcaccaacgcaaggaagcaccccaaaagcatgggacgcgaggcagctgccccgaaaagcggggcagcggccacaagccagcacgaacgaccggggcccaacagcggacgggggcaaacgggggggccaacgcgagcccaacaggacagcaggcaggaggcgaagaggaaccaccaggggaaagagccagcagcaggaacacccacagcgaccccgacacgacgagagcccggcccaagccacagcgaggaaaccggaaccagacagcacaccgaccgaagccggaacaccaaccgcccccgaagaacacgaaaaggctcagacccgggcagcgacgggcggcgagaacaaagggcagggacgaatgcagagcgagcggatgactcgcccctacaaggaattcctcgttcacggacaataattgcaatgtccgatcccaatcacggcaaattttcaccggcttaccaacccttttcgggggaaggactagcacgctgattttgccagtgtagcgcgcgtgcagccccggacatctaa

SEQ ID NO: 36589 - DNA, 1054 bp, Heterodera glycines
aaggggcgatatgaaggtcgtattcgtattcggcgaccctgaaaaccctaaattagactcctttcccgggtttttatgagctttttcgagttttggacatttcgtgtttttacccttatggacatttcgaggcctggacatttcgtggcttggacatttcgttggtcagcgtctcgcgaagagaaaataaaatatgacacgcaaatttcatcaacaggcaaattgttaatatttttcgcttaacaacaaccaatcggttggaaaattaagaacttttgtttggcacttttttacattttttatttttctccaatgtgttggatgaggcaagaaagaaaatttaaaacattgacgattatttcaccaatttgtcatttgaaaccactataaatgaacagagacttaaaatttgtggtttaaaaaagcttagcgatagacgaaaaatcactgatatgactatgccgttcaaaatttgccggggtaaaaaatcagtttagaaccaaaaaattattttatcttttcatctcgtccccagccaaaattatcaagactccaagttcgaaatacaaaaataaattattttaaagcacaattaaattatggaataattaacataatgcagcaatggaacttcccaccactgccaagtttaaaaatttattcagaattacatatattcccaagagtcctgagtgtttgatatgactttaagttagagttacacgggtccgggtatttggacaaaaaccgggtccggggaagtgcccttttagaaaagccgagtccgggtcgaagatgacgtagcaccgtttgaaaggtctctgccaccaccctgccctcccggacttcatctgtaattaatgaaaacaccgactgatggatggacgctgcccgatctgagctgctcgccatttcattcgcatgtgacaaaagcggtacaccatacaggacgccgtcattatgcgaattttgccggacgagtaatgcaacaacaatggtgaaatccatggccaggtgacgccgatcggtcttcaaattgaaggacattcaggaa

SEQ ID NO: 36590 - DNA, 1157 bp, Heterodera glycines
aaaaaatgcaaatttttattaaatgctagcttcacaattgcaattcaaatacatctcaaaatttttgtaatagtctcattctgttttcagcgaaaattttcggaagcggacaaatatctaaaaaacattccaaaatttcgaaaaaaattctttttaaaggtgtattttttaaaaatttccaaaaaagtcgatctttcggggtgtattttatttgcccgagtctatccgcggaaattgcgggacggaagagccagcggaaatgcgctaatttataagaaaatttaataataataaaaataatattgtgatttcaatgttaactcaattaaatgagcggaaaaaatgctttgatctttgaatgtttttcccatcaattttctgttctttaattttgtcattgtcactattttcaattcaaaataatcttacaaatacccaaattgttcgctcctccattaaattgacgaatttttttaaatttatttatacgaaaattcacaaatggtaaaacaatacagtaaaaagtcatacaattgttacagtaatttacaaaaatattaaataaggtggccaaatcaccggaacattttcaacgccctccctctccactaatcggcgctgctccggcgccaaccgccgaagagatcgccacgaatattcgcctccgtccggtaattgctggtgaggcttgagaaggcgctggaattttaaaaataaaattaaatgattaaaattcgaagtgccgtcttcgtgctcagcgtgtgaaaaaaataaaaaacagtacagtaaccgcctactcctccctcaccctcccgtactgtctactagactttcgtgatccccgttatttcatatgtgaccccagcttacagagtagggatggcacgaaattccgagttccgacatttttggggtcagaattccgatttcgtaaatttttggggtctcggaatgccatccctgatacagagtatgccattcaaaatgccatcttcacccatccctcgtttgcttttgcacttctgccgggaattggttggccgcttttgaaaagaaattgggacgataatgaggctgaagttggaaccaatcgcgttccgaagctgggacctgaagaaggaaaccgtctttctcccaccctgttcgattttttcccg

SEQ ID NO: 36591 - DNA, 604 bp, Heterodera glycines
tcccaattcccaacaatcactccctcccctccccccctcccctcatatcattccctcctcctttcatttgtccacccattcgctgatgacttattgtcagcaagcagaacaatgtgaaagatgcatgaactgctgctgatgaaatagcccaattaacagcagcaaatttttgccagcatttcatccatcagcaacagaaaatcaaaaacaattaattgaaaaagtcaaaaagaatccatttggcaagtttttatgcaaattgtgaagggggggggggtgaaatcgatggatagaaattgagctgtcaaaaggacggacaaagaagaaaagggggagggaggggaagcgaagtgaaatggaacgaatgaacgtgaagggaggaaaaaagacaaaagaaatgggtgaaaagcacccttaaataacattaattgtcccttttcaaataatttcatccataaaattggccacaaaatcaatcgggtctaaggaaactgtaaaaattggatgattcgtcgcggttattttggtccagctcatccatatggatggatgagtgggtaggagagagaatggtttggttgaatccctcagctccccgggactt

SEQ ID NO: 36592 - DNA, 654 bp, Heterodera glycines
agagtggccacgggaatacaaaaaaaaattgaaaacaatttaatttctgtagagggattgaactaggggaaagaagtaaggaaagtcaaggagactagccactaggccatttgcacacttaggagttttacttttaaagaatatattaattattattttttatttttccctttgactccaattttcttcactaatttttcactcagaccccccattcttaccagtgcttgtttttcccggttcccggttgccctaccgggaccgggaccgggacctgagcttttcaaaacccgggaccgggaaccgggaaaaacaagcactggtaagaattgattgactctcatttacaatggtccatcttctgatccgctcctcgacgttcgacgtctcggtttttttaaaggcgattgatataagttatttttgagaatgttatatggaaaatagacgatcttgggattatgcagatgcgatagagagccggcagctcaaaaaagttctgtggccgaaaatcggaagatggatcatataatttgagaaatcgtgaatccagcggcacgaaacatttgagtaatcggaattccgatggatcaaaaaatttcggactatcgaaaataggaattccgacggttcaaaatgaaaaatttgggcaat

SEQ ID NO: 36593 - DNA, 1187 bp, Heterodera glycines
  unsure (1)..(1187): unsure at all n locations
ttgagatgccaccgctcattctccgcgaatggaaaccttatatgagggagttcgatggatgttatgaaacaaacggacaaaggagtggagattgcccattgaccgatcattccgatgcatcatttggaggagacttcttccatgtaattttgcacactcacgaaatggatcttcaacgtgtgtgcgacggaactggaacttgaaaattaatcaaaattatcattgcttataacaaatgattgggtttcgagtgtgggcgattggcctgtttttctaacattgtgtacatccgtcgttcaccgatctgtttgttctgcgtctgtccaacgtttagtggcccataattatggattcccgatcactatttcgaaatttgggaattcatcttattttcttttggcaaaaattgtgtccataaaaatatgggacgacatatttgacattagcctttaaaattttttccggaaaattttaaaaaactaatgttgaatggtccattggcaacaaataaaaattatttgtcccttacttttatatattttcaggccgaagacgagttcactctttcccacatcccttttctgggcgatgccgaggacgacacgtcattctgtgccgaactgatgaaaacattccaggacggcatccacggcacggtcaaaggctgcggagagttcgttggcccaccaatttgtctgtaaataaagtgcgaaatttttcggtatatcaacgactacattttatactacacactgaggcaactgagtgaacaactcccacacacgggcaagaatattttattgtttaaatgcgaattttgattaatttataaaaattgttgtccgattgccaaccttccatcggtataaattcaaattttaaattggacaagaaaatgccgagaacgacacaatcaccatacaattaacggcctctgttgtttcagacatggacaacatggttcagggtggtccaccagcagtttcctaacaaagcctccttccacgaactgcgagccctgtaatatttttttaattttctgaacttttcatttttcccctttttcagctaccccgatntgcagcgccgttttcagcccgagacaatttgacagcagcgcttcaccaacgagcaaggcgagctggtggaaaaatcaaaaatgaccgtctactgaacagctacgaact

SEQ ID NO: 36594 - DNA, 722 bp, Heterodera glycines
aagtgaggccgtcgactaatcatcacaatacaaatatgtaattttaaaggaactaaattttaatcaaaacattaatataaaataaattaatttgtcctgatagcgattctaaaaacaaaaaagatcccccctttgggttttcgtcgggtgcccataaagtaaaaaagtgccgctttttgtcaaaattttacctgataaaaattgccagccaccgggtcgccaagttcgtgctttttcgcgaatttttcagttttccaccctccacggttgtcaccttaaattttaatatataattttctccagggatttagataaattagaaaaaaaccaaatattaccagaacgattggtcaggtggccgtgttcggtgtctttaattgtgttcttttgttggtaaatcaggtagacgtaacggtgcagacccgtgtcctggggaggccccgaaccaacttaaaacggaaaattaaaaaaataaataaaataactaaccatattcacttagcacatcgcccttgtccacctcggtgccaggaatgttcacgacgagcctaaaagtcatggtttgataaaatcaaagtgttataggaagataaaaacgcaccagtggtgccattcgcggaatttcggctccttgcgactcggtgcgtcggggtctgaaaaataaacacgtttttgcggagacgataagccgaaaattcacaaaggttgttctttaccggtca

SEQ ID NO: 36595 - DNA, 467 bp, Heterodera glycines
ggtaagttaatcgctacattaaagaggagggtgtagcgtgtggtagtgcgggacacatcgctccctttatctaccacagaactcctcaatttttttggtgcccaatgctttggtgcgttctcgccgcgggcaccgttagtaggcatttagccgaaacgaaacccaaagcaaaaacaataaaaataaacattattttgaaaacatatttaagaaaattaaaaattagcactagcgcaaggtgcgcgagcgaagcgagcgcacctgcgctagttatattaatcggcagttaaccccgcccaccgttcaaaacaaagaatttttcgacgcgatttcttttcccttccattcttctccccgagggtgtttatttactgctttttcccttttttgctcactgctttttgtttaccattttcaatgactgcaaacttttttatttgtcatttttgcataaatttttgaatgat

SEQ ID NO: 36596 - DNA, 1477 bp, Heterodera glycines
  unsure (1)..(1477): unsure at all n locations
cgaaaatataattacataaaaatgaaaaaaccttttgaactgaataacggaaaattgtttgaaaaggaaaagtgcatttcctcaggaatgaaaggaacgaaaattaattaatattaaattgcgaattctgttaaggattgttcgtaaacaaattattaataattaatatattaaagaaattggaattgtaaagggaaaacggaaaagcaaacaattaatgggaaaatggcaaatccaaacggataacacacaaaaacatattttaattaaaattagaaattgtagcgtactttggtgcaaaaaaaatcgtatttaaaggggtggacttttccggaaatttcagattcgagacaaacggttccctccgaagtttcccggcacccgcccaccgcctttcactgcacccggccttcgctgctctctgtctgtgcgagtgccctccctgtccgcgcctgctcgagtgccctccctttcctttgccattgtgtggcccttttggaccagccgttgcccgaatgcccttccttttcccatcgccgtttcgccgttctgaccccttttgattttgccacatttttccatttgtgatttatttactgtcaccgtttttgtgcccccttttccccgttcacattatcatgtttgtcccccatttttcgtttccctcaccgtcccgattgggacggtttaattacccaagtttgaggtcgacacaataaacatactcttattaaaattgtgcccaacttggtctatttgcctggacgaaaaccggcacgactcatcgctctccgatcggtcccgaccccctacgttcccccgaccggctactctgcgcgcctcgcccatttcatccccttcccgtccccttcaccccgcagagttcgacgcaaattttttgtcgccacgacaaaaattggtgccacgacccgggaccgtgcctttcccgctgtgcccatttgtcctgccgtgcgtcccgctgtgctcgttcgccctgttgtgcctgtccactccgctgtgcccatttgtcctgccgtgcctgccgctctgcccgtttgtcttgctgtgcccattcgtcttactgtgctgcctgtccggtctgcacctgattgccccgtcaaaacgtcaaattcaccgttgcgcaactgctcgtcatccggaagtataagggtcaccaagcccatacaaaatcaagggttgacaaacccaatttaaaaaaacacacacacacacacacacggatcaccaaacccaatcaaaaaaccgaaaaaggacaccataaaaagccaaacataattaaaagtcataataaaccctacagcaaacccatcactaatttaaataattaagtggacagagcgactcctaattncattactccgacgaccaaagccaancacgaaaagaaaacagtggcgaaaagcactacactgactgaacttataaaattaaaaacacaaacggggtacaaattaac

SEQ ID NO: 36597 - DNA, 962 bp, Heterodera glycines
  unsure (1)..(962): unsure at all n locations
gggggtcgggagcgtcaaaatgcgtgaattttgaccattagtgcgaacaatttgtccaaatagcttaatcgcttcacacaaaagctttgaagctaattactaaaagttcatacactgtacatagaacactttccttgaaaatgatggcaaatttaattattttaattggccactgaaaaaaagtttggcctttggctcgcgcggcgccggtggcaattggcctggcaatcgaaaagccaacgaccgaccacctgctgctgttgccgctaatagccccatcaaaaagggaggggtggggtcgattacacgatttgaactcattaaagccaattaaggggcgacggcggacaaaaaaaggacaacgaaaattggtatcatattcgtccaccactttctcacccattggtgtgccatacttaatttggtgatggcggcgatgtgcctgccatacgaggaacggcggcagcggtacggcacggcacgcacacagtcccatttaattggcattttggcaatgccagcatgatcattattataaattattattgcctttaccaaatttgggcggtgggccaattactgactaactgctgctgatattgctcccattattcttaattgtttaaactgatgctgcaaaaactttcctaatttttccgagactcttgagtcggaaattgacttgagactgaaaatttatgacttgagatccaagactcgggaataatagttggctcgagattcccaagtctgacaattggctcaacctgagactgagtttttatcaaaattctcgttccgtgacactctaattaatgtaatgcttaatttgtccgccgctcgaataattaaaattggctcggaactttctaggcctgaaattggctgaanaatcgtcggaaatgttccggcttcagactgatttcgtgagggtcacgagtcctaagaatttggctcgaaaa

SEQ ID NO: 36598 - DNA, 926 bp, Heterodera glycines
  unsure (1)..(926): unsure at all n locations
tagggaagctattccggaaggattcggtctccccataaatctgggcgcatcggttcggggggactgccccgaaaacaaaaaaatcgattttttcaagtgtccgtttggggtactcaaacaattatggggagcaaaaatccaacgcagaattaaagtacaggctatagggaagctattccggaaggattcggtctccccataaatctgggcgcatcggttcggggggactgccccgaaaacaaaaaaatcgattttttcaagtgtccgtttggggtactcaaacaattatggggagcaaaaatccaacgcagaattaaagtacaggctatagggaagctactccagaaggattcggtctccccataaatctgggcgcatcggttcggggggactgccccgaaaacaaaaaaatcgattttttcaagtgtccgtttggggtactcaaacaattatggggagcaaaaatccaacgcagaattaaagtacaggctatagggaagctattccggaaggattcggtctccccataaatctgggcgcatcggttcggggggactgccccgaaaacaaaaaaatcgattttttcaagtgtccgtttggggtactcaaacaattatggggagcaaaaatccaacgcagaattaaagtacaggctatagggaagctattccggaaggattcggtctccccataaatctgggcgcatcggttcagggggactgcccccgaaacccaaaaaaaattttttggnataaaattannttaatgaactgactagataatatttaanatangttatttctcttcctttcagtatccctgcaaaagttgntgcgcttctgatcagtttctgaaaaaaaagtaagcctaaactttttgcctgtttaaaaaaattaaaaattttaaaaattttatcatctcccttt

SEQ ID NO: 36599 - DNA, 303 bp, Heterodera glycines
atgattgaaagaaatcatataccgtaaatccgctagttgaaggcccgggggccttctattattcaacccctccaaaaagtggcctttaattggagggggccttctaccagcagaggggagcttaatactcaaaaaaccccaatttttttctctatatatattttatttagttcttgtttttaccattttcggaaaaagttataaaaataaaagtgctttggtaattttggaccaaggggggggggggcaaatgttttttgagtggaaaattttttttcacccaaatttagctgaaaaatactt

SEQ ID NO: 36600 - DNA, 1476 bp, Heterodera glycines
tatatttcccccccccccccaatgttgtgtgtgtgtcactctcaaaaaattttccctttttttggcgtcacagcaattttcattagttgcaaaaaattcttggaattttctccatgttcagcagcaggtgggcgggcagtaaatagttattcgttttcattaaatcagcaattaaaaatttattgaattaaaaattttttgaaaatttcaaattccactgattttttaaaaaattaatttataatagaaatttatttttttataaattttgcattttccatagagggaagttaacattttacaaatattctggaaattttaaagattttttctcaaatttttcttcaattgtctaatccctaattttcttgacatgattacagggaattaggttagattaatttaagatttataatccgtttttacaaaatttctttggactttgtttgttttaattttcaataaatcgtgattacaattttacatatgttctctaatttttttctctaattatctttaaatccctaattgtcttgacctggttacagggaattaggttatgacggaaattttgagaattttatttataaaatttttcactttttaaaaaaaataaaaattatttccgcctttattaaataggataattagtttgcatttattacattttttaaaattatcatcattgtctcttccattaaattctccactttcccaatttcgtctcacctccccccccccccatttccattaatttttgttcaatttgcctttgtccctgccgccccattgttgtcaaactctcaaaaaatttctcagtattttttttttgtgtcacaacaattccatttttattattacaaaaaattcatggaatttccattcgttttccatcaaaatttgtcttcattttccacccgaaacttcgaatcaaatatttacaaaaattatacaattgcataaaatttctgagtttttgtgtgtatttttgaataggaaatttaatttaaaataatatttttaattattaaaaagatttgcattttccttttttattatggcttatttattttcaaatgaataaacaaaacaaaaaaaagtaatcatttatttctattcatttatcaaaacaaattaaattttattcgattcttttaatgaaaacttttttgctcaaatttaattctaaaataattaaactctattataaaatttattcattaaacaaaaaataaaataaattaattaaaagttttcaaaaaaaattcatttcaatttaaattctccccaaaatgtcaaattttcgtatttccttttctgtcgcccatcatcccacattaatcaaccaccacacatttccaatccaacatttctcaccaccgccgccgccgccgcattatttgctgcaacaaaaaatcctcccgcgaaaaaaaaagaatttttccaacccaaaaatcccacgtcattcacacatta

SEQ ID NO: 36601 - DNA, 1243 bp, Heterodera glycines
ttgcctttgtgccaccaaagttgctcatgctgtgccccctcctacgattcatttcggcattttagaatcaattaattaacatagaattttaatttaaactttaagaattgtccgtgtccatgaaaacagtaagaattttttgaaaatttttaaaaatcaaaatttagtctgtttgaactttgcttatttggcccaaagtgtgtccattcaattggccgttattgttgatggtcgaactgtgtttcagattacagtatcgggtgatttcttactgtatttgtgtttggtaaaaacagggagaatacaggaaccgacagatttttgaggggaggcggaattttgccaaatttattttaatttattcattcacaaggaattatttttcttggattattttgaataaaaaatatttggcaatctatcacttagagttttcccatttttcaataatttttcactattttaaaatttaaaattcttaatttagccataaatcctccgccaatttgcttgcctttatttgtcggcgaattgtgctttgaattttacaatgtaaaaagaaaaataatttagtttaatttaatttaatttttaattttttaaattttttagctcaatgtctcgcataatttgttcagcggatgtgccctttttgatatggttttgctccatcaaaaagtcattcacgaagaattgggctgcttcaaaattccgtgaattttattttaatttatttttttaaaatttaatttatcaactttaaattttgaatttagagttccaattgcttcggaaaatgaacattgaaagatgccatcgagaattagctaatttttgcgatgaaattacgattataattgttattggagaaatgattccgttttatttggccctgaaaaaaaagattgaaattaaatattagaaaaaccgcaagttaggcttaatgaataatattcctaagccttcttttgagaataatgaatttgctcaaggataaattaaaatattgcggataaaatttagaaaatttataaaattggttttttcttaaggttgaaactcggcacaaaattttaaaaaaattattaataaatattttgattcaaaattgtgccaatttttggaatttatctatttctttttttactgttatgcctcgctgatttgtctgtttgtctggtctcccgctgtttcatatgtccccatttatctctatcaatttgtctcatttctcttgcccatg

SEQ ID NO: 36602 - DNA, 1060 bp, Heterodera glycines
gagaacacagggatagttctgtctattcctaaatcggaatgaaaaaacgaattgacaaaaaactgaatcgaactatttttatcctttatttatttttcgctatattatgggatataatcgacatccgattttcatccctttgaacttaaagtactttctgtttagaggaccagatttgatttttttaaataaacaaatagaactgaaactggcgcggagatgcaattattcgaaaaatctttgcttaaaattaatggcatttatgcctccgaaactagaattagaatggcatgcgcgtattttttacaaatgcgtcttttgttacctttaaaaaaatcaaatccgatccactgaacagaaaagtaccaaacttaaaaccttccaagtccaaaacggctttcaccatttacccccccccccttttttgggcaataattgtacgaatttcgctgttaattattgcactgctaatgtttccatgtttataagtatttttggcgtttttttcggaaatatttaattgaatcggcattttcaaaaataaatctgcttcttacttcatacaattgcaacaggcgcgaagatgtaattccatgaaatctgctgtaaattattagcatgtatgcctccaaattaataatatggcacgcgcgcattttttacaatttacttcgccttttttttgatccagcaaagtaccaaacttaaaaagcttccaagtccaaaacggctttcacattttatcccccccccccgccctctctctcccatcagccatcacaagcccttttccttttctcctttatgccttttcattcataccctcctccctttccccattttctcagcccgcgctcaatgtgtctttccattccctccccctttcattttcaatcgatacaaaactgattgaagcgcctagagaaagataaacaaatgagagcagtcagacacagacgacccttgaaagggccattcgaagagcaatctcaacacgaggagaatgatgagagagagaaggcactgcgaaaggggaactcgtcgtcctttctgtcttaga

SEQ ID NO: 36603 - DNA, 838 bp, Heterodera glycines
aagtttattaggggaaaaaaagactttacaaaataatccccccctggagaagggagtgggaaacatgatttcaaaattttcaattttttctagtctaatctactcaaaccggttcagaattcaataaaaataacattcacggtgcgaaaaaaggggtttgaaaagtttattttgaaaaaaagactttacaaaataatacccctgggagaagggagtgggaaacatgatttcaaaattttcaattttttatagtctaatctactcaaaacggttcagaattcaataaaaataacattcacggtgcgaaaaatggggtttgacaagtttattggggaaaaaaagactttacaaaataatacccctgggagaagggagtgggaaacatgatttcaaaatttttgttgaaatatttgtcgtgctctgaagggcgtgggaggggggggggcgaaggcccaccacgaggccgcgaagaggccgagtgagtaccttcggtgcaggaaaattattaaattttaaaattttttaattgctttttaaatatgccaaaaaatgtaggcttaacttttttagtgaaaattcgatcactcatattttttgctaattgagcagaagcgtaccaaactatgcagggatactccccggtaaaggactaacttacactgaaatgagcgccgagctagctggctcaaaaaaaattttcgaaaatctgagtctttcgtttttatttattttttgcgaaattaattcataaatattttttcagaaagggttctgaaacgcaccaaattttatttacaagttaataaggctctctgatgctttttctatcaataatgga

SEQ ID NO: 36604 - DNA, 1139 bp, Heterodera glycines
  unsure (1)..(1139): unsure at all n locations
acattggcgtacacaaaatcattcacagaagagaaggtggagagggaattatgccgtaattagcaccattagtgccaccaaaaatggatatcggtgagtgttgggcacctggcaaccaaccgaccgacccatccacccattgaacgtgttgatgagtattgtgagtgagtgagtggatgaaattgagcggagtgtgcactatttacatattaaattggggcagctattcacacaaataacaataataaatattgtttaaggaatattatttggtaaattaggaccaaattaattgggaatgtatttatgcgtaattttagtagtggcaaaaataataaaaacagctaattaaatagtgaaaaacagcgaaattcttttagagggaggtgggggacagaaaagaatggaaattttttagcaaatttaaaaggcgaaaatgaattataatcaattaagaaaaaaaagtaaaagcaagtgtctcatattttaactttagaaaaaacaacataaagtgaaaaattttgggaaccaaaaaatattcttaaatttatattttaaaaagattttcattatgggaaaaagacaagcctagatatctttgtctgcccaaaaaaatttcaaaaatttcatggcttatgtgtttacaattttttttcttaaatttatatttatcaggttttttatagctaaataattgcagacttctaattaaaaaatttaaaaaaaattcaaattaattttcttgcaatccgtacaaaaacttatttaaaaaatatattttgccatttttgataattgattttttttgttgcttcaaatcactacaaattcacatgcattgagccggaaaagccttcctttttcacacgcgcagcaaaacattgtttctcatgtgttcaataaccaacaacaaattgttcattcgtctgcttcggtcgtctcaatcggcggacgaaaagtgaataaatggngggacaggcagaaaatcctgttcttacgggggtaatttgttgctgggtgatgtgctgctgatcacctcgatcagtcagctgttaataggcgaacattttgtcactttacaggaaaaaaagtgaaattaaaaatatacaaaaatttatgaatancaattagtcattgaa

SEQ ID NO: 36605 - DNA, 1003 bp, Heterodera glycines
tttgccatgcaagtcaccgactgtggaaagcatttccttattaagttcaagcaaaagtttctgccacgcgagattagagtttgaagagagttggaccacccgaacctcgtctacttgtacaacgatttccagtggagcgactatcagttcctagtgatgcaattggctgttggtggagacttggtaattccctcttttgttttatgagtgttgcattacttcaccatttactcttcagctttcgttcctccaaaaatgtggccccgtcagcgaaacgacctgtcacaattggatgctccaaattgttgctgctttggattatctccaccgtaagggaatcgctcatcgcgatctgaagctggaaaacgtccttctttgtgaaaacggcgtcatcaaagtcactgactacggattctctaagcaggtggtgaaaattgtttttgcttatttgaagttgattttcagagttctgatttgtcttcaacattttgcgggtcgcgttcctattcgtcaccggagattttgcttggcatcgcttatgacatgttcaaatcggacatttggtcaaactctgttgtgccatcctttttatgctgatcataatttcaggtcattaggcgtcgccgcgttcatcatgatcacaaacacaatgcctttccatgaagacttgcccaaccagcaaatcgttgactcgcagcggaagcgccgttacaaatacccgtcatggcttaacattacgaagcaatgccgcactgccatcgatgccttgctgacttaccaaccggcttttcgtccggtagggttttgcttttaattcgcttctcattttctttcccattcagaacatctttgaatgtgccaagttggaatggtttgcccaagattccgcctctttgtggtgcggtggtcgtcgtgccggtgttggagtgatgggtcaagtgcgtgggcgatgataggccgtgtgatgaccaacggaagaagatacatttgataggattaaatc

SEQ ID NO: 36606 - DNA, 862 bp, Heterodera glycines
ttttgttctttttttcgtatttatttgaatatttttactaccctaatagatgcaatttattcgaattgttaacagattttttaaatgaaaatttaaggatttatttgtcaaattctggaaaaaatccaatggcattggacccgaatttagaaaagtgccaaaaagtaaaaaaagtgaacctctgatccgcccaccccccttttgtttggtctttgccttgtgaatgcgtccgacgcggcacaaaaaacggcaatttcacgcacattcccatttttgatctgacagaaaaattattttaaaaatattttatttttgatataggtaatttaattaatttattttttttgagcgcttactctgttttaaatttttgtgaattcacttttaattgtaaatttttttgattttccaatttatattttaaattaacaaaaaagctttctgttgatgatttaaacatttattgatgcattgcgaggagaccgcattgtgaagcccggcgaggttcggcaccagcacgggatagctgacgccggcaaattttttgcagcgactgatcacttcggcatggtcggccatctgtgctgaacggaatggcactaattgtttttaatggatttgccaattattccaggataaatgattagaaataattaattgcagtggcttttctttcttttacctgtgggacccatttgggcgacacaaaacttgtcgcttcgatggttttgagcccacaatcgctgagtctgtcgatcaaagtcactttggtcgctgttggacaattttctaaactatcgacattttaattgcctttaaaatttttttttaatttcgctgaaccctccactctcgaatctcg

SEQ ID NO: 36607 - DNA, 784 bp, Heterodera glycines
aaattattcgacagaaaagcaaatcaaaaaggaacaacaaattgaggaaggaacggagattaatgggcaaacaaaaggtgagttcatccatcaaaatcaactacctcacgcgaacgaacggtttttcttttccaacggcgaaccaatatttggggacccgacttatagggattcccgatatttggggaacacgacatttggggaccccacttttggggatcccgacttatagtgactcggcatttgggtttccgatatttggagaacccgacatttggggatttgtaacatggcgacacgacatttggggacccgacttatagtgactcgacacagggattccgacattttgggaccacacttttggggatcccgattacaaatgcccaaatatcgcgccaagtccttaatctaaggaattgggagggatttaaaatgtacccgcgaagctcagtcagttggttgtactccgaacggcatgaaaggccgtcatgggttcgagtcccaacgcggaacgattttgacatttcgtcatccgtcaaaatctccacattgcattaaaatattcaaaaaaatttccggctgcgcctatcggcaccaccggacctctacatattttaccatatttttttgtacgggacgggaccggggtgggaattcccggtctccgatgtcccagttcccgattaaaatattttgtgatttctactcatgggtttcttaccgagaaaatatggattctcttggttttttttaattgcacatattttatcttttttttaaa

SEQ ID NO: 36608 - DNA, 614 bp, Heterodera glycines
tagggttgagcggtaccggtaccggtaccggtaccgaccggtaattaccggtttttttggtaccggtaccgataccggtttttgcattaccggtcagtaccggtactggtttttttacaattaccgattaccgctcaactctagttttgtttctttgtttttctttcaaaaataatttctcatttacttttgtgttaatttgtatttatatgaattttattgtcttcatttattttaattagctatataaaataatttgtaaatgttcaaagtgctcttttttatgctgtcaattgttatgctttattctgtttatattagagaccagacgggatcggaattccgcgggattaaattcgggatcccgacatctggatccgtcccgacgatttttgaaattcatcgggattgatcgggatcgggatttcatcgggatcccgaaccgggatccctcccgaccattttaccaatcccgcaagatcccgcgggattgaagtcacgataattttttgaaaaaaatctccatttaataattaagatcttgaatttttaattaaaaaatattgtcatttgctaatttttcttaaaaatcctttaaaatcccaaaaattttc

SEQ ID NO: 36609 - DNA, 507 bp, Heterodera glycines
ggaaaggccagggattgtgtttgatggtaaatgaaaagattagggtgtagaagaggctgaatctggagaataatgggggtggtctgttggaagagggagggacgggaagagagcaatgcgaaattcagcggggaatggggagggagatgaatggaatggatagcagcaccagcagaggagcgattgaactgctgcaagtgggggggggggaggagtgcttggatgagagatggtaaaggctttgagcgcaatcgatcggggtggatgggatgcaggtggaagaagcgggcagccgaccccccccccccccgccccgtccccgcatcagccacccattacgcaccgattgctccatttaaggaaaggtttgctcattgtcagaggtatgcaaggaaattaaagtgaaaaccagcaagaacatgctgaagaatgccatttaataggtagataaatttcaagaacaaagaaaagcgagtttaatttaaatctactaagggattgaaactt

SEQ ID NO: 36610 - DNA, 728 bp, Heterodera glycines
aatgagtaattcttttttacaatttccaaataatttcttttagtcttcatttatattcatttaatttttacttttcaatatttaattaattgactttttaattcattatttaaaaaaattgttttgattgtgttttactaattgtaatttttaacaaaatttaaatcaatttcatctttgtatttatttctcatgcaaaaaacttgctgttattttgacttgtgagcaggtgagtttatatatatatatatatatatatatatattttaaatatatattttaatttaaatgaattactctttttaaaaatttatttaattcgcaaaaatttataattttttagcgttttttcgattgttgaaatattttaattttcttcataaatttcaattttattttctatattattatttttatatttttattaaattaaatttatattccttatttttaattaattgtatattataaaagtaatgaatttacttttttttataaatgtgaattatgattttttctctaataatttaatcttaaattaaataagcaatagaaataaaatcacattagttagaactctgaaaatattattctttttattcaatttttcttagattttctaaatattatgttttttaattagcttttatatactaataatttatattgtaactcttattaatttaaattatttaaataatcatcagtatttatggattcctttttaa

SEQ ID NO: 36611 - DNA, 953 bp, Heterodera glycines
  unsure (1)..(953): unsure at all n locations
aaattctttttcatgtttattattatcttattttttatttcacaaatacagaaattaaagcgttaaaatttttctttttgacgtgtccgatttcatgttaagttatgcgcagtaaaatttattttttacaaattaatgattttttgattatatatcgcttcacttcattcttttaaaataaaattatataattatttttattaatttttgaaaaaagttctttttttattctttttagttactgcattattcgtggcattgattcataaaaagtgaatcaaacacttgattgtatatgtttataatgaaattattaaatttaagttagaaatcatttagaaaaaatacaatcatttttattaaaaaagttaatataataaaattagttttgctattagcgtagtttcatggctctcagttgactgacgctcaatttgaaaaacaataaatttccacaaacgctgttttcacagcagtttggatttatatgaaaatcgactattttgcaaatagatatttttcgtgttcaattttggtaatttatacgatttacataaatataaataataatttttaaacaacatttaaatggttttaattatgaacctagaagaattaattttattattatttttttttataattttaaattgcttttgtagtattttatgttttaaaatgttgtattttctagagcaaagaaacaaaagaagaatattttttactcatataaaaatataagaatatgttttaattgcttctttcatttttgcatcaaataattttactttcactntctcctggcaaggataagcttngtgttttcaatggnggaaagactaaatacaagtgngtgagcatcaaaagtacgcaattttattatttagataatgaattaaaatgaatactttcatattcatatattttagaaaagattgatttttaattaattt

SEQ ID NO: 36612 - DNA, 1373 bp, Heterodera glycines
ttttattggatcgcaagataattgagcggcattttcgggcaacatgccaacctactaagaatgccgaaaccatttttgaattctcggttctgcttgccgaccataaaaaaaacaaaaaattgccaaatttaatttaattttaatttttttggaagggggcccaattatatgctaatttgtaagtaagtgcaaaagtatttttaaaaaatcaggcttaataaacagcacccatcagcagaatattggaatgcttctgttggtgatgatgccattccttcttggtatatatttttgaccctttttttttgtcatttattcttttaaatacccagattttagcctttcttttcaatgccattttgcgcgcatcaatttaagtgagcaacggatttgatgacgtgaaatgtaaaggacagcagaagagtcgtaaaaagaaagaagcaaatttttgcaccaaaaaaaatttaaatcgctaattatgtttattatcagaaatatttggccaaaactccataaaatagtcatttattaatttttcgtgccaatttatttattcgggtcgctcgccaccgtattcatttgctccgcagccatgcacttgcccaaattctgcaccatttttgtgaaaaaaggcagaaatttggcaagtacaaaggacagggacaagaatggtgtactgtaggtagtgaagacggtaacaatgagatgaatactgtattcatacctgcattggccgcaaataaataatagattaattgaaggcaatttatgaatacataaaatggcatttgaatatggcggcatgtcgaggggatggatgatacagtagtattgtactgttggccttagaaatatttaaacgaaaaaatacaatttgataattaattagcatgaatttgttcgactcgaaaaaaatctcgagattttgcggtcttctattctcggttaattattttggtgccgaattattaaacgctctaagcaaaaaaaaaaaaaaaatggtttaaattgactgaaaatcaaaacccgtagaggcaatagattatttttttaataaaatttaaaaaagctatttaattaaatggtagttttttctttataaatgctctttctccgccgtcattttctaaggttttctatagtttgaaaaatcaaatcaaaataggatgaaaacattgttgtaacaaaaatattgtactgcacaaaatacaatgaaaatggaattaaatttgaaaaaaaaaaaattcaaaagaaaaagcacaacaggtgtcttctgtcgtctgtctgtctggctaaaagcgatgaaaaaacgaaaaatgttgaaaaatttattattttttaaatataaaaaaacttaattaatgatttggcag

SEQ ID NO: 36613 - DNA, 654 bp, Heterodera glycines
ttgagtcccagtgatttgaatgctggtgggttgagtcccagtgattggaatgctggtgggttgagtcccagcgattggaacgatggtggattgagtcccagtgattggaatgctggtgggttgagtcccagtgattggaatgctggagggttgattccggcgattggaatgctggtgggttgagtcccagtgattggaatgctggtgggttggttcccggcgattggaatgctggtgggttggttcccggcgattggaatgctggtgggttgagtcccagtgattgtaatgctggtggggtggttcccggcgattggaatgctggtgggttggttcccggcgattggattgctggtgggttgagtcccagtgatttgaatgctggtgggttgagtcccactgattgaaatcttggtgggttgagtcccgacgattggaacgatggtggattgagtcgcagtgattgaatgcaggtgggttgagtcccagtgattggaatgctggtggattgagtcctggcgattgaaatgctgtgggttgagtcccagtgattggaatgccgcagatttgagtcccaatgtttggaatgctggtgggttgagtcccggcgattggaacgatggtggattgagtcctggcgattgaaatgctgtg

SEQ ID NO: 36614 - DNA, 805 bp, Heterodera glycines
acaaggctaaaatttataaaaatataagtttaccctttataattattagagggtgtaaaaaagtctcggttaaattctggagcggttgattttctgtaattttttttaacccataatttcgattcaataagacagattgaaaaatgaatttttctaaaaaaaattgaatttaaattaaaaaaaatttctctttattttttttaatgaaattatttttgtggaatttttgtcggtgagaaaaaattggtctgattgaaaagaaaacagataaaaatgctttttttgagcttttcatgcgatagcatattcgcaaaaaaaatatgtttaaacataaaaatcccagcactgataatgagggtttgaaatctcatagattgagtgaaaattcaaaattttcttaaaaaaatcattaaaataatttgaaaattttttaaggtataaaagaaatgattttattttttaaattaaattaatttacttaaaaattgtaaaattaattttgaaaactttgattttcttttcttgaaaaaattcccattttgtcccatttcgtttctccgattgccatcttattcataaatttaaaatttcccctttgtttgatatgtatgttgggtttaagtgtgaacttttttagtctagtcaagtcaataacccggccacgggttaatcagtgaatcattttgtggtttgggaagggatggcgagggggaggaaataaatttgaaccttccttcgcgattggatctaacaaattatttatctacataacaatatgtatgacgaaaaatgtgaaatgatcaga

SEQ ID NO: 36615 - DNA, 1293 bp, Heterodera glycines
  unsure (1)..(1293): unsure at all n locations
ctgtcgcaatcgttctcacattgtccccattttgccgttccatttccggttctcacctagctttcctttatttggtttttgtccgcttcgactcaaattcatattttaaagtttttcgaagagctttcgcttttgggctcgtctaattattgggtagcgtgccataccgcgatagcgctctaaatcatcacaataatgcaattaatcttttgtatgttttaaaataacaaatgagcatgtccattttctcttcatccaaaagccaattgcctacgccgcccccgtcaattcccacacgctagtttagatactactaaagaaacagatgaactcattgctaaaacaaaaatctcgggaaccgctggcgggagggactcgggatttcgaccttgggggcaacttttgacggcgcatccaggaaaactataggcattccggtccgagggccaactgagcgccagcggcgctgaaacggcttttttaaatttttttttgctgtttttgggattcaaaaattttttaaagtcctaaatgaaaaatcggcctcgataggaaatcaagttgggaggtttggcacaactttttgctcttcaccgacctcgtagggcctaccagtttttccgaaaaactgcgcaaaaattgcatacttttttggccatttcagcgccggcggaataactcgtcggggtttggagggaggaggtcggtgtaagcggcttttttgtacagctcgacgagctctatccaaccatgtttttggatttctgaaattttcagaaattttcgagctaggccccctcgaaaattttccgttttttaattttattattttttacagatttttccggggaaaactgagaccactttcaagcaaccgtttttcatgctctatcgattggtggcattttcaaaaaaaattttcaaaatttttttggaaatagaaaatttttggttggtaagcctcaatttcagttctgtggctataacttgtcaggagttgattttatcaaaaaatcgtctaagagcttttttgtagagaattttaagcccaatctaatgtgctttatctcatgtttttaccatgagtttaaaaaaagttataaaattaattgtgattttgaaactcaaaaccataggggggaccccatggttttgcatttcatgaaaatttttttggtcctanattagccaaaatgcatttttatggcataatttgaggtgctgaatacgtatatacgctttatttttgcgttcagactttttggaaaggtgggtaaaaattttttgaaaatc

SEQ ID NO: 36616 - DNA, 145 bp, Heterodera glycines
ccctccattttttaaatgttttattattttaagtgtcgccaaggcttagtgatcaggcacaaaaattgttgcgcagcgaagcggagaaatacgctgcattattaatgagtgttgtacaggtgcaattattctttcatagattttt

SEQ ID NO: 36617 - DNA, 1189 bp, Heterodera glycines
aaaatagatggatgacttttacattgtgctaccctagaacacgccggaaccagggaacagtacatcaaaattcacagtacgactccccgagattttggaattgggcacaaatttggtcagtagctctctcatcaattatttacccctactcattcaccttactcggtataaacggtcaagagtttattaaagtatgggaaaacgacagcagtgtcccgactcaagtttatttaccggacatgaattttaaaaccgccgggggcctgggaaataaaattaacgaggcattcagccatcattacaaaatcaaaaaacaacgtggaaggagagaagccaaggctgaagataccaaagactcaaaaattgatgtcgcaaagagggccgcagaacgcgccgggagagacgtagaaagacattttaatcagatcaacaatatctcgaattccatccaaacccaactaaacacactacgagaaacaaatcctcaaattttagaagagcctgatataaaaatttggtttgacaaaatggttgagatgggaaccgaaattcaaacatcccgaaatgaacttaaggcttttcaagaagaagtagataaagccaaaaacataacattggagcatgtggaaaagaatgacttgaaaaaagcaaagaaatcagccgacgtcgcaaagggaatcgccagacaggcaaagaccaaatatacatcaactctcgagggatataatgataaatcggaaaagggttttagcgggatagtgataggcttaatgaggcgctcggtgagcatattaaacgtaaagatattgaaaatagacaagtatctgaaactgagaaaggaccacaaaaaagagaaagactagccaatgaggatgttcaatttcaatatgacagcattgatcaaaaatttattgtctatctttccgctgctgtctcccatatagatttgtcaaaacacctagcctatgtgctcggttttaagaacacaaggctatttcacgcggaagaggcgaattatataccagatttgacgggaggcgtaaggcagctatacatttatgcaccaaatttaatagaaaacacaattatcggggaccagatggctccactcttaagaatagttaacgtagtcaatgacccaggatcgattagtgaagttatatatagcaccgagtactttcatcgtcta

SEQ ID NO: 36618 - DNA, 1175 bp, Heterodera glycines
acgaaaacggcctggcccctacactggctacatgaagctctacctagtgctttcaaatgttcccactccgagtaagtgacatcggaaagaaaggaagaaaaagggacacgcggtggggaagggcgacgttctcgcgcctttttaaattgaggctattgtaaatcttcacgcaaattaggctcattccgttcggcgtgtccctctctgcccccgggggcgttcgttcgttcgtcggttggtccctttgtccttccctttcatttctcctcgctttctaaactatcaatagatttgataaataaacaaatatgcatcaacaacagttcattattataatttataaacttaattcgttgggcaactcattaaaatgcatttaattaagtaatttgtccagtcattctttcgccttcgcttctctttctgcccttttgtccagttgcttcgtctatacatcaagtgattgaataacccgagatgatcattgtgacagcgaacgaaaatttattggagcgattggtaattaaaggcattcattcgagtgccaaacgctttttggcactttcgcttcggtccctttgaaaggtccttttggtgcaaaataagccccgcggtgacaatgccagctttccgccgccggtgcgtgcgcagactgtgctgatcgcctcttcggccaacagttcggaatcggtcggattgcccactcattcgctggcccattgttccactggcgagggaagcactccgccacggaattgggtgttgctaatggccaagaagggattcggcgaacatttgaacactttgcgaacgctggccgacctctaccgactttccatgtcaaattcagtgggcatttgaaaaaaaacaatgaaaaaggaggaaaaattatttattgcttgaggatgaaaagggaacagcagcagcaacaggccaaagtcacatgcgaatacttatcatcaaaaaggatcgatcggacgacgacaaacggtgccttcaggaacacctcgacgcggtgcgggcggaatgggtgggcgaatggagcgccaggtgggagaagaacaggtggagacggaaggaacaccatcggaagaatagaacgattgatcggacaatgaatgagatgcttatgacagttcggcgaaagcgatgcgcaaaaagagcatttaatgcgc

SEQ ID NO: 36619 - DNA, 872 bp, Heterodera glycines
tttgtctttctgttgtagcgggtgaataaaagcactaaatagtgtgtttgaaaaacgcacgaaaaaatagttcattgacaaaaaaatgtgctatcttctgaaaagtcatctattaaaatcccctacccgggaaatgggacaccaaactctttgtctttctattgtagcggtggaataaaagcactaataagtgtgtttggaaacggcacgaaaaaatagttctgaccaaaaaagggtttttttgaaaagcccttattaaatccctccgggaaatgggccccaacttttgttttttgttgtagcggtgaataaacccctaatagtgtgtttgaaaacgcccgaaaaatagttattgacaaaaaatggctatctttgaaagtccctattaaatccctcccgggaattggaccccaacttttgtcttctgttgtagcggtgaataaaacactaatagtgtgtttgaaaacgcacgaaaaatagttattgacaaaaaatggctatctctgaaagtcactattaaatccctaccgggaattggacaccaacttttgtcttctgttgtagcgctgaataaagcactaatagtgtgtttgaaaacgcacgaaaaatagttattgacaaaaaatggctatctctgaaagtcactattaaatccctaccgggaattggacaccaacttttgtcttctgttgtagcgctgaataaaacactaatagtgtgtttgaaaacgcacgaaaaatagttcttgacaaaaaatggctatctctgaaagtcactattaaatccctaccgggaattggacaccaacttttgtcttctgttgtagcgctgaataaaacactaatagtgtgttgaaaacgcacgaaaaatag

SEQ ID NO: 36620 - DNA, 913 bp, Heterodera glycines
ttgcttaaataaacctaaaaagtacaataaacaaccaaaaaatggggtttaaaacttaaaaatgcatattttttattgttgttcgttgtatcaaaaacacctccaagtttgccaaatttcgaaaaaattctcattaaaaaaaaagaaatgttcgcaaaaaaatgacgaaaatatttattgaaaatgccaaaatgacgacgaaaactcaaatttttcgtgttttgtggggtgtaatttttaaaaatttccaaaaagttgatctttaggggtgtatttttcgttttttttttcatttttcttgtgaaaatttccaaaaaatggccaaaatatggactaaaaacccaaaaatggcgaaatatggatttattcccgaaaacccccaaaatatggatttatatggactaaaaaccttcaccaaatcaaaaaattttaacgcagaaatgctatttttaagcccctttcttcatagcatatgcgcagaaaaaatatgttaatccatataatttacaaccctagtgattgggatgccgacgaattgcagagattgagtcccagcgattcgaatgctggtgggttgagtcccggtgattggaatgttggtggattcagtccgtgattggaatgccggagaattgagtcccagtgactggaatgggggcctctaaaagggggtcggggtcactttggcgcggaccacttcggcgccgcaaattttgaaatgctataacttttttatttttggcatcatttgaaagctctatgtgtgctctatatttcagggcggccaagtgtccttttttcgaagatttgtccttttttggaggggccggatctttgaaaactaaaatgtccttttttcgaagatttgtcctttttttggcatggcctacttgttttgtgcttattcatggat

SEQ ID NO: 36621 - DNA, 723 bp, Heterodera glycines
  unsure (1)..(723): unsure at all n locations
aaaattttgtaatttttaatgcgatttgttaacagaatttgtaaaaaaaatgaccaattgattaagttttgggtttttaggatacttaacatgaaagaaaaaagttggaatattttttaaaattaaaattttaattaaaataatggtaaagaaaatgtgaggaatattctatccaagtggggaattgaacccaggcgaaaaattatgaaaggtagaaagtttaaccactacaccacatgtgcatgtgtgtaatcccatgactaaatggaataaaatttaattttttctcaaaaatttctccttcttcaccaatttcctactcttttctcgaccagacccccattcttaccagtgcaaatttttaccggcggtaccggtactagacaaaccggtaccggtttntttcaaaaatgaaattaccgttaccggtttgtctagtaccggtaccgccggtaaaaatttgcactggtaagaatgggggtctggtcgagaaaagagtaggaaattggtgaagaaggagaaatttttgagaaaaaattaaattttatttcatttagtcatggaattacacacatgcacatgtggtgtagtggttaaactttctacctttcataatttttcgcctgggttcaattccccacttggatagaataatttacatggccggagaccccttcgcaaaatgggaaaattggctgctgacccctgttttgcaataatctg

SEQ ID NO: 36622 - DNA, 1020 bp, Heterodera glycines
aaaaaggagaagaataaaaaatctaaaaatttttattgtttttaaatatgcgaaaaatttaggcttacttttttttaaaaaactgatcagaagcgcaccagattttgcgaaggcatcaaaaagacaaggaaaagcacagctatgatgctaactccagtaattctgaatttaaaattttttattaatttttaaagcttcactattttattttttagcaaaattaattcatcaaattttttgaatttttttaagtgaaaaagtggtgggtgtctgcaaaaaattttcaccgggtttaaaaaatctagaaaaattagtaagcatttgtagtgttccgatacgtatccctgcaaaatttggtgagcacctgatcaattacaatttatttatggacgatcaaattttttgaaatttttttaagtgaaaaagtggtgggtgtctgcaaaaaattttcaccgggtttaaaaaatctagaaaaattagtaagcatttgtagtgttccgatacgtatccctgcaaaatttggtgagcccctgatcaattacaaattatttatggacgatcaaattttttgaaatttttttaagtgaaaaagtggtgggtgtctgcaaaaaattttcaccgggtttaaaaaatctagaaaaattagtaagcatttgtagtgttccgatacgtatccctgcaaaatttggtgagcccctgatcaattacaaattatttatggacgatcaaattttaaacgcaccaaattttatttacaagttattttaggcactcagatgctttctctatcaaaaagggagatgaataaaaaatctaaaaatttttaattcctttttaaacaggccaaaaagtttaggcttaactttttttttcagaaactgatcagaagcgcaccaaactttgcagggaaactccccggtaaaggactaacttacactgaaatgagcgccgagctagctgggtttaaaaattttttcaatgaatcacagtctttcgtttttatttcattatttattattt

SEQ ID NO: 36623 - DNA, 953 bp, Heterodera glycines
  unsure (1)..(953): unsure at all n locations
aaaattttnttgaaaatgtacccctaaaaaatagtttttttcgaaaaaagagatattaaaaatcaatttttaaaatactaaaaatgtgattctatgcctattttggtcattttgtggcattttgtgcctattttactttttacgatgaatttttatacaaaaaataagcattttaaaaattttatttacatattttagtacatagttggaggttttagtacatatttcatacatattttagcattttttatacatattttatttacatatttcgcgatttttcttacataaaaaaaagaagccctgctgatcagcactgaactgttattaacttttgatttccctccaaaatcgtattaattaatcgcccctggcataggtcggccccttcaattaccgcgtcgtgaacaaccgcgacttggtgccgcatatgccgcccctttggttcgaagggtaccgccaccatatgactgaagtgggacattcggcaaaatgactttaaaaacaaatcctaaggttttctataacaacgcaaagaacaaaaccgaggaatttgtcatctgcgcggatgaagccgaatcggaggaatgtgcgggaaaatattggtaagcaaagaaaggcacaattggaaaacaatttcaaaaaatgtgccaaaactgttgttcaggttctacaatgttcgggaccatttgaattattttgggaaatcggtgtccgaatggggagagaagggatgtgccaactgacagaaaaggacaaaaaagaatgaatgaattgtgcaattaataattcactaattgtagtagcaaaataataatccaaaatattttttaattttttattattattatccgaagaatgaaacttaaaaatatattaaattttaagggctctttttgatttgagtgggccattctcaactgaacatctgccaaatgatcccaaaaaatgat

SEQ ID NO: 36624 - DNA, 764 bp, Heterodera glycines
gactagggttcggaccccgcccccgtcacccccgccgggggcgggacaggttttttggcctcacccccgtccccgcgactctgacccccgcaatcacgcccccgcgaccttcgcccccgcgggggcacggggatgaaaatacacccctaagaatggcatattagtgggataaaaggcaaaaaatttatacaaatgtgaatttttaaccatctttgacaaattttttatgaaataaaataaattttgctgttaatttccgatatatttgttggtttagtggttagtgcttcaacactaacagtatttcttgttaggagttcgacaccggttgacgttttcatttgaatttatttttatctgattaatgcagggtttctttatgttcttatttctaagaaatgttctgattttagggcgtattttcatccaaaagaatgaaatttggctaatttctaacaaaatccataaaaaaaatttttcccggcggcgcctatcggcaccaccggcccccaaaaaacctatttttcttaaaaaattagcataaatttggtcattctttagacaaaatctgtgtaatttatgccaaaaggaattgaatcgaggcgatacatcgacgaaaaggaatgtggagccaacacatcattcataaaaattaatttttttttgtgagattttttggagctattcaaatcaaaaacccccgcccccgtccccgcggggaaggaattatcgtgcccccgcccccgcgaaaagccacccccgcc

SEQ ID NO: 36625 - DNA, 1121 bp, Heterodera glycines
agtgcgaaatgggtcatgaaacatttgtgatggcgacatttttagttgacttagataatttgatttgtttactagtgtctacatcgccactctgatgaaaatgctgcggacatcgcgtagatccacgatgtctttactgagtatgagttcccacatggtgaaatttttgggtcaagaattccatccacagtttgtgaaattgggagctagtggtgataacgcggatggtccttatccgagtgcacttccgttgaattgtgcgctcagtggtccagcagagggaggcgcaccgcggggcgcaaaatgaaggatgaacagcgaggcggacaagcggtcaagccccttgatgatccgtcgggattggtgctcgtccgcgttcagtcgctgctgctcatcattgctgagcaccaaaatgacaacccgagcaccttctcttgaatttaaaaaaaaattacaataataattattattttatgtaaatacgtattttttccagaatttaacaggctctattgaacatatttttctaaatatttattctcgcttttttttttagtttatttaaggtttttaaattggaaaatttcttttgaaaaaaattgaaaaattgtacctcgaattttattcaaaaaacaatatttttacttatcataaaagaaaaaaattaatttaatgcaaattttaaatgccgaattgatatttataaaatcattaaataaataaaaataaatttttttgtaagagaatttatgaatttaaatactattttacgacctatggaattggcggagatcgtcaatggacatttgcaatttgtctgccaatggcacagtgccgccaagttcggctgggtccagctgagcacggtcaagggcaaacagtgcatcatccaaatcaattgcagttttcaaggacaccaacactcgcgcattgatcagaagtgagagacgaattcgcttttggtagtgctcagcggaagcttgtcttaaaattaggcaatgatcaattataaataaatttaaaaaacaaaaaatattaaaaaaaacaaaaacaaaaaataaacatccgtcccttccatcccattaatgggatagttagtatcaaattaaaataagatttta

SEQ ID NO: 36626 - DNA, 669 bp, Heterodera glycines
ctaaataaatcccataaaattctcctgatttttctttatttttaaagctttatttcattaaaattggccaatacaacacattgttatgaattttcaaatattaggccaaaatcccgagggccaaaaaattgccaaatattttcgaatttttaaaaaattccaaaaattctgaaacttaaaatagacatcatattcgtacttagcaccttaaaaatacccagaaaaaaatttttcaccctctttttcaacccaaaaaaaatttccgaaaatttctagggggcctagctcgaaaatttttgaaaatttccggccatataatacactattcgatagcattttaaaagctctacaattttgccctaaggcgttttttcgataaaatcaacccctaacgagttatggacccggaactcaaatgtgccgcatatgtgaagatgataaatttatcttgggagagaaatgataaatatatgacaataatggacatactagacatttgtaggagcggaaaattcttattattctaagaaaattgacattatttattattttacttatgaattaaaaattgaaaggaaggctatctaataattaagactttcgttaaaagcatatcaaaataaaaagcacattagttggctagcgatggcatatgcgaggccgctccat

SEQ ID NO: 36627 - DNA, 560 bp, Heterodera glycines
  unsure (1)..(560): unsure at all n locations
catatattctttcaatcaaataatttttatttcttctctttacattcagttaatcagtcttcatcacttttctcaacgatttgacaaataaaaagcctaattcccataatccaatttgtctatttggtttcttttaccctccaactgaatttttcaattttcgttttaatttcaaatcgaactagctctgctatagctttgttctccctgatcaacagtgctgatcagtaggcttttcccagcctcccccctccttcaatgcttcttccgttgatccaaggcttccttcccaatgcttacatatcatcatcatcatcatcccatcctttcccagacattcacgccggcagcagaagcattggtgcagccagcagcatcagcatttaacattcgttgcacattgccgccgaggcaacggggcggggaaggagggacccatccgccggtggggggnggggggagataatcctaatcccattcaatattccatcgttccacgaattcatcctcctccagctaaagaagcatcagcgccaggcacacacatataagatggtggt

SEQ ID NO: 36628 - DNA, 955 bp, Heterodera glycines
gggtaacactacgcacttatataccagactcccaaatttgcggattccgccgcgggattggaattcaaatttttttttttttgcgggacggttccagcggtattaatcccgcaaatcccgtatttaaaatttgcagaatcccgcgcgggattttggaaactcgaattgtggttacataaatggatgttagagtcgtggtccctgtatggttggtcctctcttttgtaattcattttggttgtccgagttacagtgacacttttctttgttacagtgatgtgccagtgatttcacccgctgcattgaagctggaggcgtggctgaagttgcgcaagtttactgtttacgtaagcacaatgctagaaataaaaacttatatacgtaagccatttgccaataggcattggccacgcccatatatacgtaagccatttggcaatagacattggccacgcccaccatgcagtggccaatgaacattggtcacgcccaccaggcgggggccaatgggcagtcacacccaccatgcagtggccaataggcattggtcacacccatcaagaaggagatttggcatggtcacgcccaccaggcgggggtcaatgggcattggtcatgtcagccctgactggtcaggccacaatgcaattagcattattgatctgttatttaaaatacggtatataactcccctatgtgtactgtacaagttgttgtttgatttttaattttcattaattttttctaagcgtgtaaccagtgggttcctgtttgccgatctgtttggccagcagcgtgtgccatttgtggagctaaacggcaagcaactgaccggcaccactgatcgcatcattgaagagttggagaaatcggaagtggccaaagaaaaagcccatttgataatggacgaggaaaattttgaacgccatgggtacaatgagaaagctgaactgcg

SEQ ID NO: 36629 - DNA, 718 bp, Heterodera glycines
aaatttcgtaaattccaaaaattaaagtcaaaaataagactttttgcttatcagctttaaaatttagatcaattaaaatttattgcattaattcttacccaattaattaaaattgaaaaaaaatgtttaaaataaacattcaaaaacttaaggactgcaaaattcgtaggtcggtttacgcacgtaatccaccaaaaagactgatccatgcgtattaaactcttcaaaaaatccatggatgatgtagtcactcggattaaaactatcctccggacagaatgtttgccggatgcacttcgtgacgtactcacccgggccgagtctgatttgaaagccctgtttggacttggtcgttccttcacggtcgatgcatagggttattaaatccatcttgaaacttctcgaccgttgtccccgtgttgtaactcaatttcatcgctctggctcctctactccgaatactttattgccatcacataagagcgatttcaccgctcatatcccttctccggtacaacctataactagctcaacaataaaaacattgccttaaaaatattcatcgcaacccccgcattcgtacaactcctcagtagtgggtcaaaacctttcgtaatgtcgttaatcagtatccttctaaactcaattaattgacagcaataatattctccgtgtgcctttccgtaataatcttttcaattcatcatccaaataaaaa

SEQ ID NO: 36630 - DNA, 1134 bp, Heterodera glycines
  unsure (1)..(1134): unsure at all n locations
acgagagtgtccaatttatggccgagagtctcgactttgcccacgaaattatccaagtgttgcttgtttttgtcattgtcaatcttctcgatgagagtgccaactttctgcacaagtgcatcaatttggttgttcttcttgtcatcatcatcattgttgttcttcttcactagagtccacaaaaatttgggatcatcttcgtttccaccggcgtaagctgaagacacctgtgaaaatgatgggcaaaattagggaaatggcaaaaacaattttatgccaacaattcatagccctcggcaatttttgcattttagcaaattttgatcagaaaagggagggcaacgagaaaaaaatgattgattgcgagaatttcttttaattttttgtgttttttatagaacaattttaagggaatttgttaaaaaaaattgtttttttcacaaaaaataaattaaatttttctgaattttataaaaaatgtaagttcgaaagtattagccaaaagccaacacgtttctggctataactttttcctttgccaaccaaatccaacattatttggatcattcgatatacctaagtgttctctgtaagcctgtataaatttagttaatccacattgtatcattcgttagatagacctaagtgtcctctattagcctgctaaattttgaaaaatttcgttaatgttcaagaaaatttatggctagaagaattattcaaaaaccagatttttccaactctttttggctcaaactttttttaaacttaacgaaattttttggaattttgcaggctaatagagcatgtgaagggctctcgaatatgcaccaagtttgttggatttggctttttttggtctcggtctcggggttttgggtctcggtctcggggtcgagtctcggtctcgagtctcgggaaatgcatttaccatcccaaatttggtgagagtgttgtcaaaaaagcatttttcttcttcttttcaattcttctggccataattttcttgaaacataataatacattttttanaagtcatttatttttctctgccacgcttcgtttgatcattgatttgagttttggtaagccagctcatgcttcttcctcttttgcgtacgtgtccttttctcc

SEQ ID NO: 36631 - DNA, 959 bp, Heterodera glycines
agacagaagagcatcaactggaaggataaaagggacaaactatagaaaagccgatggaagggattaacaaaagccgatggaagagatggattgattgggacgaaggccaaaacgtgtccaatcactgctcaaccaatcatgcggaaattggaaacggaagtcattgggacgaggcgaagagatggcattggcattttaacgtcaacagaagaagagaaggaaatgcccttgggggcttttcagcaatttgtgactgtgagggatttgccattggaggacgacgacctgcgaaaagtgacaatggcatacagagggatgaatagaaaaagttggcaaacttggccaagagagcgtcggaattgggccaattcttcactcttttgcgctttgatgcttaattgcaagacaattggctcagtgcgcaagtcatggacatttgatgacgagcatttggggggagggaagagggagggggagaaggagagcgagacagacagaggggagagagagagaaagagagggaagagagagagaaagagagaggggagaaagcgagaaagagagaggggagagagagagaaagagagggaagagagagagaaagagagaggggagaaagcgagaaagagagaggggagagagagagaaagagagggaagagggagggggagaaggagagcgagaaagagaggggagagagagagaaagagagaggggagagagagagaaagagagagaaagaagggaagagggagggggaggggggagagtgagagggagagcgagaaagagagaggggagagagagagaaagaagggaagagggagggggagagttagagggagagcgagaaagaaagaggggagagagagagagaaagaaagggaagagagagagaaagagagaggggagaaagagatataggggagagagagagaaagagatgaagagggaggggg

SEQ ID NO: 36632 - DNA, 785 bp, Heterodera glycines
tactcacttaatccgaagtttgtccccaattgaaagcttggaaagtgcgttcatcgcctttgtgttgctttccgggacagccaaccaaccaagcactttggtgaagccggcatcctccaccttacgagattggcacagaaactgctcaccgccaatgtcaaaactgtcataagtgggggggggggggggcaataattaaattaaaatacttacgtcgtcgaaaaaagggaacattttcattcattccctagcctaattcaaaaaaatttcaagggcatatagtttttcagtaacatctgggcttttgatgaaaaaatttcttgagattttaaaaaaattctgcggcgacgttttggggtacactgcccggcgccctccctcactgaaatatttcctgtaaggaaaacttacaagggaacgacccgaactgtaactcggaaaatgcatatgtgttatataccattggatagagcagggtcgacttctattgtggatttttaattttacgggcatatagcaagaaataaaaaagttatggggcctcaaaaatcgaaattttggccgtgttttcacttaaagttggtggctcagttggttaaatttgcatttttggagcttgggttcaaatcccacatgaaaataaataaattttaattaaggtataatataactaagtaatttaaaaaatcattttttaggctaacaaaaacgtatgctactatttctttagtaaaaataagcaaaaatataaataattgcaaaggttgggaattaatagaaagtga

SEQ ID NO: 36633 - DNA, 576 bp, Heterodera glycines
tcccatttttcagctggtgcaggagggcataagatacttcgccggcaaacgtctgatcactgtcttctcggtgccgcgctacaacaatcaaatgaacaccggagcagcactaacaatcgcggaggacctgagccacggcgtcacattcttcccgccaaattgaggacgcgatgcaatttgatgctcagattcccagttgtgccctcgttctctcccatgtccatatattgatgatcccttggcatatatatgtatgactcacttccaatttaatgtccatgtacagattcccattgcaactgttcatttactgcttctcacaaccccattttcgtgcattgtacatacatactgttcttttgatggcaataaataatgcatactaaggagaatgatagttctttttaagtgttaaaattatatcggctcttataccgtttaacccccataattttttcggaagaaaattttttgttttaaaaagtcgtgaaaacaagtttatgagggttttctgggtcgctgatcacgaattcggcatccatttcgatcaatttcgaatcccggacccgaattcga

SEQ ID NO: 36634 - DNA, 953 bp, Heterodera glycines
tgggatagagtataaatataaaaattccctcaaataaaagatcgattgcgcaccgccctccctatcatgctcgagagcatttgttgtgtataaaatttatcaaaaaaagagatagccatttttctgggatagagtataaatttaaaaattccctcaaataaaaggtttattgcgcaccgccctccctatcatgctcgagagcatttgttgtgtataaaatttatcaaaaaaagagatagccatttttctgggatagagtataaatttaaaaattccctcaaaaataaaaggtctattgcgcaccgccctccctatcatgctcgagagcatttgtatgtgtataaaatttatcaaaaaaagagatagccatttttctgggatagagtataaatttaaaaattccctcaaaaataaaagatctattgcgcaccgccctccctatcatgctcgagagcatttgttgtgtataaaatttatcaaaaaaagagatagccatttttctgggatagagtataaatttaaaaattccctcaaataaaagatcgattgcgcaccgccctccctatcatgctcgagagcatttgttgtgtataaaatttatcaaaaaaagagatagccatttttctgggatagagtataaatttaaaaattccctcaaaaataaaaggtctattgcgcaccgccctccctatcatgctcgagagcatttgtatgtgtataaaatttatcaaaaaaagagatagccatttttctgggatagagtataaatttaaaaattccctcaaataaaagatcgattgcgcaccgccctccctatcatgctcgagagcatttgttgtgtataaaatttatcaaaaaaagagatagccatttttctgggatagagtataaatttaaaaattccctcaaataaaagatcgattgcgcaccgccctccctatcatgctcgagag

SEQ ID NO: 36635 - DNA, 1387 bp, Heterodera glycines
  unsure (1)..(1387): unsure at all n locations
ttttttgtaaatgtctatcgcgaaacaatagcttagaaaaagcttctaaacatgtaatctttcgaaatgatatcaaaaatgatggatttggatgacattgaaaaaagttataganagttgtagtggaaaaacattctggcgcccaaacgagtgggtcccgaggtgtacatcaatcatnattatattaaatacttagttacaaaaactttattntattttttttgggaaatttttatttttttttggtagtgcttttaaaaaatacgtataagcaaagtgatcattccaacaaaaaaagaaaacattttatgagcacggcaaaaatcatttttaaattccttaattcaaaccgatcgtccatttcttaacttccattcacttaagccgagcaatccgttgagaagcctaaaaataaacagaaaaataaatttgaatttttgaataagcattcaatcattcattcactgacccgtccccgattttgtcagaaccagttatgttaatgcgcatttgattgcactgatcacgaatatgccagccaagcgcctccttttcccatttcgcccatttgtccgcgtcacgcacaattggacaacggatcagcagaaaacgacggctcttgtcgtcaatttccttcagcatcaattgttccccagtcgatttgttggtgatcgaaaatggcaccacgggaattggcaaaggcgacgcatcaaaccaaatggaaacaatgaaattgacgggagatgaagcggaggaaaatgtctaaaatgtgtaaaaattagtaaaaaaaaaacaatttaattaattaataaataatgccattaatgattaataagcaccagtttgaagacgtcaagtttcgtcgccaaactgtcgtcgttgtgtgagtcgcatttgaacacttttggcacgttgttttgaagcggagtgaaaagccatttggcgaatgcttgtccatccgatgccgcggcactgtcatcgcatgggaattcggcaaagagatcaccggcataaaaattgacaaaacgaagtgatggacattcgttaagaattgatggcgccatttgtcgcaaatgatggaaaaatgtggcggtcatttcaatgctatggatttttttcccgagaattggccaaatgttgcgcaaaatgagctccgagatgcaattgcgatcactgtccgtgttgatgcacaaaatgatttgacaggcggcaaaaagaggacgaaaatggtgaagaaaagtgatgatatttcggtcgatgtatctgtgaaaatgaatgggaagtgttggctaaaaacttttacatttggccatatcttacaagatgttgatccgttttccgatgatttgaatggcaacggtttttgcggaattggcaatggaattcc

SEQ ID NO: 36636 - DNA, 615 bp, Heterodera glycines
aatttcccaccggtgatgaaatgatgccctcctccagacaaatcagcgcctcgttgacgaaccgcgacaccacccgaatttgttggtcctccaccgacgaggcgccctccgatggactcagtttgtagcgtgccaaaatttcttgggccttcgcatttggcactttcttcgactttttgccaccctcggccgaataggtgtaaatgcctgacaaattaaggaaaaaaggttttcttttttttaattttttttactagcaaaatcaatttctgtcgattgggaaaaacaagaaggtcggtaagcagaaaaatttaatttttacgaaaaaggcaacattttttccttctttcaatgttattttacaaaattttaagtagcagcgaaaaaaaaacaggaataatagctatttttctaaccgaattttaatattcctggattaaattttcaaaaaatttggtagaggtccggcggtgccgatgggcactgccggggggaggggggaaatattttgtaatttaaagaaatacgaaaattaacgataggaaaattgaaggataataataattcttggacccacctgcacccgactttttgcccttagagccggcctttgtc

SEQ ID NO: 36637 - DNA, 1248 bp, Heterodera glycines
  unsure (1)..(1248): unsure at all n locations
ggcgcatcggttcggggggactgccccgaaaacaaaacaatcgattttctcaagtgtccgtttggggtactcaaacaattatggggagcaaaaatccaacgcagaattaaagtacaggctatagggaagctactcccgaaggattcggtctccccataaatctgggcgcatcggttcggggggactgccccgaaaacaaaaaaatcgattttttcaagtgtccgtttggggtactcaaacaattatggggagcaaaaatccaacgcagaattaaagtacaggctatagggaagctactcccgaaggattcggtctccccataaatctgggcgcatcggttcggggggactgccccgaaaacaaaaaaatcgattttttcaagtgtccgtttggggtactcaaacaattatggggagcaaaaatccaacgcagaattaaagtacaggctatagggaagctactcccgaaggattcggtctccccataaatctgggcgcatcggttcggggggactgccccgaaaacaaaaaaatcgattttttcaagtgtccgtttggggtactcaaacaattatggggagcaaaaatccaacgcagaattaaagtacaggctatagggaagctattcccgaaggattcggtctccccataaatctgggcgcatcggttcggggggactgccccgaaaacaaaaaatcgattttttcaagtgtccgtttggggtactcaaacaattatggggagcaaaaatccaacgcagaattaaagtacaggctatagggaagctattcccgaaggattcggtctccccataaatctgggcgcatcggttcggggggactgccccgaaaacccaaaaaaaaattttttggataaaaattatttaaatgaactgactagataatatttaaaataggttatttctcttcctttcagtatccctgcaaagtttggtgcgcttctgatcagtttctgaaaaaaaagttaagcctaaactttttggcctgtttaaaaaggaattaaaaatttttaaaaattttattcatctccctttttgatagaaaaagcatcagagtgcctaaactaacatgtaaataaaatttggtgcgtttcagaaccctttctgaaaaaatatttaagaattaattttgcaaaaaataaataaaaacgaaagactcagattttcgaaaatttttttgagccnagctagctaggcgctcatttcagtgtaagttagtcctttaccggg

SEQ ID NO: 36638 - DNA, 1104 bp, Heterodera glycines
  unsure (1)..(1104): unsure at all n locations
ttataatgccgcataaaaattctgtttcaatttattttcttttatttaaataaacattgtacttttttaatttattctcttttttattcaccattttaatttaaattgataagagaacaattagtccattcttccctcggtgtccaataggaaccaccttagaatttttgaaaaattgaccagtctcgaaaaaattataatcattatgaatattaattaaaggctaattaaatttttagtaatttttaattcttttcacttttttaaaataatcatttttaagcattgttcatttattttataataggaatgtcggcattattatttatactcatgataatttattctatgattttttgctatatttaagaatttaattttatatttttaaatgatagatgctttgaaatattatttttcgtttctatttttaaataattaaatatttcttcaaatataatgtaatttcttaaatttaattgggttatcacttatgcaagagttaattattgatatgtcctactgctttattacttaattgctcattaaatgatgttataataaattctgtttaaacttcatatatttgattttttaatataataatgaattaaattaaagcatgcccattgacgtccttagtttaaccatttaataaatttattttacgtcattcgctttctaaataaaacaataattaattaattcatatttaaatccatgtccggtaaacatcaaatcgattcgatattaaagtgagtttctttaaattgattaatataaatttactgtgtttttaagtggttttcttaaatattaaaacagaattgcttttatttatacattaaatttgctaaaaaaataataatttatttttggctctaattatttttcttttgaatgattttctttttaagttttcatttaaacaattaaaactctgtttanatattctatagtgaaaataatataatttattttaattagttggtttgtttctactctttttcgcccttttatatgtttattttgtttaattaaatcatgtaacaaacaaatcttcgttccttgatatatggatttggtaaaaaaatttttgctttt

SEQ ID NO: 36639 - DNA, 1313 bp, Heterodera glycines
aattgctaaacccacgcggattcgaaccatcagtcaccacttcgccattgtgcaccacttgaccaccatcactgaagggaaaacacaaggaaatttccggtttttgaggccccataacttacttgtttttcgctatcggcccgtaaaattaaacaaaaaatgatgcttattttacaggattcgttcatcggaagcgcggacgaagacggcgacctttccttgaccggtgcgcccattgacaagcagggcatgtacagcttgagcctgttggacccggacaaggcccgcctgatcatgtaccagcagcacaagttgtacgacgacgtcatggaggtggcagcaatggggaaatgtgttacacgaggagaacattcatttggggaagcaatttattgtaaaacagcaaatcgcctgggaaaatgagaaatgtcccccccccaaatttttaagtgggcacccgccatgttttggtctataacttttttctttgtccaccaaatccaacattgttgatgtccttcgatagccaaaagtgtcctctattagcatgcaaaattccaaaaaattacgtcaattttgaacaaacttatggccaagtacatcagaaaccagattttcaatcatttttggccataacttttttttaaaccttaacgaaacttttcgaaattttgcaggttaattgctctctcaattattttagatttttaacctatctttcaactttgtgtcgcatctaattaagatgacatttacatctttttgatcggacgcttcaatttattgtcgtttgtcattttaggtttaaaaattttccttattcgaaaaaatttaaaaaattttaaatgcctatttccaagccctttcatgcttttttcaattttttatgtctttttgtgagattctttagagctaattcaaagcaaacccccgccccacgaaaagccatccccgctcacggagctcgaactcttttttaaatgctctttgttcagttttgtttgaattattatgccattgctctccgtcatcgtgccattttgtttatttttctacactaaattttggtggattgtctgtttgtattttgtttggtttctttacgactttgacacgccgagaagaggctcaagaaattgggtgctttttaaattcgcatttattaaaaaataattatatttttaattaatttccagttatggtacaaaaattcattcatatggaagcattttgctgattattttccaatcaaactaatcaaaacagctgaccttccaccgatcaataattacatattagggcacgatttaatt

SEQ ID NO: 36640 - DNA, 726 bp, Heterodera glycines
  unsure (1)..(726): unsure at all n locations
tttatgttgataaaattattgttgttaattaatgtaaaccttctaagaaagtgaagagagaaattgacatttatacacacctttattccaactaaaaagtnagnaaaantcagaaaattatcagaaaaatagcgaaaacattctgttggaaattgaatcgaaattgttggacaattcgatttgttggattttggagacggcggaaatgccaaaaatagcgaaaaatgaaaaggaaaaattggagaaaacttttgagaaaattttggagaattataaaaaaatagcatcagaaactaataattctgtgcgaaaaaattgcgaattttggaaattttggcgaaaagcggcaaaaaatttcggtttattatttttatttaatttacacaaaatttaaaataaaaattaaggaaaaaatataaaaatggcaaatgaaaaaggaaatttcgaatgtgagaacaaagaaataaagcgaagcttcgaaagtgccgtctataatgcatttgccgaagacattttaatggggcatttgaacgcactttcgaatttattgaagccaaaaaaaggcgaggaaaagccaattcaaatgggaaaagcagaggaacagcagaaagacggcacaaataattggtgtaaataaaaagattaaatggaaataaatttacattttaaggaatttcgacggatttttttgtaaggaaaaaatgaaaaacgaatcgaattttgcgc

SEQ ID NO: 36641 - DNA, 1385 bp, Heterodera glycines
gaataatatacatggcgaataaaaaggtggagagagcaatgactcggccgacaatctgaaatataaaataatttatcaactatttgttttgctttttaatagagtccggaatgtaggaaagtaccggactgttataattgtcaggcccagcaaaaaaagtacgtctaaccgggcggcacgggcccggtgtatttttgaaactggcccagcaaaagcccgtcgggctctttttttaatatgaccgagtgaaaaatgtgtcgtctttattttaaggggtggggggcatctaatttaggtaaaaataaaaaaataaccacaaaacggcgatgcactgttggggagaccaaattgtgcgggaaagtggagtgattggcacggttggacaacatcgggacgaatggcacaagaagggcggcacttttggggcgaaacgaacctaaaggaaaaaacaaaatggaagacaataaaaagatttttaaaagtcagggcttcacattggccagtctgtatttcgcagaccaaaacccaaacccgggtctttctttcttttcaggtcgaattcgaacaaataattaaaaaatacaaagttgggaagtcagttgctaaaatgtgtaagaaagaagtaaaaattggagaacctgctcctttggtcccaactctgttgcgagaaagcttcaaaagccacttggaccaggtcggtctggtggtgtaaatgacaccgataacagtggcactgccaaaggtgagcattatcagactgtcacgggcataacgctctctgtgccacacgtcgttgggaaactgaccaatcaaacaatcttttatttgtaaaaaaaggattttcaagataccctaaagaatagtctgaggctaaaatcttagtccctggtgacattgaggtaaggatttctcttttgaacattaaaaacaccaaatttaaaaattctaaacaaatacaataccttttctcgtggcaatttgtgtttctgtttgatgatcggctccaactccataattgcaataaaaaaatttcaaggaatatttatttggcttctggctggttttaggagaaatgaatggtgaatggaatggaaagcaaatcgatgcaaaaaaataataacatttcgccataagaattaaatttcaaatttaaaatagtgacgagaattattaatttttagtgcgatttgataaataaaattatgtaaaatattatatattctgccattatttctgtcgacgataaacgggcgatcggttcggacatgggcaatatgcttaaaatgaaacccgaaataaaatgtttgattccccccaccggcatctgtgccgggaagtccaattgtgccgcggatgcccgctgatcacgcgcgccagggaggcca

SEQ ID NO: 36642 - DNA, 732 bp, Heterodera glycines
atcactgggactcaacccaccaacattccaatcaatggcactcaattcttctgcatttcaatcactgggactcaacccaccaacattccaatcaatgggactcaattcttctgcatttcaatcactgggactcaatccaccaacattccaatcaacaggactcaacccaccaacattccaatcaacaggactcaacccaccaacattccaatcagtgggactcaacccaccagcatttcaatcactgggactcaattcttctgcatttcaatcactgggactcaacccaccaacattccaatcaatgggactcaattcttctgcatttcaatcactgggactcaacccaccagcatttcaatcactgggactcaattcttctgcatttcaatcactgggactcaacccaccaacattccaatcaatgggactcaaccgaccagcattcaatcactgggactcaattcttctgcatttcaatcactgggactcaaccctccaacatttcaatcgccgggactcaattatcagactttccaatcgctgggactcaacccaccaacattccaatcagtgggactcaacccaccaacatttcaatcactgggactcaattcttctgcatttcaatcactgggactcaacccatcaacattccaatcgctgggactcaacccaccaacattccaatcaacgggactcaatccaccagaatttcaattaccgggactc

SEQ ID NO: 36643 - DNA, 1154 bp, Heterodera glycines
atttccttattttattaagtaaaataatgatttattcagttttttaatcagaaaaaaatcatttaaatgcctcgaaaaatgaattgccatttaattgaagaaaaataaaataaaatcatttcgagacgacaaaaatgaaattatttccgctacttttattaattatattatttttaattgtcaaaattggagcagaaaagaaaaagttacaacaaaagtcatttggcgaaatatttggagaaaaatggcaagaaaaagaagaagaaaaacgaaatgagcagaaaaaaagagaaataattgaaaaatattataaaataaaagagaaaataaagcaaaaaggaagaaaatacccaacaaaagaatgggataaaattaactcaaaaatagcgaaaaaattggggacaaatcgaaattacattcaaaaatggatcaaagaattggggcttaatcaaaagaaattttataaatcaaaaagtgatgaagaaaaacgtcaaattattcaaaaattcattaaaatgaaaaatgaatttaagcaaaaaagaaaatattctgcaaaagaatggcaccaaaattatgccgaaatttgtaagaaaattggagttggccatgacacaattaaaaaatggaagaatcaatgtggcattagctgtaaaataacggagaaagaaaaaactggaaaaaattaaaatttattggaaaataaaaatgaaaagccaaaaaagaatgatgaaaatattgtaaaaaaccttggattttttagaaagaaattgttgacttttttccttttataaaaattcccatttattttctttaatttattaatttatacgcaaagcttaagaatatacaaaacaaaaacaatggaaaaaattcaaataaatagccaaaaaattggggacaaatcgcccagatagattgaagttcgaactagagctgagcgggaccgggaccggggcgggaaatcccagttttttcaggtcccggtcccggtttttggaaaaattgaaatccggtcccggttttgccagtcccggttcctgcaggactaaataagcactggtaagaatggggggtcttgtgagaaaagagaaggcaattggtggagattgagaaatttttgagaaaaaaattaaattttttatttcttttaaagt

SEQ ID NO: 36644 - DNA, 795 bp, Heterodera glycines
tggtgaaaattgggccaaattgggaggacatgaagttggagcagtacaaccaggaaatgggcgatgacaattgggacaggacaaatgagcgcatggaaatggaaatgagggaggtgcgcatggaaataaattggccaaagagggggcaaaaatgggacaaatatggcggtgaacggggccgaggagttggagctgttcaactcccaatttgttgtcgatttggagaaatgaagtgctgtttgttaagcacacattaaaagggacggaaaatggggagagttgattttcgaaatccgtgtttcgacaaaatgcacaacaaaaaaacactttggaggacattagcacgacggcgctggagtcggagccgagccgacgaatgaggagctggagacctttgccaagatgttcaaacagcggcgggttcagctcggcttcacccaggcggaagtgggacaacaactgtacgacctttgtggccaagtgttctcccaaacgaccatttgccgtttcgaagcattgtatcaaagggcggggggggggggaagctcccggacaatctgtcagtggacagttcgttagcaaaatttattttaaaacaccatattttatttaaaatcagtttgaaaataaatttaaattgctaaaaaagagaataataatttgtattattttataaaaaattatgaaataagatattaaattatattgaagtataagtaactagaaatactgacggattgtccttcactaacggattatccactgatggattgtccgtccgtgccccgggggagg

SEQ ID NO: 36645 - DNA, 410 bp, Heterodera glycines
taccagggatgggccgaggtttcgcttttcgcatttcgcctttcgcattattcgcattttttggcgtttcgcatttcgcttttcgcatttcgctttttggcgcgaaatgcgacttttacacccctaagaattggattaaattcccataaaatttttcaaaattttacctataaattggctaattttcagtgaaaaactgtttataaatgatcaaaatttccaattttttccccggcggcgcctatcggcaccgctgcgcccccaaaactcctattttttcttagaaaatggcccaaaatcgcaaaatttggtaatttgatgaaaaaactgttctcagcggcgcgccaaaactcttatttctcattaaaaaaatgatacaaaaatcacaaaatttgatgatttattggtga

SEQ ID NO: 36646 - DNA, 536 bp, Heterodera glycines
cctgcaaagtttggtgcgcttctgataagtttctgaaaaaaaagttaagcctaaactttttggcctgtttaaaaaggaattaaaaatttttaaaaattttattcatctccctttttgatagaaaaagcatcagagtgcctaaactaacatgtaaataaaatctggtgcgtttcagaaccctttctgaaaaaatatttaagaattaattttgcaaaaaataaataaaaacgaaagactcagattttcgaaaatttttttgagccagctagctcggcgctcatttcagtgtaagttagtcctttaccggggagtatccctgcaaagtttggtacgcttctgctcaattagcaaaaaatatgagtgatcgaattttcactaaaaaagttaagcctacattttttggcatatttaaaaagcaactaaaaaatttttaaaatttaataattttcctgcaccgaaggtactcactcggcctcttcgcggcctcgtggtgggccttcggcgccggaaaattattaaattttaaaaatttttta

SEQ ID NO: 36647 - DNA, 708 bp, Heterodera glycines
tcgtcggcaaatttatcacagcaattacaacggaggcactccaatttttgaccattcttaacgcgttttttagtgattttcttaaattgggtaagcaattctaaaaaatattttcaaaagatttacaaaatgaataattgcaaaaaagcgaataaattcactcattttacagcaattaccattacgaaaataggaccacaaaacaaggtttgatttatagtcccgacagacttacgttgcaaaacgaacaaagtgcggtttgtactcaatgcaatgcccgcaccaactcgaatagaattcgacgaaaaatgccataggctaaaaaacaaataatttccttaaaattttgttctaattgactactaaatagaatagtggggatgaaaagaactgcataaaataaaattcttaagcttttttaggaaacgatacctaaatccataaaatttaagctaaaacctctaaaatgaccaaatatgacattgacccctttagaaaaaaaaacaaaaattcatgttcagcagtgaccgccattgtttttacggacaaaatttttcttcaaaaaagggaaaggagatcgccagtattacttactaaaattcgtttataattcataaaatattttttgaaatttaagaaattgatttaaaggaagggcgctttaatagagggagtgattctaacagagaagtttgagaaaatccgaaa

SEQ ID NO: 36648 - DNA, 388 bp, Heterodera glycines
  unsure (1)..(388): unsure at all n locations
aattagaatttcttataaaaaagtttctaaaaattttttcttgaaatatttttaagttagtgaattttattaaaaaaaatttncgggggaaacaataaggggggatcagattgtgagctgctcccaccagagccgacctgttcaggaagctgacgcataaacgacacattccatccctccaccagctgtgctttctggtcctaaaatttcgtatggaaaatggacaaaaatagggacgaaacacacattttgcagaaacggcaacaccggtgggtcgacacgttgcagaaaatggatgagcatcacaatgtaggcatatgaagagattgagccggcctaaacacaccgacaaataaataaggaggtcacagacaacaatttgttcaat

SEQ ID NO: 36649 - DNA, 1778 bp, Heterodera glycines
  unsure (1)..(1778): unsure at all n locations
tcgtttttattacatttttgttaataattttgggcaaaacgccaaaataggttttttcatttttttaggtttttatgttctaaaaaataaaaacctaatataggttttaaaaacacgaaaagtagcttaacaaccaccaaaaaacatattttcgtgcttttcaggccatagggaactcaggaaaaaataggctaaaataaaaatacatccctagttacagtgcccccatgacaaaatgaaacgcgcctatgacactatgacacgtcgtgtcatacgtcgcatatgatttttgcggtgatttaattaatatgacactattaattccttcataacttttttgagaaacaagcaattttaatttagttttatattagatagcccgaaattctctattattcagccaaatttcaaaaaatttcttgagtttcaaaaaagttagggtcataattgttcagtccaaatttttcggaagtttttggttacaacttcttgtgaattttagttagatttttaaaaaaattaaatatagtagaggaaatgtagagatactttctaatgccaagtttaattaatttgaataagtttaagataagttataatttattatatagcaaataaaattaaaacaataattaagtttaattatttcgaacattgatactttggggacgggacaaaatcgccgaaatatcgccggccganatgtcgccgagacaaaatatcgccgtgccgcagaaattaaaaaaaaaaaatcttcgggcggcgatatttctgcggcgatattccggcggcgatattttgggggtgtactcgatactttttgtcacttgggctcaccacgcatgaaaattacgaaaaaatcgaaatttttaattttttcttaataactttttatggttatcgggaaaagggtttattaaaatatttagggtcatgtcgttgtaatctgacaaaaagggacaatcagttttggttattacctagattcgttttttgccacaagtcacttttgagagataattggtgaaacaaatattgagaaaattaatttactttaaagatgtatttttaaattattattattattattattattattatagcaatattttattacaaattggaaaatatatagcttcatcgggactctgatgttctagttttggtatttgttctgagatttgagaaactatgccaaaccaagcattaaaacagtgccaattttttgaaattgttgaaatgcgacgactgatttgcttagaaatgtttaaattctttttttgatattatacagtcatggtcatatgtttacaaagccgggtgttaaaaccaaagaatccaataaattggcactcaaaacaaatgcaaagataaccattcccggcaatgggcctactcaaaatttccataaaaattttcttaaccccctaggaatttttttcgaaaattaacatgtaaacggtagatgatgaaatagtaagctcacaaatacagaatccggcattatttttctttggtaattagcttgtttttttccaaatttaaatttttttaaattggataagagagagaggcgcccgtggtgccaacaggcgccggatacggaaaaattggaaagtccggtcccgatttgcccaaaataaactctcttcccataaagtctaagtttaaaaaccaatatttttagtctgtaaaactcaggaaaaatataaatttatgacgacttagcaataggaatgaaagtgtaacataagttaaaacatattcttcgcccatta

SEQ ID NO: 36650 - DNA, 1234 bp, Heterodera glycines
  unsure (1)..(1234): unsure at all n locations
cataccataccatatcataccatatcataccataccatatcataccgtatcataccatagcataccatacccccccctgttttgttatgtcactgtgttaacctttaaaaaactaataaaaattattccaatagaaattaatttgttttacttcgtcccatttattttattttatgattttttttacatgtaattttaatgttattagcatcactgaaaccttaatactagtttctttttattaatccagagttattaaagtattattccaataaaaaagaattttgattttttacttcgttccattttattttatgaattcattaataataataatttatttttatttttataagaattagtgaacttaccatttaaatttttctccatggcaaactccaatcataatcaacttcagcaaggacagtcagcacttggaaatgtatattttggcacatttaatattaatatatcattaaaaaaaatgggttgttttactcaattgatctgactagccaacatagatttgtcatttatattaatttccataattgttcaagaatgtattctgcaccgatggaacgcacaatattcagttcttgaatggatgcgttacccaaattggccaacctttaccgtatgtttttttgatggtgaagactttaaatttgtgttccaagaccgctctgcctgatcgttgtttcaattgatcaccggcccgaacaacagactcccgcaggattgctttctgtgactaatgttgtgttgcgcaatgccgatggtcatcggattgaagcttcgggatggcaaactcaagcgggtgttttggcgtcattgtccataggaactgcttactggttcatgaactgtatggcacgttcacggtatcagcgactggattgttggtaccgaattggcgttgatggtagaaatgctaccataattcctcacccaatacaccaggtaatttttattattattattattattaaaaaaaatcactgattagcaaacaaccaatgctcgtcctaatgaatcagttggacttcgtcactcaatcgcatctattttgggggaacaaattcaagtttttanaaatcaactaaagttgtgtataatttaattaaggctcaaccggtgcaaattcagacggggagtggtcgcaatgaagtggtctgatttatttaaaaaaaaattttaaaaaaatatataggtaaatggaaatttgaatggt

SEQ ID NO: 36651 - DNA, 947 bp, Heterodera glycines
aaaaaatgagaaaaaagagatagacattttttggtcaagaattttttttgtttgcgtttcaaatatcgtaagattgtttgatagggccagacaagagaaggcaactgttggtaccaagtttgcggtaaaaaaatgagaaaaaagagatagacattttttggtcaagaattttttttgtttgcgtttcaaatatcgtaagattgtttgatagggccagacaaaagaaggcaactgttggtaccaattttgcggtaaaaaaatgagaaaaaagagataaccattttttggtcaagaattttttttgttgcgtttcaaatatcgtaagattgtttgatagggccagacaagagaaggcaactgttggtaccaattttgcggtaaaaaaatgagaaaaaagagataaccatttttggtcaagaattttttttgtttgcgtttcaaatatcgtaagattgtttgatagggccagacaagagaaggcaactgttggtaccaagtttgcggtaaaaaaatgagaaaaaagagatagacattttttggtcaagaattttttttgtttgcgtttcaaatatcgtaagattgtttgatagggccagacaaaagaaggcaactgttggtaccaagtttgcggtaaaaaaatgagaaaaaagagatagccattttttggtcaagaattttttttgtttgcgtttcaaatatcgtaagattgtttgatagggccagacaagagaaggcaactgttggtaccaagtttgcggtaaaaaaatgagaaaaaagagataaccattttttggtcaagaattttttttgtttgcgtttcaaatatcgtaagattgtttgatagggccagacaagagaaggcaactgttggtaccaagtttgcggtaaaaaaatgagaaaaagagataaccattttttggtcagaattttttttgtttgcgtttcaa

SEQ ID NO: 36652 - DNA, 1104 bp, Heterodera glycines
ttgaaatcgactgaagaagccagcaactgggtttgccaaatcgccaatttcttctcaaattccggcagcacgatgcatgcacaaacaacttttcaatatcaaacttttttacaaggaaatagatgcggttcgaactgcgatggtgtatggcttggaaaagcgattctttgatctgcgattcaaacggtgattttaagtggtgtcttttataattttttattcaatttcttttaatttttagttgcattgccatttcgaccttcttggacccccgattcaaggaccgtctggtgatggaagacgcggaggttttccgtgaaagagtccgcccgtggcttttcgaagaggcatcaattgctttcaaccaaattgaaaacgaagaaaatgatttgattgctacaacttctattgaatcgccgccagcaaaaaggaacgaatcattttttgctcaaatggaggaaattgccaattttgcacaagaaaaaagtcgtttttgttatcattttatttttcactttaaatattttagctcaaattgcctctcaaagcgacattaactcagaatttaacgaattacttagtttcgacagagcaccaatcaattctgacccgtttgaatggtggaagaagcatggaccaaaacttccaatgttatcaaaattggcgatgaagtatttgtcagcccctgcaacaagcgtgccgagcgaacagactttcaaagtggcgagggatgtttatgattatcgacgttcgagattaaagccgaaaaccgcagaaatgttgatatttttgaacaaggccatcccaatgttggactacaaatactgatttaattttgttggatgataaaaagttcataaaattttccataaaattttggtttagaacaaagaaaagaaattacgcaatttttttatatttataaatgcatttttaaaatttgaaaaaagcccgggcccggcgggcgcccgacaaaaattttggaccgggcccgggacgcccggtaaaacgggcttttttttgaccgggcggcccgggcccggctaattgtcgaagcccgagcccgggcccggtcccggcattttcaaaattccggtctctagt

SEQ ID NO: 36653 - DNA, 792 bp, Heterodera glycines
  unsure (1)..(792): unsure at all n locations
atggccctattttttccagcaacgaccgatggcacaaccaaaaatggcaatcaaaaaacgcttttcatgcactctttgcacaaaaagttttgactggttctcagacttaaagagagatatgcgcgtccacacgggcgagaagccatttgtggtgagttacagatcttacattttaataagtaagataaaaaaaatgcaatttttattatctgttaacggagtaaagaccgtttaagtttaaaaaagaaaattattttctaagtttattttttaacaaatggagtaattaaataaataataataattgaattttacttattttttcaatatagtgagaattttgtgacaaggcatttgctcgaaagcatcatcttgactgtcatcaacgtattcatacgggcgaccggccctataaggtgagttgaaaattgtttttgaatttaaaatttagtcccccacccctcaaaaaatttttttattttttaataatgcgattttggggtataatgatttgaaaaaaaaatttcaaataattttaaaagatgaatttacaatttatttgttagtgtgaccattgtggcaaacgcttttcggatggcagcgccatgaaacggcaccagcgcatacacacgggggaaaagccttatggggtaaaaatgaactcatggaaaattaaattgtgctctgtaaatgcatgctgttnaaacagggacgtgggccagccattccatgtaattactgaatttgaaccccccggnggtctatttttcaacccctncaaagggggattta

SEQ ID NO: 36654 - DNA, 932 bp, Heterodera glycines
cgcgaagaggccgagtgagtaccttcggtgcaggaatattattaaattttaaaaattttttaattgctttttaaatatgccaaaaaatgtaggcttaacttttttagtgaaaattcgatcactcatattttttgctaattgagcagaagcgtaccaaactttgcagggatactccccggtaaaggactaacttacactgaaatgagcgccgagctagctggctcaaaaaaattttcgaaaatctgagtctttcgtttttatttattttttgcaaaattaattcttaaatattttttcagaaagggttctgaaacgcaccaaattttatttacatgttagtttaggcactctgatgctttttctatcaaaaagggagatgaataaaatttttaaaaatttttaattcctttttaaacaggccaaaaagtttaggcttaacttttttttcagaaactgatcagaagcgcaccaaactttgcagggatactgaaaggaagagaaataacctattttaaatattatctagtcagttcatttaaataatttttatccaaaaaatttttttttgggttttcggggcagtccccctgaaccgatgcgcccagatttatggggagaccgaatccttccggaatagcttccctatagcctgtactttaattctgcgttggatttttgctcccccataattgtttgagtaccccaaacggacacttgaaaaaatcgatttatttttgttttcggggcagtccccccgaaccgatgcgcccagatttatggggagaccgaatccttcgggagtagcttccctatagcctgaactttaattctgcgtgggatatttgctccccataattggttgaggacccccaaacggacacttgaaaaaaaccgattttttttgttttccggggcatgcccccccgaaccga

SEQ ID NO: 36655 - DNA, 1018 bp, Heterodera glycines
gggagggagagagagagataaattgagagagggagaggagagggaggggagagggagagagagagagatagaaagagagaggggcaggggggagagcgcagcgcgagatagaaagggtggggagaaggaggggagatgaagatggacatggggagggagagagagtgtggggggaactggacagagatatggaggggagtgaggtggagagagggagggcggggaaataatataaagcaaattttgagaaaaataaaataattttggagggttttttcaagtttcaaacacaggggaaaggaaaattggagagttaaaatttaattggcacatatttccgacacaggcggcagaaatttaaatatttttaccaatagcattacttttctcatgcaaaattataaaatgaaatatttttccaataaattttttttaatccttctcacaagggtgaggatttttttagtttcatgtacttttttatggttttgtttcacttataaatgcacaaaaaaacattatttttatcgcggaaacattcattttatgtcactattcgtaaccattttgaattttagaaatagaaacaaaaaattcaataaatcgaaaaatacctaagacttgtatttctacaaaattaaaaaaatgattcctagagtcagaaatgttcaatttttaataaatttctattgcaaaattctataattgtcttttgacaaactaatcctcaccctttgtcactaatcaaccacttttctttttctcttcctcttctccttctccctttttctcttcctcttctccttcttcctttttctcttcctcttctccttcttcctttttctcttcctcttctccttcttcctttttctcttcctcttctccttctccctttttctcttcctcttctccttcttcctttttctcttcatctgctccttcttcctttttctcttcctcttttccttcttctatttcatcatgtgcaccccttaattattttaaacaaataaatcaa

SEQ ID NO: 36656 - DNA, 785 bp, Heterodera glycines
tctagagtcataggacatggtagactactgaaagagggaatacagttcttttgaggagatacagtggatgcgctaatggagaggaagacggtaggcaggacagttactagggatacggcgactacatcagcaaaggatatgaatatggtaggctatggaggtggagcatacggtgactatggaaagggatacggtaggattaaacttattaatgaattcctcattaattaaactgtcataagattactcaaatggaaagggaaattacggtgccggaggaacgggttacggtggttacaagccggcgaatgcggattcatccgattacagccagacgaaagggacgactgcatacggcagccaaaagtaccaactgcaacagcagggcaaatacagtagacctttcaacatcaacagctacagaaagcattactacgacagtgagacagtcaaatgcgatcaaatttggtgaatactgtaaatatcccaccaaggccattactgctcagtgcacggttcattttcattggcaatggccactgaatatagtaaagactagctgaaagaggcgacgacatatggtaccccaagcgagttattattcaaaattttaaatttttttattcagcaagtgaaaatgcaaatgcttatcagcagcagaaaaaggtttactctccgtacaaagcgcggtactacacgcgccaattctgtcgctacacagccgcgtcaagcccacgcgcgtgcgaattctgttgccgagtggtggcacgcaagcggcaacacga

SEQ ID NO: 36657 - DNA, 1266 bp, Heterodera glycines
  unsure (1)..(1266): unsure at all n locations
tatttgaataattgatttttntggttaataattttatcctttattataatttatatttgaatattcttttattattacccataaaaatattaaatcgactacaagctaaaaatttcgctaaaaacgccccttaaaagtacctctcaacttcgcgcaacatggccagctttctgcgctgttcctgttggtgttgctttaccatgtccaaataggctacacggtcgtacagatcagtgtcaggcttaactcattttttttgtcaatttttaaaattttttattttagaaaaaaatattattaaaaattttagtaacttggcctaattctcgcaaaatttcgaaataattccaggaaataaaacaatttcaactttttgtttatttttgtggatattcagcaaattttttttttctgtagaatttaggttatcaaaaaattttaaaaccatttttaaaaatttttcttcaagtatttaattattttttttgcggcgacgttaagtaccgacgtcgtttcgtccggcaaccatcttatacaatcctttttttaaaacatcaaaatgattgtagataaataaattgataaaaataggattttgatcctccttttacgcccattttaaagcctatgtttaattttgaaaaaattggatcccatcaaattttatttatttattttatttttttgaaatcggcggttggccggcctaacaaaccaacctcgtccaggccaagtacaatccgctcaatttcctcaaattcttcgtccgacattttttcgggccagcaaagttcagcagcggttcattttttctcgtgtcccaaatgccattctgaccatcgcaaaaatgccaaaaaaatttggcacaatttcaccccacaaaaattttggccgaaccggaaattttttgggtcggaaaagggcaattttagagcagaaaaaaatgcgctcgttttatggcacatttttactcacccacctttacaattcatggaagtacattatgtccgccggatgtaggcacatataaaaattttgatgatatttaaacgatgggcaaaaaaagaaattagagaaatttgtaaatttaattagttttttctttaagttccgcaaaattgttctaatatttttttcaagtgtaaaaccaattcattataattattattattatttcctttataattggagaaaaggctttgaaagatggctcgaagtttatcaaagatttttgaaagtttttaatttctattttttaaaggcttt

SEQ ID NO: 36658 - DNA, 875 bp, Heterodera glycines
agtaaaaaaattcactcactgtcgtaatgtacactgtccaattgtccacttctgtccaaaagagttcactgtccaaatgtccgctgtccagatgtccgctgtccaaatgtccgggagcccgtattaagtgcgcaaaaattttaagtatttaccaaaatttccccgccctaataataattgaagatgattttgtaaataaaattaatcaacactattaaaaaatggaagactattttggaatttttagcacatttaagtcaataaaaattgaaaaatacgccactaaaaatcaactttatttgccattcttattgcattttcaaaattttctttatttatttctgccaaattgaattcttaatttgtcattggatttcgaagttccctgctggaagtttcaaattataaaaatgatttagcaaaaaaaggaacaattttaccactgaacaccttgaaatttatttggtttacttgttcggacgaaaatgaaaaagaatgagatttttgtggatttttaatgcataaatactagagaccggacatgagggtcggtcggtcggtttcggttaaaaaccgaaaaaaaccgaaaaacttaaaaatttgtcagtcggtcggtttcggttaaaaaaccgaagaaaaattttcggtataccgtttcggtttttttgaatttttttatcttttcccaaaaaaaacaataaaccatttttatcaatagaaaaagcgaaagatcacctctgagtaaaattgtagagcgaagctctatcaatggtgtataagttgggaaaataattgaaaaggcagccaaaaacgtttggtagctcctgattctctaaaaaataagggtgctcccccacccctgggggggggggggg

SEQ ID NO: 36659 - DNA, 1023 bp, Heterodera glycines
tcaaaaaaattttcgaaaatctgagtctttgttttttatttattttttgcaaaattaattcttaaatattttttcagaaagggttctgaaacgcaccaaatcttatttacatgttagtttaggcactctgatgctttttctatcaaaaagggagatgaataaaatttttaaaaatttttaattcctttttaaacagcccaaaaagtttaggcttatcttttttttcagaaactgatcagaagcgcaccacactttgcagggatactgaaaggaagagaaatgacctattttaaatattatatagtcagttcatttaaataattacccctaacggacacttgaaaaaatcgatttattttgtgttttcggggcagtccccccgaaccgatgcgcccagatttatggggagaccgaatccttcgggaatagcttccctatagcctgtactttaattctgcgttggatttttgctccccataattgtttgagtaccccaaacggacacttgaaaaaatcgatttttttgttttcggggcagtccccccgaaccgatgcgcccagatttatggggagaccgaatccttcgggagtagcttccctatagcctgtactttaattctgcgttggatttttgctccccataattgtttgagtaccccaaacggacacttgaaaaaatcgatttttttgttttcggggcagtccccccgaaccgatgcgcccagatttatggggagaccgaatccttccggaatagcttccctatagcctgtactttaattctgcgttggatttttgctccccataattgtttgagtaccccaaacggacacttgaaaaaatcgatttttttgttttcggggcagtccccccgaaccgatgcgcccagatttatggggagaccgaatccttccggaatagcttccctatagcctgtactttaattctgcgttggatttttgctccccataattgtttgagtaccccaaacggacacttgaaaaaatcgatttatttttgttt

SEQ ID NO: 36660 - DNA, 1369 bp, Heterodera glycines
  unsure (1)..(1369): unsure at all n locations
atttttttaattagtaaaacaaggtaaaaggtaacattttccattcaatagatttccatttcaacaacttattttaaaaatttcaaagattcttcaaatattttccaacttaatttaattcttctattttgaaaacaattcattccttatttcattaattattccatatcattcatttgagcgattattcattatagtgacaatctgttttttgttatttttaaaaattctttttcattttaattaattcaatctgatgccaagatacttataaataatatatttttaatctttttaaatattctaatggaaagaagtcgatggttgtcgtcatctatggcttgtcattttctttatgacataatattttaattaaaatatttttatgaacaacttttatacatcagtagttgcaacgtattaatgatcaggctatttaattaaacaatatattaataaatataatcacttgcagaaatatcatcttttataatttgacttagaaattttatattttttgactgatttttgaccccaaaatctgattttttgggcccgatcgcgagatagagagggagagagagagagtattttacacttttaattcgtttaagtattgaaaatggtaatccgttttcaaattaaaaaattctttcgtctaataattttttccttattttttaaaatttttatggaaagtgttattcttttttaattcattcatttattttatataatttttttatttctataaaatgccggaggctgcatctaatcatatttgttttattttgaaaacatttatttattattattacgattgatttaaatttcgctcgagtagtatgtagcttacagtaacatgctgcttggttaggaagtcacatttctggtattatctgagactttttaaattcattttaattaaaaattactattttttctcattattcattaaatttttaatacaaaaaaaatttaccttcgatagaatattcaattcttttttattttagtacaggattaacaattttaattttttgtagttcgtattttattatacatgctttattttcacttcctgctcttttgttcggcaataattctcttttgatccagcagtattttaatgtattactaatcaggatatttaataaaacaatattttattttttgacctaaaaatattaatttttataatgaaattttttctttattatttttttactcaattcttttattctgggcatctatatgatttttaattctagccatttgcttatttattaaaatatcttccagttaattttacttacagaaatacctttgtttttaaatactcattttaattaaaaaacanaaatttatt

SEQ ID NO: 36661 - DNA, 1062 bp, Heterodera glycines
  unsure (1)..(1062): unsure at all n locations
tgcacttctttcttcggtttaattacncaagtttgaggtacttggcgtgtcctgccaataatatctgtggcatggaataaattttggaactgcgctgcctaacggcggtgcttaaagtgcgctaaaaatgatcaaatgattatcaatttttatttttcttaattccaaaatgaattcgaaacgcaaaaatttaatcataattcatgtggtaaaaaatgcatttaaaaataaaaaaaattcttgaatttgcttctgaattttttaattttaaatagtaaattactttttcgaaattttgcacaaataagaggcgaagaaattcaacgaaatttttattaggattttgatttaaaatgttgagaggtttaacaaatttgtacactgaatgttggatcgtcaacaccaatgagaaatgactaacagaaaagagggagaaaagggcgttgttggcttaggaaaatagcttataataaaggagagacgagcagacgatgagtgagagaaaaatagtggtaaaaatggtaaactgctgcattggcagagtcagagaggggtcacaaagagttcgcacagcatcgaatatttccttcattttgggcgtcattcttccccactgcacttctttcttcggtttaattacccaagtttgaggtacttggcgtgtcctgcccataatatctgtggcatggaataaattttggaactgcgctgcctaacggcggtgcttaaagtgcgctaaaaatgatcaaatgattatcaatttttatttttcttaattccaaaatgaattcgaaacgcaaaaatttaatcataatacatgtggtaaaaaatgcatttaaaaataaaaaaaattcttgaatttgcttctgaattttttaattttaaatagtaaattactttttcgaaaattttgcacaaataagaggcggagaaattcaacgaaatttttattaggattttgatttaaaatgttgagaggtttaacaaatttgtacactgaatgttggatcgtcaacaccaatgagaaatgactaacagaaaagagggagaaaaagggcgtgg

SEQ ID NO: 36662 - DNA, 854 bp, Heterodera glycines
cttcatggtgatctgaaaatcctaaaatgggcttcgaactcttggaaattttcagaaaaaaattccaatggggctgttaaacatttttcgtgaaaaatcattaaactcgtcttaaagagcactaaattctccacaaaatggcctttggatgattgctctatggcaactctccgctgagctgcgtttggttaaatatcgactacccaaaaaaagactaattttaagccatttttccttactttttgcgacattcgtatttagccaaacgctcctcagcagagacgcatcgcagagccaccaagcaaaggccattttgtagagaattttgtgctctttctgttcgtcatattcatcttctacggaaaatttttcccaaccccttagaattttttttcgaatttactcagattttagcattttttcacccgcaaaaattttgtgtttaatgacttttttctggcataaagtgaatagaaaatgcttataggatgtctatactttatcttagtgttgattgctgacaatttgatacatccgagaaagagggacaaggacagacactcgccacaacaacggccgcaaccacaaaggcccaatttctcggcatcaaaattcccgagaccgcgcaccaatcccacagcaaccggaacgcacattcatcacctcagcggcggatgacaatcacaaaaggctgatcaatcgacatcctcaacacaggacacagcaaacaaaggcctcgcgcaccacaaccgcaacaaaaaaacttggcgccttttcaacatcaaaaagcaatttcccactcaacgtgcaaatgcaaccaacaatcaaccacaatttccaacttcaacgtgcca

SEQ ID NO: 36663 - DNA, 781 bp, Heterodera glycines
aaagaggaagtgaaaaagcctgaagaaaagagacaaaaagaagcggaagaggaaaaacggatagaggagcaagaaaagagaagaaaagcggaagaggaaaagacggaagagaagaaaccaaaagaagcggaagaggaaaaaagaatggaggaggaagagaagagacggatggatggggaagagaagagacgaaaagcggaagaggaaaagccggaagagaagaaacgaaaaaaagctgaagagaaaaaacggactatgaatgaggaacacaaaaaacggatggatggggaagagaagagacgaaaagtggaagaggaaaagccggaagagaaaaacccaaaagaagcgggagaggaaaaacggatggatgaagaagagaggagacgaaaagcggaagaggaaaagccggaagagaagaaaccaaaagaagcggaagaggaaaaaagaatggaggaggaagagaagagacggatggatggggaagagaagagacgaaaagaaacggaagagcaaagacggaatgaagagaagaaacgaaaaaaagcggaagagaaaaaacgactggatgaggaagagaagagacggatggatggggaagagaagagacgaaaagaagtggaagaggagaaacagaaggatgaggaagagatgagacaaaaagcgaaagaggaagtgaaaaaacaggaagaaaagagacaaaaagaagcggaagaggaaaaacggatagaggagcaagaaaagagaagaaaagcggaagaggaaaagccggaagagaagagac

SEQ ID NO: 36664 - DNA, 1012 bp, Heterodera glycines
  unsure (1)..(1012): unsure at all n locations
aaaattgatgatttgacaacttcggtgttttggttctttcttggtaanaattatttggcttaaatggaaaaaatccccttttgataagaaaaactaaaagccgattggtagttgctcgagaaaaaaaatgaataacaaaaaagtaaggatgctgtccgatcgctattgttttaagcaaaatgcctaggatttgccaaatgacttttttgttccatcaactgctgactctcgtaattgccaattaatttctttccgatcatcttatttttggcgacatttgccaattttcattatctttatttttgttcaacaattggcctttgctttttcgcttctgttcctttaagttttcgttaattacttttggccgttaattatttatccaattgagctcaattttctatcggaatttctcgtgatttctttcattctttcattttcactttcaacatcaacatttttgtcattggtttatccaagcagccccttcggccaacaataggcgcctttatcgtttgccgtcagccgcttttcggcctttgctcgccacttctgcgatcggagcaattaaaagatgaacagatgtgttcggagaattaactattttttttttttttttttgtgaatttgaaaagaagtcggggcggggtgtgaaggaaatggaaaatttaaataattgttcaaaaagagtgaatttgaatggacaagggatggggacattgattcgatggtaaacgccgttaattttcgcacttcctccggccagtcatttcgttccgtaatttattttatttcttcttattgaaagcaaaatttgaattatggccgaaactgcctgggaaacgaaggcaaattgtgccgtgccctgtgaattgcccaatgtttgttgggagcccgtgctttataccagtcccaacatttgccttcctcctggtgccaatccccacacttttgaaaactacatttcattgcatgccatttctttcctttggcttttccttgctgcttttat

SEQ ID NO: 36665 - DNA, 803 bp, Heterodera glycines
tttatttatttattcataaaaatagaaaagtcatcagaagggggaaaccctcttcttctgacgcctgtcagttaatgtgtcgtagagtaaggaataaaatattatggatgatcccaggaaaaaaaacaaaaatatgggaaaataaataaataaataattgtaaggccgggaccggaaatggcctttacccttccccccccccccccccccattttatctctccgatagggctcctcccatcccgaggggcgcttaaaaggcaacggataaccagccaaaggggacagtcggatcagtcgggagccatctcagtgaaaaaaaattgtccatgcatggttttcgacaattctctgcaataaaaaaaaaaatgaaaattgtccatgcgcatggtttcaaaaaaaaaattaacttcaattaaaaaaaaaaatatccatgcatggtttcggaaattttgtagttcaaaaaaaaaatcccattcataggaggtcaaaagaaaagacaaaaaataataatttacggatgaattagccatcttttagaggtgcccttaaaaaggaggggaattttaatgaaccccacggggtctaataaaatgtattttgctctttcaaaaaaaaaaaaaaatcaaaaactgcttaattttaatcggaattccattaaccctgaggggatcaattaatttgaaaagcgataatcagataatcataaataaatgattaaataaataataataattaattgaaaaagatattaaaatcaaaaagaaataaaaaaataaataattttaaattaaaagagggaaa

SEQ ID NO: 36666 - DNA, 668 bp, Heterodera glycines
ttgtgctctttccagtgagcttgtccattttctctagaagaaattttccagccccctagggatttcgaaaattccccgattttcagtgtattttgggtgtcccggtcactaggaaggagtgatctgatcaagttggtgtaagagacttttttgatcagcaccaaaagttatgcaagcatgaattatttcaagtttttaaatgaactataagatagtttttcaggttattaattaattaaaatattattcggtactgaaatgacccgcctcttctgatcatcactcattcggactttttgcacttcgactcaccacgtgttataacagggctcggattcgtacttggatgccaagtacgtactcggatttcggctttgtgcttagaaaattttaactgtattcatttccatgtaattggaaaccggtatttttgcgtatgagtgtaaaaaatgtacattttatgtaaaaaaatcaaatttttagcattttgtcataacaatcattaatttttgctaaatttaaccaaaaaatcgaaaattttcagtgaaaatctgttaaaaaagagcaaaatttcaaattttttagcgcccaatggcaccgcccatcgcccttccaaaaaaaaaattccccttttttttttaaaaaatttaaaaaaaaaaccccaaaaa

SEQ ID NO: 36667 - DNA, 824 bp, Heterodera glycines
gatttagaaaaccatgttaatgggttttaactattctttatcaaaacaaaccaaaattcattaacgaacaattctaccggtgtgaatttttttctgtttaaaaataagagtcaatgttgcgacatatttttactaattaatgaatagaagtagaaaaattaaagcggaaaaagaagtgcaatcagtcaagaaaacgaatgattaatgtttgattcagattcggaacagggcgattctgaggaatgaaatgaaacattgataaagtgcggtgcgcttattaatattgtaaattattacaattggcttttatgaaatcaaaaaaaaaacaaacaaaaataggtaacgcaaaacgaaataaaatctcaatatgaaagccctaagcaaaacaattcggtgaaagcctaaaaaagtggtgaaccgcgttttagtgacaatgggaagagattatgggtcgcacgagaattagcaaaagaaggcaaatcagcaaaagttaaccggacaatcaaacggatgagtgaagtcaaagcagcggatgggaaaaacaaaaggtaacatggaaaggacataaagaaggttaaaacggacaatgaatggccttctgtctttccgtggccccatccattggcatcgtttgctttcttccgcgtcactttcatctctccctttcccctcttaaatgccttctctatgttcctcttcctcctcctgttcaccttccccctcttcttcctcctcaccaaattccccctcctccccttcctcctcgtcgtccgattccaatgaactttcacttttcgctctctccagtggaaattccgaaaaat

SEQ ID NO: 36668 - DNA, 1273 bp, Heterodera glycines
  unsure (1)..(1273): unsure at all n locations
aaactcaaagtgaagtgcaaagaaaactgaaataaaatttattagagtcatttaaagtttggttaggggtttggttgtaaaggaggaaagctagaatgccatgacacggaaagaggtagtgagtgaggagggcaaggaactatcgggaggcattatgccgtggcgtcatttatgaatgcagggagtgagaaatagggtttgtaaaatgtaaattgtgacatggaaactgcgttaggaatggagtgatgtcaaaaaacaaaaaaattttttaatattaatttgcaacaggtttataattgcttctctgcaagatatcccgttgaggaaaatccgcgagtactttgtttttagaatggttggatattggggttcgcttggaaaaacaaaacactaatttcgggatttattgatgcaaaaggatggatagattaatttcggctaactaaacaattaggaaacgaaacggaaattatgattggaagctaatggataaattcaaaaatttagaaaaatagggcacaaattctgaaatgaaagcttgtgagttggggaattgagataataattagccctttttactaattgaaaacgatttatttggatttgtagtggatctatgcaatatatccctttgaggaaaatcgcttttctcttttttttaagatggttgcattttgggcttcatggaaaaaatactaatttcgggattaatgtaatttaggatggatttaagataaattttcggctaattattgttaggaaactagaggaatttgattgaaagctaaagtataaattcaagaaaaatagggcagttttttttaaaaaaacgataacatacgaaaattaatttccaggatattgtaccgttaatgctttttgaatattaaagtaaaaaggaattgattgattacgaaaattggggaaacaaaatcattgggaaaaattgtttggtattcagggaggaagccggaattggtctgaaatcgagggaaaagctggccttaataaccaaccaagcagaattaaaaatccaaatacggaaaactttaaattaatcaaaggggaaaaatcatggatttaaggaggttaaactgagagaggagctaagagttttgttgtttttttagcaagataacccagtgagggtaatccacttgtttatgtatatggaatttgcataacataggaattttggtacttgaggatttaatttaattgaaaaaatttagggatagtattttgaccgantaaattcggaagggtacaagag

SEQ ID NO: 36669 - DNA, 1132 bp, Heterodera glycines
  unsure (1)..(1132): unsure at all n locations
tttcctccgcttttcagctgttgccgggaggatgcgttctgtgctcggaatgcgctctctccgcagtgtttgcgttgcgatttccgtccgtttgtcttcttggtgattttattgtcgtcaattgtactcagtccgctgcctttgtcaattgcgctggcgacggcgtcgtcccccgtgccaatgtccccgccgttgtacgccttcaagcaaagtgccgtttctgttggcaacttgaacagagcgaaattatgtgtgaggagcggaagaactgctcgaccaacgagttgacactgtacatgatcaaatgctgggagaaaccgaacgcaatctatgcggggcggaggcatttcttcaaaaatgtccgaacggtgcgttatcgatcagcagcatgactttgttgatgatgatgatcctttttttcgtttttccattgtcagttggcattggacgagtgggcacagctggcggaaggcgctttttctgtccttcactctcggcgggttcggcgttgacaggtggtgaaaaggggcaaaagagtggaatggttctgccaattttttcgcttaggttttatttgggctatcggaaaagtgccatcggaaaactgtgagtattttttatgcactaaataattatttttaaaatctttggaaaaaaatgaaaaatttctcaatgttctatgattcgaaggttctctttcggtggtcttggcgtgtggacacttctcgacattgtgctcattgacttcggttacattcagcccgctgatgaatcgctttacatttgaaagaaaagcaaattgttttccattaagttgtatcaacttacagtggttatttatttaaaattgtgtctcttctctcaactcaaagggtggccaaagggattgagaaaattgtccaaattttaatgcttattgagtaaataatttttttcttcccattgatctctgtccttccgtcacttctgtcgttcttttgttttgttttctctattttataaattttctacattttttgccgctctcttncgtaaacagcttaccctccccctcccccacatcccgtgacccttccgccccccggggcaatacattagccaacaattaaccaccacaataaaatccattgaa

SEQ ID NO: 36670 - DNA, 605 bp, Heterodera glycines
ttttacggcggtaaactaaggaatggagggcaatgggtttcgaactgtttttgtttgtcagtggcaatacggacaggaagcgttgacagtccgatcgggctaccggaagttgaacaaagtgttcatttacatgaacatgcaaagggaggacgcccctcggctggagcgatatgtgagggattgggggaggcaaaggaaaggcacgtcaaccgcttccattttcagtatgccgaagagcgagtgaaagtggcgttggaagaactgcacacggacttttatgtgttccagcggatgttgcgtcgtgcccacattttgctcgacctccgcgcgctcgcccaattggccatttacgagcccgactctttcaaagtttggccgcaagttacgacgaaaaatcactttctaattttagtgtctcgtggatttggcccaaaaaatggcgctgattgacggcgaaatggtcgtccaatcgccagaggaattggcccacgtccaatgcgacggaagtctttttggcgaccctttcccggaaagcgagctttacccagaaagggcggtagaaaccatctcgaagtgccaagagagctcacattggacgaatttta

SEQ ID NO: 36671 - DNA, 1026 bp, Heterodera glycines
ttcgatatgaatgccggggaaaacgagcttttacactttcggaagccgactcccggcccagcaaatgatatgcagagtgatcgcagctgcagaggaaggcaaagacgagtgccaaacaactttgttgcttgacccgggaagccatgtcgacggcgcagatacggagctaattcaacaactcgaaccgcaacccatcgacaagcggccgcttacagttcaagtgttcggaggaaagaagcagcggattcggtcagcaacttatcgcctacgactcaaacggaccgacggcaaattggagagcattgaggtgtccgaagtacctcagatctgtacgccaatcagaacagaactcatcgagtcgggagcaacacccgatagcgacccgcgaaccatcacacagacaacgcaacctcaaataatgatcggcattcgaaagttctgggattacgtggtcggatttcggaaaatcgagagtggcgcgcatgtgattgacaccgtgtttggacaagttttgtgtggcgaaggcacccaagcgagcagcggggcaactcccgcagcatcaatcctaacaaccatgccatgcggaaatatccaccaaactcgaacaaataaacgacaacaaatcggagaagtacgtcgaaattggaagcgaaaacgaaagagtcggaaaaacaattcgcgagggattgttagccgagaccgccacaactcacctgcagagtttggtcccgatcggttgggtgcgaacgaagttcttacgtctcgagcggagccaattggggaaatggaccctaaccagcgaaagtggcccatcggacggatagtcgagacaaaaggagcgagcgagcataacagaaacgccataatcagaatggccaacggacgaactcggagacgaccgatcaagaaaatttggccgctgaaagaagcgcggctaaaaacgggcgaaacggacgaccgagctgacgaagcagtacataaacgaccacgaagaagaaacgcgagcagccaagactcagagcgaaa

SEQ ID NO: 36672 - DNA, 969 bp, Heterodera glycines
  unsure (1)..(969): unsure at all n locations
aattcggccctgtgagtccngcgccttttccgcncaacagtcgtcgatgtgcacaaattggtagccgacctcgcggaatccgtcctctgccagccgatcggccatgtcctgatcaaacaatgccaatggatgattacgaaattggcagtttaaaaaaaagcggattgaccagaaaaattagaataactggtcattggctatccgtttagcgcataaaatgaataattaaaaaatattatatatattttgaattaattcttatgagcattttcaatctatccattccttaatgaagcgtaattactgttaattgtttattttattaccatataaagttgttcattgatgcaactgaatgggtgtttggcacaatcggtttggcaatagaatttggtccacgacatccaacccatcggaggggttcttaaagcattcttttataaatgttactcatttaaaatattttccattaaatataatcaccataaaatataatgcttaaatgatatttaaaaaatatttttattttattataaaataacaattagcaaagataattaaattaattgccttgcgagtccgttgtccaatgaataagccattgaaatgatggaaaataataaaatgaacacattcattttttagtatttcttatactctctagaaatatttttaatgcatttaaattgccaaatttttatttcattattattaaaagataaaatgagtattttattaaatttattgtttattaattgttttataaaaaataaaattctaataaacgccaaagtgatgaacaacacattacattatttgatgcgattttcaacactttatccatcggcagaacgaaaaattaatgtcagaggacgacagttggctattagcaaaatgctaataaaatcaaaagacaaaagtggatcacagaaaagaaaatgtgtcatggtcaggactctagagatcccc

SEQ ID NO: 36673 - DNA, 907 bp, Heterodera glycines
aaattttcaaaagagggcttctttaaactagcgcccaaaagtttgaaattactaaatccaaagatccctaaaacgaattttggtgggcagcggacggtccggcaacggaaatgccacccttttgccatcgatccgttcagacagtttcggtgttggtccttcgtccttgttaattgatatttctttccaaattgtcaattcgctttttccatcaaaatgcatgtccacaagcgcatcgaaacggtcggaaagcaatgccattttgagtccgagttgggcatggtcaaaagatggcagaatgtccatccacacgtcgctacaaatccatctgaaagatgaaaaaaagaattgggtaaacgaaaaaatttgtaattttttaaaaatttccctaccgtcggttcatttttgctgaaattatcacaattttccgttttccaattgattgatgccagaataaatgccaaattaggtaattaattgtctttgaaaaatccctttctaaacaacaaacgaaacactttaaatttttataatcactgaaaatgaacagaaactttttacaacgtttattggttttcaatattttatattcttcgaccttttccattttttgtttcataaaatctttccgtctattttaaaccggtttaaaaaatgcgaaatttttagtttattttccgaattcgagcgcagagttttctgaatttatgccggcctcttaatcagcaacttcgaaaattcttggaagcattttcaatagttttttttaaaaatgggggaggggggacatcatccttttatttctcttcccaatttgcctccagcagagctgagaccgagtggaatcgaatttgatatcttataaaaatgtatgatttaagaactactggactggaaaagtctgttt

SEQ ID NO: 36674 - DNA, 1049 bp, Heterodera glycines
  unsure (1)..(1049): unsure at all n locations
gacatgagtaataaacattttgattattacaattaaaataagcttttattattatacatttataaaaaaaatggctaacaattaaaaaatatattcatatttaataatctcaataatgtcagtatctaaaaaataatataaacgcttttcattaattgttaaaataatgaaaatcttgcttaaattatttcatttaatgtgcatgaaaataggcctaaacaggtcaagcaactgcgataacaagactactttcgtttttaaattttaattattttgttattccaaataaaaaaatactatttatttaaaataagttttaatacatataatagcccgtcctcaacacttgcagggcgttttcatgcatttttggcaggtcatatctgttactgtcatttaaaaacaatataactttctgattataatattagcataaattattgtttttaaatactgaaaaatagaaaattttttgctctttaatgctttttatggtaatttaatattttatttttctttgtggtaattatgattttcatcaattccagataatggcagttaaacaatatgaatttaaaaaccatgacccaagtttcaagtaaagtataatattaattatttacatcagaaagacgaattgaaccaataattaaaattaaataaaaataattgattcgcttactaaaatactgatattaatttccaatcataatttttattataatttttttgtactgttgagtaaattatgaataaattcacaaattactagttcaaatttttaaaatttatttataagagatcaaattttcaattttaaaaagatgcatcaacgcaagagtgcataaaatatatagaaaaagatagaagaattgagaatatgtgtaaaagatgcgaaacgtaagcgttcaattggatgtcaaattttattaacattaatggataaaacgttaaaagtttaatgaacgcctaagcatatataacaaatctatgaaagatatcaaattannagcattattactcaaaaacattaaaaaacataaataatt

SEQ ID NO: 36675 - DNA, 939 bp, Heterodera glycines
aaccaatccaggtattcgttagggagtcagcaaccactcctttccaaggacgtccatttattttggcattatttcgtattaccccgaaaaaagagatagtcgttttttgaaaaaaattataacgagcaaaaccaatccaggtattcgttagggagtcagcaattattttttccaaggacgtccatttattttggcattatatcgtattaccccgaaaaaagagatagtcgttttttgaaaaaaaattataacgagcaaaaccaatccaggtattcgttagggagtcagcaattattttttccaaggacgtccatttattatatatatgttatataggttttgagtttcgtttcaaaaaacaaaatctcccggccgaaggccgggagcgccctgaaagtggtggaagggtcttacaactttttgaggagaatccgggaaaactataggtttttttctccgagggccaactgagtcccggcggctaatttctcacttttgcttgcgtttgatggcccataactttttttctaaaactcgaatcaaaaaatgttcgctgtgagggggctaagttgaagtgttttctaaaaaacaaaaaaaattccaggcctctacctataatatgaagggctgcagaaaaatggagaaattcagtaccaactttgtccacttcagtcccaggcgaataactcgccagggtttgaactgagcgagggggtgccagcagacttattgtagagttcaatgagctggatttttccagtttttaaaatttcgaaaattttcaaaatttttcgagctaggcctaaaaaacggttttcgggtttttgaatttttggaatttttaacgaattttcccagaaaaacggagaccactttcaagcaaccgtttttcgagctctatcgattggtgatatttttgaaaaatttcgattttttccc

SEQ ID NO: 36676 - DNA, 1333 bp, Heterodera glycines
ttaaataaaatgcattgatttccttaaatccttattctttcttatttattgggtttttggaaattaaaatggaaaatctataaatgtttaattatgtttttaatttgattttctcactaataattgatataaataattatttttcttttctttaattttcattaatcagtttattttttaaagaatttcatatttaacatatattcatgtaaataaagattgaaaacccgaaaaattttgaattttttgtaagaacttttgagaaaaaaatagttgatataagaaaaatgtcttttgttttagcataatgataaaaattttaaaaattctagattgcatatataaatttaaaaaatcaaaatttttttgaagttatctaaaaacgctccttagccattgttttggtgtttttatgtatttttataacaatttttgcatttttgagggttcaaagctatttttggcagtttttaacgcatattttagtgaatatttgggcgtttttcgtgtttttagggcatatttgggggatttttagtgcatattttatgcgcatatttggcattttttagtgaatccaacctataactctagtgatgataatagatatttaagcaattcaatatttaaaaaaaaattaattttaaaaaatttaaaattaagtttaacatttttacggtcgatcggttactgataattggaattgcaaaaactttgccccattttagcaaattggaattgaccgataaggtaattttcgaacttgtaaattaaagtaaattagaaggtatccaattataaaaaacatgatatgtcgatacattaacgaacgacccacggacaaaggaattaattaaaaaaaaaaaaattttttttaataaaataaaaggtaataatcagggttgtcaaatatgcacgaaaaatggccaaaatatgcaccaaatatgcacaaaaaaatcttgaaaaggtgcaaattcattaaaaaattttattccgcataaattttatcggttttctttttttgcaagcaaatcaaaaatttctcaaggttttcggcagtgaagtcactgttgatccactcgcgcatccattcaaatttgaatttaattttaggcataatcaaattttttcctaaggtatattcaaatcagaaaatatttgacgaaaaatggcaaaatatgcaaaaaaaaaatctgaaaatatgtacaaaaaatggcaaaatatgcatgaaatatgcataaaaacccaaaatatgcaaataaaagtcccgatttttatacgcaaacacaaaaaaggaagtatttttcctactatttagagcatggagaagcca

SEQ ID NO: 36677 - DNA, 996 bp, Heterodera glycines
agagagataaagagaaaaggaaagaacagaggtagagtcattgagagagagagaaaagaggagagagagagagggggagagataagagtagagaggggaaaagagaagcgagagagggagggagagaaaaagagtagatagaggaaaagagaagagagagaggaagggagagagagagagagaaagaggaatgagaaaagaaaagtggagagagagagtgagatatgatagagaaaaagagagagagagagagagaaatgcagagaggataagttgagtcagagagaccgacgagcaaagagatgaggagagagggaaagggagagaaacagagagtcgaaagagacagagaaaatttaaatagagagtatgagaggcacaaaaacaattgtgtgaagagaatatatagagaaaggagagaaaaagagagagaaagaatgagtatggtttattaaaaagaattttaaaaatcaaaatgaattaatattttttaaccaagtaaaaccgaatttaagtggtttttctggttaaagattctaaatcatttttttctgaaaattttttataagagattatttcttttttttaaatgcttattccactgagtttaatatctttgcacttttaatcactcattttcggatttttactctttatttcccaaattttttactttttttcttttatttgaaataaatgtgatcactgatcagtagtagggttagacgggtccgggtatttggccaaaaactgagtccaggtattgcccggtccagaaaatccgggtaccgggtcgggtactaattttcaaaccgggtccgggtacccggtaacgggtattgaaaaattatttaaaaaatccatttttttaaaagaccattttttacggtgattttccaaaaaaaaaaaaaaattcgggagcaggggcaggaagtccggtgatgccgataggcgtcccccgggaaaaattttgaaaatttacttctgttttgttaa

SEQ ID NO: 36678 - DNA, 1289 bp, Heterodera glycines
  unsure (1)..(1289): unsure at all n locations
ttttagatgtacgccctaaaataagtttttgcccttattttggcgtttcgtgcttattttcgttcttatttcgcgatttttaaatttttcatgaaaattcagaaattcttaacaaaaaagcaatgaaaaaaaatttttttgacacaatcacaatttttggcgacttgtttataaaattttcaaaaatttttccactaaatttgtttttctttcttgaccaaattttggtttttgaaatttatttatttatagaaaaatgtattcaaaaatttcgaatatatttaattattttcaactgtaatcaatgaaaaagaaattattttcatataaaagcaatttgaaaaattatacccctaaatttgcaattttttcatgcttattttcgcacttatttaaggccttattttggactttttcgcgcttaaaaatcctcaccctaccaatcaatgaacattttccatttcttaggccatatatttttaaaattaaataaagatatgtatgtatcaacgatttttgacttattgtaacgtatataatttgttttggcgggctcctacagtataatataccgtatttttccgattaatagaccgttcgattataagaccccttttgcgaggggctgaacaatagaagagaccccggtccgataatcgaaaaaatacggtacgacaaattgaaggttaagatctattcggctttacgaaacttttattaaaaatgtttaggagcaatattctttatttgctcagctttatccgattgttgtgtacaccaaatgtaagattgttcacctgcttagtgaattggttttttgctacaaaacagatgatcaaaagaaatagcaaatcagtccatataattatataggttttttaaagaacgaatacctttgctataattacaagccctgataagcaatcttaaaaattttttgcaaatcaaaaaagggttgaattttaatttcatcttttcgtctgttctttttcttcggtctctccccctttttgccccgtttcccattctaagcttatttttattgattatttttcctccattttcttttctttgactttttcaatcgttttgccaattactcgacaatttaaaagcaattttacataatatttaagccgtatgcaatttcctgtaactttgtaaatttattcattttaattcccactgcttttttctcattttcatctctcaaattatgtgtttcattccntttccanntattatccctcattttacatcgacttttattgatttttctttgntgattt

SEQ ID NO: 36679 - DNA, 737 bp, Heterodera glycines
ttcatggggtttacttactgtatattctttcttaccgtattcgttcttactcactattgtatccgaaatataaatcattgaatacattcgttaaaacagacattcaatttaaacaaatatgtagaattcacacttaaattatgaacacactaaaaacgggaagaatgaatgacaatgctaaattaaacttaaattaaaactatttaagtctcctggcatcataaaattatttttttacttatggaccaagttatggcacaaaaaatcacccggcgacgcttactcttgaagcaggagaacgaaactcgactcgggacaaaaaaaaacaaaatcgaccgagacaccaataccaaccattttttagccaaattctcgagcagataaagccgagccaaacaaaaatcaaagtttatgtaattttaggcttagtagggtacataaataaaacttcatttagtccatttaaattatgaatgcactaaaaacgggatgacaatgctaaatctaaactcaatatagcaatttaagctcctggggcatcataaaatcgttttcagtttttcgatttttgaaaaagaaagttgcattgaacggttttcccgggatgtacacacaaatgatgatgatgatgatgataataatgatgacgatgatgatggtgagtagtgaattttagccctgtgttgtgttgccaaatttggggggggggggggggtaagccgggtcctcctcgcctt

SEQ ID NO: 36680 - DNA, 896 bp, Heterodera glycines
accaaaaaaatttatgaatttcggtaaatttttgtttttcttcgatatgtattttgtcaaaatatgccaagacggaccgggtcggttgggccccgccgattgggccccgccagttgggccccgccgattgggccccggtacgattgggccccgccgattgggccccgccgattgggccccatagagcacatggacaaggggggggggtcagaataaaaaagttatattgtcaaatgttattgtttgcgtgtttcattgcatatttgtaaatatatttggtttcatatttgttttctaatttttttatattttccaattcttgattgcctaactaaaataccattaattcagcttattatttaatatattaatatcacgatggaaaataatatcttatcgaagatgaaccacaaaaaacttgaacatgaaggtcatctttatgttttcgccaaacttagcgcggatggttttatcaaattttggaggtgtgagaacaaaaacaataaggacatgaagtgccgagggcgtctgcacaccaatttgaatgacgtagtgttgaaacaagtcaatgagcatgtctgtggagcaaaccctgcgcgagtggaagcacagcgcgtcgttacaggttaggttatatcaaatgctcaagattttgcatgcttatttgacaattttaggaataaaacgtagagccattgaaaccgccgagccgccatctacacttcgctcaattgcactccaaaatgtgggaacccctgtgttgtctgaagtcccaacaaaaaatgcaacaaaacaagttgtgttaatttctctgcgctcattgtatggccttttttagctaatcaaaagggccccgcaatgaaggaattactcccgcaatgcccgcttattctaaa

SEQ ID NO: 36681 - DNA, 963 bp, Heterodera glycines
  unsure (1)..(963): unsure at all n locations
caaatttccttcgggcctcagaaaatggctatctcttttcggccaatttgtaccngatcaagggaaaatggcttatttcaggcccaaatgtgcgcctgaatcgctaattagcttggcactttcgaatattacatataaattagccctctcaaattttcctcgggcctcagaaaatggctatctctttttcggccaattttgtaccgatcaaagggaaaatggcttaattcaggccccaatgtgcgcctgaatcgctaattagcttggcactttcgaatattacatagaaattagccctctcaaattttccttcgggcctcagaaaatggctatctctttttcggccaattttgtaccgatcaaagggaaaatggcttaattcaggccccaatgtgcgcctgaatcgctaattagcttggcactttcgaatattacatataaattagccctctcaaattttccttcgggcctcagaaaatggctatctctttttcggccaattttgtaccgatcaaagggaaaatggcttaattcaggccccaatgtgcgcctgaatcgctaattagcttggcactttcgaatattacatataaattagccctctcaaattttccttcgggcctcagaaaatggctatctctttttcggccaattttgaaccgatcaaagggaaaatggcttaattcaggccccaatgtgcgcctgaatcgctaattagcttggcactttcgaatattacatataaattagccctctcaaattttccttcgggcctcagaaaatggctatctctttttcggccaattttgtaccgatcaaagggaaaatggcttaattcaggccccaatgtgcgcctgaatcgctaattatcttggcactttcgaatattacatataaattagccctctcaaaattttccttcaggccccaaaaaaatggataattcctttttccgccaatttt

SEQ ID NO: 36682 - DNA, 1086 bp, Heterodera glycines
  unsure (1)..(1086): unsure at all n locations
caatttgancagtatcagatttgatctgtggagtttcgataaatccattgagtgagcagcagcaatagcatttgaattttatcgaaaaataaaatatttaattaattttaggccattgtcgccacaaaacggaagaagaaaaagaagaagaagaagcggataaaagcaacggaaatgtcgtctgctgattaagtgtacggaaatgaatgattgaataattctatttgagaaatgatctatctcaatttgttgtgcttttttctctcagaaatgcttttgttaattgtttcgttccaattatataaaacatttattttattggcttttttgttgaacatttattaattatcaatgaaacgattatttatagaatgtggaaatacagtagtttttgtttccttcctcctcgcttagaaaaaaattcactagggtaataaatagggatgcgatttttagatgtttacatatttttttcctgagatccccgtggcctgaaacgcacgaaaaacatgtttttttgggctgttgttaagctacttttcgagttattagcacctattttctaggtttttatttttagcacctaaaaaacctaaaaaaaattttaaaaacttattttcacctattttggcattttgcccaaaatttgttaacaaaaatacaataaaaggaaaaatagacccctaagaatcgacccaattttttttcaaaaaatataccccgaagaatcgacccaattttttttcaaaaaatataccccgaagaatcgacccaattttttttcaaaaaatataccccgaagaatcgaattgaaaattttcaaaaatataccctgagaaatgaaaatttctcnaaaattcatctacaaaatttatttgtttaattttttgacgagaattgttgatttttgaaaattatgtatctcattaatgatttggcgtaatatttttgctttttaagaaaattttcgattttaccccctaaatccaaactttttggcccctattttccatttttagcacctattttggggttttttaataacttaaaacctacccatttttggatgtttttaacacctaaaaa

SEQ ID NO: 36683 - DNA, 1321 bp, Heterodera glycines
  unsure (1)..(1321): unsure at all n locations
acaaatgatgaatgggcagtttaanttattnggacggagatgacgacgaagcaccggttcaaggcactcattccgccagtttacgttcggcacccctttttaactttgtcaacgcggcaccgtttggagttcatggatggctggcgcattttggcaaaccttacattggcaccactcaattcgagattgatcgtggagcggaggcatttgaacccaatgctgatgtcggggcaatggtaaagattattggactaagtttttagaaatcattttcaggggtattccgaggcgcttattacgaatttcaataaaatgattaattttccaaaaaaaaatccaattcaaaccattctattttactaccgtatttggtgaaaaaattgttgagaggagcttagatatttcggcgtttttgagcactaaaagcctaaaaatagctgcaaaaaacatgaaaagtgactaaacaatagcacacaaaaattgggggtgtctaattaattggactcaaaaatgcaccggaaccgataattcctcctgctcttgagcagtcttaattggtgcatttatgtaaaaaaaggaaagaaataaaatattttcgtcggaaagaattttcaaaataaacgagaaaaaaagatcagatcaatttgtcaattcaataatcttccaaatagccgatcatttctcaattatatttcacttccgcacaattcgacgcccttttccgccgggtaaattaatcgaaattttaaattttagtgttttaaatgtgttcaatatcagtgtatttttatttttttttttaaatacacaattttttttcaattcttttcatttttacacgaattctgttttgctcttactcaaccaatgcaattgacaccactcaaaataatgctgacattgttcaacttttcgtccttccattgaacaatttgcccaatttggcatcgcttcatcacccaattattttctgattctttgctcagtgtcagcttttcctttgtttgttcgttgaccaattcaaacggctcaattggctttggttcgaacagttcaaaatgaataatgaaattgacagaagaattggtggcacggagaaatgcctaaaacaatttcataaaattaggcatcgacccaatccccttggtgttttttaaaagtgtttaaattttttgctaacataagacaaaaaatttcttaaaaaatcaaaaaagcacgtaatttgttgcttcgtctcattaataaaatttttaaaaaattaatgtcgaaagaaaattgtggcgaccttcttgaaaaggttgaccaattttccttttcgcaa

SEQ ID NO: 36684 - DNA, 1060 bp, Heterodera glycines
aaatttgaaaatattccaaaaatccctattcttttttctatcctttggactgagtcggccctgaaatatatagcagtgaccaatactttccttgaattttccagtacgggtttgtccgtgaaaatttgaaaaatatttccaaaaatcccattttcttttttctatccttgtggactgagtcggcccttgaaattatatatcagggaacccaatactttcttggaattttccagaacgggtttgtccgtgaaaatttgaaaaatatttacaaaatccctatttcttttttctatccttgtggactgagtcggcccttgaaattatatatcagggaacccaatacttcattggaattttccagtacgggtttgtccgtgaaaatttgaaaaatatttccaaaaatccctatttcttttttctatccttgtggactgagtcggcccttgaaattatatatcagggaacccaatacttccttggaattttccagtacgggtttgtccgtgaaaatttgaaaaatatttccaaaatccctatttcttttttctatccttgtggactgagtcggcccttgaaattatatatcagggaacccaacactttcttggaattttccagtacgggtttgtccgtgaaaatttgaaaaatatttccaaaaatccctatttattttttctatccttgtggactgagtcggcccttgaaattatatagcagtgaacccaatactttcttggaattttccagtacgggtttgtccgtgaaaatttgaaaaatatttccaaaaatccctatttcttttttctatccttgtggactgagtcggcccttgaaattatatatcagggaacccaatactttcttggaattttccagtacgggtttgtccgtgaaaatttgaaaaatatttccaaaaatcccattttcttttttctatccttgtggactgagtcggcccttgaaattatatatcagtgaacccaatactttcttgtaattttccagtacgggtttgtcctgaaaattgaaaaatatttcaaaatccctatttcttttttct

SEQ ID NO: 36685 - DNA, 866 bp, Heterodera glycines
  unsure (1)..(866): unsure at all n locations
ggttttgcatatcatgaaaaatttttttggtcggaaattagccaaaattcatatttatggcataaaccccgccccccccccgcccttcaaaattttgaaaaataaataaaataataggagactcagaattttgaaaattttttataaaaactgatgacaagctaatgtgataaaacaggttaattcttttcctttcagtatccctgcaaagtttggggcgcttctgataagtttctgaaaaaaaagataagcctaaactttttggcctgtttaaaaaggaattaaaaatttttaaaaatttattcatctccctttttgatagaaaaagcatcagagtgcctaaactagcatgtaaataaaatttggtgcgtttcagagcattttctgaaaaaaatatttatgaattaattatgcaaaaaacaaataaaaacgaaagactcagattttcgaaaatttttttaaaggaattaaaaatttttaaaaattttattcatctccctttttgatagaaaaagcatcagagtgcctaaactaacatgtaaataaaatttggtgcgtttcagaaccctttctgaaaaaatatttaagaattaattttgcaaaaaataaataaaaacgaaagactcagattttcgaaaatttttttgagccagctagctcggcgctcatttcagtgtaagttagtcctttaccggggagtatccctgcaaagtttggtacgcttctgctcaattagcaaaaaatatgagtgatcgaattttcactaaaaaagttaagcctacattttttggcatatttaaaaagcaattaaaaaatttttaaaatttaataattttcctgcaccgaangtactcactcggcctctt

SEQ ID NO: 36686 - DNA, 486 bp, Heterodera glycines
  unsure (1)..(486): unsure at all n locations
cataatttttntgaatgaaaataaatttntggaattttaccgtctaagaacaactcaggagctttcgtatgatataataagacttaatatgaagtgttgaagcaatcgtgcatttttgttgtcgatcaaactgctctggagttaattccccaataaactgcattttaaatagttattcaaatatatttcatcaattaaaattagtaaatccttccttctcaatcatttaattacttacctacagtaagtcaacggcaaaaaagtggcgtggaaaattgcaaaaaatagaaataaattcataataatggtaaagtcagcttcgtgaccggaaaatcggtcagtggaaaatgcgtcagtggaaaatgcgtcagcaaaaaatgcatcattataaaatgcgtcacaagaaaatgtgccagagatgaacatattctaaaataatgttctatggacttagtattgcaatatacaaataaccttccataagaa

SEQ ID NO: 36687 - DNA, 799 bp, Heterodera glycines
  unsure (1)..(799): unsure at all n locations
cgcaacaacatctcatattctcaagcttaacaatgacctctacatgtaacaacangnatggaacaacccaacaccncgccctcttccgcacaccagaacgaggccnccaaaanccaaccacagggggccgcaaacacagccgccgagcggcaccccgagcaaaaagggcaggacagncgcgcacaggccagaaccgcgcccaccgaganagncaacgccaccagccaccgcgcgagcaccgaggcacccaaacacagcaccgagcacggaccgacacagcagcaacaagacaaccaacagcaacacgcacaacacgaaagccaaggccggccgacagggcgaaaagaaacgaacgaaaagcgcaggcgcgaacgaaaaagggaagacacaaagggggccggcacaaaaccgacaggcacagccgaaaaacacaggacaacacggaccaacccacggcgcggaggggcaacacaaagaagcgcaccccccggaaacatgaggaaagcgccagccaaaaagacgaggactcccccgccgaccagaacaaaggcgctgcgccccccgccgaaatgcttccccgcgcaccgacagacggcactgagcaacaaccgctgcttcgtcaggcggcgggttccacactttccattgagtcgacttctgaccaccgcacttctccccaccactcgaacaacggacttcagcaaaatgggccatcggtggtgaaactgtcaccggaagaggaaaaagcgatggtctttttgcttgaattgatggggcgtttcacactttattttttact

SEQ ID NO: 36688 - DNA, 163 bp, Heterodera glycines
tttcctctcttttcccgttatctcctctcttttctgcttcctcctcacttttctcctcatttccccctcaatttcactttttgttttcaactttttcaacaataaattgacctgattatccctaaaggacaacgaatctgacaaatccaaccgattcgccgat

SEQ ID NO: 36689 - DNA, 1193 bp, Heterodera glycines
  unsure (1)..(1193): unsure at all n locations
ccctcccctccctttctcctcccctcgcttctctcactcctttcttccccttctcctccctctcttcctcctcctttccttttttctgtccctctttctccatcactttctctcctttccttgtccaagttttgatgagtccatgtgagccgcgcgcctcncatgcgggcgaccgcacgcgtcgctccccccaattttcccttaagggcacaaattgaggatgaatgaggtgtggggagtttatgggctgtttttctactacgctggcggcttttgggtcggttagcgccatgggcgtgcgttccgcattctctcgccatctgtttttccctcttccttcattgtctatcactgtctcttctctccccactctcttttcgagcattttcgcttcttttccccattagcccttcacttgctcacttatcgaagtgtgtgctgcgggcgactctcccccccccctcgccctctctcccctcgctctctctcccccctctctcccctcgctctctctctctccccctctctctttcctccgctcctccgctttctttacgcccattccatttgattttattaattcccccccccccctctctcccctcgctctctctctctccccctctctctttttcctccgcactctcttctcccgctcgcccaccatttgctagtgatggctgactctctcctccctccctccccccaggcgacaattgcctcctttttccgtccgtcgttgtcacgaaccacacaacatttgcctcttcctccaattcgcttaattaaactcttcttcctctttccattcattatcatcatccatctaattccattatcacccccgaggcgacttttcacacaaatggcgttaaatgaggccaaacaatgccaataaaacttttgtcccaaaaacaatgcaaataaaattgattaattaatgtcagcaataaactgattaattaaagggtcattaaaaagcgacaattaaaacctcattaatatttaaatcccattagttgtaaacccaattatgctcaatttaatttaatgattaattacataattagttataattaattttaaaatgttaattaattaatttttgaatatttacctatctattaaattcaaaatataattgatttttccaaattgacccctccccccactggattattctttcccccata

SEQ ID NO: 36690 - DNA, 1303 bp, Heterodera glycines
tttgttgtgatgttgtgattgtattcaatgtttaccgtcatagatccggaaagtcagaaactttgtctttaaatctcggctcgagaaacatggcaatttgatgatccctaagaaaaaaattaactaagaattccgttaactatttagacctttcatctttacagccaaaaatttttgtcttcaatccatcgacaatttgatcctcccgtatttcgcttacgtcgtggttttcaaactccatttgttccagatttttaattgttaattttgtgaacgggtacttaacggaaattgaagacgttcctaggcagaataatctgcttaattgctccattggatccaaaactttcagaagttcattcaaacggaaaaagaaattttttcgtttgaaaaattccatatcttcagtaaatcccttaatttctctgcaattctttcaccagtatgagtgccttcgaattcagaaacagacagtacaaatgattttctgacaaatattttgctgattccgtgtgccgtaagactaaattgtttgacgacaaaaattgaaagaaattgaaaacacaaccttatgaatgcgtttgaagtgtcagaccaaatatccgacgtaaaagcaatttttgagcattcgtccaattcactttggacctttgatttgaccattctgtagaccattggaagaatttttttacgatccaagcgaaagagattggttctgaagaagaaagtaaacacggcggcgccgcctatgtggacggaagaagtggagaaagtgctgcaaaacgttttggcggccccggggggttcgactacaacgggtgtggcacaaactcttctgaacgaaattagggagaaaaagagtatgatttgtgcctgggcctggttctttaaattaaaaagttttaattattcagctgcagcagcagccaaagcactggttggaggggcgccgcggggttttgcccttctaacggatggacctcgtcttgatgacaaccgagaagagattgcagctgacgatggtatgctgacttattttttaaagaaatccatacatttatatggttggacccctcttttaagccgagctcagtcatatcgctttgcgcggtggtgaactgggcttgccgccgcctctgcgcgtgaatcagactgcagccggtaagaaaatagaaatctttatgcccttaccaataactgcccatccctttcccattaactaatggggatggtagccatcccctcaacaatgtctatgtggacggtctatttttatcaaaattttccagaggccaatcgtgtt

SEQ ID NO: 36691 - DNA, 1276 bp, Heterodera glycines
aattgaatttaatattcatttaggcatatcattcttttacttgctcataaaagttttttaaatacatcaatttataggttttgggtgccttagatcatggaaatatcatcatttaaaataggtcaattttttaacccctaacaatgaatccctaaactttatgaatcaggatcaataatatagggtttgggtgagtaagaaagaattatgacctgaaaacctagggtgatcgttttatagaacgcctaaaaaattttgatagggcatatattttggtttatttttttgaaaaatctacggaaataaagtttaagctgaaacagacgacgccaaatcaattatttttggcttttttgtgctctcaaaaatgtgatttagacaaaaaatcaaatcttttctttttaattttgaatgttttgggatttttaatataaatatatatttctaaaaaaaaacgaaagaaaaaaaaaagaataaaaattaattgcaatttaatctaagaagaatagtgtctataattgctgataaatcataaactaagtatgcagtttttcaaatatcaaaatattttcgtttagttcaacctattaccttcaatccttgtaattaactagtagaagatactgtacttagatatataaagttaattatttgataaaaaaatataaaaatataaaacccctcatctaatgtgttaatagacttttaagctctaaaaaaaattattctctaatatttcgtttttcaccggtttattaatccatagtcacaaatacaatatatatatatataatatatacacatatagatatatacataaaaaatgttttttttttttgttattttgtagttttttttattacaaagtatgattattaggattgcgcatagtatggaaaaggtaaggtctcaaatatttactaaaaaaacctactatgtagtaaaaataaaaaatttcaaatatgaacaaaaatataaagtaaaaatcagaaaacaaaaacgtgtgaaaatcaaaaataagccaaaaacaaaatttttagcaaattcatttaatttacagtctatggttttttgataaagaaatttaaaatttttacaggttaaaatttcaaaaaaaaatattattgaaaatttatcaaaaaaattttttttgcaatttcaaaaaataaaaaaatattttattaacgatttttaagcagaaaaaaatccacaagtttattaaattctacatttttattttttttatttttttggaaaatactaattcgaaaaaaga

SEQ ID NO: 36692 - DNA, 952 bp, Heterodera glycines
tggcctatgaaaaaatggagttttatggatgtcaaattctgggacttttcttcgacgtggccatcagcgggttgtttcgtgacaaaaacaaaccagtttgatgttattcgaatgagctagacgcgctctacattttcaaatgtatcaacaaagggtctaccgccactccctggcgagatatggcctgtcaaagcagaacggggccaaaaaatttgaatttttgttaatcttcggcagttgcctttatttcgagcctactctacttgtgcatcttttcccaatatggcactgcttccgaattattgaactgtttcacgactgattgttgagataatttttttttccgattcctttatctccaagcatgagccttataagtgattgttcatatccttctcttgaaaaaaattgtcagtaaaaaaaacacgttttctgaatattaacaacaaaaatttttagacactttctaaagaggaaggaaaaaaatttttcatttgcctaatatttatttatactgttgaactgttggaaatgcagctgatgccgtcggaaaagctccgattttttggggaagtttttttctttcagtttcaccactgattgttgaggcaatttttttcgccaatttcttttgtctacaaacattatttattgcgtttcatcctgtagtgtgtaaaaaattttcagtaaaaaaaacttgttatctgaatatttacaagcaaaatttaagaccatttccaaagaggaaggaacaaaaatttttgcctaaattttatattatattgttgaattgtttgaaatgcatctgttgtctgccgttttgaaatttttcaacttttcacgaaaagatttcccagaaaatgcatgggacaaataaaaattaaacttctattatgatcaatttaaatttcctattcagtttcgggtttgctttaaacacgctggcctatga

SEQ ID NO: 36693 - DNA, 1185 bp, Heterodera glycines
  unsure (1)..(1185): unsure at all n locations
taaaagcttaagaatgcttttctgtgtgcgataaantcagacaaattttttaagttaaatttttaagtgatttaatattttctctatttcagaaaaagaaaatccattaattgttaacttttaaaggcccacagcatttttgcatacaaagaacaaaaaccttcttacctaaagcaacatcagcgctatttgctgctgaaaagcatagcatcattttacaaaattggcacatcggtgagtgatggatgattggcatgttatgggcatattatgggttatggattttaaattagtcaaaatcttatcattgattagggttactcctaatcaaattcgaatgctctttaaaaaatcgaggtcccggtcccagcttttcaggtcccggctagtcccggtcccgattttgcccaaaattcccggcccgctcaactctactaaaaatgctcgataagattcgtataatgggtcaaatttcgttcaaatcttgggttaagctttgttcttgattctcgatataaggcttcgttccagaatctctgggtcaattctatttccttgttcctgctgtaccacaaaattttcggagggcggaatccaaagagaccattttccctttggtacattacaagagtatcatgaaaagccctccttaaaagttaagcagttgtcactttgtttcctcatgcaacgcgccccacatgttggagcagtaattgtggaagaaacggatgatttgtttctcacaaaaaatggccgtccacggcgtgtgatgtcatgtcagcagctcaggaaactgctgaacggcttggtggccagcgtgtgcaacaacagcgaccaccttgatgagcactacgattttgacgacattccgccaaaatcccaacaacatcagcagttgaaggtaagcattgctttgaaaagggtgccaaattatagaatagattttaggaaatgcacagcacgaaaattttgaattcatgattcggaataaaaaaaaagaaataaaatattggcaagattttggtgccgttaatttggcttttattaaattctcaaacagttggtcaacccccctttagttgttgcgcgatgagcacatgagcgcgatgcaacggatggacttgggcaaattaggcggaggccgatttacggactgtgaacagtggaaagtgatgtgaaatgatg

SEQ ID NO: 36694 - DNA, 1138 bp, Heterodera glycines
ttcagttgaagacgaaatttgtcccatggggtagccgtttgtttttccggaataaccgacccatacttcctgaaggatatacggcaaaaatatattaaaatttttataatattatgattagaaacattaattataggggcattaaaaattgaaaaaatatttcgtgaattaaaattaatttaatgaaatcaattactaaataaaaaaaagaagaaattgcgaaattaaagaaaaaaaaaattaaagtaaacattctatttcaaccaaattttcgattttatatttaattttcaaaagatttaaatattgtgtctcggttttaaatttaaaacaataacaaaccaataaaacatattattgtattagccatgccaatcatgaaaaataagaattaatttaaacaacataaaaattaccaaagcaccctgaccctgaacatcctgcagcttccaaaaggcccaatatatgaataaaattcaagaaaaatagcaaaaaggttttcatttttattattgaatattaaaattaatatttgtcaagaaaaaattatgatttgcgaagtctttttttttgttatttattatgtctaatgaattgataaattgatttcaaccattttaggcgtcataaatttgctttgtatttcctggcattaacgtaataggcatgcatattttcctgtgctatgcatattatattatattatttgggttggagaatatgtattatgtaaatatgggttttggtgaatgaaaaattttagcaacgccaaaaatgatgaaaaataatgttaaataatattattaacacacagtttttcgtctgggaatttcgaaaaaaaaccgatgtaagttaaaaacaatttttcgaaaaattgatgatcgaaaaaggttttggcaatttaacattaattgatgccattaattttataggcgtgtatatttttctgtgtattgaaaaaaaaacattttacataaaattacatacattttttagaaattaaaaaaaaacttaaggtagcaccaagatatgtctgctggaagttgtaaaaaattactttttattttattttatttcttatatttacaaatataatatcgtgagagaattttttcatttatttctttaaaaattaaaa

SEQ ID NO: 36695 - DNA, 1373 bp, Heterodera glycines
  unsure (1)..(1373): unsure at all n locations
attaaaagaaatcattatttatttattcagcaaaattattacataaaaatattttattcattttaggctaatgcatatcatgatgaattacttaattttattctcattgcctccaacggagatggccaaatacagtttgctacacgtggcattagnccattgttcaagtctaaaatttatggcatcagcccgtctaagcattggccaattggctgcttcgtccgacaaggacggcactttttcgcccaaaattgctgttaatttgtctgaatgcaaaaagaatttagaaatttattttcttcatttaagatatttataaagatttcttttaaagattaaacgaaattgggtttaaaccttttttctttttgcgattttttttaaattttagaccatcagcaaatgtttgaatatttttttctgcggcagctttattttgatgggaaatgcacgaaaaacatcatttttatccaaatttctccttttaacgtccatatgaagaaataaaaaaatatttggctttcataaataaaatactttttacaatattttgaattatttttgctttcaaaaataaaaaagattatgaatatttttaaaaatttttaacaaaattttcgcatttttttgttaaatttcttcacaaaaattcagtaaaaatgaaaaattatccactaagaaatagcttttgaaaaaaaaaatcaaaactggttccaaattgcacccaaatgtcacttttttttttacaaatatgcctctcttcttgcaaggttgtgcgatcatattctgataccaaaatatttttgctgaaaatcctatgtgctttacctaattgtaccattattttctgaaaatttgatccaaaaatggcaacaaaaaaatgtcattctttggcgttaaacctctacgaattcctgatttttcgcaccggcgctgaagattttaaaaagtaagactggcaacaatgttttggccgaagagtaaaaaaaaaatttcggcttcccccctccgaaattttctgactacgggcctgactgcaacagcgaattaatatttgtattttttggtatttttcaactagaagagaatttttcaattttttgatcaaatatttccgttaatagggttcggaattataagtatattatttatttcctcaactgtgtaatgactgaaatttgggcattttttcaaaaatccctattaaaactgcccctctattaaagcagcccttttaaaccttttttctcttttctanataaaatttctcaagtaatttgtaaaaatcttaataaatttaaagaatattttagttattgaaatttttttcttatgaagtttttcaaaaacattaattggtttgctatcgaatt

SEQ ID NO: 36696 - DNA, 823 bp, Heterodera glycines
gctttctaattcctaattccactctccacttctctcttccacttccacttcctcttcctctttatctttctcttccgctttctgttcctcttccactttctgtttctcttccactttctgtttctcttgcgctttctgtttctcttgctctttctcttccactttctgttcctcttccactttctcttccactttctgttcctctcacactttctcttccactttctgttcctcttttctcttccgctttctgttcctattccacttccactttctcttccacttccacttcctcttcctctttatctttctcttccactttctcttccgctttctgttcctcttccactttctcttccgctttctgttcctcttccactttctcttccgcttacagttcctcttccactttctgttcctcttacactttctcttccgctttctgttcctattccacttccactttctcttccactttcacttcctcttcctcttcatctttctcttccactttctcttccgctttctgttcctcttccactttctcttccactttctgctcctcttccactttctgtttctcttccactttatgatcctcttgcgctttctgttccactttctgttcctcttccactttctcttccactttctgttcctctcacactttctcttccactttctgttcctcttcttctcttccgctttctgttcctctttctcttccacttccactttctcttccgctttctgttcctcttccactttctcttccgctttctgttcctcttccactttctcttccactttctgttcctcttcc

SEQ ID NO: 36697 - DNA, 611 bp, Heterodera glycines
agtgattatatgaagtgagtgtatgtggggggagccccaggcttaagtaaacagacagagggggcgggcgacagaagtaccataggaaaaatggaagaaacgatttgcagatgtgaacaaaaattggccaaagggagacaaagaagaaagaagaagggggaggaaaaaagctgagaaaagcgacggcacatttgaataaaaggagagaggcgaaaaacgcaggagaaggacggggagagacaaagagaaaaagtgttaaaaaagggggtgtttggacaacttgcccccgggggggggggggggggttaaagtccaattacaaaaacatgaggcagagtgaaaagtgacaaaataaaaaagggaaaaagggggaacaaaggatcggttaacaaaatgtggaaggagaaggagaaaaggagagaaataagaaacaaagggggggggggaacgcaaaaggaaaatgcccaatttgatctctttcgaatttgatcattcccctcgtcgcattcgcgacactggccggcgcgcgccccctcagttcttcggcagctgattgcagacctcgggcgggggcggaagcgaaaacagagcgccagtcaagcgcagcaact

SEQ ID NO: 36698 - DNA, 636 bp, Heterodera glycines
  unsure (1)..(636): unsure at all n locations
ttcgaggccgagtacttttggcgcaganaatgttgtttcccgtacgaggccgcgancatcccaagtcacacaaaaaganaaggagatttgagtcccagagattggaatgccggagaattgagtcncagagattggaatgccggagaattgagtttcagtgattggaaagcttgagaattgagtcccagtgattggaaagcctgagaattgagtcccagagattgaaatgctggtgggttaagtttcagtgattggaatgtcattgaaagttggtgagttgagtcccaatgtttagaatgccggagatttgagtccagtgtttggaatgccggatttgagtcccagtgtttgaaatgccgaagagttgagtcccagagattggaaagccggagaattgagtctcagagattgaaatgctggtgggttgattttcagtgattggaatgtcattgaaagttagtgggttgagtcccagtgtttagaatgccggagctttgagtccattgtttggaatgctggtgggttgagttccagcgattgaaatgctggtgggttgagctccagcgattggaaagcctgagaattgagtttcagagattgaaatgctgatgggttgattttcagtgattggaatgt

SEQ ID NO: 36699 - DNA, 1092 bp, Heterodera glycines
aaagacataatttgccggcactcggcccaattggccctctttgactgcgatggcatcgtcaaccattcggtcaaggtcgaccttttccaacgcatcctcactgatcccgatcgcttggcctgaacatttgtgatggaatagcaaaaaattccattttaattttgcataccgacggcatccaaaaggtcgcgaacggagatgcttaacatggaacttcaatctttagcattgatatgccaaattttgcttcgaaattcccttttttcttttgtttgactttttttattccattttgtttgattcgtttcggtttgatttgattcaaattgaatttggttcgttcgtcctccccccacccctcaactgttttccgccatagaaaaagctggcatgcgcaatggaagttgctcgtttgcccaaataatacaattttttcacgtaatttgatccaatgtctgaaaagaataatgcgaattttcaattagaaatattttaaatgtcaaaacccaaagcgatggtcgaaattgccaggccaacgcacatgtaaaggagaacgaagggaatgaacgcatcgctgaaaattaaattcagcaaattaactattaatgatacacggcaatacagtgagggattaattaattagggtgattggaaactactgtatgtatatgcattactgtaactggttctttctcacttttctgggatcaaatggccatattcaatggcggtgaagcacaaatacgagtagaaaaggccgttgacaaagtcaaattggcctttgaacagaggcaacagaatggcaccgagggccttcaatttgaatttcttttttagataaagtcaaaatgacatccgacaccaaataggccaacacaacgccggccatggtcagcggcgagatttgcttggccgcgtccgcgtcctccgcctcttcatcctcgtaaaaccacgggttgatggagacggtctcctcactgttccactgcccaccgtattcgtcccgtctgaacggcataccgtactttacaaatgtttggggatgtacagtcgggatcccattcccaattggaccaagggcgtaggcagggg

SEQ ID NO: 36700 - DNA, 763 bp, Heterodera glycines
gattcgcctatttgcgatcgaatttcgtcggaggaaaatgcaaagtgttggaaatggtcgaacaaaaggaggcggccactttaataatatgacaatttgttcacaaattaaaaactaatataaagaattaattattgagtggactgggaactgttgaaaagcatgaaaacaatgtttttagcttagttagttattgaagctaataaaagccattcatttgcatatttgaccatttttggtgtctaggggtagcggggtctggcggtgccgttaggcgcctcaggaaatttttttttatgaatttcgctaggaaatttctcaataaaaaatttttcccccttcgttacgactcccccgcccccacgacgacccacacttattaaccaattaaactcgcggcggtaaatgtgtctcatagctagggacgtgaattttaggtttaacttttttttttttgctcaattgatttgaagaaaggagctcaaaaaacgcatttccgcattaaaaattttcgattctgatgtcattatcggtcactagaaatcactattttgggattttgtcactaatagtgaaaattcactattttggagttttgtcactattttttcaatatttcgacattttttgaaaattccttaacaaaaatgcagcaataaaaccaaaaatacacccctaagaatcgaactaaaaaattttcaaaatatactcctatgaaatgaaaaaaattttctcaaaaatttactttcttggcaaaaatttt

SEQ ID NO: 36701 - DNA, 1125 bp, Heterodera glycines
taagccatatccctttctcataatttagggcaattcatgcagacggtcaccaagttggtaccgatcgctcggtcacagataccatctcccatttcggccaccgagcgtccagatgcgccagaatgtcccaggaaccctgagttgattcatcaaatatcagcacggaagtgccagtccacgccgtccgcaatgcattctcagccatagatgccgtagcgaaaacaattctcaagttcgccgcttggcgcatacaacgatgccatttttctctcttgtgtcagcctaggcctgagttcataattttggcgatactctctcacatctctcttatcatgattctcttcacttctctcttccaacttgctctgaatttcctcacttgttagctttgacaccaaaatgtgacgcttcaacttctcaaccatctctctatatttttctttcgcgtaacccgagaagaacgcaatcgatcccgactcttccatttcatcactacctaacacttcgtctaattcttgggctaattttgcaagaggaagattcgctgatgtgacaatggcaattttaacattttcatttatcgacaagagaatcgccgccacaattgatgcaacataagtcttaccaactcctggtggcgcattttgatagatcaaacaacactcattccctaacaacagtttggccgacactttttgcctctcatttaactttctcatcaacgggtgaaactcttgaactgccgacgcatgacccaaaatctcttcctgttcaccaaccagctgttctcgtggacgacccattactgccctcatcagctttccttgatttgtgtccagcttggcaactcgagatggaagatttgacgcaaaacatgcccttctcaactccaaaccctgcggaatcatcggatgtgctacaaagctacctccttcctcagctctctccaactcttcatgaacatccctgttttttctttcttgcacttgtgtcactttcaccgcaatccacaaaataaattttggtctccctaaggatttcattgactctacattcgtttctttgacaacccccgaagcaaaataatgtgatccatcgaaggcttaagcattacctgcgcatcaa

SEQ ID NO: 36702 - DNA, 1023 bp, Heterodera glycines
  unsure (1)..(1023): unsure at all n locations
tggaagcgctaaatttgttgagaagcttttgagcgtattacgattttacttacaccattttttctaggcttagatcacatgcgattttcggcactctgataatttnagcgctcataatgggatgtataaaggcgattgtagaaggaattggaagcgctaaaattgtttgagaagctttttgagcgtaattacgatttttacttagaccattttttgctaggcttagatcacatgcgattttcggcactctgataattttagcgctcataatgggatgtataaaggcgattgtagaaggaattggaagcgctaaaattgtttgagaagctttttgagcgtaattacgatttttacttacaccattttttgctaggcttagatcacatgcgattttcggcactctgataattttagcgttcataatgggatgtataaaggcgattgtagaaggaattggaagcgctaaaattgtttgaaaagctttttgagcgtaattacgatttttacttacaccattttttctaggcttagatcacatgcgattttcggcactctgataattttagcgttcataatgggatgtataaaggcgattgtagaaggaattggaagcgctaaaattggttgaaaagctttttgagcgtagttacgatttttacttacaccattttttgctaggcgtagatcacatgcgattttcggcactctgataattttagcgctcataatgggatgtataaaggcgattgtagaaggaattggaagcgctaaaattgtttgagaagctttttgagcgtaattacgatttttacttactccatttttttctaggcttagatcacatgcgattttcggcactctgataattttagcgctcataatgggatgtataaaggcgattgtagaaggaattggaagcgctaaaattgtttgagaagctttttgagcgtaattacgatatttacttagaccattttttgctaggcttagatgacatgcgattttccgcactctgataatttt

SEQ ID NO: 36703 - DNA, 1352 bp, Heterodera glycines
ctgtttgtaatttttttttctcgtgggggaaagatccgaagaacggcggggggggggggatgaactgctcccgtcattttttgccccatcgggacacaacccaaccaaccgttccgttgttttgaacgggctcagcagtccgttggcacgataaaattcgtccagcaccgagaagcggtacagcgttgtgggcgggggcaacgcgtgacggaagaaggcgagtgcgttgtcgctgagtgtgccgttgaaatgaattgtgccacgaaagccgagcacatatgatggctgagcaaccgtgggcacgggaacttcctggaaacaaaaaaataaatgcgaggaaaaatttacaaaaattttttagaaaaacacccaaatactttttaaaatgtcaaatgctaataaatgtatttatattgtgcctgttacgtgaattaaaactcaggaattttcggacttccatttcaaccaatttcgaagccgggacccgaattcgaacgttaagtcaaatcttcaagttttcgagttgcactttttttaattttcgattttttgttggaattcgggcggaattttgcaattttaattctctttcgcttgggttgaaaaaataatataaaaatttgaataattttgccgagtccctatttatacgcacctcaaatcccccgttgtttcccctggggatgatcattcgcgtggtggtcgcattggcaatgaacacgcagtcgccctccacccaatgtgcgttggcgtcgtgcattctccgttgggcaagcgaattgaaatggtgactcacctgatttaaaaggaaaattttcaaatgcaattattatgttgaacaatgttggattggattgacatttgaaatgaaggcgctttttgaattttattaaagataaaccaaaggggaacgaaatggcgtatttgaaagccatttttatggcctctgatcatgaaaatatgatattcatttcaattagttccgaattcctaacccgaattccaactgttgaaaatgaaacgttggtctttccgtgttttgctacccccccccccccccctcccgaaaattttaaattcatattttgggtttaaaagtcactgatacataacgaatatggtgtcatcaaatgtcgaaacaaacaccatcttcgtgatcagttacctctaaaaaccaaaatatgaatttaaaatttttcgcggggtggggttaacaaaacacggcagtacgttttcgaatttgcagtccgaatcggggtagagattcgaaatcggtcgaaatgtatgcctgattcatgctctacgaccttattcccgactttttgtgacaaaaaaaaatatggaaaccaaaa

SEQ ID NO: 36704 - DNA, 635 bp, Heterodera glycines
ggtgaagcgttccgacactctttcaggttaaacaattcaaaaattgaactgacttcataatgttttcagaaatgtcctatctttgccattgttgccaccaacttacgtcagacgagcattcagcgtcattgtcggcaccgcccctatggagatggaacagtttctcctctactttgcgaggacatacatcggaatgacgcagcaacagctgcttgacggtgacaatgcgtttggagttcgtcctggtggtctttctccattttcgtgtccgttttttcattttgttttatttttctttaacttgcttttaagcgtttgctgggacatcattttgttctgttgaatccgaccacgcatactcacggcagcccttacaatttggcatcgactcgcccgccccctcaacactatcatggccgtcaacagtggagcaaaactcgccgttggtgcagtactcattgagttcatcgtcaacgacgacactgctgccaggcatacccaaatttattaaacttttcatttttataattttagtccgtccctgggaagaacccgtcgtccgtcgcgcactgttcccaattccatattggaacgtgcactcacatgcggcttctgccctcgcgagaaccaacaat

SEQ ID NO: 36705 - DNA, 1277 bp, Heterodera glycines
aaaaaatttgtgactaaagtgaggggattatcgggcgattttatgaaaggccacagcataaattttgaaagtgccattaccggctgtacaattgcttttgaagcaatagttgacccctacagggcattctttgacttcgaatgtttcgaccacaactccggttgatccatgtgcgcatttcaatgcttttcgttaaaaataattattatttaaaattaaaaaaataccaccgccacaaaagttggggagaaaagcgaacgaaataaaaattgcggcaaccgttggaagaggggcgaacaaagtcattttgagaatatttattgccaaaatattgtttaaaaatacaaaataataataatgataattaagactattattttaagcaataattaattaataaaaatgaattcgtttgaaaatcagcgcatccgaaattcattttaatgaatattggaaaatgaaaaatgtgaatgattggagcgaattgcgagctgtgattcactggaaaagggctgatcagatgcctcggaataataatacaatttatttgaatatttatttcagatttttatggttaaccttcgtaaaatatacaaatccatgtatgtacaccaactccgtaaaaaacaccaaaatacgctccaatacctcaaaatagttttgagaaaattataggaaattgaaaaactaaaaatccaaaattttattccaaaaattccactcatgtaaattctctcaattagaaaaattagagccaaataatttttaaagttttgataattaaaatttggtgcttttttccattgaattatcaaaatattaatttcttattaaattttaagtcaaatgcgcacaattttattcaacctttgaagtgaccgaagcaataaattattaaaaagcaatatttgttaaatggaatcgcccattcttccccaactccgccgtttccgcatcgcttctcctccgcctcgtctctcactgcgctgtccgcctcgtcctcgtccctctcactccggtgttcgcttccgcctcgtcctcgtctctctcattccggtgtccgcttccgcctcgtcctcgtccctccgcctcgtccctctccccctacgcctcctcacgctccgtctcgtctccctcgcccgtgccgcactcccctggcgttgtgccctcctgctgctgtttgcgtctgtgtgcagaacgggaggacacaacttggagttcatagaggaattcggagaagggcacatctgtagaagacacgctgttgaggctggtgg

SEQ ID NO: 36706 - DNA, 1081 bp, Heterodera glycines
agttgtacatttggctgcaaatggaagaaaaaaaagttaaaaattagaggcaatgaaaaaataaatgaaaagattaaagctaattataagtgtgagcaatcggtaattaacacactaaaatgagagacacgacttaaaactgtaaaatctaaattttatttccgactttaacccaccgataagccattttgacggcataaatttgcacatttggtcgcgtcgtcataatcctgtcaaaagtttatgtaaatgcgtatgaaatatcgaaaaggaactcactcgatcagaatatgctctttggtgccaagtccctaaaatgagaaaacgattgccagaggcatcaaacggagtgaatgaacagagcaaaaagaaaaatgaaggggtaattaagcccgattaattggcatcgaacccaaattagagcaacaatttttcttttcacaaccattacacgcaaaacgcacctccatcgaacggcgcaattgtgcggcgtcgtacactgccggcagttccataagtgcaataattaagtgttcgaagtcgcctgttagttcgcttttcaactccgggatcagttccttgccatacatttgcttgaacgtgcggatgacctgaaacgaaaaccacaaaatttaaaacagtcagtcagaactttcgaaagttaagacggtcccggggttttgaaaatctcaggtcccggtcacggtcccggtagggcaaccgggaaccgggaaaaacaagcactggtaagaatggggtctgagtgaaaaattagtgaagaaaattggagtcaaagagaaaaataaaaaataataattaatatattctttaaaagtaacactgcgcaagtgtgcaaatggcctaatggctagtctccttgactttcccttcttctttcccctggttcaatccctctacagaaattagattattttcaattttttttttgtatactcgtgggtttcctataaagaaaatatgattcctcatagttttttttttaaattgatacatattttatcattttttaaatgaaaatcatagcgaattgagcttaataatcgcaaaaaccaaccttttt

SEQ ID NO: 36707 - DNA, 1090 bp, Heterodera glycines
  unsure (1)..(1090): unsure at all n locations
atttttgaccattttttgacccttttcattcaatgagtcgaccaancgtcggattaatggctgaatgatgttgggaaatttttcttccagtaaaaaatcgtgaaggcgcttgatggtcggcaatatcacagaagccgttgatttttcgtgggataacttaaaactaataagtttattgagcaaaaagaaattttttactttttgggtttccacgtcaaaaattttaagaattgggcaaatttggcgcaaaagttcgaagtctttgaatgaaatggacggcaatgatgaaattatttccatctcggccatccgaggtttttttggtgcagacaaaattccggcatttctttggtctctttcaaattgcattgccagcaaaacttttttctgctctttgaaagctgccaacattcggtaggtcgaattccatctcgtcggaactgacttaaaattggccgaatttgaattagaatggaaagaaattaccaaaacaagttgctttttcggcatattcaattgctcttggtgtcgctccatacatttcttaatttagggttttcggcattctttagtccactcttttgccttcaagataatttcagaaaggcattgatttttgagcgcatcttgaataaccaaatttaaaaaatggcaacaacactggaaacttaaaagggaacacggaaccattcaaaaacaaatgaaaaaaattgcctgtccttatccaattggcgtgtggccgactgcatattacgagcgttaccacgcacacaacacgcaatataaaaaaccatcaaatggaaattttcaacaaaaaactgctcaaaacttttgtcaatgtcaaccaaattagacattcttggtatcattcgatagccctaacatttctctacaagtcatttaaatttcaaaaaatttggtcaagtttgagcaaagctatggccaaaagtacgcaaggtaacatgttttcacagatttttggccataactttttttaaactctataaaattttttgaaaatttgcaagctaatagaggacacgtagggctatcggataataggaagctctattaattttgctggatctga

SEQ ID NO: 36708 - DNA, 858 bp, Heterodera glycines
cattggtaacgtataaatttttcaaaaataagagatagccatttttctgggatataagataaaattataaattttctgaggaaattaaatggccgattgcgcaccgccctccctatcatgctcgagcggcttttgtaacgtataaaatttctcaaaataagagatagtcatttttcttggatataagataaaattgaaaaattctccgagaaattaaatggcgattgcgcaccgcccttcctatcaagctcgagagctttggtaacgtataaaatttctcaaaataagagatagtcaatttcttggatataagataaatttaaaaattctctgagaaattaaatggcgattgcgcaccgcccctcctatcatgctcgagagcatttgtaacgtataaaatttctcaaaataagagatagtcatttttcttggatataagataaatttaaaaattctctgagaaattaaatggcgattgcgcaccgcccttcctatcatgctcgagagcatttgtaacgtataaaatttctcaaaataagagatagtcatttttcttggatataagataaattttaaaaattctctgagaaattaaatggcgattgcgcaccgccctccctctcacgctcgagcgcttttgtaacggaaaaaatttttcaaaataagagatggccattttttgggatataagataaattaaaaaattttcggagaaattaaatggcgattgcgccccgcccttcctatcaagctggagagcattggtaacgtataaaatttcacaaaataagagatagtcaatttcttggatataagataaaatgaaaattctctgagaaattaaatggcgattgcgca

SEQ ID NO: 36709 - DNA, 811 bp, Heterodera glycines
acatatagaggactgaatgatgtcgaaaaagattgtgtatttacatttaaattcttctgggtacgaataacaaaatactttttgtgggtacgaatttttgtttattgatataattgatgtgtgtatgagtaaatgtgatatatactatacacttaatgttaccgttgccaagtcaaactaatattaaaaaatcattttttgctataaaaagcatagtgaattatagctaagtaaattatgtcacgtgctgatgaaataaaaaaaaatgccgagagcttcaccgttttcgtcttgtgggtacgcagcgtgctggatgttggcactgcggggatgaccatttgtgttaagaaaaataagtttaaatttattttcttagagggttcgaaagcatgctggaattgcggcaagaaaggccacctagaaactagctgtcaccacacgccgtttcggtttaatagaatattaaaccaaatcatattgtttgtttagttatgtccctgtgggttcgtatccaaaatggcaggtccaggacggctgccaaactttctggtaataagacaattgctcgaaacaattcagtttgtttaggtacgacccgaagaacctaaaaggatacattcattcatgcccagttaatccgttttctattcaaaaaggtaaaaatagttatttggatatttatttattcataatatatttaagggggtccgcaacgctgtcatggaaaatgggttaagaaatcgaaatcgaaggggtcgactgaaacgtgtgtctctgaaaaagaaggcacaaattccgagggttcggcgaa

SEQ ID NO: 36710 - DNA, 985 bp, Heterodera glycines
tctaatcaccattgtacctcttctaatcactgttgtacctcttataatcacttttgtacctcttctaatcaccattgtacctcttttaatcacttttgtacctcttctaatcacttttttacctcttctaatcacttttatacttcttttatcactgttgtacctctttaaatcacatttgtacctcttcatcaaatttgtacctcttctaatctctgttgtacctcttctaatcacttttgtacctcttctaatcacttttgtacctcttttatcacttttgtacctctttaaatcacttttgtacctctttaaatcacatttgtacctcttcatcaaatgtgtacctcttctaatcacttttgcaatcccaaattgctttggatcgaacaattactccacaacccataaatatcgggcgcgaagcgcccgtccgactcaacacaatttaaaaaacggccgcgaagcggccgaaaagcacaacaaaaattagaaacgggcgcgaagcgcccgttcgaggacgcgaagggcgcgaagcgcccgtcttgagcctcgatgttgactaaaaacccctaataattttttaaaaattcaaaaaaatctctccaaccaattcgatcaatttgaatcgcttcacagcctaggtagcgaagctcccaaagcgcgaagcgctttttcccagctaaatagccgacggttcacgcacccgctagttaatatatacgttatattgacaaggagtttcgtttgcaaaaacaaaatctcccggccgaaggccgggagcgccctgaaaatagtggaagggtctacaacttttgaggcgcatctgggaaactatagaaaaaattcagcgcggacgactgaatcccggggaccgatttctcatttttctttgcgttgaaggccctaactttttttttaaaaccgaatcaaaaaagtctgctgggagggggtaagttgaagggttttctaaaaagaaaaaaaa

SEQ ID NO: 36711 - DNA, 1298 bp, Heterodera glycines
gtaaaaaatttaatcacaatgggtcaagagtatttttttacaagaaagtcgagagtctcgatagctttttaattggccctagttaaccgtcgagacctttcacttttaattttttgttcagaaaggtacaatcatccgtaacggttctgttcatgtgctgcacccgattcctgcccatcacatttcccgtggtaagtgtagacattttcacagtagtcttgcaactacatactgcgcgaaacccaagattttttcgtctaaatttactataaagtcccaaaaatttcacggctttgccaattagctcgatcaccccactgatccgagacattaattcaacccaatttcggctgatcactgatcagcgatgaccatatattcaaatagctatcattgcggttttccaatcattttgatcaccgagaacagtaatttccaatcacgccactgatcactcaatcaccgctgatcagcgaccgatcaattttgtttcaattaaagttcgccgatcgacgtccgatggtgccaccgcaacggcactgcacgtattgtaccgacgtgatgccgtggcaacggccaaaaacggcactggcgaagatttttgcggcattgaaaatacaatcaacagtgatgagatggcggagaatgaggcgggcatccacgaggacgcttttgtggtgggacaacgtctgatgcgcgagggtgaattgacggtaaaaatgtttggcactggctttaggggaaaaaattcggcactgtcgagagtctcgaccatcaattacaccgataaatattttctattttgagttaaactgacccattatatccagccagaaaacgaatggattttttttgttgctaaatttcgttttaacataaatttaactttttttttaatttggcacaagcaaaggaaaaaacccctaaaatttttcggtctatagcatagatttccaaaaaaagaaaaggttcatttttacagagagaattaaaaaaaattttttaaggcctcggatctgctaaatttcattatgaaatgcctaaaagcaaatatttccacactttagcattaacaaaaacgaaaactcaattaaaaaaaaatttaaagcttctgatttcaacttggcacaccaaaatcagcatttttctccactttagccattaataccaaaaattaagttttctctaatatctaagctagagaaatcgctgaatttagagctctcaagactctcgagtggcacatttttgaaagtgttgccacccatatgtttttaggtggagttggccgtgttcgt

SEQ ID NO: 36712 - DNA, 1381 bp, Heterodera glycines
  unsure (1)..(1381): unsure at all n locations
tgccgtcaattttttgtcaccactgattttgatgtcattgtgacaagcattcgaatcccaacaattttgatgtttttgggttgaaattttctaaaatttgaataatttattttaattttaaatattaaagtttacaattaataaattaacccttttaatatttcacctatcttcaccactttctgctgtgtctccagttcactgatcctttccaaaattgccttctgatcattttgcaactttgttgagtgctgatcaacagaaacttaaattcgggaagaaaatttatttcaaatttaaaaataaaataaattatgcttaattattaaaaaaacagcaaataattttctgtaccgtattgttgggctaactctgcttgaagtaccctctanaaattttttttaaaaattatggcaaatttaaaaaatgtttaaataaaaactcgctttttcgagtcgaagacccttaattaagcacaattgtttcgtttcgcacaattccatttccgttttggcaaagtttagacgaatttcctataatattaataattaaaatttatttccatttttattgtttctgttgcgttcgtccacctcgatctgttgttgatcactgattgattctgggttgtccaatctttgacaaatttgaaaacaatcataacaattctcctctaaaatttcgatttttttttattatgaaatgaaataaattctccaattttgcattcggacattttaataaaaatcgcagcaaaaagccagaatttatattcaaaattagcttcaaagtgaaaagaaattacaattttggtacatttttcagtaaaatataacacaaccaaaatatgtacaaataaaattaaatggccttaaaatgactttaaaatattttacactttgtttgaaagcttcttaaatgcattattattttaattggttttttttactttttggaatttttatgttttttttattataaaagacttcaactgtctaagcccgaacccatggtcggtagtttcgaaattctgatccccagatttttttgttactttttggctatttttccatgacttttttggattttctcgtgactctcattcctaattattattataaacaccatctgaaaaaaggaataatgaactaaaaaaacagagaaagaaaaattgcatctatcataattctcaaaaattattttcttccaactcgtgaatttttgtaactaataaatacgtatcataattataatttttatttttgttcacccatttctttgccaattaacttttctcacgccgttctgctggtgcgaaaatgctgctgtctgacaaagggagagaacttgacatttatttattttttcaaaanattttctg

SEQ ID NO: 36713 - DNA, 1224 bp, Heterodera glycines
ggcggtcttggcctgcattccggcactgggaagcagagtttgtagatggggtcgatgttgtacgcaacagtcaattggcccatcactgaaaaaatatttgggggctaaaattttcaaaaaatcaatctccatataaattatttttaattgtttgtcggggcaaatgacgtctgaaagtgtcccctaactcccaatagcaacaaaaagcccaaccttgcgtgaagtagccgatctctcccgaccgaaccgtctgctgttgttgcaccaaaaatgacaaattttttgcgacctgtgccgcctgctgttgtttctgaagctgcaacagttgcagttgtcgcagttgcaatgcgttggagaagtgcgccatgtcagtggccgtgccgaaaggcggctgctgagacgtgccaggaactgcggcagtgccatccatggtcaaaggggatggccttggcagcggcaaaagttgacggggcagtctttcgctctcgtaacgctgagaaaaaggacgaaaaagcaaagcacaacacggtcaatggcaaccattgtgatgcgaaaatgaagtccggccatgtaaatttttttagttcaaacctacgaaacccgaaaataagaagtttcgactttgtatgtctaacaacgaagtggatgggtgaattaaagtttattttgcgctttcaattatccgatcacaaataacaattggggggatgactgatcaatgccatttttagggaaattccgtgctcagttctttggttgcgtacggtccaccgtttcttgtgtgttgtcacattttgggtcctaaaaattggccaaattatatccaaagtttactattactcattcttccgacttacattcctcggcaggcggatgattgttaggcggatggttgtgcggattcgttgccgtacaattccgttcaccacctgtgccttgcctttgcacgcgcccaacctctgcggaaaacggacgcagttccagtacacctgcccattggctccttcaaattttttgtagtaatcgtgcccttggtagcgcattttcagtcggccttgttgggttggaagaaattgcgggggcggtggtgttggaatttcgtgaaaccaccacattaagacaatattgtagaactaaaaaatgaacctaacaaagatacagactgttcataaacagagctagagagagtaaaattgaagaatatctacacctcacaggggtggg

SEQ ID NO: 36714 - DNA, 601 bp, Heterodera glycines
ttcgaataactattataaaacatttaataatcatttaaatgacaaaaattaagttttttgaataagttttacgtgttttgctccctaaaaatccttaataaaaaaaattttaaatgccttttttatgcctttttcggggttttcgtgccttttcatgcctttttttcaatttttggtgcctattatagttcctttttcgcgatttttgatgcttttttttgcggtctctagtcataacatccaccgttcattacgagctataaattattaatttaaaaaaatttatttgtcatcctgtaaaatttcattaccaatttgggcaaaaatatttttgtccaattcaggccattcatagcaatgggattccagccttttgcaaaaaacttcagcccaaaaagtgatgatctgttcctgttcattgctgagcagatccgatgtgttaatccacttgttaaatgcgtccatggcaatgtcaatttgagtgaatttggacgcattttctttgactttaggccaaaaggcacaaaatttttcgggttcattagacttctgtaatttaattttaatgattatggaaccgaggctttaacataatacaaaa

SEQ ID NO: 36715 - DNA, 834 bp, Heterodera glycines
attgacgataaatagtaaaaaattttgtcattgcattttagatttaaaatgccaaaccaaaaggacggagtgacaggaggcaaacgaattgagcaggaacttgccgtgtttgaccttcccttttacatcgtcgcattggcctttttcctaaaggcgttcttccgtctgtatgacttgctcgtcttcgtcccattcaaattatttgctgaccctgagctggaaaaggaacgctctcgtgagcgaaaggttttgcgctttcaaaagtaaaaaaagcaaataaaacggagggtttgctttaggccatgcccatcgatgggaagccgacttcgtcctggagacacgtcgataccattggcactgctctgtacaccgaactgtttgagggctgtccgacgcttggcaaaatttgggacaaagcggcacagttagtaattggctttatttatttatacatgcgtttatgtttgaattgaggttacaccgtggacacaattgcatgggcacgcgcgacattctcaatgtcgtcgaagaacagcagccggacgggaaagccttccaaaaattggcacttggcaaatgcaattggatgaactacgaacatgttgatgaagtgatcgtggaagtcgcttctggactcagcaatttgggcattgtccaaggacaaaaagtggtcattttctctgagaccaggaaggagtggatgatctcggccatcgcctgcttcaaattgggccttccaagtgcgctttactacaaatgatctattacttttctaaatcgcccttttcagttgtcactgtttatcccacgcttggtgacgaggcaattgctttt

SEQ ID NO: 36716 - DNA, 845 bp, Heterodera glycines
gagtcccagtgattgaaatgttgatgggttgtcccagtgattgaaatgtaggagaattgagtgccagtgattggaatgctggtgagttgagtcccagtgattagaatgctgttgggttgagtcccagtgattgaaatgttgatggattgtcccagtgattgaaatgtaggagaattgagtgccagtgattggaatgctggtggattgagtcccagtgattgaaatactggtgggttgagtcccggcgattgaagaaaaagccaagaaaaggatgcgaggccgcgaagcggccgagccagtcgattttatcattcataatcctataatacaatcgtactacctagcggtggatgcgccgaaggcgctgaccccgctagttaagataaattgtcgaacaaacgcctttttttatttattttaaaataaaattattaaaatggcaacttttgtcgtttcccaaaattaaggcatttaaaaatgaactaattagaatttatttatttttaaaaatattgttggtcttttgtccgtgggtcttctgtcagtgtgggtctttcgtctgtgggtcttttgagagttggccttttgtctgttgtgggtcttctgagttgacacccaattacttcaccgattttcgattttttttgtgttcattttcccaagggcagttcagcagcagcttttattcaattggtggcaatgcccacccattctccattttcattttcattctattcatcagatttaaatgggcttttgtgcacaatttacggccagtcaccacacacgaccacactcatcacattactaattgttagtaaaagacaaaaattttacatttaatt

SEQ ID NO: 36717 - DNA, 1093 bp, Heterodera glycines
aatgagacatttcaattgcatttttaatgaatggcacgacaattttttttgttagtgttaaaattgacgaaatttgccgacggaaaatggctgaaagtgccattattaatggtgcatggaatttgccttgtgggcacaaaaaataatagttgaaaagtgccgagacaaatggggagaaaaatagtgccaaaacaggaaacgcaatattaaaaaatagaaaaatggattcccgggggattttcgggattactgatcacaaattttactctgtttcttcaaccaaatcagaacccttaaatgagaaaattgtgttttaaaaatttaaattttcgactttttgttcgatgtcgggttagagatttgggaattggtgaaaatcaaaacaaaccactcatgatacagtctttgaagaaactcacaattttatggttaaaatcaaaaacttaattttcttatataggccaaaaaaatgttgccacaataaattgagaggaagcaaaaaaaaggcatttctgcgaaaaaaccccaagggaattggcggcggcgaatgccggcgcacttttcacgcttctcttttaattatttataaattagcggaaagggacaaaaaagaaaagaaaagcagcacccaatgtctgggcaatacaaagataaataaaataaataaaagataaaatttaaatttaaaaaaaaaacatattcttataggggagttctatcatgaattacatcacgaaaaatgaacgggcgaagtgaaaacaaataattaaaaagaagggcgggggactttagaagcgtgtaatctttgctttcaaatatattaaaacttttttttgcagaatatttggccaaaaagggaaacagcaaattaatgttgaaagtgccaatggcactctccgtttttcagagggtttatgccttttaaaatccggcacattaatccgttgtccatcacgtgcgatgtctagaccatcttaacatttcattttctaaagcacaaagttcgattccgttactgctgtttgtcagagtaaaaaaaatcagacaaattaaaaaatcaaatttaaaaaaaggaataaaaattgaaagacca

SEQ ID NO: 36718 - DNA, 823 bp, Heterodera glycines
tccgattgctcatttttaggaatgcttttcccctcctcttctttgtgtgttgacatttaacataaggatgtgttgtaattgagcctataaaatcgtttttattctctttgttttgccatattccatccaattaaattaaaattttatcattttttcaaaaataattttattttatttccaaatttcaatttggcactttcattgtttctaattttaattacggtcttttaatgcatttaataatggcataatattaattaatttatttaaattaaatattaaattccctttttccccatttttccaacttttttttcttatgtaaatttttctctctttttccccattttttctcctcaagtgccttttatttttctcgagaatggtttcgttttgtcctaaccattctcgagcatttttccacgtaaaactctcgaaaatccgtctcaaactgcgggaagggcaaacaaagcgaaatttttgggttttttaacgttttttagggggcaaaaggcaccattcattcattctgctcaaagcgttcaacctcagtacatttacaataattatattcagtgtttgtattgtgtggtgtgtcatatgtataattttgggtcccttttcgaaattttaattttattaatttttaattttttgaattttaatttggttaattagcattttgccttaaataatgaataaaaaatagatattttgctatttttaaagctacaattagtgtgtaaagtgttttaatattggaaccttaatttttattttttccattttcattttcccccgataaaaaatgccttggcttaaa

SEQ ID NO: 36719 - DNA, 962 bp, Heterodera glycines
aaaaatcctattctctgaaagtcactattaaatccctaccccttccttggataccaacttttgtcttctgttgtagcgtgaacaaagcactaatagtgtgtttgaaaacgcacgaaaaatagttcttgacaaaaaatggctatctctgaaagtcactattaaatccctaccgggaattggacaccaacttttgtcttctattgtagcggtgaataaagcactaatagtgtgtttgaaaacgcacgaaaaatagttattgacaaaaaatcgctatctctgaaagtcactattaaatccctaccgggaattggacaccaacttttgtcttctattgtagcggtgaataaagcactaatagtgtgtttgaaaacgcacgaaaaatagttctagacaaaaaatggctatctctgaaagtcactattaaatccctaccgggaattggacaccaacttttgtcttctattgtagcggtgaataaagcactaatagtgtgtttgaaaacgcacgaaaaatagttattgacaaaaaatggctatctctgaaagtcactattaaatccctaccgggaattggacaccaacttttgtcttctattgtagcggtgaataaagcactaatagtgtgtttgaaaacgcacgaaaaatagttattgacaaaaaatcctatctctgaaagtcactattaaatccctaccgggaattggacaccaacttttgtcttctattgtagcggtgaataaagcactaatagtgtgtttgaaaacgcacgaaaaatagttcttgacaaaaaatggctatctctgaaagtcactattaaatccctaccgggaattggacaccaacttttgtcttctattgtagcggtgaataaagcactaatagtgtgtttgagaaacgcacgaaaatagttattgacaaaaaatcctatctctgaaagtcactatttaaatccctaccgggaat

SEQ ID NO: 36720 - DNA, 988 bp, Heterodera glycines
  unsure (1)..(988): unsure at all n locations
tggaatatctattaaatttaaaaattatttgaaaaataaaatggccacggcgcaccgcacttcgtttcatgttcgagagcgtttgttgcatagaaaatttctcaaaaaaatagatagccatttttctggaatatctattaaatttaaaaattatttgaaaaataaaatggccacggcgcaccgcacttcgtttcatgttcgagagcgtttgttgcatagaaaatttctcaaaaaaagagagccatttttctggaatatgtattaaatttaaaaattatttgaaaaataaaatggccacggcgcaccgcacttcgtttcatgttcgagagcgtttgttgcatagaaaatttctcaaaaaaatagatagccatttttctggaatatctattaaatttaaaaattatttgaaaaataaaatggccacggcgcaccgcacttcgtttcatgttcgagagcgtttgttgcatagaaaatttctcaaaaaaagagatagccatttttctggaatatctattaaatttaaaaattatttgaaaaataaaatggccacggcgcaccgcacttcgtttcatgttcgagagcgtttgttgcatagaaaatttctcaaaaaaagagatagccatttttctggaatatgtattaaatttaaaaattatttgaaaaataaaatggccacggcgcaccgcacttcgtttcatgttcgagagcgtttgttgcatagaaaatttctcaaaaaaagagatagccatttttctggaatatatattaaatttaaaaattatttgaaaaataaaatggccacggcgcaccgcacttcgtttcatgttcgagagcgtttgttgcatagaanatttctcaaaaaaatagatagccatttttctggaatatctattaaatttaaaaattatgtgaaaaataaaatggccacggcgcaccgcacttcgtctcatgttcgagagcgtttgttgcatagaaaatttctcaaaaa

SEQ ID NO: 36721 - DNA, 514 bp, Heterodera glycines
aaaattgccgaaattctgtcttaataatttacctccactaatgtcagacattcaaaaagaatcagaggaaaaaatggcaaaagcaatttttaaatttaatttttttttccttttttcagtttcatttccggcgacggttggctggcggtgttcgatttgctcccgccttctcaacttggccttggattttttttattggcctattttaatggcaaatcgaccttgtgttttcaaaactttcccacggttcctatcggcgtgccggacctctcaaatttttcacaaatattcttaaagccaattagggtttaagaaaatcactaaatttatcctaaaggcatacatataatacaacacaaaagttgatcaccgcaacaaaaaataacaattttataaacgtcaaattaattctccaatatcgcaattcaaattgatcggtctcttctcaacaattcattcattcacttttgttgctgatcacttgggccgggagcgtcgagaaggctaaaaatcg

SEQ ID NO: 36722 - DNA, 878 bp, Heterodera glycines
ctaaagaacttattaaataattgaaaaattattcttaagctagaaatatgaattttagcaaaaaaattaatatgaggcatttattaattcattaattcaaggaaaacacgtgcaaaagaataaaaaatacaaaaaaatctctataaattaaaaaagaactataaaatatttaatatataataaaaaaatttaaatagtcaatttaaaaaatttgttaaaatatacattttagtaagcaggatattgattgttttagtaaattaaaaaactaataattatttaaataaaaggttaaaaaatattttattcaaatcaattaatcatttaatcacatataaatatgaaattaaaattatataataaaatatagtaaaaatattcgtacaaagaaaataccctttaaaactaatcataaatttaaataaaaataattttattttaaatataaattaataactaaatataatatttatttttaaaatttcgtaaaatataaaaattaattattcttataatttaaaaatgagcaatatttattttaaaaacatgagagaaaaaaagagaaacaaatctaaattaaaataataaaagcttcaaaaaaatgtgataaaaaaggaaacgcaacatgatattaaatgaaaaaaatgaataaaaaatatattataaatccattttgatatttttagtgtttatagtctttaaggaaatattaaatacgacggattttgaaaggatatattacagttttagtcaatatttttgtcaatatttgttcatattgagttaaaattttgcattaaaatctcttattataagggctatctgtctgcaatataaggaaatattttataccgtttttttctacagaaaaagtgcag

SEQ ID NO: 36723 - DNA, 982 bp, Heterodera glycines
tgaaacgcaccaaattttatttacatgctagtttaggcactctgatgctttttctatcaaaaagggagatgaataaatttttaaaaatttttaattcctttttaaacaggccaaaaagtttaggcttaacttttttttcagaaacttatcagaagcgccccaaactttgcagggatactgaaaggaaaagaattaacctgttttatcacattagcttgtcatcagtttttataaaaaattttcaaaattctgagtctcctattattttatttttttttcaaaattctgaagggcggggggggggggcggtgttagaagtgtaccttcctatagaacttgtcagaaagagaaaaagaagaaggggaatatgaatacggacaattcatgcattcattgatttgcagagcccatttgttacctctgcgaggcgcacctattcttttccgttcttaaattgtaaatattctgtccatttcccaccacttacgtttcttaaaaatgaaaatgtcgctggaaaaccgatagaatctcttttttctcttcttttatttaagtaactttacaagtcttttattctaattagcaccacattcgatcaaaaaatgaattgtgagaaatcccaattgctcaaattaatccagtgatgttttgatatgttttttcatagaaaatttacaggagttgtcgagggttttcaattttaagggaaacgctttttgatgaatttattctctcgaaaattcccgtcaagcgaatcctaaacttttgctgagcgagtgttgtaaaatggcagtttaaaaggaaaaaaattgtatccatttttggcaaaatgttaaaattattacactgccattaggtattattatattagttaattaaataatttgaatggcttctctttacgctttggagaagtgggttttcccccattcatatttttggcattatgccactaatgaggaaattaaataaattctctttg

SEQ ID NO: 36724 - DNA, 910 bp, Heterodera glycines
tatggatggattttttgtgggtgcgaaatttaaattgaatttttagactgaatttgtttgaaatttagaggctaaaaattttttggatagccatggtttttcaattttttcgatatttaacagcgcaaaattttcgtggcatattttagttttttttttctttcagtttttcattttctgtgattaaaatgggtttttctaacccaacaaattttgattgattttcaatttttagacaaaaaaaaaattgcgttttccaatttttcaaagcacaaggcatttaaatttaattttgattttcaacggcagaaaaacagtgacatattatcaatttttcagcttttaggccttccaggttgcaattttcagcattttttgttgtaacctaaattaggaaaatgaaaaccctatttagtaatatttccaattagccgtgccgtccgtgtgctgtgccgttgttgtaaccccccgttttgccgccgttggcactattcactcattgctaatttgtttatgtttttgtcccctgcacccggcttctcccccgccgcccacctgcgattggtttgcccggcggcgcaacgcggccgatgtgacaaaagtgcttcgggcattattcggctggcgctgtgccgtgccgacagccgccgcttctcgttgtgcaaaaggctaatatgtatatgtaaatatgtttttgtagggaggacggaatgccaaagggacaaaaggccgccgccgtcaaagggcgcagctaattagggcagctaatcagtgaggtgtgaagctaatgccctcagggcaaaattaattgagtgaaattccaactagccgaaaaagccaattttgggcgagaaaattaagaaaaaacagaatttttaaacatcttagatgtttgtttttatcgattaaa

SEQ ID NO: 36725 - DNA, 793 bp, Heterodera glycines
gggggtagtggccgaattttgttctgattttgatattttaaaaaaattttgcttttttttcaaatacaaaataatgttcttgttgtgttgatttatttatttcttctaaattttaaaaataggtgaaaaaataatatttatcggccccatgggcaatccaccaatttgatcagtaggatttctaattttatgtgtcaaaaattgcaaacaatgcacataaaaaagtgtaaaatatgtccataaatctaatcaaactgatgaacgaatttgtcaaatttcttctaataagctaaaagtaaaaaataaaataaaataacgattaaaaataatttattaaatatttaaaagaaaaatacgaataaagctcaaatttattaatttgaaaaaattaagtaaaagtcaaaagggcccgttttaataataggggctgttataatagaggttttcttaaaaaaatgcctaaacattcaaataatcgagaaatattcacggatatgcatatttaaatgggcaatttttggattttaaaatagggaaaactttaatgaagaaattggaaatacgaaattggataatttgcggaggagagaaaggaaagggaacaaaacagaaaaaaagaataaaaaagggaggggggggagcaccagagcagaaactattaattaattaattgagcgtaatctattatgtatattgccattaattgctcagatttcggtttttaattttaaacattgctaatataagtgtttagtttctgctctgtgctcccccccccctttaatttcttttt

SEQ ID NO: 36726 - DNA, 947 bp, Heterodera glycines
ttgtttgtccgtcgtctcgtaaaggagcacaactccgccctggttatccttgctgctcaacaccattttccaacgtccatcaggccccataaaaactgtgacaaatcattatttgtatttttaaattgcaaaaatgccatattttaccgctagggtcccgaaaatccggcattaggccaacaccgggcggcacatccgggatcagcgtggtggccgcacgatctggcatgatgccattcgttgtggtcactgctctttggaattgccatggcacacgatctaatgatttataaaagatccctttatcaaacaaataaaaaatttccaaaaagaaaagtttttattattattttatattattttacgggtaaagaaaattttaaaaaatattattttttgtaggggtagcttactcaataattgttgaatgcacttttatttatttgtcaataaagaaaaagtccacaaaagggaaaaatccgcttacattgaggacaaaacattaattaaaatgtcctcaagaaagcgcataaacaattaaaaacgagatcgccgccaaaaaataaaatataatgtgagatcaataaaaaataaaaataatgaccaaataactttttgtttaatgaattaataattcgacttttatttttccggtcaatcttacagaaatgaaatagttttaattttatttttaaattgatttaatgagtttatttcaataagctttttatcgagttggttccaaatttttgttacccgccccgcaaaaggtataaattttttgcctaatttatatttcgagttaagtctataaaagggaatgttaaagaaggtttaagtatttcaaagggattcagatctgttcggccataaattattttatgagccatgaacagatcagacagctttcgcctgcttttcagtgttggcagttgaaggtattctaa

SEQ ID NO: 36727 - DNA, 858 bp, Heterodera glycines
cctttattgcctatctccaagatgtcgaagaaccattcgatgtcgagtaacatccggtgctaccagtgagtggcggcgtgctgggcccgtaccaaaagaaggaggtaactttacctgggtaaagttacccgtgtaacttaacccggttaagttacctccatctgtgggttaactcgtacaaaatgaacgttaccgggttctcgctgggcttacccacatctgcgggtaaggttacccgttacccagttcttttagtgagggtaacgttaaaaattattttttaaatttaaattttaattgaaaataaatttttattttttgctcaatatatatgatcaaaaaaaactttcaaagtttgattgcttaagtaaatcgattctgtgtaatctctcctctttttttaatgccggacaatttcctttgtctctcattcataagtgctctatcggtgagcaccgccggttcaacagtactatcaccaacaacatttccgttcccttcatcaattaaattctcgggctcaatttctgtctcgggctgatcttcaatttacatattatatttcattggatagaggagaatttgaagaacaaaataccaagaggaattagttaggaaaaatatttaagtatttttaaaatttttttgaaaaattgagctcatattgttaccctggtatgggtcagggtagaaaagttacccgcagctgagggtagggttaccagttactcgattcttttagtgcgggttaaaaagttacccgcagctgagggtaagttaaccgggttaagttaccctcaactaatgctagttcttttagtgcggagctggtgttcaatgaggcgatcgtcagtcatg

SEQ ID NO: 36728 - DNA, 1370 bp, Heterodera glycines
agtaatggccataccttttggttagaaaaaattttttcaaaaaaaacgccagaaaaaaatgcgggaaaatttcccgcgccagccccggacaaacaccgggtttgggacaaacaccgggggcgacccttgttttcacacaccctcccaaaggtgtgaaaacacatgttttcacacctgggacggttgggacgctccccgtgggataactactgtcatttatctacgttaatcttactggttttgatcacgatttttgaaaaatcttgatcattgcaagaaacatgaatttttttttctaatatcgatcaaaatttcgtttctgaaccaaagtgatttaaattcaatgttttcaaaaagtttctgcataatttttttttattttatagccaaatgaacgtgaaattgagtgatggtaaaggcagctttgcggaccgtgttttgttgatggaacggtaaatttgaaatttaattgaaaatgccaaaaagaatatttacttaattgaatcacatttatttcaaatatttgccaatttttatttcttaatatttgttttttcagtctttgtccaatggtcaacaaaatgggagtagctgcaaacaaaagcaacctgatcatgcagccacttgagtaagttttattgaaaattcaaatccttcaatatttcttataaaattatttgagcataattagtgtggggtttaaaacgattttgtgtttttaatattttggcaaaagatattcaatagccaataaattttctcgaagcctttatatttataaaattctgtacatttttacaaaattggcaaaaaaaaaaaatttttttttgacaataatataaatggcaattaacgaacttagttaaatttttatttcatttgtttttaaaaaataatttaatttattactaaaatttactgctcaactcattaattttttttaatttaatgcaatattataagttttgcaagttaattagggggcaatttcaattatttctgcaattaatattatttttaaatgacatatgtttgtttgttttttttcatttagatacaaatacgagaatgtgcgcatggaaatcatgcacagctgcgccggaggagaaccaaaaaaagtgcattttttggataattatacaaatatttgtttttccctgaaacataatatttcaaaaaataaaattgtaccctttttagggatcaaatcattgatatatttttttagcaattctttaattaatttcctgaaattataaatttttactctttttttctttattttcctgtgactgtttttcgagttttttggcacttattttcggcattatggctcttaattaaaaaatttcaatcaaaattttattgtt

SEQ ID NO: 36729 - DNA, 1039 bp, Heterodera glycines
  unsure (1)..(1039): unsure at all n locations
ttttgagcccgggcaatttaggctaatttttgaaaattcataactcgcttcagggttggacaatgttagtggataaagcttaaaaaataaagaaaaatcaggagaatttatttgttttatttgggttttctaattaaataggaaaaaaattttccagaaattctggaaattttcaatttttcagaaaaaattcaacactcgattctgaaaaggagttttcataaattaaaaaaactaaaaaaccgcaattttttgcattaaaagcagggttcgtatctgtccttatttataagatttgtccttatttggagggtccaaatcttacaaaataaaaatgtccttatttgtaagcttatttcgggctattgttcttattttgttcttatttcttaaatatattcataatttggaaatttatggccaaatgttcttattttacctataaattttaaaaaaattttccccggcggcgcctatcggcaccgtcggacgctaaaaatactttattttctttaaaattggctcaaaaatcaccaaaatttatgcaatttttagacaaaatctgttaacaaatcgcattaaaaatcataaaaaaatttcccaacggcgcctatcggcgccaccggacgcccctgtccaacctccaaaattttttttaaaaatgtcgcaaaaaaagccttttgaatgtaaaaatggtcgccaattgtctcaaaatcgcaaaaattgataatttttgatgaaaatctgttaacaaatcaaagaaataacaaaattnntttccggcggcgcctatcggcaccgccggacccactcccctcccccgttctccaaaatttcttggaaaaatgcgccgtaaaaaatttgttaaaaatttaattttttttagataaaaattgcactaaatttgctatttttctccccaaaattgttaaaaataatcatgggaggtgaaaaatataatatttgatacatttttgatcgaataaattgtaaaaatatctgatttgaagcaattttgcgaaatgttcttatttttgac

SEQ ID NO: 36730 - DNA, 909 bp, Heterodera glycines
ggacgaacaggtcaaatcagacgaacaatgaaagaaggcatggcaaaagagcagacgaaaccaatcaaaacacagaagaagtggtgaaacatgggttttaaaaatgattcattcgggggcatcatcatgtagtgttgggaatttccaatcattggcattttttccgacttttccattcccgttacaatactccaaccatttccttcatcatcttttacagtactccgtcgcgaccgtctcttttccgtgtccaattccatcagcagcacaatttgctgccgctgccccaccaccagcaagacgcactcgcaggaacatctgtcgctgaacaacttcaacttcataaacaatcgccacagaaactgtataataagaagcattctctacccgcgctgcacccatcgaacagtttgacaatggcacagcaccaacagaagcagcaaacaatgccgaatccattgacaaagggtaaaagggggaagactataattagaagacacaactgatcagtgttaaaagtgatcaatcatttaaaatcattattattaaatggaaagggattaaaaagtgaaattgagctaaaattaaaaataaatttcttagatttttttgattaagctaattgcctcattacttttcgccctcagagtttgtgcagcgcaaagtgcaccaatgggacttggaggaggaatttgaggaatgttttgtggccgaagaggtggacgaactcactttcgcaagtcttcgcgaatcggaggtgcaccaaaacagtttttaatattaatctgttaattaattatgtatttcaatgttttcaattcaaaagcacagattcgggaagtgttggcccggcacggccgtgccaatgatttggctgtccaccaacgctttttggaattagtcgcggac

SEQ ID NO: 36731 - DNA, 626 bp, Heterodera glycines
aatttttcagaaatttccctcttttggatgaaaatacgcccccaaatcagaacatttcttagaaacaagaacataaagaaaccctgtactaatcagaaaaaaaaataaattcaaatgaaaacgtcaaccggtgtcgaactcataacaaaaaacactgttagttgtgaagcactaaccactaaaccaaaatatattggaacttcatagcaagatttactttatttcataaaaatttgtcaaagatggtaaaaaattaaaagttttatgaattttttgctttatatcccacgaatatgccattcttaggggtgtattttcacccccgcgcccccgcgggggtgaaggtcgcgggggcgggggttgcgggggtctgagtcgcgggggcgggggtgaggccaaaaaacctgtcccgcccccggcgggggcgggggtgacgggggcggggctcgaaccctagaaacaatacatattttcatataactttttctaaagtcaaagcgatggcaaaatttgattttcatagtaatcagtagggatgggaactaaatgaaaatatgttaacaaatcagaaagaaattacaaacatttttccggcggcgcctatcggcaccgccggaccccgtccc

SEQ ID NO: 36732 - DNA, 984 bp, Heterodera glycines
  unsure (1)..(984): unsure at all n locations
ttcgtttaaaaattggttccgaaattttttgactctaagaaattaaattgtaaaaattcaaaacttaaaattctcctctgaagtttcgaacttggcttaaccatgtttttaagtcccaccgtgaggagggacagttccaaaatttgtaccacattttactgtggaaagtccaagtaccttaattggacaattacttgtcaacgaacacagtcgcctctggcctcttatggaacagaaaaggggaattatcagatggggtgcgtcccttcctaaaaattactctcgtcttctaccctccctctctttttgtgcactgtttcgtttaaaaaattggttccgaaattttttgactctaagaaattaaattgtaaaaattcaaaacttaaattctcctctgaagttttgaacttggctctatcctgcttttaagtcccaccgtgaggcgggacagttccaaaatttgtaccacattttactgtggaaagtacaagtaccttaattggacaattacttgtcaacgaacacagtcgcctctggcctcttatggaacagaaaagggtgaatatcagatggggtgcgtcccttcctaaaaatttctctcgtcttctaccctccctctctttttgtgcactgtttcgtttaaaaaattggttccgaaattttttgactctaagaaattaaattgtaaaaattcaaaacttaaaattctcctctgaagtttcgaacttggcttaaccatgtttttaagtcccaccgtgaggagggacagttccaaaatttgtaccacattttactgtggaaagtccaagtaccttaattggacaattacttgtcaacgaacacagtcgcctctggcctcttatggaacagaaaaggggattatcagatggggtgcgtcccttcctaaaaattactctcgtcttctaccctccctctctttttgtgcactgttttcgtttaaaaaaattgnttcccgaatttttt

SEQ ID NO: 36733 - DNA, 982 bp, Heterodera glycines
agtcgacgatcacgacgacagaaatacagcaacaaccgttcgtccttcgctattggtcattattcaaagtgctgaactgatggaaaatggcaaaaggcaaagcgaacagagtcagaggatggaagccacaaaaacggaggagaagaagccattgaagcaaataatgtttctggacgattatgaacaagttcaaggagaggaagagggaaacgaaatggcaaatggaagggaagggcagcggagagaagggggaaaagagggggaggaggaggaaaaggaggaagaggcatttgaggaggaagagaatgaggaggaggaggaaatgttcttcttcaaaccgagcggtgggcacgccctaagtaaggacaaacggacgaggaaatgggccatcccaaaaggacactccgttttaagggtgccgcaaggatatttcccaaacccgccaaattggcgcttattgacaaaaaaagcattgttttaaattttaagcaacctaattaagcaaattttataccatttaatagctcttattcaatactctctgtataggctataaatttctattcactcatcaaaaattttaaaattgctggccaatagaaaataccgaaagcttggatttaaaatttttgattttgagaaaaataaggacgtcgaatttatgaaatgctaatggtggcggaataaaggaaatggccaaacacgctttttaaggaggggaacgtcgaacagaagaacggaacggaagagcaggaagcagagacccatttcgaattgtggtccatgaaacgagcaaaaagttatgaaatgagagacaaatgacgaaaatatttgagccattcattttcaaattaaaattattttatcgaaaattattttattttttacaaatcggtcgataccgtatatgctctaattatagcccagtctctattaatcccgcagtctccaatatcccccagtctaagaggtgttttgaaaa

SEQ ID NO: 36734 - DNA, 723 bp, Heterodera glycines
agtaccccaaacggacacttgaaaaaatcgatttattctttttttcggggcagtccccccgaaccgatgcgcccagatttatggggagaccgaatccttcgggaatagcttccctatagcctgtactttaattctgcgttggatttttgctccccataattgtttgagtaccccaaacggacacttgaaaaaatcgatttttttgttttcggggcagtccccccgaaccgatgcgcccagatttatggggagaccgaatccttcgggaatagcttccctatagtctgtactttaattctgcgttggatttttgctccccataattgtttgagtaccccaaacggacacttgaaaaaatcgatttttttatttcataaatattttatcagaaaatgctctgaaacgcaccaaattttatttacatgttagtttaggcactctgatgctttttctatcgaaaagggagatgaataaaatttttaaaaaatttttaaattcctttttaaacaagccaaaaagtttaggcttaacttttttttcagaaactgatcagaagcgcaccaaactttgcagggatactgaaaggaagagaaatctcctattttaaatattatctagtcagttcatttaaataatttttatccaaaaaatttttttttgggttttcggggcagtccccctgaaccgatgcgcccagatttatggggagacggaatccttcgg

SEQ ID NO: 36735 - DNA, 1197 bp, Heterodera glycines
taaaaaataaatctaaaaagaataaacattaatgtatttgaaaacataaatctatttgtaataataattgtattctaaaaaatattaaaagtaagcgttagttaattataacgtagaaaagaattatcatttgagttataaaattcattttatttaaatgttaattaattacttttaagattttattttgtattaattataatttgtttatgaattttatgccgttatttgtatgatttgttgttttttttattttacaataaaaatacatttaaaattgaacatgttaaaaaacagtaaagaacaataaaacatcacgactttttgccccatcatacatgcgatgtgctaaggccttaataagaaagtgagaaatgaatttaaaaataattttttagcttaaattttttagcttaattattctataatttatttacgactttattgtaatattttcactataagaatttaatgttcgaaatttttattttaaatattttattaaaatttcgaattttaaaactttgttttatttttataaaataaatacttttatagagcttgttaaaaaggttttatttttcaattttcttatttatatattaaaattcagaaatgaatattttttctaaaatttttattaagtaaattcaagtttaaaatacattgtttttataaataaaaatgagattttaattttaagcattaaaaattatattgtctaattctttatatatatatattaacacgtcaatattcgttttttggatttgctttaatatattaaattatttatttttgaaaaattttttatgtttttgtagtgctcatcttctatggcaataattttttcctttactgcgatgaaccgaataatatgtactaattgttatttcttcaattttattcaaattaaaaagtaaacaacagatgtgcagatttaagataacgatcctttagctgaaaattaaaatttactggccaatttgcactcttatttgatcatattttccatcgcatgtaacaaagaattaaaaaaaatatattaaaaaaaataataacagaatttattttcaatataattatctatttaataaacagttccaaataaaaaatattttatttaatgaaaataatttactaaatgacattttgccaacattttaaaaaaattatttctcagtgacgaaacgatca

SEQ ID NO: 36736 - DNA, 690 bp, Heterodera glycines
ccatgtggctgttcatgggcgaaaagtgcgcactctctttggttggcattctgttcaatgccattttggtggcctctactgtaaaatcgaagtaagacagtacggtattgaatattgggttgtcatcattaagttagtttggtttttctccatcctgaccagggcctaggaatgtgaatgttgtaaggtttgttcaggaaagctaatttgtgcaaaaattgttctcgcaattgcacattatagatttgttgtaaattcaaatggaaattttagaaaaccaggaccgaatcaatgagaaatgtgcttttctaattttgacaatctaaaagaaaaaaagaaaaatttagaatttagaattttttttataaaaaagtccaagtggtatgttttgatattttaaaaaatttaaattaaaaataattaagaaatttacaaataatttaattataagaactaaaaaacaaatttaaacgaatagaaggatttgtaattttcgattttgaggcatttttgtatattctttcatattttatgaggcttagttagaagaagtgatcagtcactctaagtattgatttatgaattaattttattttatggcacaggaagtaacccaaaaactgaacttttatgttcacttaaaatcgtctcattttaattcagaaaccttaaaagcatgtgcaatttgct

SEQ ID NO: 36737 - DNA, 371 bp, Heterodera glycines
aaattttaaggtctgacgcaaaatttttttgatcccgaatgtaccgaaattataattttgcattttcctccccaaattatcaaaattgataatatgagactaaaaaatataaatttgatacctttttgatcgaataaattgtaaaaataactgatttgaaaaaggttgcaaatgttcacatttttgatactaaaatcttattttttgggcttggtgttcatggtggaagccctggtttaaaaatacctggaggggggagggggtttaaccgaaatattgcgaacccgtctcaacatcgaatttgaccaccattttttttgcggcgctctttttcaaaaaaacttttggggaacagaaggggggatgggcgg

SEQ ID NO: 36738 - DNA, 1067 bp, Heterodera glycines
tgcagaaggttcatcttaaactttttgtgcatttttttgcttttttttgcgattttggtgccttattccgggcacgtaattttcgtgcctttttgacgtatggtgcttttttaatgcctttttcggtattttttaaaaaaattgtaaatttttgaaacttttgcaactttttctatcacattttattacaatttccaaaaattttccggcaaatttaaacactcaaatttgaaataagataatgattagggtcgcgacttttagtgacgaaacatgttgaaatagttaactaaaaaagtgccaaaatagtgaaaaaaagtccgaaatagtgacgttatagtgatataattttcagccaaaaatttagcaaaaattttttttacttcactgaatgcagtgcaatgaggtgtcggcaatttcgttgccgacgagagggccatatgctttttcttttctttttttacctgaagctttgagatgtaccacaattccaagacaaacataaattatgaaagacattgaaataagcataaaacttattgtatttaaaattgatttattctaaaaatatataatatttaaattagtaataaaaaagcaataaacaacacctttaaaaaatcgccatatgatccggtggtcaactcatcaccttccataattgcattttggtacaccgaagcagagaagcagacaccatagaccacagaaagaattgttaacagtgccaaatacagtcgttttttaaggttatcgtaactgaaaattactgtaattaacaatttgataatattgtattttttcatacaattccaaaaaagcaattccaatcagtcgatcaatgccagtgaaaaccattgccggaaaaattgcccctgaatttaaatgtatttaaaatatttatttaataattttctacatgcaaataccaagtccaatcacaggaatgaataaaatttttgctgctaaatgattcgcaatgaaattctggccagaaaatgcggtgtacacaaacagaaatgggccaagttgataaagcaattcataaaatgagcaaagtgccaaaa

SEQ ID NO: 36739 - DNA, 809 bp, Heterodera glycines
ctggcatatgatttgctcattctttttctttgtgtctccgcttttctcttcactctctccttttctcttcattttttttttgaatattgtttggcattttgtatacaaaaataagaaactacccaaaatgatttcttttttaactttcttacttgagcagactttgttcgggaccggcttttggaaatttcggaaccagtaatcccgcttctaggccgggaaaaatcgctcaaaaatgggaaaaagattgggaaatcttggtataaatacagagcccggaactagtcctggacccgaattcgatgccatagaatttttttttttgatttttttcatccttattaattttttagccatttatttgacttccagttcagcaattacattctttgttcttcttcaattttcgcaatggccaaatattgtttaagtaagaaaaaaagtcaatcaaaaaaacagtaaaattttccattttcagaaaaacaaagcaaacggttgacctgcaagaagaagttcaaaattcagcgcaaagttcgggaacactcgcgaaaacttaagaaaatgtccaaaggtaaaaaattaaaacgaaaaccccttggatttttcggaaatttcattgccctaaccctaataaaaattttaaactttagaatccgagcggaaaaagaagacggaaaagcaaatttccgtgcccagcaaatgtccattcaaagaggaaattttgatggaggcggaacagaaacggacggaggcaaaggtttccccaaaaaaacattagtgccgtaaattgtgtaaaatttttggttttt

SEQ ID NO: 36740 - DNA, 759 bp, Heterodera glycines
aaaaaaatccaggaaataaaatgataaccgcttttttcaaattttggagttttttttcatatatgcctatttagtttcaatatttctgttttggcttcgtcctccttccgtcagttttgtccgctttttcagcccgaaggtgaaggcgctttcactgtgccccagcgtggtcatccgccgcccttccactggtccagcacttcccgtttggttgctgatcacgtggcggcgggcgcgttcgactcagccgctcgtttgctggaacaacagctgggcattgtgcggttgaaaccgttcaagccgcacttcctcgccctctacgccaagttggtcgttcgcgtttagtctcgctcttacaattagcactatcaaaagtgcagaaatgcaagaggaaaaatttcgcatcggaaaattcacatttattgttagcacctaaccatgttttaaattatcttttttcgtgatacttcgttttctggggagcagcatcgccctgctaaatgctcatttatcgtaggtcccgtgttgcgtacacagccttcccactttccccgtccaattttgtgtacccggcccgaaattggcaagaagcgacgccgaagacgtcgctgccctcctctgcgctcaaggcatgtttttcatagaaaaatttagttttttggaaatttcttccttttttcagttgaccgagttggcccaacgtctccaggtgtgctaccagttgactacggccggtaaattcagcgacgccaccctacg

SEQ ID NO: 36741 - DNA, 939 bp, Heterodera glycines
ggagaagggagtggaaacatgattcaaaatttcaatttttctagtttatctactcaaaacggttcagaattcaataaaaataacattcacggtgcgaaaaatggggtttgacaagtttattggggaaaaaaagactttacaaaataatacccctgggagaagggagtgggaaacatgatttcaaaattttcaattttttctagtctaatctactcaaaacggttcagaattcaataaaaataacattcacggtgcgaaaaatggggtttgacaagtttattggggaaaaaaagactttacaaaataatacccctgggagaagggagtgggaaacatgatttcaaaattttcaattttttctagtctaatctactcaaaccggttcagaattcaataaaaataacattcacggtgcgaaaaaaggggtttgaaaagtttattttgaaaaaaagactttacaaaataatacccctgggagaagggagtgggaaacatgatttcaaaattttcaattttttatagtctaatctactcaaaacggttcagaattcaataaaaataacattcacggtgcgaaaaatggggtttgacaagtttattggggaaaaaaagactttacaaaataatacccctgggagaagggagtgggaaacatgatttcaaaattttcaattttttctagtctaatctactcaaaacggttcagaattcaataaaaataacattcacggtgcgaaaaatggggtttgacaagtttattggggaaaaaagactttacaaaataatacccctgggagaagggagtgggaaacatgatttcaaaattttcaattttttctagtctaatctactcaaaacggttcagaattcaataaaaataacattcacggtgcgaaaaatggggtttgacaagtttattggggaaaaaaagactttaca

SEQ ID NO: 36742 - DNA, 893 bp, Heterodera glycines
  unsure (1)..(893): unsure at all n locations
ccccccccccccccccaccccacccctcactccagggaggggatacgtgtggtataatgccctttccccaggaaggaaaatccgccgtacggtcatcgcaaatacattaatatcatagtaacgaaaaaagacaaaccaaacagattccgacgtgtcgtcaaatgcgaagaacaccaggaaaactttttgaaaaacaaaaaacaatttctgtttgtgaacgataaaatctaaaattacaaagaaatgagagattacaggaattaacaaaattagaattgagtcagagaaaacatttggttagccacccttcctgtgaaaataatagtgcgtgaactggactggacacacggcagtcttacgtcaagaatcctgatttttttaggactgaccaccgatttttccgaaccattgatgcagtttacgcatccactttacttttacgcgtccaatcagtgaccatccttagtttatttggccacaaacttttttctattagttaaatcttacattcttggtatcaaacaaatagaaaaataaaacttctgtatgctttaagcattcgattgataccaagaaggatcttgatcaaatataaaaaagatagcctaagaaagtaagcgtggtcattgattggacgcgttaaaagtcgtatggacgtgtaaaatgcagtagtgcaataatgctcctttaaaggaattgaaaaatagtctcctggtcttattttggaaacacgcctctttttccaaattcttgacagtagcagagaatgttcttcatttttagttgaatggaatcacaaaaataatgttgtagaaattaagaancaatagcaattaattttctgtttcattcaacttgatctctcattttttggntgactaagatacatacct

SEQ ID NO: 36743 - DNA, 1396 bp, Heterodera glycines
aaatgacattaccggggagattttgacagcggaggaattctcagtgagaatcccctaggacaggtgggatcagctgtgttctcggagggaaatcccctccaaaatggaagtggaggacttgaagggggggaaccggtggattaaatttcccaccccccccgctcaattaccctcaatttgtatttattaggccacaaatctcacgagcaaaaatgcgttttctatgttggcctggcgatttaacaatcagaagttcacactcggtctactacggcttctaattggacgctttgaccgttgtccccgtacagctccatcagtcgacctctgtgacaataataacattcccttgctgaatagcctaaagtttcggtttctcgtgatgaaacgaaccagcactgcttaccccgcggcacccggcacggtcccccgaaggaatggatttaattaaattctctccttcggggatttttttccattaggtcgtccgttagcgttcgattgctctagtcaatttttcaaaatttttgttgaaatatttgtcgtgctctgaagggcgtgggagggggggggggcgaaggcccaccacgaggccgcgaagaggccgagagagtacctccggtgcaggaaaattattaaattttaaaattttttaattgctttttgaatatgccaaaaaatgatatgcttatctttttgttaacgaacatatcgatcattttaattgctttttatttttgtcaaaaaggttaggcttaacttattattgcaacgtagttccctcacatatttctttattcacatgtctcctctcactaccaacgatatcttgtaaaaattctgttaaacgtggcaataaccgtcgcaaatttttcctacgggattttccgaaacttttcttaataatacccttggaaaaggcgacgaacatttgcgactccattttactccttaattactccatttaaattatcaaaacgggtcaaaattcgataaaaataacattcacggtgcgaaaaatggggtatgaaaagtttattggggaaaaaaagactttacaaaataatacccctgggagaagggagtgggaaacatgatttcaaattttcaattttttctagtctaatctactcgaaccggctcagaatacaataaaaataacattcacggtgggaaaaatggggtttgacaagattattgcggaaaaaaaaactttacaaaataatacacctgggagaaaggagtgggaaaacatgagatcaaaattttcaaatttttctaggacaatctactcaaaaaccgttcaaaattcgaaaaaaataaccttccccgcgcgaaaaatgggttttgaaaagttattggggaaaaaaaacctttacaaaaaatacccctggga

SEQ ID NO: 36744 - DNA, 1066 bp, Heterodera glycines
  unsure (1)..(1066): unsure at all n locations
aattcagtaagtacggtaatttataacctttanaatttcataaattagcacagtacagtttaggtgtccgtgtctgtgttttcctgttttttttgtagcgaaaaacagacagtgcggtcggtggtaggtacaagcttttcaaactgtacgagtactcaaatttttttttgttattctgtaatcaacacccgatttatttggtaaaatgaaatttttaaatttgatttttaattttcaattaccaattttgttagcattttcgatcgttttctcaattcagttacgagtagcatttctttgccgttcgctttcttcgacttttttctcagttttgctttcattgtgtggcactttgccaatggtattgccttggacagttcccaaaatcaattctgctggcagtgccacccttttttggcatttgttcattgcctttgaaaagatagaaaatttttctaaaagaattacatatgtataatattttttggaaataggaaataataagcattattttattactagggatgcgatttttaggctttaactattatttttttttgctcaattgttttgaagaaaaaagctcaaaaaacacattttaaaatttttcgattctgatgtcattatcagggctgcaaaaaatatgcacgaaaagtgaccagaatatgcacataaatatgcaaataaaatagccaaatatgcatcaaatatgcacaaaaatcgcaaaatatgcaccaaatatgcacaaaaaaacttgaaaattaggggtctaaatttattaaaaaattttattcctcataaattatatcggttgtttttgtaattgtaaatcaaaaatttctcaaggttttcgacagtgaaactcactgttgactcactcgcgcatccattcacatttagatttaattttaggcattttcaaaattttttcctaagagataatcaaatcggaaaatatttgacgaaaaatggcaaaatatgcaaaaaaaaaaaatctgaaaatatgtacaaaaaatggcaaaatattcaaaaaatctgaaaatatgtaaaaaaaatggcaaaatat

SEQ ID NO: 36745 - DNA, 1131 bp, Heterodera glycines
ttgattaaaattaatcactaaatttaaaagattttgacgattttccccaaaaggctcaaaatttctcatagccataaaaatcctcattaaaaaagaatcctcactgacctatcaaaaccacaaaatgaggataaattctcaggtctgggagccttggttaaatggctataaaaattataaaacaaatttgggtcgaatggtattttgggttttaatattgttgacgaaatgtccatttggaaacgtcattgaaccaattgaactgttaattgggagtaaacacgtgcgaattggcaagaagtgatgagagaaatgatatatcacacaaatatatgtaggcaaatttatcaattggttgccaaaaaatatatatgaaagtgttctttggaggaacaaattgatgggaacggctgtaccttcacccctttccccaaatttgcggcagacaaattcacttaacgggaaatcgtaaaatagcaagtaagtatatgcagtacttttatgttaatgtgtattcacatagtatggttaattcatccctcaccgtaaaataaagcattaaatgatttacaactacaattaggcaaaataatcaattatttaagctttaaaattcttctctgggtgaaggatcgacttactttactccggaggatgggaaaggataatatttgtcagaggacacgaagagaggatgagaagaaagggacgggcagaacagcggaagaatgcgacatgggaattgggcgagaacaaaacaaatgaacaaatgatcatcgagtgaaagtcaattcggagcttttgtctatctctcaataagttgtcattgtcctcactgatgccacccaacccactcggtcaccttcccaatccattgaactgaatttccacggtaagaagacattaagcctttttgctttctccttcaacccacgacatccttttttcacttttttattacaaataatggagaggtttagtcagagaatggtagagtacaaagcaaacagaggcctaaagatgagttgggagagaagtgcagcagcagcagttgttcggttagaaaaaggacaaccaaagcaaagcaaagttaggacaaagcgaggcgagcgaggggggccactgctgaga

SEQ ID NO: 36746 - DNA, 1338 bp, Heterodera glycines
aaacatggatttcaaaattttcaattttttctagtctaatctactcaaaccggttcagaattcaataaaaataacattcacggtgcgaaaaatggggtatgaaaagtttattaggggaaaaaaagactttacaaaataatacccctgggagaagggagtgggaaacatgatttcaaaattttcaattttttctagtctaatctacttaaaacggctcagaattcaataaaaataacattcacggtgcgaaaaatggggtttgacaagtttattggggaaaaaagactttacaaaataatacccctgggagaagggagtgggaaacatgatttcaaaattttcaattttttctagtctaatctactcaaaccggttcagaattcaataaaaataacattcacggtgcgaaaaatggggtttgacaagtttattggggaaaaaagactttacaaaataatacccctgggagaagggagtgggaaacatgatttcaaaattttcaattttttatagtctaatctactcaaaacggttcagaattcaataaaaataacattcacggtgcgaaaaatggggtttgacaagtttattggggaaaaaaagactttacaaaataatacccctgggagaagggagtgggaaacatgatttcaaaattttcaattttttctagtctaatctactcaaaccggttcagaattcaataaaaataacattcacggtgcgaaaaatggggtttgaaaagtttattttgaaaaaaagactttacaaaataatacccctgggagaagggagtgggaaacatgatttcaaaattttcaatttttttctagtctaatctactcaaaacggttcagaattcaataaaaataacattcacggtgcgaaaaatggggtttgaaaagtttatttggggaaaaaaaaactttacaaaaaaaaacccctgggagaaaggagggggaaaactggattcaaaaattttcaatttttctaagctaaaccacctcaaaggggtcaaaaattgaaaaaaaaaaaattttcccgggggaaaaaagggggttttaaaattttttggggaaaaaaaaatttttaaaaaaaaaacccccggggaaaagggggggggaaaaaaattttttaaaatttttaatttttttttaggaaaaaaaccacaaaagggttaaaaattaaaaaaaaaaaaaactccccgggggaaaaaaagggggggtgtaaaaattttttttgggggaaaaaaaaaaatttttaaaaaaaaaaaatccccgggggggggggggggggggggaaaaagggttttaaaaaatttttttttttttttttttt

SEQ ID NO: 36747 - DNA, 686 bp, Heterodera glycines
agcagcagacgaacagagaaaaaatagtgaaaaaaagggaaaggaggagagacagtcagcggagggaatggaacagtgaaaggaaaggcgaagtgatcactgatcagcaacagcagttaaattaaattactattcatcctgttttggatacgtcagcataaattatcggatattttatataaatttaccataatatctctttcccgtttactgactgttttgaaataagttatgtttcgtgacatttaatatcatgctgagacgaaatatgaaaagtgcaagtgacccaattaaaagcacaataatttttaaatttattattattaataatactaatacctaaaatattttagtaacatttaaattaattaaaaataatctatataaacagaaaagtaaattaattagttgtgcctaatgaaaatgtcccacaattacaataatttttgaccgtttactgggctagaaggattaagtaaattgcgcttcctccccgcttatcccttcactcatttgacgcgttcatttaaatgtttgcacacatccgcaaagatatcgtcaacagagccttcagcagcgagctgattggaaatcacttggttatggatacaaatttaatatgaatatatatatttcttacatattttggactttttagcaccttttcctacatttttttgtatttt

SEQ ID NO: 36748 - DNA, 1199 bp, Heterodera glycines
aaaaatgcaaaaatatgcacataaaaaggggaaaaatattgacattaatttttttcaaaattgagcgttataatttttcaaaaatttctttaaatttcgctaaacgcaaagtaaaactttcaaatatgactaaaaatatggtattaaaatcattttagaacaaaaaaccacgatacaacttaaattttacgaaaaatcaacctgaaaagcaaaatttcgctttttgcttattttgggcataaattaatcaatttttaagaaaattttaatttagtcgatattttcgacaaaattttgctaaaaagtcttttttggaaattttttggtctttaggggtcaaaaaggccaatttacttgataggttttaataggggtattttgaaaaaatgcccaaatatgcacataaaatatgcacgaaatacccaaatatgcacataaaatcatgtttttcgtgcgtttcaggcctcccacagtccaggaaaaaaatatgcatataattttatgccctactgtgcaatgtttattattcatttttatcacactgctttcttcccgaagaataatgcatattttggggattttcaagaataaatgcatatttcaccatttttgcgtttttagaaaatagttcagccatttttagaaattttcacagaagaaatgcaaaaaaagcgaagaatacataaaccctctgagaatcgacgattttaaaagtttcaattcaaaaaaaattcacactttatttgggttcaaaaagccaaaattatttttcgggatcccgactgaatcccgatcactcccgaacattttggaaaaacgatcgggacggatcccgggtcgggatcccgaccgaatcccgatcccgatcaatcccgaagatttttttcgggatcccgcgggattatcgggatttgctcaaacccatttttttttacattttgtgccaagttttgttcaaatatttatctaatatttataattgatcaatacgattgaagaaaaaaagggatgtgaattatatcagatttttatagaaatttttcaagattggaatatcatgcccaaaaaatcagattttcaaaaatgagaacatttaacaacatagccttaaataatttttttacaatttaataaattaatatcaatttttgtattttcgcctcagatgatcatttttaataattttgagaaacggaatc

SEQ ID NO: 36749 - DNA, 816 bp, Heterodera glycines
ttctgcgttggatttttgctccccataattgtttgagtaccccaaacggacacttgaaaaaatcgattttttttgttttcggggcagtccccccgaaccgatgcgcccagatttatggggagaccgaatccttcgggaatagcttccctatagcctgtactttaattctgcgttggatttttgctccccataattgtttgagtaccccaaacggacacttgaaaaaatcgatttttttgttttcggggcagtccccccgaaccgatgcgcccagatttatggggagaccgaatccttccggagtagcttccctatagcctgtactttaattctgcgttggatttttgctccccataaatgtttgagtaccccaaatggacacttgaaaaaatcgatttttttgtttcataaatatttttttcagaaagtgctctaaagcgcaccaaattttatttacaacttaattttagcactctgatgctttagtatcaaaaaggaagatggagaaaaaattttttaaaaaatttttccttatattttggatatatcgttttgcttttggtggggtgcttggaacagtggaatcatgcgcacccgtccgatctggcaagttaagcaacgattgctgactagccaaaaggttcggtgccgtgatgaaacgaaccagcactgcttaccccgcggcacccggcacggtcccccgaaggaatggatttaattaaattctctccttcggggatttttttccattaggtcgtgcgttagcgttcgattgctctagacaatttttaaaaatttttgttgaaatatttgtcg

SEQ ID NO: 36750 - DNA, 1457 bp, Heterodera glycines
  unsure (1)..(1457): unsure at all n locations
tgctccccaatggatttatcgaaactccacagatcaacagtgacactgttcaaattggcactcggatttacgctgtcttcccatttaattgctggcaccatcgccgtctccccaattgggcaccgttgcaacagccaattatacgcatttaagtcgaattcgtcgatctcctgtttcagtgtcagcttttctttcgtccgttcattcaccaattcaaatggttcaattggcattggttccacaagaaaataaagttgaattgtgtaactgacagaagtggtggcacggcgaaatgtctaaaaaaatttttgaaaatctgcccacagataacacacaagtacccgaaaaaatttctaagaattttcaattaaaatttagaatttttagataaaaaatcttaatggattttctagcctagaaaaactttttaaaacacttaaattttcaaaaaatttaagaaactttaaaaaatcagctgtaagaattagtaaaaaaacatagagaatttttttaaagtttttctaggctagaaaatccattttagatttttttatctaaaaatactaagttttagttgaaaattcttagaaaaatttttttttgtacgagttgccattgatccaancaaagagattaataaaaaaatatggcgggccacctctttgaagttgttgacccattcgagattctgtggaccaaaataattatagcgatacaatcgcttcggttgcccattttttgtcggagtgtgaagccatttggtcaacgcttgatcagcaattccatttggcccatcgtcagcaattccatcggggcacagataaccgcaatcgattgaaatcaattgatcaagatcagtgagaagtgtcggcgaagtgcgacgaagcaaattgtccaaatgattgccatcttcgaagcccaactggcgaatgtttgtcgcaaaaatgggccaaatttgacggacaaaaacatcccaaattggctggacatcagttgggttgtctgaaggcacatccaaatccaatttggtgcctcttctgtcccaaattggcttgtttgaacggataaatgtgagcacagaatggtcaatgtagctgaaaagggggaacaatgaagacgacgaccaaccatattaattggtttctgtatagtttttgatttacttaatccgaagctccttaaagcgaattttgctgggcagcgaatggtccggcagaggaaaatccacaaatttgtcatcgatctgtacagacagtttcggttttggtcctttgtccttgcgaattgcgattgctttccaaattgtcaattcgctttttccatcaaaatgcgtgtcaaccaaaacatcgaaacggtcggaaagcaatgccattttgagtccgagttgggcatggtcaaaagatgggaaaatgtccatccacacgacggtacaaatccaactgaaacatggaaaaaat

SEQ ID NO: 36751 - DNA, 1262 bp, Heterodera glycines
  unsure (1)..(1262): unsure at all n locations
ttgtctaatctcgaagcaatagtttaagaagcagcttctacacatgttaagcttccgaatgataccaagattttttggcaataaaaaattataattcaaaaattttggctggcgccgaaacgagccctacacttttgagcagatgctcaccaaaccccattaaataagtaatgcgtttcattcttcttttatagaaccctctattaactgtttcatcattttatgcgtaggttttgtcccaatcacaaggtgaacaaacaaattaaagctttcgttaatgaatttgttttatgatttcataattgttgggctttttggttggcaaatttcatttcattgcttcaaatgtgaaaaaacaaaacccttcaaaattaggaacggctctgaatgtgtttcagctataatttgaatgggtcttgctgctcgagagtctcgctagcttaactcctgactcgagaaaagtgtctgtttcagggtctctagcagcgtgaaaaatgctgggaaaattgtaaaatttgtgaatgtttttatatttaaagtatcgattttgtaggccataatttttttaaatataaagaaattttttgtagtttgacaataaaacaataaacatattatagagttatcggaagataaaaaaatacgtaaataaaatattatcgctaatctattacttattaatatcactaaatttcagcgaactttttgtaaatttataaaggcgaaaaagcggcgcctgcggcgcgaaaagtgaatgaatttctcggcgcggatgtgatctctcctcgtcaagcgcaaaaatggttccaacaattccgggcggggagaaacagcaccaaacgcaaacttgggtctggaaggccgtcgacagtggacaaaaacgttttggcacaacggttgcgacgacacccggaaagttcctgcgcagaattgtcggtggggcattgccataaaacaacaacatggcgctggcttcggaaatctggtcgtcggccgatgatgagcaaatgggtggcacaccgtctgactgatcagcagaaatgtctttcaaacatcgcaagacacccggagaggttatatgctgaaccggctggtgacatgcgacgaaagctacatnctgttacgatggcacagcacagaaaaatttgtttgnagaaagaaggaggaagacccaattttggtcccccgacccaacctgcacaaaaaaaccgcatggtgtgtatctttttggtcagtacatggcccactgtactgggaactgc

SEQ ID NO: 36752 - DNA, 954 bp, Heterodera glycines
tttgaaacgaaacactgggttactaatttgcatatatctctgcgaaaattccagatccaaaaaaatcagctataccattcgaaagctgctttcaggcgctctcagaaaacagtaaaaacgctcctattcatgcactaggcgctgagatatatgcacttgactttctgcatataattgccattctccgcagcaaacttcgcgttctcaagcgtgaatagttaatttttttgtgctgaactgtgttagggttctccttgcagtgcgctcaactaagtctcttggagttagagcatttttcatggtattttcaagaaaattgtgcaatgtgggcgacccggaacattttagacagtttccaaaccaaacactcatagtaaaaaattatttcgttagaatacgagaaataatttgaaacgaaacactggttactaatttgcatatatctctgcgaaaattccagatccaaaaaaatcagctataccattcgaaagctgctttcaggcgctctcagaaaacagtaaaaacgctcctattcatgcactaggcgctgagatatatgcacttgactttctgcatataattgccattctccgcagcaaacttcgcgttctcaagcgtgaatagttaattttttgtgctgaactgtgttagggttctccttgcagtgcgctcaactaagtctcttggagttagagcatttttcatggtattttcaagaaaattgtgcaatgtgggcgacccggaacattttagacagtttccaaaccaaacactcatagtaaaaaattatttcgttagaatacgagaaataatttgaaacgaaacactggttactaatttgcatatatctctgcgaaaattccagatccaaaaaaatcagctataccattcgaaagctgctttcaggcgctctcagaaacagtaaaaacgctcctattcatgcactaggcgctg

SEQ ID NO: 36753 - DNA, 730 bp, Heterodera glycines
ttcctggatttttgtccaggaaatccaggtccaggcattctttaaatgtcgagctctagtttttagtagtatattcgcttgaaaaaattatgcaattattttatcaaaatctctttttgtcatttttcattattttagaacattttgggaaaaggagtgactatttacacgttttttacagcgcgattttttcaaaaactttttgggaacttggaggagggtacggcggtgccgataggcgccgccgggaaaatttcacaaattttgaatgaaatttgcgatgaaaaatgagttaactttaattcaatttattatttaatttatttaaaaatatttggcattctgtcttagaaaaattttcaaaaaaatcaataaaatcccgcataatcccgcacaaaaaatcaaatttgcggatcccgctgcgggattggaactcaaaattctttgcgggacgggatcccgcgggattaatcccgcaaatcccgcaatcccgcaaatcccgcattttccaaaaaatgcgggattgcggactgggatcccgcaaaatcccgcgcgggatcccgacccgcgccgggctctattcggaggtgtagaaaggcctctccgagcaatcatcatacatttgaaagtaataaaaacatttactttattagttgatttttgtttttaattttcggtcttttcttaatgatttttattcgtataattgatcaattataattatttttaa

SEQ ID NO: 36754 - DNA, 929 bp, Heterodera glycines
  unsure (1)..(929): unsure at all n locations
tgggtttaactccgcttggagatgcgttagaaaagaaagaaaaatatgttcggacagcttttgaagagctgcattgaatgctgcagtcgccgctgctgtacgcccacccgttgctgagttagggtcgagagcggcatgaaaaaagacaaaaaggaggaaaatgaaacaaattcgcggctttgccctcgcgttggagaaagcaatgcgcagaataactggggagacttagggttagcgcatcaattatttttttcagaaagtgatcggggtacaaaaatacgggtccaaaagtgggtttaactccgcttggagatgcgttagaaaagaaagaaaaatatgttcggacagcttttgaagagctgcattgaatgctgcagtcgccgctgctgtacgcccacgcgttgctgagttagggtcgagagcggcatgaaaaaagacaaaaaggaggaaaatgaaacaaattcgcggctttgctctcgcgttggagaaagcaatgcgcagaataactggggagacttagggttagcgcatcaattatttttttcagaatgtgatcggggtacaaaaaatacgggtccaaaagtgggtgtaactccgcttggagatgcgttagaaaagaaagaaaaatatgttcggacagcttttgaagagctgcattgaatgctgcagtcgccgctgctgtacgcccacgcgttgctgagttagggtcgagagcggcatgaaaaaagacaaaaaggaggaaaatgaaacaaattcgcggctttgctctcgcgttggagaaagcaatgcgcagaataactggggagacttaaggttagcgcatcaattattttttcagaatgtgatcggngtacaaaaatacggntcaaaaatgggtgtaatccgcttggagatgcgtagaaaagaagaaaaatatgttcgacagcttt

SEQ ID NO: 36755 - DNA, 1150 bp, Heterodera glycines
tcttacctaataaattggtacactgacccaaaagtcctttttttacctatcatgtaatttataacattttcgagcaaatgtcttttattattattattattattattattagtccactgatcagcttcacaaaaccttgagttcagtatgaaaggagtaatagagagtaaaatttctcgaaaattcttcaaattctttaaatttaagataaaaagctctaaaatagctaaatatgatatgaaaaaaattacagtagaaaaaaatacaaataaagctaaaatttattaatttttaagaaaagtgagtaaaaatcttaaattagatagtcaatctctgttgacgtgtttcggcatttttttgttcagaccagtaaaaagtatgccttttgctatattactcaaattatacatgccttaaaatttgattgtaaaagttagtctttgactagcccgatggagaaaatgagttaggtattccatttcggttccttccccaccccactgcccccccccctccctctacgctcatcatcacttcagtcccatcccttcttcatcaatcattcttccatccctttccttcccttcccttcttccaaggccttccctcatcctcctccgttcatcccttcgtcctctaagggtctttcttcaggtaattgccctgtggggcttccgactttgcctcaagccattttcccttttccattacaatcaccgcgaaattgctgccacaacaaaataacgaagttcgttcgttcgttcgttcgttcgttcgtttattctttcgtcgcgcctttccccgtctctttcttttctctttttcattgtcaatgtttgttctaaaatatatgcagcagcacatttttacctcattttctgctccttcatttttcaatttgccgtttttagtcgtcgtttaaagtgacaaagtgtgttaattaaagggttaaagaatgtgcactaacaaatgggacttataaatgagcgtttgtacatttcacatttactggactgatggtttactgtaaaataaactatatatttattaattagggaaatgactcaaatttctttggcaattaatacgcaaaataaaaaagggtattaagtattaagaagaaacaaaaacacaggatggatatgttgtt

SEQ ID NO: 36756 - DNA, 1155 bp, Heterodera glycines
ttgggaaaaaaatggcacaaataaatatgtaaaaaaaaacattgaattttagttggtgttaccgagaaattttttgctacgatggggaaaatggagatagtaaaaattttatcgaaagaaattcttttgaaggaattttattttattttttccgctaggaaaagctctacttccaactgtaagaaaacattcaaaaaaaaattgtttcattgattttttttagtaaaattttttcgaattaggctaggtgactaaaattttttgatttatttgttaccgttttataatggaaggaccaaaagtcggacggagtgatcagtttggaggccaccaaatgcttgtacatgtccaacaaatgcgcattttgttgcagaatttgctgcttggcctcccgctcgcgctccgagccgcccttggccgactgttgggccatcttcaaaaaaaaaatttttttttaatccatgaaaaaatccattaatttgtcatgggttcactgctggaaattcttagtttttctttgttattgccattccctttcgtaatttttaaactccgaaaaaaaatttggaaaaataattttcataaataacagattgcgtaaggattaaattttatttattttaggttcatctactatttttcggtaaatttcctatttgaatcccaagaaaaccagacaaaatcgaaataatgaaccgagtcacacttttctggtccatggaatttagttggattttggattttttttaggtctcttccccagtcaatggaatttatattttcgtgatttttcctttaagatgactatcaaatttttagtggatttctccatggatcactcggttgatttaccaatttttcagcgaattctcaaattatgaatacaaaatgcggtataaaaaattttcagacataccagtccaaaaatttacaaattttgctgtccatggctccgacaattcccccccccccaaaaaaaaatataaaaatgaatgaatatgcctggttgacaagctgacgatgtcgaaccaacgcctgctgcagcatttccttgaccaggtcccgctcggccaccaactgctcctgactgtgtgccgggttcatgaacacaaatgttgcctggtcatcgttgaacatgcacagctgcagttgcac

SEQ ID NO: 36757 - DNA, 299 bp, Heterodera glycines
  unsure (1)..(299): unsure at all n locations
aaaaagaaaaaaaaaacaccaatgggagggaaaagcaattaaaataaaaaaaaccatttcaaaataattgaatataagttttatattaacgtatttgctgtattagaaccccccttttgaggggggttgaaaaatagggtactaatgtggtttgggtcccggnttttggtcaaatttttcnaaagcgtagccagacagtcagacagtgcactatttccttctttatttttctcacctcttcccttttcccacacacaatgctgccaggcagcccatggctgcttactgtctacccttcc

SEQ ID NO: 36758 - DNA, 932 bp, Heterodera glycines
atcataggtaaattaacatggtcttcgaacgcgccagcttttgcgggctaggcgagtgagccttggccaaatttctgccggagatgtcgtcgttgacccgcttgaccgaagcctccagcggcgtcgtaccaggctttccggttttgttgacgccatgcgctttcgctcctccttcaccgccttcgcattgttgatgcgcattgccatttcggtggcttttgcctgaagttcgttgcgagcagaagacattatgaagaaaaaatttgctaaatttgtttggtaaattagaaaaaaaatttcaaaaaaatattaaagcaaaattgataaacaaataagtgttaactgaaaagcaaaatgagaatttgtcacatttttggtactatttatatttaattagtccctcctccccttttcattggatgctccttttttgcctacggcaattgatccttgccgctcagctaattttgccgaccaaatttaaaaattttttttaattaatacttttttgccttttttgattttttttgttagttttagaattaaaatagtttgttgctttttgtaaaagtttgaaaacataaaaatatatttaaatataattttattaaatcattcgaaatctttattttttctcttataattgtacttttgcattttgttaatccccttccattttttgaattctgcaagtttcttcttatactaatcccttgccgctcagctaatttagacgaccaaattcaaaattttgttttgttaatccttaaatgattcttcattttgttggtttgccattattctgtcatttaacaattttgccgttcttcataatatatgccaatcatttttacattttgaaaatttttatttaatttttttcttttcgataattccatttattttaacttaacttgaaatgtttttcatgt

SEQ ID NO: 36759 - DNA, 1311 bp, Heterodera glycines
cattgaattgaaatgacaaaattaaaatatttacctactatgtgaagttatctttttctcgaaaagattaaattaatttttttcattggttttatattatttcggattactaaattccttaatttttacacttaattttattcgccaaacaaatttaggaaaatagattattatttttaatactttcgtacacattatttaagacaaaaagatttttaatttaagcatttataatttgtttttttatcggatcaccatactattaatatgctaaaaatgaataaaaactaagtattgtttcaatacccgtaaaatgaatatttttgaaatctctttagtggaataaatatgagtttccaatataaaaaattatttttattcaaattttaccaaataattcgagaatttattaacaatataaatttcactttgataatatagacaaataaaggtaaatatttgctataaaagaggattttttattttatcaattacttatttatttaataatagtttatttaggtaaaatacaacaaactattatataatttaatgcgaatcctaagctttaaatttattaattgagtttttaacttgtaagttaaatttaaataaattatttttttatataaatttatgcgtagaattttttatatttattaatatgtttgggttactttttttatctttaatattattaacaataaattttttaataattaaaattaataactttcaaaattagcacaatataaataatatcattattaattctttaaagtaaatgtttattttccattttttacagttttgtctcaaaagtttctatagcatcgaacagcgcatttttttgttcaagcagttttacaatataacgaaattttctcccgacatccatttgtcattatttttttggcaaaatgagcctcaatttttcaattacttaaatcttttgattttaaaaataatattccaaattgcaattgtcgtttttaaaatcattgatttaacaagattttattgattgattgggatttaattaggcaattaaaccaataacacagcagaatatttgagttagatgcaatcaaattgtaaactcattaactgatcattttccgacaattactacagtgacatttgtcatcattacttttttcttttattctaattggtcgattatctaatcttatattaatttattcaattatcaaaatttttataatattaggaatattaacaaattaattaattaaaattcaaatgaattattaaaggttcaaaatcccatttggggggaatttttaaaaa

SEQ ID NO: 36760 - DNA, 884 bp, Heterodera glycines
gatttttgctccccataattgtttgagtaccccaaacggacactagaaaaaaatcgatttttttgttttcggggcagtccccccgcaccgatgcgcccagattttatggggagaccgaattccttcgggaatagcttccctatagcctgtactttaattctgcgttggatttttgctccccataaatgattgagtaccccaaacggacacttgaaaaaatcgatttttttgtttcataaatatttttttcagaaagtgctctaaagcgcaccaaattttatttacaacttaattttagcactctgatgctttagtatcaaaaaggaagatggagaaaaaattttttaaaaaatttttccttatattttggttatatcgttttgcttttggtggggtgcttggaacagtggaatcatgcgcacccgtccgatctggcaagttaagcaacgattgctgactagccaaaaggttcggtgccgtgatgaaacgaaccagcactgcttaccccgcggcacccggcacggtcccccgaaggaatgatgtaaataaaatttggtgcgtttcagaaccctttctgaaaaaatatttaagaattaattttgcaaaaaataaataaaaacgaaagactcagattttcgaaaaattttttagagcaagctagctcggcgctcatttcagtgtaagttagtcctttaccggggagtatccctgcaaagtttggtatgcttctgctcaattagcaaaaaatatgagtgatcaaactttcactaaaaagttaagcctaaattttttggcatatttaaaaagcaattaaaaactttttaaaattttattcacctcccattattgatagaaaaatcagctgtagaacctcattaactggt

SEQ ID NO: 36761 - DNA, 1589 bp, Heterodera glycines
ataaataatttatgtaataaaataaaaatggtgaaaataccaaatattcaaagcacttttggcgttgactacggaaacactcgaattggtaggaaacaggaccaattggagtccgcttcacattggcaaataggcagactaatggcacaaaattgatcagctcgctgttcaattcagccggcaggcgtcgacgaagtttgggctttttctcactcattggaaggttcaaaggattagggcgtttcattttaaagaatttgaataaagaatgatttcgatttcttgctgggaatcatttggtggtgcgcaagtgggcgtggcctaagtgtgcatatcgtacacccggtcattttctagattcattttaaaaattttcatcttttttttgcacatctggtgtttctctctcctcccctcacttgtcttgtgctttatggggaccgtatcatttaattgtgattttggggacggtataattaaattaatatttttgctgttaaccagggcggttgctttaattacaaaaagctccgtttatcctggcagcaatttgccttttagggcttgaggtctttcgcttgacttgactaatttcccgagtcgtttaggtgccctgtcgtcttgtgcttcatgggtggcggtgtgctgctcttcaggccatagtttgtttatgtttttttttttgactattttccatgcccaaatatttattattcattcaccatttcacgccatttccatgccggcgatcgcatataaataccgagattttactcattcctcctcactccactctcagattaaaaaatggaaccccgaaaacgatcctctaacttttccattgatcatattctctccgcgcccaaaaagccccgtcaaggcttcctgatcaatgaactcttgggtgtcgtacacttccttggatcggtgcagcaaggcgaaggaacatcaaaagaggcaaaggactacgttaaaaaattggacaacagcatcgagcacatggccaaattccactacgtcaaagtcaagtcaaagttcaccattacggatttgccgagcacacctgaggcactgttggctgggattttccaacactgcatcgacgaagcaattgttgaaagccgtgagcgcaacatcgaacctacacacctcggctgtatgatcagcagtcctatgttggaaggcggagatatcccaatcccgatacgacaaatgacaaacaacactctcgacaccattctcaaccagttcaaaaaagtggcgcagtccaaacaacagaaaaatgtatcgttatggggtgagccgtttaccgtcaccatcacgactctcgaccgtaatggactaccatccaaacgtcgtgtcaaagggggagctcgtcgccctgtcaaaacggccgttcaccaccgaattaatgaccaatgcctgattaaaattcgtaataacgacaaccacttctgccttttctacgcgctgcaggcaacaatggtcgacaaaacatgcaattggacacgatggaagtttttggactacttgcacgacagacacgaaaagcagggacaactccatcatgatactgttaagctccatgc

SEQ ID NO: 36762 - DNA, 1634 bp, Heterodera glycines
tagaaaaaattgaaaattttgaaatcatgtttcccactcccttctcccaggggtattattttgtaaagtcttttttccccaataaacttgtcaaaccccatttttcgcaccgtgaatgttatttttattgaattctgaaccggtttgagtagattagactagaaaatattgaaaattttgaaatcatgtttcccactcccttctcccaggggtattattttgtaaagtctttttttcaaaataaacttttcaaaccccatttttcgcaccgtgaatgttatttttattgaattctgaaccgttttgagtagattagactagaaaaaattgaaaattttgaaatcatgtttcccactcccttctcccaggggtattattttgtaaagtcttttttccccaataaacttgtcaaaccccatttttcgcaccgtgaatgttatttttatcgaattctgaaccgttttgagtagattagactagaaaaaattgaaaattttgaaatcatgtttcccactcccttctcccaggggtattattttgtaaagtctttttttcaaaataaacttttcaaaccccatttttcgcaccgtgaatgttatttttattgaattctgaaccggtttgagtagattagactagaaaaaattgaaaattttgaaatcatgttttccactcccttctcccaggggtattattttgtaaagtctttttttccccaataaacttgtcaaaccccatttttcgcaccgggaatgttatttttattgaattctgaaccgttttgagtagattagactaaaaaaatatgagtgatcaaactttcactaaaaagttaagcctaaactttttcccaaagttaaaaagcaattaaaattttattcacctccattattgatagaaaaagcatcagagtgcctaaactaacatgtaaataaaatttggtgcgtttcagaaccctttctgaaaaaatatttatgaattaattttgcaaataaataaaaacgaaagactcagattttcgaaaaatttttttgagccagctagctcggcgctcatttcagtgtaagttagtcctttaccggggagtatccctgcaaagtttggtacgcttctgctcaattagcaaaaaatatgagtgatcgaattttcactaaaaaagttaagcctacattttttggcatatttaaaaagcaattaaaaaatttaataattttcctgcaccgaaggtactcactcggcctcttcgcggcctcgtggtgggccttcgcccccccccctcccacgcccttcagagcacgacaaatatttcaacaaaaattttgaaaaattgactagagcaatcgaacgctaacggacgacctaatggaaaaaaatccccgaaggagagaatttaattaaatccattccttcgggggaccgtgccgggtgccgcggggtaagcagtgctggttcgtttcatcacggcaccgaaccttttggctagtcagcaatcgttgcttaacttgccagatcggacgggtgcgcatgactttctgaaaaaaatatttatgaaacaaaaaaatcgattttttcaagtgtccgtttggggtactcaaacatttatggggagcaaaaatccaacgcagaattaaagt

SEQ ID NO: 36763 - DNA, 1581 bp, Heterodera glycines
  unsure (1)..(1581): unsure at all n locations
tttcctttttattagcactttggcttgccgaagcaatattttcatttatatttttatttgtttcactgtttcctgccccgtttccttccataagacccgtgcattccccttctattttgcttgccgaagcaactgattttacaccgaattcattagtacaagtttccctagaaagattcctagtttgatcttcgttttggcttgccgaagcaattattcttccctggcttgcctcctcctcttcctcctcaaatgtcagcatttcgagcagatgtaattcgtttgtgtcagtcaaactcgtggtaggctgcagcggattgtttgacattcctgaaattgattttgtgttattaatgatgatttttatgtgcatttattttaattaaatattaataattaaaatgataaagtattatttataattttcactaggaccctattcccttttatttctgagaatgatattctgagaactctatcccttacaaacttataaatttttactaatttacatatataagcagagaagaaaaaacaaaacaaaatatagataacatggaagaaatgagaaaaaaaatgcaaaataaggccgaaatatggacaaaatagttgaaattcacaaaaaaaaaagaaaatatgtaaaaaaaaaaaaattttttttttttaattttcggaaggaaaaaaaaaattcaaagaccaaaaaaaaaaattttcaatgaagatgcttatttaatacatgaattatagaatgacataattttaatctataattattgtgtttaaagatgaaaagaaaaaaaaatatatttacataaatttaaaacttttgttaaaaattcattttttaaaggaattttgaagtgaaagagaaaacattttttacatttaatatggttttccaaaattttcaattaaggtcgtattttacaaaaacaaacaacaaaaattcttgagcggtgtctttttgagattttgtgaaaatgccttaaaatgaatatacaatatggaaatagtgacaaaaatctaaaacatggaaaggaaaaaaaaattcatgaataaagctcaaaatattattttgtgtttaggtcaaagtgtttaaaaaaaataggagtcaaaataaatccgatgcctaatcatagaattcattgttttgcctaagattttggttagcgacatttactgctcgccaagcttttctaaccgaagtactattttttttagcctaatatttctcatcattaaaattcattaactttttttggatataaggtggtcaatgaggaagatttgatatttagcgcattttggaaagccatatttgataggacaaaggtgtaccgaagtaaaaaaaaagattgaaaaaaacttggaaactaaatccatataaactatttctcagataagcattaaaaattatggaatatcctaatgatctctacggtacagtattgccttaactccattgtggaacacaatcttgtttaagtggaatattaaaaaaaacggcaaaatgccaaaaaaggtatttaatgcatngaaatcccgaaaaaggcaaaaaaaaaaaaagacataataaagtca

SEQ ID NO: 36764 - DNA, 1066 bp, Heterodera glycines
  unsure (1)..(1066): unsure at all n locations
tagcaatgatgcacgtggtcctgggaaattcctcaggaattaaatccctgaatttcttctattttcttatcactcacaaatcactgtggggaaaattaagatgattctgatgattagcgttcttgttcgattttggcgctaatgcgatatttattctcatggttcttggaaagtaatcaggaagtatttcgatttttgtaaataaaccatcagctgatataaagaaaagcattgttgtctgtccttttccaattatattgccatttcggcatcggtctaacaaagctgcgcatggctttgggaaattcctcaggaattaattttcgttgtctaaagaaatgcgctagtgtcgggcattttgacattaaaatgccattaaggcaccgttgtagcaatgatgcacgtggtccttgtaaattcctcaggaattaatccctgaatttcttctattttcttatcactcacaaatcactgggggaaaattaagatgattctgatgattagcgttcttgttcgattttggcgctagtgcgatatttattctcatggttcttggaaagtaatcaggaagtatttcgatttttgtaaataaaccatcagctgatataaagaaaagcattgttgtctgtccttttccaattatattgccatttcggcatcggtctaacaaagctgcgcatggctttgggaaattcctcaagaattaattttcgttgtctaaagaaatgcactagtgtcgggcattttgacattaaaatgccattaaggcaccgttgtagcaatgatgcacgtggtccttggaaattcctctggaattaatccctgaatttcttctattttcttatcactcacaaatcactgggggaaaattaagatgatactgatgattagcgttcttgttcgattttggcgctagtgcgatatttattctcatggttcttggaaagtactaaggaagtatttcgatttttgtaaataaaccatcagctgatataaagcaaagcattgttgtctgtccttttccattatattgccatttcngcatcggtctaacaagctgcgcatg

SEQ ID NO: 36765 - DNA, 932 bp, Heterodera glycines
aaaatattttcccattgaaaatttttaatacttaaattaggggaccgaaaattaattaaatttttcaaaaattttttttttacgaattttgcgcctccgccctttgccggcacacttcgttcagtgcccgcatttttgccatttcctcgtcctgctcgtcgtcgtcgttggcgcttctgctgctgcttcttcggcttatgtcgttgaaatactgtgctgggccctctagacaatcctccaattcctcatacactatgcaccgcgcgagcggtgtcggatatcgatcaccgaggtggtgtcgattttactggtgatgagcaccggcgggagcagtgatttgaggacccgcgccggcgacgacaccgccaccattggcactagcggcgagcgactgacgacgacggcacggagaggagttgccggcggaggaagaggacagtgtgccatggctggacgaacagcgcgtgtttggctgtgaatgttgttgttgctgatcggtggccattgccgatgaagacagaggcggggcaggggacggacccgcggttggacacgaagacgaagcagtgccggtagaacaaccgccggtaccggcactatttgcgccaccaccgcccattgtcgagcaggcagccaacaggtgggcgtagctgttcagcccgagcagtgcttcgttagcggatgcgcggcgctcctctgtgaagaagaaaactttttttttaaatcccaaacttagaaatttttcgaaaaaagcagaaactataagaaaatttagcgattttgtggaaaatattttaaaaaacttaagaattcttcataaaattttgaaaaatagctagaaaacatttcagaattttttttcttaaaactttcataaaaaaactgggctctcggacggatcgtaaccaagtttcgatctataacttttctct

SEQ ID NO: 36766 - DNA, 1336 bp, Heterodera glycines
gtaaattttgatggattaaaaatacagcaaaattcaattttaataatataattcaaattaagaggaaaatttaaattgattaaatcacaaaattagattggtatacaccaaaaaaatacagtattggacaaaaaaatttatattatattttttttctcaaacttcaactaagagaaaaaaagttcaaacaattttcacaattggcaaatgttttggtggaaaaaaatgaaagtggcaattacagtagtaatacgatgagatcgatcatttcttcgttgttaatgtaacccaaaaaatggataaattgaatttttttaaaacttaggaggctggataatattctggaaatttagggtttaccatattttcgagtgtaattttgaggaatttcatgaaaataaatgcaagactggcacaaatttgtcgtttataaaatttttttatctttatcttattctttttctttgacaattttgaaaattaattaaagcttatttgtatgcggggtggtatataagaggtggcatttcgaattccgaggccccgaaatttccgtaaatcgaaatccggtgacaaaaattttctataaattgatcattggaatccgaggccccaaaatttccgtaaatcgaaatcctgttccaaaaattttccataaattgtaattggaatccgaggcccccaaatttccgtaaatcgaaatcccgttccaaaaattttccataaattgtaattggaatccgaggcccccaaatttccgtaaatcgaaatctggtgccaaaaatttccataaattgttcattggaatccgaggccccaaaatttccgtaaatctaaatcctgttccaaaaattttccataaattgatcattggaatcccaggcccccaaatttccgtaaatcgaaatcctgttccaaaaattttccataaattgatcattggaatccgcggccccaaaatttccgttaatcgaaatctggtgccaaaaatttccataaattgatcattggaatccgaagtccccaaaatttccgtaaatcgaaatccggagccaaaaagtttccataaattgatcattggaatccgaggccccgaaatttccgtaaatcgaaatccggtgccaaaaagtttccataaattgatcattggaatccgaggcccccaaatttccgtatcctgagccaaaaattttccataatttgatcattggaatcccgaggccccgaaatttccgaaaatcgaaaaccgatgccacaaattttcccataaattgtaaatggaatccgaaggtcccaaaaattcccgaaatccgaaatccgatgcccaaaatttttc

SEQ ID NO: 36767 - DNA, 1300 bp, Heterodera glycines
  unsure (1)..(1300): unsure at all n locations
atgaaaaattttctcaaaaattcatctccaaaatttatttatttattgacaagaatttgtgattatttatctcaatactggtttgacttaattttgtacccttttttgataaaattttacgatattataccccaaaatttgaatgtttttagcaactattttcccatttttagcatctattttggggttattttttgaaactaaaaattaactaagtattttggcagtttttagcaactataaatcgtagcacttgttatggcactgcttaaggttgttcagacgcagttggccatactcattaggcccgctttgcgcatcactccctttttatttataaatatattttatttttgaaagtttaccgtcgttactctgctgatcagaaacttcattactactgctactgctgctactttcttcctcttcttcttcttcctcttcttcttcgttttctttatggctttttgttttcttttcttttttcaaaatcattttttttccaactttctttaagccttcttcaattttcttcgtcttttcgtccgttttttctcttgaagtcgtcgacttttgtttatttaaagaagtcaacttttttgatgagttttttgctggcggatcggacaagtccaactggcaattaggtgccattaattttaattgatagtaacaactatctccagagtttacacacatttaaaaaaaagaaatggaatacgttggatttatagaaaaatggaaacccaaaattaacaaatttttactggaaattttgatttttatttcttttttattcttaataaatatttataaatgtatttttttttattataacataaagaaaacatatcaattacaaaaccaattcgctgagcgccttactttttctccattaaatatgtgttgtttaacgttgattaattgtgcttttgctttttcatccgtgttgtttttagcataaattgacacccattggctgacctatgaaaaaagtttataattttattttattaaaagtttttacgtatgaaacaataaatattgacaaatttattttctattatattagcctttatttacgaaatgattaattaattatttatgcatatctaattaataaatatgcttaaaatggaatttttttaaaatttatcccgaaaacagaaaaattttaaaaattncatctcccgttgtttttggcgaaattttgatttttgaaaattttacacatttctaataaaaaaaatttacaatttttattagtaaatttaaaatttgtttgtttataaaaaccttc

SEQ ID NO: 36768 - DNA, 971 bp, Heterodera glycines
aattaatcggaggaatgtttgctttcgcattttgttcaccaatggcgttactgactgtctccagttggcgctgatgctcatatttgccatactcaatctgatcaccaatcacatcccaatttggttccaaatggtattgcctctcaaatttatttgaattgtttaaaaatgaattaaataaataagaataagattaatgataatttgtgcggtattggcaagtggaattttcagttttttgcttcaatttcggtgtgtgtttggcctcttttttaaaatgtatttaatcatgataaaaattcaattattaaacatttaaaatttcaaaaaataaattttaagaaaatttttaattttttaatttaaaaaataaagcaaaatattttttaaaaatgtccctaataaaaaatatctttccactataaattatttatttttatatttttttaataaagttttgtggtagcattgtgatcaatgcctggaatttactggtcatgcaacatttattattggcaattaaccgcctaattgtaattatgcgagcgcgatttcttggctcatccttttttaagcttgaggaggaaacggaggcgaaactgttcaatgttggcactattttaataacaaaataatataaataaaattataagttttgtttttagatatttgccaaataattttcgtgattttcattgactttattaagtaaaattcataaaatattttgtttaattttacatcatttcgatcatctttttttgttaaaaattaaattaaagaaaaataataattaaaagaaaaaaaattaaaaaattttttttctttaaaaaaaagaaaagaaaaaattttaaccaaaaagttaaaaaaggaaaaaagaaatcaaataaatttttggaaagaataaaaaataaaaaaatcactttcttaaaaaataaaccagaaaaatttaaaccttccaaggaaataat

SEQ ID NO: 36769 - DNA, 396 bp, Heterodera glycines
atgctggtgggttgagtgccagtgattgaaatgaattgagtgccagtgattgaaatgctggtgggttgagtgccagtgattgaaatgcagaattgagtcccagtgattagaatgctggtgggttgagtgccagtgattgaaatgcagaattgagtcccagtgattgaaatgctggtgggttgactcccggcgattggagaaaaagccaagaaaaggatgcgaggccgcgaagcggccgagccagtcgattttatcattcataatcctataatacaatcgtactacctagcgggggatgcgccgaatgcactgaccccaatagtaaaacatatgtgcctatgaatggatttatacaataattaaattaatttagaataatgctttttttttcaattg

SEQ ID NO: 36770 - DNA, 1130 bp, Heterodera glycines
acagggaatttttacatttattctctatgacagaaatatggctatctctttttgcgagaattttgtaccatacagatgttcacagcatgggcagaggggcgcggagagcaatggacattctattctacagggaatttataaatatattctctatgccagaaatatggctctcttttttgcgagaaattttgtaccatacaaatgttcccagcatgggcagaggggcgcggagagcaatggccattctattctacagggaatttttaaatttattctctatgccagaaaaatggctatctcttttttgcgagaaattttgtaccatacaaatgttcccagcatgggcagaggggcgcggagagcaatggccattctattctacagggaatttttaaatttattctctatgccagaaaaatggctatctcttttttgcgagaaattttgtaccatacaaatgttcccagcatgggcagaggggcgcggagagcaatggctattctattctacagggaatttttaaatttattctctatgccagaaaaatggctactcttttttgcgagaaattaaatgttcccagcatgggcagaggggcgcggagagcaatgtccattctattctacagggaatttttaaatttattctctatgccagaaaaatggctatctcttttttgcgagaaattttgtaccatacaaatgttcccagcatgggcagaggggcgcggagagcaatggccattctattctacagggaatttttaaatttattctctatgccagaaaaatggctctcttttttgcgagaaattttgtaccatacaaatgttcccagcgtgggcagaggggcgcggagagcaatggccattctattctacagggaatttttaaatttattctctatgccagaaaaatggctatctcttttttgcgagaaattttgtaccatacaaatgttcccagcatgagcagaggggcgcggagagcaatggccattctattctacagggaatttttaaatttattctctatgccagaaaaatggctatctcttttttgcgagaaatttttcccagcatgagcagaggggcgcggagagcagtggccattctattctacagggaattt

SEQ ID NO: 36771 - DNA, 786 bp, Heterodera glycines
cgttcatcccgggtgcatatgctgtacattcggatgaagattaccacccaccttgtgatcgctttgtgactcggtaaaagaaaaagcaaatttctgtccggaatgaaaagttcgaactcggcggcgctgctgtcgacaccatgaccactaactttctcattgtccttcaaactcttgactcaaaatcttcaaataaaggtgcccagacatcaattctgtccgagagttgtgctcgacgctgtgacattttgaaatacgtggaccgccgttaccgagtgcaggcccatgggattggcgggtcgcaaaagatggtagggaggtatgttaacggtccctgaacatcccaaagggagtaagaatattaatggttgggtagttttccagaatcttcgcctgtcaagtgcaggtcgatgacaatgtttttgcgtgtccctttgaagtgatgagcgacagagacgtcgacattttgtgagacgacaataattaaatctttttgctctttcccctgaaattccattatcgaaaggttcggcctgaacgcaatgcttcgccaccgttgcaacatcgacctcaagaaaatggtccttcgctttggggacggcacggagacgcctttcctcagtgagcaggaagtcgagcgggagaaagaagcgattgcaatggcccaagtgatggacgaagaattcgcgaagtgatgaaaagggtgatgatcgcatactgttgactagagcccggtcgggaccgggattttgccgggactcccggtcccggttttttggacaaaca

SEQ ID NO: 36772 - DNA, 921 bp, Heterodera glycines
aattacagagaatacatgaaaagattaaacataattaaattattattatgtaaattagctatgctgttgaaaaaaaagtgtgcgaaaaattaacgtgtaaataccggggcgcaaatgtgggagacgcaaaagtggaggcgctaatgtggggggcgcaaatgtgggaggcgcaaaagtggaggcgctaatgtggggggcgcaaatgtgggaggcgcaaaagtggaggcgctaatgtggggggcgcaatgttggaagcgcaaaagtggaggcgctaatgtggggggcgcaaatgttggaagcgcaaatgtggaggcgcaaatgggggagttccaatttttcaattttttaaaataaatttaacaatataataacaaatgtttattaattttttttaatttacaaatatttttgtaaaattaataaaaaataatagcaaaaatttttgcatcaaatgaaaaaaaccgggaattggagacaaataattagtcctaatagtactgtaaggcatcattggctcagccaatcagagggagggaccgagggaccaccccttcccatctctcccaatgcaaataaaagtaaataaataaatttaagagaacatgtgttgaagataaaactaaaagctaatgaaaataaaattattattggaaaagaactcaaaatattaaaaaaatggttgttgaaattaacattaatttaatcttacaaattttaataggctgaaaaggtcatttacatgagtgataagataaacaacaaaaaataaaaataaagaaataaaaaagtaaaataacaaatagaacaaatagaacaagaatagctaaaaagatattaattaataaatagaataaaatttatacactgcaaaaactttcaaaatgataaacttttttaattcttttaaaataaaatattact

SEQ ID NO: 36773 - DNA, 1008 bp, Heterodera glycines
cagtgcacagcaaagcagtgtctgaagtgacgaatttggttagccaatcattaggcaatggcagtcacggcattagtgtcagcccccttcgggaataaaattttcacgttctctctccgatcactctcttcccccttaccccttgcctctctgaccgatcacttttttccccacattactacaccctcagattaatccattaccccctctaccccattcgcgcctatccgatcacccgctcactctctttcctttccctctatctccgatcattattttaccgcgttacttccctttcctctctcattccttaccccttctacaccattctcgcccattcgatcactctcttccctttctaccctctcccatccgatcagtctctcccccttccctctctctctccgatcactctcttccccttaccccttccctctctccccgaccaccgattacttcttcccttgtgtccacctttgcttcatcttcgcacggatatctgctcagcttttcctgtgaggttgaaataggctctgatgcattgcgcagtccctcaacaatatttctgattgtgatcaattgaaatgagtttcggcgcggaatttgcggcggatggcactgactcgccaacggagtctgacccgccggtgccgtggcggagggactttggggaagaagcaattgcgaagggggagaaaaagacggtggcggaggaagctctgcttaatgatccggtcaattgggaaggaaaattgagtaatatgaatccaattaaggcaaaaacaggtctatgtttttggagccgtaataatcgacgaattgtacctgacatgccttgcaggttttgtgcgtggatgcaattcccaggacgaactagacttctaatggtgcgtaaagaatttgtaccaacagaacaccgaatggctgagagaacaatttgcgcttcccccactacggcagttcgttcagtacgcttagacatttgctgccgcacggtaatgacgacgg

SEQ ID NO: 36774 - DNA, 657 bp, Heterodera glycines
gggattcgtccgatgttttggagattgcaagtcaggtagaaaccagcttgcagagactccaacacaagcaattagcctgatcggtttatggtcagcgacaaatcggaaatccgtagaccgacaaatgaaatcgatagagaaaggagccactgagacaagaggggaagcgggaagcaagagaagcgcaatgtccgagaaagcaaataggagaaggaaacgagacaacgacgccctccccactcgccccccccccccctctccctcattttcggcgagtaattcaccgccccgtgaaaaaagttttattataacatttaattagttagttctttgcccagccgcgcctcgtcccattgattttctccacattttccactttttaaatataatttttattcccaatttcgccaattccccacccaaaaaccattccccccccctccacacacaaacactttcatttctttcccaatttaattttatttatttattatttatgtattttgttaatttttttattaaacaatttttccttttccatcgatttgaattttcattaaagtaaacgcaaaattatttgtttaattatgtattaggtgtttacaaaaatcataaattaccgtttgcttttagcaaaagaaagaattgataatgatg

SEQ ID NO: 36775 - DNA, 1104 bp, Heterodera glycines
aaaggggggataattagagactgggggattatgatagagggattattttttaaaacacctcgtagactgggggataattagagactgcgggattaatagagacttatacggtatacggcggcttttttcaacaaacaaaaaataaatgttggacaaaaagtgccgccgggaaaattttgtaattttcaatgcgattgttagatttaaaaaggtaattttgagtgattttggaaaaagttcgcgaaatttttagggaattttggtgaggtaggtaggtctcttggaggggataccagaaaatccaagaattttcagcgcaaaaaaaaaacaacaactatggtttcctttaatttcggctgtggatggcgttttggacctgctccgcgctacgcccttgcgcctgcccatgcccacttcagcactcacttcaaataggcccacacatggccaaccccgggcaccacatgcacttgcgcgtcgccgttccacaacgcccgggcattcggcacgtgcgcgttgtgcggcacgtactcgtcatgttccgccacaacaaagcgcattgcgcccgcaccggtaggcggtgtcgggtaatggcacagattggtgaactcatccatcagaatccacatcagccgatgggcacgcgagtcggggaacagcttggcggtcacgtggttggcatcgtcctggaatttttaagaattttttaaaatttgaaggggtcaacgaggcctggattgtttgggtttggtagcgtcaacaaatttccaggggaaagaaaggaattcccacccattaaaatgaaaaagttttttaaggaaaaactaagcatttttttgttgttgaaaatttggcatcaattttctaaaaattcgtaaattttcctaaagttaaccaaaatgcacaaaattggtcgaaacaattttttccggccatattgccgttaattcactgttttccaaaaaaatttcggaaattcagtctctttttgttttttggtcgtttagcttctttgaggtgatcagttttttttaatttacaggctaatagtcaaatagttggggagctatcggatgaaaccccaagtggttcaattctgacact

SEQ ID NO: 36776 - DNA, 1053 bp, Heterodera glycines
  unsure (1)..(1053): unsure at all n locations
ttattttttgctattttatgccttctggcactttaatttcaatcaatcaaattcattcatattgttgtttggcaaacctgcgaatttgccaaacactcactcattcattcatgcgcaaatatgggccaaatttgggcggcgtcaccgtcttggccaatggtttggcataaaagtgcgtctagaaatctaatggaatacgcaaacaaaaacgtgccgaatacaaattcaaaagtgcattaattgtccatgccacacttaaaaatgggtaaatttctctaattttcatgacattttttaaatattttttattcgaaaaaaagaaattagtttaatttttattggtttttgaagatggcacgaaagtgccattgctcttttcaaagttaaactaataccgctctaattagccaattcagtctcattttatgctaattggccaaattctttccaacaaataccttttattaaatatttatttaagaaattaattaatattttttcgcaacatcaccaaacagcagataaaggtgatcaaataaagtgtaatccgtttactcgacaactaaattttgtgctattattatcttgtcattttggccgtgattttttttcaaaaatttaattttaaatttaaattttaaagattcatttttgcatttaaaattttatgcccaaccaaatttggtattcattaaatttttttttttactctttttcgaaagtgtaaaatgcaatttgaaatgaagcatattcccaaagggtcgccacgtccatttttggcacaaaatttggcccttttttcattttaggaaaattaaaacaaaaatttgcattcctctaaacgcttagcatcattgaaatttcaaaaaaaaagcattaccaaaatgacaaaaacaaatttaaacgtaattttttccaaattggcattaagcctaagccgagaaggcgatgatcacattctttttcaattaaattgtttttttgtgacgtgattcgtcctgccattataaaagtaaatttttttccccctctnaatctcantataaaaattct

SEQ ID NO: 36777 - DNA, 1062 bp, Heterodera glycines
agagtgggggctgaacagaaatgcttttactcgggaattggggtgtgaaaaaggaaatcggcattcagcgtcagcaagcgaaaaaccatggaaatttcccaaatcgtaccaatcctggcacaatcctacttactgcactgagatatttaaagtaagcatattcataaatccatatttgggcagccatgcataggcatatttcgcgattgcaataaaaaattaatgacattgtatatggcagtgggcaaaaagcgtggcattgcatatgacagtaggcggggagaggtcggtggaggcagcacaaaatggcaatgaaatgaaatttattcattcatttattgaattaaaatataatttttattaaacaagcataatttatataataattttctaaaaaatatatagaatataatttttattagtataatgatataatacatagataacttttttttaatctgtatgttaaaacttaagatgaattatcatcaatttcttatccaccgctttcccttactgtttctgcttctttttatctgctgcaacaatggggtaaatggtactggtggtgacaaaaagactcgtcgacgtactgttcttcctggtccagcagatcacccaaattttcaaccgaatctggcagcgtcgcagggtcttaaaaaattaaaaatttcaattttcttttttcgtagaaaggttgtgaggcgggccattccatcaggcgtttcgcctggttaaattcttatagatttagttcaaatttgttacagttttaccttaaatttcacagtttgaaaattgattatttaactttgttcattgtagttcctttgcataattactaaagatattgaaaaaaagttaacacaaaaacttaattctaaataaaattatataaaaaaaacagtttaagcttgtttttttaaaggaagtgccaattaattatttttacatggaaatctcggatttttaaagatattttaatttgccaaattcaaacaatttcttagaccaaaaaaagaagtttcgtttgcactcattttggcaatcctaaagaatggg

SEQ ID NO: 36778 - DNA, 901 bp, Heterodera glycines
ccagaaaaaatcactatctctttttttggaatattttactctttagagggagagcatttaagcgactcgctgtgcttgcccactgcatttcaaatagctggtaatatttatttctccggcctaatccagaaaaaatcactatctctttttttggaatattttacgtgtcaaagggtgtgcatttaagcgactcgctgtgcttgcccactgcatttcaaatagctggtaatttttatttctccggcctaatccagaaaaaatcactatctcttttttttggaatattttacgtgtcaaagggtgtgcatttaagcgactcgctgtgcttgcccactgcatttcaaatagctggtaatatttatttctccggcctaatccagaaaaaatcactatctctttttttggaatattttacgtgtcaaagggtgtgcatttaagcgactcgctgtgcttgcccactgcatttcaaatagctggtaatttttatttctccggcctaatccagaaaaaatcactatctctttttttggaatattttacgtgtcaaagggtgtgcatttaagcgactcgctgtgcttgcccactgcatttcaaatagctggtaatttttatttctccggcctaatccagaaaaaatcactatctctttttttggaatattttacgtgtcaaagggtgtgcatttaagcgactcgctgtgcttgcccactgcatttcaaatagctggtaatttttatttctccggcctaatccagaaaaaatcactatctctttttttggaatattttacgtgtcaaagggtgtgcatttaagcgactcgctgtgcttgcccactgcatttcaatagctggtaatttttatttctccgggctaatccaaaaaaatcaatatctcttttttt

SEQ ID NO: 36779 - DNA, 287 bp, Heterodera glycines
tttattaatgcatgttagatgaaaataaagcatatgacatttaacgcagtaactaagaatacgaaatgaatacgagaaattttttcgagtttttaaaaaattttagtcatttatttaaaagaccaaaataccctctgctacaaaaaaaatgctttaggaaatggctatccaagcacctccgctaaggcgcgtttgtttttaatgagacctttccaaaaatttagtgatcaaggggcagggcgtatctagaaaattttttcgggggggcagggacggtcccagggggg

SEQ ID NO: 36780 - DNA, 950 bp, Heterodera glycines
ctctagagtctcagagacatgttttatggtacctgtaaaaagtgatatataatttaattgaatttccttggtggacccttcaaattttaggggtatgaattgtcttgaaggcactggcaaattagaaattgttgccaaagtttagatcaatttttaaagcatttgttagactttcgaacattttttaaatttccccttataaatcccacccatttccctccacctggtcaatgccgaaaatgaatgtgtcattgtgcgcgaagatagcttcaaaaaacggagaaattagcgaaaaatcgaaaaaagtcgaaaattcactaccaccaccaccaccaacggcaggtccatcgcatggcaaacgaagggcgaccaaaattgccgcatcgccagccttgctcatgatgaggccctggaactgttcggcgatggccaaaagccggatgttgggctgaaaatggaaaaaattatgacagacatttttaaggcgcgagcaaaattaatcaaatcaaatggttttggaacaaaatctgaaaatcagaggtcggtctaaaaactagatccaatcaaaagccgagagtgtcaaacaaaacgaaaccgaaaaacgggattatataattaaagggacgaaaacaacttgaaccctttttacattaactaatccgagggtcacaaaaattgttgaattaataggaatatttttaaatgcatttttaacttgcaaaaacgaaaaaaaaatttttgtttgaagggaaggaatgaaataaaactgaatttatttttttgcaaaataaatacccacccgaatggagagcaccgcgtggtccgccgtccgtgccgttttcaccccgtaaaatttgtgtttgccgtccgccgtgccgaaaacgaagccaaaggcgcgcgcatccgtcgaagtgtcgcgggcaatgaacgaaattttggcgaccggaaaa

SEQ ID NO: 36781 - DNA, 1030 bp, Heterodera glycines
acccaacagcattccaatcactggggactaaacccaacaccattccaatcactgaggactcaattctcctgcatttcaatcactagtgactcaattcatttcaatcactggcactcaacccaccagcatttcaatcactggcactcaacccaccagcatttcaatcactgggactcaacccaccaacatttcaatcactggtactcaacccaacagcattccaatcactgggactaaacccaccagcatttcaatcactggcactcaacccaccagcatttcaatcactgggactcaattctgcatttcaatcactgggactcaacccacctgcatttcaatcactgggactcaacccaccagcatttcaatcactgggactcaatccaccaacatttcaatcactggtactcaacccaacagcattccaatcactgggactaaacccaacagcattccaatcactgggactcaattctcctgcatttcaatcactggaacccaaatcattccaatcactggcactcaacccaccagcatttcaatcactgggactcaacccaccaacatttcaatcactgggactcaacccaacagcatttcaatcactgggactaaacccaacagcattccaatcactgggactcaacccacctgcatttcaatcactgggactcaacccaccagcatttcaatcactggcactcaacccaccagcatttcaatcactggcactcaacccaccagcattccaatcactgggactaaacccactagcatttcaatcactgggactcaacccaccagcatttcaatcactgggactcaacccaccagcatttcaatcactgtgactcaacccacagcatatcaatcactgagactccattctcctgcatatcaatcactgggactcaatccacccacatttcaatcactgggactcaacccaccagcatttcaatcactgggactcaaccccaccacatttcaatcactgggactcaacccaccagcatttcaatcactg

SEQ ID NO: 36782 - DNA, 854 bp, Heterodera glycines
cagagacaaaatgataggataattaatggggaatggatctttcgttaatttaggacatttcgaagtgcggacacttccggttaatgttttgacgagaaaaaagtgatggcttttctttctcgagtctttgagactaaatctagagacagactcctaaattacgtggcatttctggattttagtttcgagattttgggctatttaaatagtcatgcatattttttttaattaaaaaattatttcatgtaatttattaattgtaacaattaatttgtcacattttcctcgacagaaaatacgacgaggcggtcaattgtattcacgaaaaagtgctgtgtttgagctccaacgtttttgaagtgattaccagcggagtggaacatttgtgcaaagggccaaaaaagcaatttgtgaaaaagcataagacatgcttggaaaagaatttggacaaagtgtcgcagggtaatcaattagctaataagaggtcaattagctaatgagggccaaaaagtgagacaattaaatgcagttaatacaacgaaaattaatagacagaaaaacaactaatggaacaaaatagttattatttttaaatatttctattacaaaaatattattaattagcatagcgtatccatattattcaactaggtcatactgtaggttgatggtatttatggtgtcgactgggctggtgttcgtacctttttagattgccattgtgcgttcacattggaatttgaatttaattcctgaaatggccatgatcgattgatcagtttgtcccccccccctcattaaggctgtgatcagaagtgccatttggcgcgttcactcgcccaattctcgcgtcg

SEQ ID NO: 36783 - DNA, 457 bp, Heterodera glycines
aattgttgagatcattcaaattgccagcaacgcaatccgatgggcttttgtacgggatgggaggggccgaatggggaggggggggggggcgttaaattgccttcgggcactactgacagctgcgcgaaaattcgctcaacaattcgattttttttttgctcgatttagctttgctgaggtgtgtttaaacctgttcattcacaccgaattcaactggaattacaggtgttggaacgaacattgaaagcacagagttatttaatttgaaagcacaaagttttttaattgtgggaacaaaacatttttagcattgacaaattgagagaataattgaattataattaaaaagttttaaataaatggcaagcaaaaaaataagtatgtgaaagaagaaaatatggagaaaattgtggcgaaatcttttggatgacagtttaaatgtgaggggagggggaat

SEQ ID NO: 36784 - DNA, 1208 bp, Heterodera glycines
atgggacagcagtaccattcagtggacgggcactggcttcccctttttagcataacagtgcgaggaccgaccgatttcagcgacttggtggtgccgaaaagggaaacgcaacagcaaaagacaaacggggcaatgccatcgacagaaaaagaggacgacggatgggtggaggtgaagaagcggccaaagctggaggcgaagaagcggggacgaaccaccaataaatgagtagagggatattatgcggagattccaatgaaacggagtgtggtactgtgcaagacgtaaacacccggcccactttttccggggggggggggggaccctcgaagtcgagactttagaaatcggagaattttctggagtatacatttttaaaagccatgttttcgtcttgcacaacactgtaaaaggtagttgttttacatgataacttatctttgtccaatttggcaattgaaataatgcatttttgtgtgaaaatcatgtgtgtaccattgaataagccagtttttgattgtaataaattggtgatgatctctttttgtgtgtaaattgttataaaaacaaatgaccaaaagataacagtaacaacattttttcgcaaggtggacggaccattttaatgtaattaacggttaaaaagtgccaattcttgaaactggctctaaaatgatcgcatcttcggccttttcttcgccccggcaacgcccgcggccattgccattctgtcctgcgttcgctgtcgcttctcctccgcgctttcttcgctcggtttggcccactccaacaccaaccgtcgaccgtacaaatgcgtggaatgcaccagcgcgtccatggcgcggtgcgcgtcgctcacggagagaaattcggcgaaacaaaagccgcggtggccttcggagccaggctgaataaaaataatattgtaaaatatttagatttaaaaatatccaagtgtatgccttggatattccaaaatatttggtttctagccaattgtgccacagtccaaaaaggcacataataattctccgaaaccaaaaattctcacttttgccttcccttttattttgctgaatttaccttttttggtaatcggatgaagttgagttcaccaaatgcggaaaacagctgcgtaagctccttgagattcgcctgaagtttttaaaaaatgtttttttgcattttctaccacaggaattaatggg

SEQ ID NO: 36785 - DNA, 903 bp, Heterodera glycines
  unsure (1)..(903): unsure at all n locations
ttacatattaattcaatgcttccgtccgcgttaaacatgaggaaataaattttgttttaatcgatgaaattttatttcccaatttattgaaattttcatattatttgtcctggtaattttattttcatggcaaaacagaattgacgctttggaaaatgtgtggtcatacaaaaagacgtccgccgatttgaccgtcaaatttgccccattttgcgacaaacattcgtcagttgagctgtgccgatgttttttttaaattttatctattttctccgtttaataaagaaatgggcaaaatgttaagcttatgtgaaatccagtcctttactgcacggccatttcgttccaaggcaatccccgcctcttatcaaccgccactttccgcgttttaacgtcaatgtcccatcgctgccctggctaaaaagttatgaactcggcacaattcaaaagatttcttagacgccaatgaaaaaatattaaaaatgaattcattcagcggttcctaattttgaaagaatttcttacggaaataaggaaaacgaaagtatgttttattaattagggggcaccataaaatgtcggcaccgcaaatattattttgaccaggcgccgcaaatgccggcaatcatttggacaatttgcgtcgccgcatttcaccgacaattctcatcgatctcaacattaattcnattcaatccggtcgtcttctacccaagaaccagattcagctcccatccctgctgataaatgaaacactggctgggaagactgacaaatgtttgaaatgatttttattttgtcatgtttaaattctttttaccaaccaaaaaaaattattcttcattttatttttggcaatacaatttttgtttacatattaataccatgtgcttccttccgcgt

SEQ ID NO: 36786 - DNA, 1716 bp, Heterodera glycines
aaaaaaagggggggttaaaaaattttttggggaaaaaaaaaattttaaaaaaaaaaattcccccggggggaggggggggggaaaaacttttttaaaattttttttttttttttttttttttttcaacaaagggttcaaaaaaaaaaaaaaaaccctccgggggaaaaaaagggggttaaaattttttgtgaaaaaaaattttaaaaaaaaaccccggggggggggggggggaaacatttttaaaattttcttttttttttttttattttctcaaaggtgttcaaaattcaaaaaaaaacacccttcgcggggaaaaaaaaagggggtttaaaaagttttttgtgaaaaaaaaactttacaaaataatacccctgggagaagggagtgggaaacatgatttcaaaattttcaatttttctagtctaatctactcaaaacggttcagaattcgataaaaataacattcacggtgcgaaaaatggggtttgaaaagtttattggggaaaaaaagactttacaaaataatacccctgggagaagggagtgggaaacatgatttcaaaattttcaattttttctagtctaatctactcaaaacggctcagaattcaataaaaataacattcacggtgcgaaaaatggggtttgacaagtttattggggaaaaaagactttacaaaataatacccctgggagaagggagtgggaaacatgatttcaaaatttttaattttttctagtctaatctactcaaaccggttcagaattcaataaaaataacattcacggtgcgaaaaatggggtttgacaagtttattggggaaaaaagactttacaaaataatacccctgggagaagggagtgggaaacatgatttcaaaattttcaattttttatagtctaatctactcaaaacggttcagaattcaataaaaataacattcacggtgcgaaaaatggggtttgacaagtttattggggaaaaaagactttacaaaataatacccctgggagaagggagtgggaaacatgatttcaaaattttcaattttttctagtctaatctactcaaaccggttcagaattcaataaaaataacattcacggtgcgaaaaatggggtttgaaaagtttattttgaaaaaaagactacaaaataatacccctgggagaagggagtgggaaacatgatttcaaaattttcaattttttctagtctaatctactcaaaacggttcagaattcgataaaaataacattcacggtgcgaaaaatggggtttgaaaagtttattgtggaaaaaaagactttacaaaataatacccctgggagaagggagggggaaaaatgatttcaaaattttcaattttttctagtctaatctactcaaaacggttcaaaattctaaaaaaaaaacatttcccggggcgaaaaaaggggggttgaaaaatttatttgggaaaaaaaaaaattttaaaaaaataatacccccggggaaaaggggggggggaaaaaattatttaaaatttttttatttttttttatgtttttatccactcaaaaagggttaaaaaatttaaaaaaaaaaaaattatccggtggaaaaaaaagggggttttaaaaatttttttgggaaaaaaaaaattttaaaaaaaaaaccccccggggaaaggggggggggaaaaaattttttaaaatttttttttttttttttttt

SEQ ID NO: 36787 - DNA, 659 bp, Heterodera glycines
ttttttcaagtgtccgttttggggtactcaaacatatatgggggagcaaatatcccaacgcagaattaaagtacaggctatagtgaagctattccggaaggattcggtctccccataaatctgggcgcatcggttcggggggactgccccgaaaacaaaaaaatcgattttttcaagtgtccgtttggggtactcaaacaattatggggagcaaaaatccaacgcagaattaaagtacaggctatagggaagctattccggaaggattcggtctccccataaatctgggcgcatcggttcggggggactgccccgaaaacaaaaaaatcgattttttcaagtgtccgtttggggtactcaaacaattatgaggagcaaaaatccaacgcagaattaaagtacaggctatagggaagctattccggaaggattcggtctccccataaatctgggcgcatcggctcggggggactgccccgaaaacaaaaataaatcgattttttcaagtgtccgtttggggtactcaaacaattatggggagcaaaaatccaacgcagaattaaagtacaggctatagggaagctattccggaaggattcggtctccccataaatctgggcgcatcggttcagggggactgccccgaaaacccaaaaaaa

SEQ ID NO: 36788 - DNA, 943 bp, Heterodera glycines
  unsure (1)..(943): unsure at all n locations
cattttacatagctcctggacaaaatgcgtcagtgatagaatttaagtttgaaattattaagttcttaggagttaagctttggaaattttgtaaaaacaagcaaattcgaaaaacccgaacatttctgatgggaatacagtaggtttccatcgaccaattaccgtataaagttttagtcactctactaccgtttctcacattttaaaaacacaaactattcactgaagcatttcccactgacagaaataatttttccaattcgcatttccaaatttatacgaacaaaatttggtaaaaataaacaatagtataacaaacagctgcataaaaaatttggtaatcagaaatgagttggcccaacatattgtagtttggtaaaactcattgaaaaacaaaaagcgaactgaaaaacgcaaaaaatccaaaaaaatttttcttggttataaataaatagcggatttttaggttaacttatttttctgtggcgttaattcaatgagaaaagcacaaaaaacacatttttaacgcgaaaattcacttggaatccctattttggactttttgcctctatttgggcatttttgaaaatccttacagctgcaaaaaaacgcacccattaggaccgacctcccgaccccttgaaaattaatttttcaaaaagttagaaatgaagaaattatttacatccatttttattttcattaaaattttccccattatttcgcgattttttgggtccctatttagccccctaaatttgatttttcgccctaaaatccactcctagtcataaaattgccnaaagtggtccattctctgttcctcttcccgttgtctctgtttgtttaacatttccctctgggctttctttcantagcaccgagtgagcttggcgttcccgttgcaatgtttcgaatggntgtggcgtcccgtcaaaaccta

SEQ ID NO: 36789 - DNA, 333 bp, Heterodera glycines
cggctacaacccccacttgcattattcgagtgcggcacgcagtgcccttttcatggttgttgccgtcggctctcttctcaccgttttccctctcaccattttgctgaaccaatttgggtcaaggcaagcattgactgctcctaatgaactgccatgaccaatgctttttacaatcaaaggctcgtctttggctgtttgggctttgtcagtgcgttggccactttattggtacattttacgtgccattggatcaaacaaataatatcaattaattaattttttgggttccctgaaagggaatctcggctttccctttatgctgttaatgcgcct

SEQ ID NO: 36790 - DNA, 1270 bp, Heterodera glycines
gattgttcggtcttagtcatggcattttttgattgttcggtcttagtcgtggcattttttgattgttcggtcttagtcgtgggattttttgattgttcggccttagacgtggcattttttgcattgtgcggtctgcttcatcgtggcattttttttgcgtggatgagttgggtatggatgaattgggtatatggatgttgggtttagataagttgggtttaccccatcgaataactattttttcctgggtttcaatgcaatcaataatttatttttatttttgtttttgatcagtgtttttggtttttctttaggttaactaattgttctaattaagaagatgcccccgttttactgctgctggcttgtcctggcagatgacaagtgaaacctaaaaaacaaaagataattcaataaaatgggaaaaaattatttttaaaaaatttaaaacctaccacacaaagtacaagaaagagcgatgcaaaaagcttgaaagaatgcatttttttcgtaggtttgttaatgagaattgggtaattttgtggaaaggaaattggtaatttttgagcggaatgaatgatttggtgctccaatttgtgcgctttttaaagggctgttttggcttttgctctcacacccatgccattagtaacacattaatttgtgaaataattaatatgcgtgaaaatggcaacgtaaatgtttcgacgaatgtgactgattgacaaataaaagcattgaagggccattagtaacaaaaattctgtatggaagaaaaaactgaaaaagtggaaaaatgaagaaataaatgtttttctccgatatgactgattggcaaacaaataataaaattgtatattagtcaaaaataacataaaaatgacaggccagcattttatgattaaaaaaagtctattaaatattaaaattattttaaaaagcggaaaatattaaagttttaaaatcgcttttaagtctaaattaccaaacaatatcatttttaatacatttatttagtgtttttttaatattttaattgaatttaataattttggtaagaatacttaaatcagattactgtacctaacttctaggtctcggttttttagtttcggaaaccgagaaatttttacactgttaagtacgaccattgggggggggaggtgggagaagagaaaaattattgaattttaacaaaatttcttaacaaaattcattaaaatcctaaaaattttcccaacgcggactccaaaaactcctaatttctctt

SEQ ID NO: 36791 - DNA, 55 bp, Heterodera glycines
ccgcaggcaccgcgccagccggcggcaacacctgcacgatcacgcgcgcctccgt

SEQ ID NO: 36792 - DNA, 1129 bp, Heterodera glycines
tttacaaattactgaatttatgaagaaaaaaatagaaatggtaagaagttaatttaaaatttaaattagtaaattggtttctagttgcatctgattttttgaaaaatattacctaatttagtctccagcaattaataaattgttaacaaaaattaattatatttaaaacaatttaaaacaattactttatcaaaatagggtgtaaaaataatgcataaaaaactataaaaccaataaaaaatatataaaggaaatagaagcaaaatttgctatatcaatttttttaaatttagaaatatgaattatttaaacatatatttttatttatggtttaaacatcattaacctaaaagaggaaaaattaaaaaattattaatacaattaatgaaagtgttgaatttaaatttataaataagttctcatttaagatattttaatgtataatattaaatgctgattttttttccaataagcctcggagaagtcaagataatagtaaattataaaatagttttttgtccataattaaaataaaagtattaaataattgactttgcgcgctaaaacaagagttataaaaatcaaataatttgaaatgaaaataaaaaaacacgtttatttttagtttaaaaaatttttatgagtaaaatttttaccatgaatgcttttttcactaaaatattataagaaagacgatctcactatgcaattcttaaatacatataaaataataaaaatacccaattttaagaatttatggttatttaagcatgttaatatcaacgaatattaggtaaataaattataagagaaattaacaacatgtaataatttattaactaaaagaatgtaaaaataaaattcttaaatgcccaaatggctaatcttaacgtaaaagaaatgattaagatttccataaaatttatttttaaagaaattggaaaaaatcaaattaccaaaaatagggtttttctattcaaaaagctaatttatcgaagaaagaaaattttaatcaagcccattcgattaaatttaatattgcatgaataaattgggtaatattaaaggtgaagagctttaatatgataaaaagagaatacattttgaaaaacggattaattattttaaa

SEQ ID NO: 36793 - DNA, 1216 bp, Heterodera glycines
tataacaaaaaatgcaaaaagattttcatgaaaaaaaaagattgtcaaaatgtcaaaataatggcttaattaatttagttgcgaaaaatcaaaacagcgattcctagtgacgaaaaaaatttccgggttttttttttgaaaatttaatttgtcattgatatttctttgaatttatttgtgtattaatttacatcgcaatttggtaatttctcagcacgatctttcttaaacccatcaaaacatattgggcattcagtatttgttgcttttttatttctcgttggagcagtgccaggtgtattaataaatattatgatccagagaataattaatgaatgatgacaaatggacatcccgaaaaaatttttttaaatataattaggactatcaattatgagtctttttggtagcaatttgttaaaaataatatagatttagtaataggaaatgttttaaggacttcttatgtagcgatattcaaaaatataattgtataaatgtacattttaaaaatttatattaaaaaatattaaataattcatgtaatgcgcgtcaatccatcactaaaattaataaatctataaaagcgctagcaattttattgcttaaaaaattggcacaaataataaaaaggaaaattataaataaattaataaaataacaaaatcaaaatatacaatatatcaaataatttcaaactactttatggttaaggattccattttttacgaatatacatttagtctagagatcgatgttttgaaaaaacctgtacctgcgcctgtatttcccgaatggcctgtacctgtttttctttacaaaagtacaggaaaaatacaggctcctcggtttttgtccaaaaaatcattaaaattatgtattttttgaatttttcctcctttttcagacatttcgccaaaaataatgattaaaaattaatacagtaatacaggtttaaaggcatgtacctgtcggtctaagtcagttgggcgctcacagttgggcgcacacggttgggcgccagcatgtttttccactataactttctacaacttttttctttgtcatccaaatccaacatttttggtatgatccgaaagcttaatgtatttagaaactttttctaagccattgcttcgcgattagacaagtatcaaaaaagttatacatgaaaattaagaaaaactcgaaattttgaagtttttgcttaacaaaa

SEQ ID NO: 36794 - DNA, 969 bp, Heterodera glycines
agaaatttgagacatttcgcgcgtctttggcggcgccgctgaattggccgcgttggcattttgtgccgccgcggtggactccgtttgcgagaacatttggcacctgcgcatcacttgctcaccgtgcaaccactcgtggttggcgtccaacacaaagtctacctgaattatttcatgctcctaaatccattctcggacaagtcgcttctcgtaattaaagcttagtctcgagtctcagtagcaaatcgcactatcgatttcagttctcggcctagggatttccgatttgtcggggaccaaaaaccgatcaggctaattgcttgggttggagtctcggcaaactggtttatacctgagttgtaatctcgaaaaaatcggacgaatcccattcttagtctggtgccaaattccagtttggcatcgattctcgcttttcccatgccaaatccatatctgctaattgcttgggttgaaatttcggcaatttttcaatttcagacggtgccttttttccatatctgctaattgcttgggttgaaatttcggcaatttttcaatttcagacggtgcctttttttggcccatcagtggcctccgtcattttcagcaagtataaagagcaagcagcacacaccttctccgccaggatgatgtcctgcaaatagtcatggaggttcttcgcctgcaaccgtttggcatccaacggctccaagtccaaaagttcaccgcccacgcatttgaccgtaatgcacacgcatgcgcccgccagcaacgacaaacgcatggccaacccggagccgggaagggtgcgcaacatggcatggaccaaaaattggaaaagcatgaattggaaaatatgaatttagatgtaattaattaattgttggccatgatcaaattcctctggtcagagaaggacattgatcataatcagactgcgatgaaatcttgcgcttttgatcattgatc

SEQ ID NO: 36795 - DNA, 472 bp, Heterodera glycines
tgcattttacactacgtcaaaattgaagtgcccatacctcagccggtataagtcatagagacatgcggttttttgaatattgtagagaattttgagtgttgttaaacacatgaccatgactgtatgtcttgaaataagccacctttaatatttttgaaatataaccaggattctaatcgaattttctgctgctctcctatgctttcaccagtgagactgcatgattggaatgataggatcctgaaatgtataatgattattccgtccattcattttcgacgcgcttttctggtctatgaaactgactttgactatcgcctttaaacatgcgcggcctttggacggcgtttggccttgtctttgggtacggcacattgaacaccattactatgcctatgctggatgagggggtgagttcaattaatatttttgagatgataattactataattatagctaaaattgcagcgca

SEQ ID NO: 36796 - DNA, 114 bp, Heterodera glycines
aatatcgctgggaagcaaaccatttaaggccgtttggtcattttcatgtctttttaaaattttaatacatcggaatgaatgtttttttgtgcgggggagaaaaagcgtgggaaa

SEQ ID NO: 36797 - DNA, 868 bp, Heterodera glycines
  unsure (1)..(868): unsure at all n locations
ctgtatttaatctggggactcaattctccggcagtcccattaccggtattcaattatacgacattccaatcactgtgacctaattcatctgcaacccaatcactgggactcaattcttctccgacattccaattacgggactcaatctcaaaaaattcttcgcacttaatcttgggactcaatttccaattttacggcagaaaatcacagggactcattctcccacttctttgcatcccaattattggaactcaattatcccttccatcgtgggactcatctcaccgattcttcgacatcccagtcgctgggactcaattcttctccggcatcccaatcacgggactcaatctaaaaattcttcggcacttaaccatgagacagtttcagcaaatttacggcacaaaatcacagggactcaattcttctccgacattccaattacgggactcaatctcaaaaaattcttcgtcacttaatcttgggactcaatctcaccaatttcatgcggaattctaataactgggactcattctcctacttctttgcatcccaattattggaactcaattatcccttccatcgtgggactcatctcaccgattcttcgacatcccagtcgctgggactcaattcttctccggcatcccaatcacgggactcaatctaaaaattcttcggcacttaaccatgagacagtttcagcaaatttacggcacaaaatcacagggactcaattcttctccgacattccaattacgggactcaatctcaaaaaattcttcgtcacttaatcttgggactcaatctcaccaatttcatgcngaaatctaataactgggactcattctcctacttctttgcatcc

SEQ ID NO: 36798 - DNA, 498 bp, Heterodera glycines
gttttcggggcagtccccccgaaccgatgcgcccagattaatggggagaccgaatccttccggaatagcttccctatagcctgtactttaattctgcgttggatttttgctccccataattgtttgagtaccccaaacggacacttgaaaaaatcgatttatttttgttttcggggcagtccccccgaaccgatgcgcccagatttatggggagaccgattccttcgggagtagcttccctatagcctgtactttaattctgcgttggatttttgctccccataaatgtttgagtaccccaaacggacacttgaaaaaatcgatttatttttgttttttggggagtccccccgaaccgatgcgcgcacatatatgtggagaccgaaaccctcgggaatagattccctatagcctgtacttaattctgcgtggatttttgttccctaaatgtttgagtaccccaacggacacttgaaaaatagattttttggtttcggg

SEQ ID NO: 36799 - DNA, 1100 bp, Heterodera glycines
tgactatttacaataaaaatttatgcagtatttctaaaaaggatgtaaaaattattctcttgcgtaatattattttacattatagttgttgaagaatttgagtctgcttctgatgcaattggaaaatttttcagcttttctcgaaaagttttttcccagaaaacggatgggtcaaataaaaaactaaacatctcacatgaccaatttaaattcccttacattttgggtttactttattatgctggcccataaaaaatggagtttttccggtgccaaatttttgtgaattttctttcggcccgtcataagcggcattgtttgggggcaaatgaaaacaaattttgtgttattcgaatgcgctagccgagctctacattttcaaatgtatcaacaaagggtctatctccactctctggcgagttatgtccagccaaagcagagtgggccataaacacgaattttttaatctttggtatttcctctattttgagcctgctctacatttatgtattgtgccaatatgcctattgcaactgaaatttattcaactttcccgacaaattgttgagataattattctagacgatttttttatatctcaaagcttaactattgcctttttgtatgataactggtagatattgggagtaaaaaaaagtttttttgtgactatttacaataaaaatttatgcagcatttctaaaaaggatctaaaaataatttcttgcgtaatattttttacattatgttgttgaagaatttgaggctgcttctgatgcgattgaaaatttttcagcttttcttgaaaagttttttcccagaatttatacagctttcccgacaaattgtttagataattattctagacgatttttttatatctcagtgcttaactattgcctttttgtatgataactggtagatattgggagtgaaaaaaagtttgtttgtgactatttacaataaaaatttatgcagcatttctaaaaaggatgtaaaaataatttcttgcgtaatattttttacattatgttgttgaagaatttgagtctgcttctgatgcaattggaaaatttttcagcttttctcgaaaagttttt

SEQ ID NO: 36800 - DNA, 846 bp, Heterodera glycines
ataacttttaacgaaattttttagcctaatagagaacacatagtgctattgaatgatgccatgatatgattaattcggttacttatgccaaaagatatgcataattttggtggtttttgagtaattagaggcggcaccatcaaaaagatgttttgtttgatacattgtaattggtcttcagagcacaagttaaaatgcttaatccacttttccgagcctaaaaagttggagaaaaattttataccttcgtgccattgataaaaaatattggcgttggcattttaggagtaaaatatgaaggaaagaaaaatgggagtgaataatataatacaatagttaggtatacatataatttaaaatttagccattttttgggtgtcatcaaaaaatgatgcgatataataacagcacgggacgtcgcgggaaatcccaacggcggatttcttccgcttcaccgcttccaccagcagcagcggagagagcgtgaaaagtgaagagagagaaaaaaggaagaaagggaagagaaagagtgagaagaggaagaaaagaaggatgaaaaggaaatatacggaagaggaagaatgggaggagagagagagagaggaagaggaaaagaagaaagagagagagtgggaagggagggagaggaaaagaagaaagggaaagaaaaggatgaaataatggagaaagaagagaggaaaaggaagaggaagaaaggaaagatgaaaagaaaaagggaaagaataagaatagaagagagaggaagcggaaaaagagaagaaagcgagagaggaaggtgaagaaagtgaagataagagagagagagagagagagaaggagaaagag

SEQ ID NO: 36801 - DNA, 521 bp, Heterodera glycines
ttaggggagtggtacggtagagaggggatttaaaattggaattggtttttgaaaatgagggcaaacatcggccaaacattattgggacgattagtgaggagagttgggaatgtgagtgcgtattgtactgtatgaatatgaccgaaagggaaagagcaaattaataattgggtgtatacggtatacggactggatactgtataacgatgctacggtatgggataattttattgataaaagtgaagtacattcgacaaacattattcgtgataaagtaaggggcagcaatgtgaataagcgataaaaaatatactgtaaaatgaaagatacggtcatgtaaatataagtttagttgaccataatgaatttgcgtatatttaatgtgcgagggttactgtacatatagacaggaaaggtatggattggagactggaacactgtaccaaagatgctacgatagaggatttatgtataaaaacaaacatataaagccagggacagtagcaccagtgcgggatact

SEQ ID NO: 36802 - DNA, 952 bp, Heterodera glycines
  unsure (1)..(952): unsure at all n locations
cgctgcccgtcaaaatgtccaagcgtcataatgtccaagcgtcataatgtccaagcgtcgaaatgtccaagcatcataatgtccaagcgtcgaaatgtcccccaagctaaaatcagtcaaaatgtcccccaataaaaatttgcgaaaaatcctaaaattacataattctaaggcttcttattatttattttgaaaaatctactcatttagactcatatggattggagaaaaggacgtggtgcttgtgtttggaagtgaacgggtaagagcatcagggatcgaaagcggagaatttaaattttaactttttagactttggacattttgagcaaaaattttgttccacatttttttgccgggtatccgtcaattcctttctcgcggcaatttcggcatttaatttgtgcgaaattttcttttttggcatttctgctgtgatttttatggcattattttctttttttgttgtagttttattgaatgcccctccacttttggttgagggtcataataatgaagggcaaaagaggggcaaatggacgcgctgctctttttttgcattaattatttgcgcaaaccaaacgccgaggatttttgaattttgtttcaaaacgaatgattggccggcattactgtaaaagtggacttgctgggaccgggaccggcacctcgatttttcttcgggaccggaaccgggaccaaccgggaaattttaaaaattcaaaaaaattttaaaaaattcaaattttaatttattccaagagaaaataataacaaaattaaattttattttttttatttaataaaatcaaaaagttaaagctanattaaattanagaaaattttcaaatcaaaatttctttcattatttcaagcaattaatcatttgggccaaatggtcgaatattttttgaaattacatttattatcacacacttttttcgtgcgtttt

SEQ ID NO: 36803 - DNA, 1048 bp, Heterodera glycines
acatgtataaaaaccccgaaatatggtatggaaaatatcgaaataaaagtcccaacttttgttcgtgtttcctactatttagaccatgtagaatccaggaaatatatgtatttacataaaattccaatccctttttatgaatcattaaataaacgggtattttgggtaattttacttgtttttttaaatgtttgcctttttctgtttttatacgtttccccacagagttcattggttggactacacacaatgcgcaacgaacactttggcatttcggtggtcgaagggatggctgccggcactttaatggtcgcacacaattcgggaggccctaaaatggacataatagcggacaacggcaattccgtcgatgagaagggcgtttatgccggagagaatggttttttggccacgtcaacggagggtaatttcggattaagaaattatcaaaagcacacttttaagactatgccgaggccattctcagaattctcgacatggacaaaattggcagagacctaataagagagagggcacgacagcgagtcgaacgcttttcggacggacaattcgaacggaatttctgcgacgcagtcgaagaattattaagggaatgaaagtttccatttgcaaactctgtctgttcctaagattctttttttcactttcatgaaacttaataaaaaattcacctttggaccaaaaatggtaatacttttgatggtgggccgcctttttgaaagaagtttttttgttctaaaaaggaaggaaattttaaatctcaggccattttgggtttgttgtaaaggttaacatggaagatgcgcagcctggccttgtgcatccggccatggtagtggtcgcatcatagaatatttgttgaaaatatgacgcgttggttcatgttttcgaaataagacaatactcccaatttcctcgggtgagtttagaccggaattgcgggtcatcaagtatctaattgtaagaatgctttcgggaacgtacttctcaaagggaactcggattttcttatgaaatcagcataatc

SEQ ID NO: 36804 - DNA, 1097 bp, Heterodera glycines
gggaatgggcccttttgggggccacctttttttaagaaaggttgtcccctttttctttgggttttcgggcctatgggcggttcagaagccatttcgcctttttttcaattttggtagtaaaaacgggtttttttttttcggaaccctttttgaaaatttttccggaagaagattttgtgacacgcaatattactaactttcgaggcttctgtcatttcctttttataatgcgtatataatttaggctatttgatttatcagcaaattccgaaattagcttgggaatgggccttttgaggccaaccttttttatgaatgttgtcccattttactttgtggtctgcggcctatggacgcttcagagccatttacgccttcttttcaataatcgtatgtaaaaacgactatctctttttttcggaacacttttttgaaaattttttccggaagagattttgtgacacgcaatataactaacattcgaggcttctgtcatttcctttttataatgcgtatataatttaggctatttgattttatcagcaaattccgaaattagcttgggaatgggcccttttgaggccaacctttttttatgaatgttgtcccattttactttgtggtctgcggcctatggacgcttcagagccatttacgccttcttttcaataatcgtatgtaaaaacgactatctctttttttcggaacacttttttgaaaattttttccggaagagattttgtgacacgcaatataactaacattcgaggcttctgtcatttcctttttataatgcgtatataatttaggctatttgattttatcagcaaattccgaaattagcttgggaatgggcccttttgaggccaacctttttttatgaatgttgtcccattttacgttgtggtctgcggcctatggacgcttcagagccatttacgccttcttttcaataatcgtatgtaaaaacgactatctctttttttcggaacacttttttgaaaattttttccggaagagattttgtgacacgccaatataactaacattcgagaattctgtcatttcctttttataatgcgtatataatttaggct

SEQ ID NO: 36805 - DNA, 632 bp, Heterodera glycines
aagcatagggttatcacatatatcttctgatggcattgaatccgttcaccgctaggctccttacgtgtgtcgcttcagccagtcgtggaccgctgccattgagtatctgccgctcgtctccgcatcccaaatgtgctgcaagatgaactcgaccaattttgacggcgcatctttcgggaagctgagcctcgttccgttgatcacctgaaaaggaaggaaaagttgaaaaaagcaagcaaaaaaaaagtgtgtttacccaccgataccgccacgtctgttccgcccgtttgtccgtacggcgcttctccgttggcgaagatctcccagcacatcactccgcaggcccacgtgtcgctcttcgcggtgaagcagcgctcggcgaacgcttcaggcgacagccatttgacggggacgcgcgcgttgggctccattttcttcactggtcttctgtgcgccatgccgaagtccgagatttttacctgtgggaacagagcgaaattagttactaaaacaacaaaagttttgactcaccacgccgttcgagtagagacagtttctggcgacgatgtcgcaatggatgatgcccttggagtgaatgtgagccagtccggtagctgctccgacgcacatga

SEQ ID NO: 36806 - DNA, 841 bp, Heterodera glycines
cagttccatttgatcattttgcaattccctcgcccgctcctcctcctcctcgatgattttaagccaactcatttgtccttcctgaaaatttattttatttttttactaatatagttttatttataaacttttttcataaaaaagtacctgtgttgctttatcttcttcttcatttcctgttgtcatcttttgttccgggtacgcattgtggagccaatcggtcgcaagaatcgcgtccatttgtttaatagttaagagattattattattattatttctgtaaagctttattgtgtatatataatattttttaaacatggataatataaggtaaaccgttttgcaaaaaaaaaaatggcagacaattttcaaaaatttgatgaaaaacacttacaactcagacacccgtttacgctgacaatctcagggagcacggggagtggaaaatcggaatgggtgctacgaatgctgaggaatgtgaatgcgctagtttcggaacccatctcggagattttctactgttatggggagttgaatccaaatataatacagcttcagaaaaatggacacatcggcgggtgtagggttatttattgtacatgctggaagcccaaccgaagagcaggttaatcggcgcgcaaaagagtgtgatggaaaactgttgatggtgttggatgatctcatggttggattgggccaacaatttcttgacactgtgttcacccggggatcgcacaattgtggggtcagcgttgtgttggtcactcaacatttgttcgcaaaagaactgcgggttgcgcgcaacaactcccactatttggtgctgatgcgtaacccggca

SEQ ID NO: 36807 - DNA, 777 bp, Heterodera glycines
  unsure (1)..(777): unsure at all n locations
ttggcaaaatgcttggtacttatgcagtttaggggaccattaaaggtacatttttctaatgcctataaaatgtattcccctttcatgcataaaaacaaaggacctaatattttttattgattttggacccaagttgcttctatttatcaaattttgtgaataaatattcaaattccgtatttacttatgtttttataatgcatgtaaaatgaatacattctataggcattataaaaatgtatatgaaatctgtcccctaaattgcataaataccaaatgcttattccctgtgcaaatattgaaattgttccgcccaacaatgcaaactgattaattccattattactagagatcgacattttgaaaaaagcctggacctggattccatgttggacctggaccttgatttcctggacaaaaatccagcaaatcaaaggcccaggaaaaatccaggcctggatccaggcccaggtcgatctctaattattaccttcgttgtcgcctcactgctatcaaccggcacttgaccaaccaactgacgaagcatttccgggtgttgcaacaaatcgccgagttggactccgccaccagccggccctttcgcattgttaccgccagcagttccctgngtttgaaaataaggggaaaggaaagggtgcaacccaaaatcacgcaggccgaaatcacgccgcttgaaatttaaaaaatttttttttcaacagaaatttttcaagacaaaaattcttagagtttttttatacgaaaaatttcaaaaaa

SEQ ID NO: 36808 - DNA, 1144 bp, Heterodera glycines
attttctttactttttccctttctcttcgtcccttttcctttatggttccctttttcgggtccgtctccgtttcggcccttccatctctccctaccgtctccgttttgtgttccttcgctttcgatggcttctcgaggcgcacaattacccgcgcttcactcttttgggccaaatgttcgccggctttgtcctcggctgcgaggcgttgtgtcgccactgtcccgaatggttcatggacaccaccgggtgtcccctcactttgccgctttttcgatggattgcctgtgccaaaacgatgtgttatgtgcactatccgttgatcacaaccggggagaaaggacataatgagccgggcttcccgtgaactccgtacgaggaaaacggatgagcatttttactttgccagaaatggtggcattggtcgactcgcgcgccgtttcttacaataactcctcacaaattgcgtccagcattgttctgaccaatgccaaattgttttactatcgtctcatttctctcctctactgcgcttgtggcacaagttcccaagtgacaatggccaatggaaggtccaaattttgctttttacgcattttaattaatttcaaaaaatgattttcagttggaccgcctctcacatcgccaatttgtggttttgccagccgaaggtcgtttttccgccgtgtaatgtcgaaattctgtccaatttggaaaaccgaaccgaacaactcttagctggtggcaatccgtcgttaattctttcagtgggccaaattcgtcccgagaaaaaccatttggaacaattgcgaatatttgctgaggttcggcgtcgtttaaaagagcgcgggagcaatttgaaggtgaaaattggacatgtgaagaatttgcccattttttattctgaaagattaaattggtaattgctgggggctgtcgcaatgcgggcgattgggacagagtcgactttttgaagaagttcgccctgggcaacttccagctgaactccgacgaggccgtccaatcggactgtgacatcgcatggcagctgaatgtgccatttgcagagctcacagatttgctccgagtttgttttaaatagacatagaattagaatcaaatttttgtctatttaaatattttttg

SEQ ID NO: 36809 - DNA, 1131 bp, Heterodera glycines
ttctttttctttgtttttcattttttaaatcttttttaccccttttttcaactattacattgttttgatgctcaaatttcgaatttatttgaagtataaacttttctgcgtcatttttcattaacaaatttaataaattttctctctcattgcttttatttttatgcaaatctaaaatatttgtaatttttcaataaatttattaataaatttaattttaataatcaccttccaatatttctgcaaaattttcatcattttttaattcattttcaaaatatttttgcaactctttgaaatgcaatttctgcattaattcgctgggctcattaataattatgtttaccattttattcaattttaaatttccttctaacatcgcttttttgaccatttcatcccattcgtttgtaaattttttcaaattgttttcagcttttttaaccatttttcgcgtgaaatttgtaatacctataaaaagatttttatggaaaaatttgtgccaataaataaaaatataaaataatatttaataaaaaatagaaagcataaagttatactgatcgcatagtgcctattttctagatttttatttttaaagcctaaaaacctttaaaaattttgaaaaacctattttaacctttttggcgttttgcctaaaattatttaaatgcaataaaaaccaaaacaaatatgaagcgacctaaaaattttttcaaaatattctcctaagaattggctaaaaatttctcaaaaattgatctccaaaatttatttatttatttgttgacaacaattttaaaaagaattgtttatctcatactgattggtcgaattttgttacttttttgaatagattttgtcattttacacccctaaattttccattttagtccctatttttggggtttttaggacctaaagcctacctattttggcggttttagagcctaaaaatctcatccctcttatacatatttttttattttagtccatttgggtgttatctctataatttttaaaattttatgattttttcataaatattcaataaatattttttaattatgcttggcttcttgcatgataagcgaagcatgaatttttataaaaataacaataaaaacatct

SEQ ID NO: 36810 - DNA, 919 bp, Heterodera glycines
ttcagccgcacgaaatgagcaaataacaggttctgtgatgcccttagatgtccggggctgcacgcgcgctacactggcaaaatcagcgtgcttgtccttccccgaaaaaggggtggtaaaccggtgaaaatttgccgtgattgggatcggacattgcaattattgtccgtgaacgaggaattccttgtaggggcgagtcatcaactcgctctgaatacgtccctgccctttgtacacaccgcccgtcgctgcccgggactgagccatttcgagaaattcggggacggttagtgttccggcttcggtcggtatgcagactggaaccgatttaatcgcagtggcttgaaccgggcaaaagtcgtaacaaggtagctgtaggtgaacctgctgctggatcattacccaagtgattcctattcaccacctacctgctgtcctgttgggctagcgttggcacaaccaaatgcccccgtccgctgatgggcacaggtcgttcgagatgacttgtggacgctgcccaacattacggggcagctgcctcacgagccatgcttttggggtgcttccatacgttggagctgtggtataccgctcagtgctgcacatgtgaaagcctgtgtatggctgctgcgtggcaatgtgtcggtggcgggccgcctcgcttggctggttcgctgcgccaatgtgggatgcacgctcgtggggcgacctaacggctgtgctggcgtctgtgcgtcgttgagcggttgttgtggcaggcacataacacactgactggggatggtggtttcgttcccggtcttacgtgccgtaactagcggtgtgtttgtgcttgctgctacgtccgtggccgtgatgagacgacgcggtaggacccgtgcttggcctagcacgaggcttaagactcaatgagtgtgac

SEQ ID NO: 36811 - DNA, 1161 bp, Heterodera glycines
atttgggacaaataccttgtccgggtattgccgggtccagaaaagccaggtcagggtcctagtttttaaaccgagtccgggtccaatcgggtcatgaaaaatccaaaaaaatcttcaaaattttttcatgaaaggcgagcgttagcgcgaggcgagagttgtaccacccctggtacgtacctcccccaacggagtagctcagttgggccggcaaaatcaaaaaattatcggcactgtctgacaccaaaaaacctgtccaatcctatcttgtctctgatgatgcgatttcatttgcccgcttgacatttgtttaggcatttctccgtgccaccaccaccaattctccagtcaattacaatgttcgttttgcaacgaaaaagtcaacgccaattgtgccatttgaattggtgaatgaacggactcaagaaaagctgacattggagaaagaaagcgaagattattttgctaatcattggctgttgaagcgatgcccaattgttggggggacggcggcggcggaggacaatttatacgctaatgtcgatattttactttatggtggcaatgattgttgcattgggtgggtcaagcaaaacatttttaaacatttatgtgttggattttataaatatttcgattaattatttaattacctaaattaatttttccaaattttataaatccagcgacaaaatttgttaactctttaggcctttgtgtccaccgacgggtcaaacgtcaaattcagcggaagagaattaattaattaattgagcaatgacagaagattgttttgaatcactaatgagaattgatttgatgctcttttttctctttgaaatgcttacttttcccgccattttcttaaaaaatttttgtgtagttcggattaaacagtaattttctgctgttgctctatatttcgatattgtgtaatttggcttacttttatataatttttaagcgaattattgaattttcaatggcatcgcccgccgaaaaaaagaaaaactttcctccgccgaccattgattaatttcttctgccaaaattgctgaaaatcagcagcaatcgttgtcgggttcatcatttgagacatcatttggagaacaacagaagaaaatggaaaatcgaattttgaagagggaaatgtgagagaaa

SEQ ID NO: 36812 - DNA, 856 bp, Heterodera glycines
attcgcttttacaaatagacagtgccgaaatttgtagatctgctaaaccttaactgaaacataccatatcagcgagacgccatgctgatttgttgtaatcataataaaaaggcccctattgttcaattctgcctttcctataagcacaatgtgtttgatgggctctacaaaatattgcttgtgcaaagcaattattttcttggaggctgtaattttctgtagtcatttgatatgcatctgctatttttctagtcacaaacaccaatatttttcggcccgaattttataggcgtgaaaagtactgatttccaacttctttctattcggatacacccaaaatttgaaaagcatctgcaattcagcctcttttaaatcttaattttctgaaacccgaatttagaaaatatgaatgtatttctgcgacgccttctatacttaattcatccataatgggccaaaaatcataggttaagaccaaaagagggattttagtttcagccggaatttctataaaaatgttcgtgtgtaacctatctttgtctattcggataagtaagaaattgaaatattcgtattacttttcctcccttaaagctttataatgaaagcgtcgttgtctatttaggatttgccgtcgcaattctgtaattccactttggaatccaaaggaatttgattcgcttttacaaaatagacagtgccgaaatttgtagatcggctaaaccttaactgaaacataccatatcagtgagacgccatgctgatttgttgtaatcataataaaaaggcccctattgtataattctgcctttcctataagcacaatgtgtttgatgggctctacaaaatattgctt

SEQ ID NO: 36813 - DNA, 1739 bp, Heterodera glycines
atcattaaagatgaatatggtaagaccgtacagcattcacctcataagttaaggcccgcgtgcctttagaaatgccatttccaattgactactccgattgtgcatgcgatccgatccaaagtcaacatccaccagtaaagtgcgtcatccgcatgcaattcgcgcctcgcccttgaggaatggctttttcggaacaatggcgtgaagcattgccaacatttcaactcccgaggccggctcgttgaagctttttggggtcaacggttgttgggcgatttcgcaaaggatcagtcgcattcggactttggggaaattcaccagtctgaaaaaaggaaagcagtgaaaagcagccaaaacggagaacggaccaaaagacttctcgccaattcgccctcggacaattcagtcgcgagacgactctgtcgcaaaggaaagtttgtcgttgggtctgtcgttccaacagaacaaaatggccatctgatgagaggtcacttccaagtcgaaccttcccgctctgctggtgaacgaaaccttcgacagaacatttggcatttgtgaactttatttcaatgttaatttgctaattaccgtcccccgtggaccaatggtgggcccaattcagctttcgtccgcagtgctgcttttttgtagaagtcctcaacttccggggtcaaatcctccaattcccgtggcaaagtcaggtgcgaacggtctcgactcctcgaccatgctctggcattcagaattttgacgcttacacaatctgaaaaaccaaaatgaatgtctgtcgttcagtgttccgtcaaccggccatttggctgcagctgcccttttccagcgatttccttagggccaagttgagcatttcctccttttcttggtcggccaccaactcgaaaatcagtcttcggctcaagtgcgtcttatgataacgcatgaaaacatctttagctgtgacatatttcagcaccaaaagctaaaaaacgaagtggcgaaatatgcggaatacgtaacaacaccaaaaagaagtcaaatttcttttccgttttgtacttcaaatgtaaaataaccattggaccgccctgccctaactcaccacgttgttcagtctctcgtcgatctcttcagaagaaaactttttcgtcagggccgactttctgagcaacaaatcgcaataatttgctagcaattccgggcactttgactcgatgttcgctgggcgtccactgtttagtatttatttttaaaattgcttttgcgcattttcaaccttttcgttcggtttgggtccaactccaatctgaacacttccgtgttgttcaccacttcttgaaatgctttgtctctgacggtcaaaaagcgcgagtcgttgtaaaaagcatctcggacgagttcggagaacactgagtacatgttgagcaactgttccacgtacctttcgctgtcctaaattcaaatttcgatgattttttctaaatcgaattccaaaaatgtaccgtcacaatttccgccgcgtgttcatgcatggcggcgagtccttctgccgtgatgtgtttgtgcaagacgttgagcaaattgggaattccgtcgggtgtccgattgatcagtcggtagagcgtcttcagcctgtttacctcgttgtttttgatcagagtcggaccaacggccaaaagttggtcttgatattcgatcaccagcacttgaacgcattggtccaccaactaaacgtttaaatgagt

SEQ ID NO: 36814 - DNA, 1141 bp, Heterodera glycines
gaaaaacatttgttcattttgtcgttcgcttaaatgtgccgttggatgggaagggaatgtcgttgaagcggcaatgggtggtcagactaaacttgaacaattagggcagagattgtgctaaatgggcactccattctgttacggtaggtttagtactgtaaattgtccaataaattgacagaccgaaatttgtttatgcgattgccctccccccaattagcgaatcattaagcaactaatttatcggctgcccccgccgcccctttattgtgccgcctttctttgactgactttgcaacgcatggctctgccagccaaaggtaccattcgccttctctttcgtctctgtgctttccgtaactttaaaaagtgatttgtcttaaattgtccgtcctttctgtcctttcgcttacgtataatacttttggcagtttttgttgtccgtcggtcgcttttgaattacctaaaattgacgctaattggaaagtgccattggcttaattaaggccatcccttcggggagtttcgaattcgtcgtccttttccgtttgctttgggatggaattccctccctccgtccgtttccatttatttctttggcatttgttgtgcctttttcattgacccaccgaaagatcgttcttcgtgccgcatccaatcggacaaataatgcgccctcaacccaaaccgtccccaattaatcgccttcctccggtctttttacttgtgccgtcccccaccaatttgttccattcattttgcggcatcggctcgcgtcggcacggcttttgccccttcgaatcggcgccaaatttcgaatttggcgtaaccaaaatgcaattgcccttttgtgacgtacagtccaacgtccgttcttctgaacaacaatcattttcagacccgccaaaggtttggccactgaaaatgaaatgccaaaggctaaccccagcgaggccattgagcgctgccgaacaccgccaaaagagaaaaccacaaaagcgaatgtttaatttgcatctgccaaaaccaaagcgaaagaattaaagacattccctaaagaattctgacaagaaaatcggcgaggaaaataatgggggggggggagtcaaaggtaaacccatgggcaaggacggacccagga

SEQ ID NO: 36815 - DNA, 968 bp, Heterodera glycines
  unsure (1)..(968): unsure at all n locations
acaaaagaaattgggcgaaaaaattgcctcaacaatcagtggtgaaactgaaagaaaaaaacttccccaaaaaatcggagcttttccgacggcatcagctgcatttccaacagttcaacagtataaataaatattaggcaaatgaaaaatttttttccttcctctttagaaactgtctaaaaatttttgttgttaatattcagaaaacgtgttttttttagtgacaatttttttcaagagaaggatatgaacaatcacttataaggctcatgcttggagataaaggaatcggaaaaaaaaattatctcaacaatcagtcgtgaaacagttcaataattcggaagcagtgccatattgggaaaagatgcacaagtagagtaggctcgaaataaaggcaactgccgaagattaacaaaaattcaaatttattggccccgttctgctttgacaggccatatctcgccagggagtggcggtagaccctttgttgatacatttgaaaatgtagagcgcgtctagctcattcgaatagcatcaaactggtttgtttttgtcacgaaacaacccgctgatggccacgtcgaagaaaagtcccaaaatttgacatccataaaactccattttttcataggccagcgtgtttaaagcaaacccgaaactgataggaaatttaaattgatcataatagaagtttaatttttatttgtcccatgcattttctgggaaatcttttcgcgaaaagttgaaaaatttcaaaacggcacgacaacagatgcatttcaaacaattcaacaatataatataaaatttaggcaaaaatttttgttccttcctctttggaaatggtcttanattttgcttgtaaatattcagataacaagttttttttactgaaaattttttacacactacaggatgaaacgcaataaataatgtttgtaaacaaaagaaattggcgaaaaaaattg

SEQ ID NO: 36816 - DNA, 963 bp, Heterodera glycines
  unsure (1)..(963): unsure at all n locations
agaatggcaaatttttaaaatcttatagctaatattatcttggagaagtgccatttttattcggaagttttttcagaagattttgggtctcgatgatgttaaaatttatatccgatataaagcattgatcaatttctataatattacccaagcatggatagcttgggtcggtttcactattattaaatgaattggcaaataatgtggcaaataattcagatttctcagcactattatgatagcatttattttcataaattagattaggtattttaaagggattgacattgaatttttgtatatatttataaattgaatttcttccctttgaaatagcctttttctcaaattggctatggtatttatttgtttgtatttttatatgtaaagaaatgctatcgtatagtgcttttttggatgggtcagttttagctagcctgaataatttagccttttctttgatggatgctaataaatgttgtgggtatttaggagtcaaatcattcttggctaaacgctttattggaatacactcatttaaaatttctaacaacatactgttaaaggcggaatatttttgatttatgctaaagcattcatatgacaaggcatttagccttgatgctatgactatattaaaatgtaacacattcgatggacaaaaccaacgaaagtttacgatctnntgttttcggttttgttttaggagtaattaatgtgaaaaattgtgttaaatgatccgatgaaaatatgcctcctttaacagtacaatcagtaataattttttcattggccgtaaaaatcaaatctagccaggangtaatccttgttggctcgttcgtgggcaaacataagaaatttattgaaaagtcacaaatatttcacacattactcattggatagggatgccatttttcataccaatccttattcgaaaaataaatctcctaagtcactgaattt

SEQ ID NO: 36817 - DNA, 1147 bp, Heterodera glycines
  unsure (1)..(1147): unsure at all n locations
ccccccccccctcttcncacgcgtttggtatatgttttgccacgagcatttttatgggctaaattttctttgtttttatcgcattttccggcggcataattcagcggggttcggttcggcacacacactttttatgtatgtgcaaatattttatttttgacgatgaaatatataagattttttgatgttggggggcaaaatttcggcacttttttgctgcttggcattttcctctcccatcactttggcatttttgcaatttaagtgagaatcggaatccttttttttggcatttagggtccatttttaaatgtagagtgcacaaaaaaaatatttatttatttaaaatggaaataaatttaaatttaaaacaccaagctattttatatagttttcattattttaaatataaaaataaaaatttctcgctcagatttcggcacttttaattatttgcattctctgcatactatttggaattttgtgcatttattggattttaccatttaatttttttggttttttctatttcaaaatttttaattaatttaaatttccacgaaaatttaaaccgaattaaaatttttgtaattttttaaaaccccaaaaattccccccaaaaaatttcggaaaattttcagaccatatcgcctgggcatcaagtgtccatcagtgtccacaatcaacccggacgactcgtcgctgtcatttgaggaccttgaacagcaaatgatctaccagcagccgatcaaacttggtggtgtcagacgctaccatcgccatcagcccaatcaaaagcagcgccgtggggtgatcagcactggcgcaaattattacgattttgacgacgacgacggtactgaaaattgcggcgccaaaagtgacgcggaactgaccgaccgagcgccgccctcctatcggtaccgcagcggcagtcaccggatgctccagcgacgaatgaatgcgggcgcagatgatggcggctcgccgccaccatcgcgcggcacgcaatccgcgccgcgcacaccgcaacggcacgcggtgccgcccgcgctcgaaatgatcgaggtgggtttataaacaggcctcttccattcatccagtgattttgctgctgatcagcttttgttcaattgttcactgatag

SEQ ID NO: 36818 - DNA, 778 bp, Heterodera glycines
  unsure (1)..(778): unsure at all n locations
gtctttcgctgcacagagtgcggcaacgaatggccaattgtaaggggaaaaggacaaaaaagcttttgaaagtcatttattaactgggttaattatttaattgtggataattatgggagtgcctttgccttttatttcgtgccgctttaataattaagtgctcagtacaaaaagataatcactttaacatttatgtaaaaatttgaataaattaattaaataaaatttaaaataataatgtaaatttttgtttaaaacatttagtttatttattttttattgtcagcttttcctcctctttttcttctggtggcatttctccccaaataattcccaaatcgccgctttatcatctttgctcagtttgaactcttccgtttgttcatccaaaagtgccaaattttgtctgtataaatggtaatgttagctaatccctaatgagactctctctccctctctctctctcttttcctctctctctatctttctcactctatctcttgcccccccttttctgcttacctgtaataactgttcatcaccgagtgccggtaggtcgaatgccgaaggccaagtgcatggccaatctcgtgcagtgccacataccgcaggtccaatgccatncgtgccatttgtcccctcggctgatgctnttgtcgtcctccacaatgccattgctcctccccgttctcctgtttttcgatcacaatgatgattcatccgctgttccttttgctttggccattacctgtctccgcccttggccatttgccatcgt

SEQ ID NO: 36819 - DNA, 1050 bp, Heterodera glycines
tccccctgccccccccccctcgtgccacctgtcttcgtgctttgttggcattttcttctcacttcccatatatcccaaacactatcctcctcatcttctcttcttcgctctcatccccgcgcagtttgagccgtttatgagcaaaaggggaaaaggcaattgggcgaggagagaatgaatgggtggggaggtgggagaatgggatcacatttcgtcgccaaaagcggattagccgcgaattttgaaaggcaattggggcaggagagggatgaatagtcccatcgtgctccttctgttggcacaacccttgcacctctgtgcggtcattaatcgccctaattaagtgctaaaagagaggggagggagggggggggggcggggtaattgatgcaacagacggggcaatcggtcgaattgaaaggcaatgccggggaaaaagataaaaggcggaggcaacaattgtgagggaagggggagggttaattggaaaagaagaagcggaagagtttatcaaatgggcagtacaaatcagtgatcagtactgcttttatcccccccccctctcaataatcgctcaattatctgctggtggtggatgactaagctcccctttcctcctccaattttgcttcttaatcctctaaagtgttccccgcagtgatgggctgaggagcagccatttcattgttggagtggcacaattgggaggagggaaagtgccaattggactcatacaataatatgcaaatatgcgaatgatgtcctgagaagggaaaccaaaaatgccaagaaaataaatgtttatttttcggtttttttttaaacagtgccgaaaaggaacggtgcttaattgagaatgaattagaagagagtaaaagtgctgaataagcgaacggacggtcctttacagttttcaaatttgctcactggtactgtacttgtgcaaactctccactggttttaaattttaaatttatttaaaaatttccctccctcctcttcttcaaataaataaaatcctcccccccctccggcgatctcttcgacctt

SEQ ID NO: 36820 - DNA, 1453 bp, Heterodera glycines
  unsure (1)..(1453): unsure at all n locations
ataataataattttatcgtaatgacaaaataattgccaactgtgtaaattaatgattaaataaaattttattactttctactggagctcattcgaaaataataaacatattttcaataaaaataaaataaatgcacaatgtaaagagattttagaaaaattaaagagattttatgaaatttcattatatcagaaaattgatgtaaaatggccaaaaatgaaattttagcgccgaaaaatgttgatgttcacgaaaataatagaaacttgaatatttgaatgctttgaacacctgtgggtttccacaaccgaaatcagaaatttttaataggaattttcaaaaggctattttgggtaattttcggcgctaaaatttcattttttcagaaaggaaaaaattgcaacaaaagtcatttggcgaaatatttggagaaaaatgggaagaaaaagaagaagaaaaaagagaaataattggaaaattttataaaataaaagagaaaatcaaggaaaagggaagaaatattcagcaaaagaatggagtaaaatcaatgcgaaaataaagaaaattttcaaaaaaagaatggaaccaaaattataacgaaatttgtaagaaaattggagttagtcaaagaataattgagaaatggaagaaacaatttggattaagcagtaaaagaataacggagaaagaaaaaatggaaaaaatgaaaaaatattggcaagtaaaaaaagaaaatccaaaaatgagtgacacggaaattggaaaaattttgaaaattcatcaacagagaatttcagaatggaagaaacattttggggaagaaattttgaaggattgaaaaaacggaaaaatttacgaaaatttggataaatttatttaaaaaattatctgcgctctaaaaaatagatttgttatataaattttcaaaaatattgtatttgtatttgataaataaatttttttttaatatttaataaaagtggttaaaaggaataatactccttaatgattttatggcgaaaagatttaaaaatttcccgtgtatttattaatttcggatttgtgtttgaatttcgggtcgggattcggaattttgaaaaataaatgtcatattcgtgatcagcgcccccaatttccatagaaatgactttttatttgaaaacttcaggggggggggcaccaaaaccgaaagtaccggattaaacatttggcattagcagtgaaagaatacgacaanagaaaaatgggaaaaatattggcaataaaaatagaaaagccaaaatgaatgaattgcaatngtaaattgctgaaaattgtagaaacatttgttggagaaatttttaagggattaaaataattnaaatnctttatcagctttcagtcgaaaatttgaattcatgaaaaactgacgtaattatgatctcaaataaaacatgacttgaaaagcaaacaa

SEQ ID NO: 36821 - DNA, 1431 bp, Heterodera glycines
cacattttttcaccctagaaaaaactaaaataaaatttttcatttaatttttcatcgggaccgcaattctaaaggattaccaaaatgatcataaataaaattttaaaccaaattttgaaaacaaattgattgagataacttattgttgagaaaaaaggtaatcaatgacactaacttaatcagacgatcattgggtatgaaaactcaaaatgtccaaaacctataatttgtcactaatttattaaatttcatttgttgattggatttacttatttgattttaggctatattcaatttttggagatgttatcgttgatggtcttaacattgctgagaatggaatcgtcagaattgtgcgggacgaaaattcattatgcccgagaatttatgaagtgcgcgcttgtgcgttcgattctcatccgacttatatttatgaatcaataaatttttgcagatgtccctttttcgctttacgtggtatgttatggtgttgattctaaacattttttgctagcccaccaattaatatgtcaaaaaacattgaaacaacctaggataaataatattgaatgtttatttatatgcctgccttccacagtttatgagaatttccaatttttattgctaatagaccattaaaacataatatttttcttatttagttctgcatgagaacaacgcttacgtggttggtcagttatatttttgtagtgtttgatacaagcgtcggtgttccgtccggccctttggtgcaaaacaggctgattgtgagcctagtctggcataagcctggtttcagacgactggtgatagcgaaagtcctatctctagggctacacattcgcgctctggacatttgcgcctatgtacaaaatcgggttcaaacttaatttttccaatccctgatagcctaaactgaattaatattaagaaaataaggtcttttgttcattaggagcattgattctgttgtttgaaaattgatggatttattcaataaacaaattttaagattatcagtgttcggcaatcctgaagaatgagggtttctaatttttctttcaaattggtttgaaattggtgttatgcagcaatctgacaaacagatttatcacatgaagtcagttaatatatgattttgtcagggttttaaaagctgggtcttttgaattttattaaacaccaaagggggggatcgagccaattccctaccgccaattccctactaaggcatttgggccatttccataccaaaagtgttgaatattgataaacattgagattaaaacacacaagaaaatttattcactgctttttagacagctcgtcaagagctttcggatgataccaaatttatcaagattcgatcgttttaaaaaagttagaagtgacaaatctctcaatttttcgagttttgaaccctcctaaaaa

SEQ ID NO: 36822 - DNA, 1644 bp, Heterodera glycines
ttaaatgagtattttcataatatccaaaaataaatattcatttatttttttaattttaccgttttcataaaggcgaattgcgagttgaggaaaatgctgaactgaacttggccaaaaaagcacaccaaagcggccaaataaattgagcgccagtccgtttttcgatcctctgctgagaatgaatcttcggttgcgccgctggcggttgattcggtgccattggaggggacgcatttctgactttttgggaatattttgtagtccgacggtttgagtgccgctgacattttacagaaaaacacctaaaaaatataaataagccaaaaaagtaaaatattattcttttaatagcctcttaatttttcatgaatttgttcttttttcttatcggaacagaacaacatgggtcatgggattggttggttgtggtcattgcaatgattaatattaatgagtgtgtgcacacacaaaaaccaaatttatttgaaataacaaataaaatatgaaaataaaagaaaaataattaaaatactaaaaactctaaaattccatttatgttatttgaactttcgacaacagaataatgcaactttattgcagcaatggccttctccatttggtgctctgcttcaaacaaaatgttaaaaatagcggcgtttgtgtgtaataatatgataataattgtggattaatcgttatgcaaaatattttttcatttttatattaaagaaaatataaaaaaataatccaattagggaaaagaagagaatttttatgttaaagtgcctatgaaaaaaaagttttaatttaaatgcaaatattgtgtttcccgttgaattgatggatgaattaaagacaattatgaaataagaaacaatgttttttttcattaaatgatagtgaaatgaagagactcccaaattttatagcctcagattcgctgatgtaattgatgcaatttggccggttgatccacctacacttcgaatggctttatcacgggatgaaactgacaaatgaacacattggggagaagaaacattgacgaactgataaaagacaaacgaatggaagagataagagataagcagcaaagctaaaacagaaatttgatcaaattaacaaatgttttgaaatatcaacaaaatgaaatgagtacatttgtacgcagcgattgggggaaacatagggacaaatgataggagaaaggccgaaaagaaagaagcacgatcagaaacatctgaccacaacttacgggaaggcctgtgctaattgaacgttacaaaaaaatgttgaaaggattaattacactatttggagtggaataaataaattaaattgtcaaaattatgagacttatgtcaaccttttttaaattttttctttattatttggtccaaatttcttcaaaagtatttatcataattagggaacggaatttttaacaattaataaatttctaaaaacttattcaaactgaaaatttgagaaattactgaaagtcgtaaatttgaaattttaacatttttgttgtaattaaaggcttctgaccaagttgaaattcttttttcatgtcttttgatcgttaaaccattaactagtttaaattaagcaaatgcttccgatccaatcatttaccaaata

SEQ ID NO: 36823 - DNA, 73 bp, Heterodera glycines
  unsure (1)..(73): unsure at all n locations
gcaggtnnctcgatcttttttaatttatttaaatttatgaataaatgaatacaagcaattttggggtttatta

SEQ ID NO: 36824 - DNA, 836 bp, Heterodera glycines
ttgtcgaaaatttgttgattggaacggagaaatgcgatgacagagtgatcgatgtacctgaaaaaaagggaatgctttcatcggtgaaaaattcactgaattttgaattacgaaatgcgaaggtccttaaagcgaattttgttgggcaacggatggtcggccaatggaaattgcacagaatcggcataatttgccaacaccgatttcggcactccaatttgttttcgaatttttgttgttttccaaagcgtcaattccggtttgccatcaaaatgtgcgtcaaccaaagcattgaaacggtaagaaagcagtgccatttggagaccgagttgggcatagtcaaaagatggaagaatgtccagccacacgtaattacaaatccaactgaaatggggggaaaataagttgagcgcggtcttaaaatgataaatttaagtttagactaaaaactaaaatcgaaaatttgagtttttcgactttttgttcgaattcgggtctaaatgggtgccgatttcgtgatcagcgatccttaaaaccccgtaaaacatgtttataactttagaaaaaaaaaattttcgaaaaatcgggggggggggggggctgcaatattaccaaaaaaaaaaaatttttcacattttcctcaaaatccgattcgttttcgttgccactcgaacacttcgccgttttccaattgatgtgacaaatgaacccaacggttgcggtttcttttcacaaatgagccgacggtcgtcggaagaaaactttttctttttgacggacggtgccattaaaaaggataattttgctaaataattgaatttttatcaccttttaac

SEQ ID NO: 36825 - DNA, 654 bp, Heterodera glycines
ggggacctctagagtcctggccacaatccttcagtttattcgatccttccaattttcttcgcatttgctgtgcttcgcttggcgttgtgcccgctttacacttggccagcatttggttcattgcctttttttggcttgtgaatcggcccattatgcttctgatggcactgcaacatttggccacggcacttcctctgcgggcatttttacaatgctgctgaaattgtgatgcatgcttttgcagcacctgccgtgccattggttctgaatttttaatttttgtttaaaaatcagaaatactttattgacataccattgtatttgcactgtaaaaagtcgactttgacaagaaagagcaccgctaaaacaaagaaaaaaccgttgggattcatttccgatttaaaaaagggctttaaacagaggaattggtgaagggattggattggcaaattctgacttaaatatgccaacttttgactgtagtttgtgagaccagtacaaaaaagaaagtatgacagcagatgagcaaacagaatcaccgaaaatttggcactttttcaatttaatcatcaaaaatttgaattatttgttcaggtaaatagtgaaattgtggaagtcatcaaattcctaaaactaaatgaatttttattaacc

SEQ ID NO: 36826 - DNA, 974 bp, Heterodera glycines
  unsure (1)..(974): unsure at all n locations
cttgaaaaatcgattttttntgtttcataaatatttttttcagaaagggttctgaaacgcaccaaattttatttacatgttagtttaggcactctgatgctttttctatcaaaaagggagatgaataaatttttaaaaatttttaattcctttttaaacaggccaaaaagtttacggcttaacttattttttcagaaacttatcagaagcgccccaaactttgcagggatactgaaaggaaataattaacctgttttatcacattagcttgtcatcagtttttataaaaaattttcaaaattctgagtctcctattattttatttttttttcaaaattttgaagggcggggggggggcgggttaaatttataatttcattttgtcaaatcattgaaaactcaaaaacaatttttccaaccctcctgaaaaatccctgaaaatgcagaaaaaaacctaccgagtaagactccttgcgggcctttctccgctttttgtctcccgtgcgcaccgccttggtcgacttgaccgccttcttcgctcctttgccggatggttttggtggcattttgtcgtcgaaatgtggagaggcgaaggttttgctgaagagagctggtgaatagattcgtttgctttctaatgaaagtggggaatggggcgacagtgagccccttttatgttgctaaagtggagggaacgcccatcccattggcagacaatgcaaatccccggtgggagcatagagaaatgtaagagagagagtgtgtgagagagaaagtgcggcgtcactttttgaaatggatttttttcgacaatcggagtctccgcgtgcctgcacatttcatcagccatttttttagcataaatagcgaccaccgggcattctcttcctcactcgtcttcatttgctcatttgattcgcttcactcatccccaatcagcaaaaatgtccggacgcggaaagggaggaaaagga

SEQ ID NO: 36827 - DNA, 988 bp, Heterodera glycines
ctaaagcggtcggatgggcgagccaccggcgcacctgcaagagattgtcgaacattaactcgaccagagtactagctttgtaccagaaatcataaatgccagatttgggcatgatttatcccagcatttcgtggtgccatttttagtccagatggacctgtttggtttctgcgcaagtgcccaaatttgcagcacatcgaagctgataaagcttggccaaacgcagcgggctgagcagccacagagcggccaactcgggatcagtgccgtgcgcagcagtcaagctcagctgacggtccaactggtgaattaccggcacaaaatggacaagcatagtgccgaacacatcgctggcactgaacagctccaatagcgcatgcaatgcgtccaggccgaccaacaacacgccaaggtcgtcctcgtgggccaaatagctgaaaacgtggagggatttttacaaatctcgggccaaatcttgatctcagattctcgactccagagaaattcaattcttgaacagccctagtgactaaatgattttaaaattttttaatgatcgaaattgggttgctgtgctatgacttttaaaattgctttgtgaatatttttcgattttttaaaataaattttaggtttttaataatttaatgatgaaatagaaatattcataatttcaataaaaatttaaaaaatttgccttaaaagttggacaaataactgagtgttggccgactggcgcaaaaatgtttcgccatcgacgattaattgcatgcgcgacattgtcggtatctcttgatgattcttatgcagctaaatcattcaattaaaaaaataataactaattaacactaaaaatttattggtcaattaatcaataaaaaataattaaaatttaaaatttaattcctttgtaataaaaagcacctgcgcaattagcattcgccagtttagcgtgtcgtaattgactctgtacgcatacaccctgaaa

SEQ ID NO: 36828 - DNA, 902 bp, Heterodera glycines
tctccaaccgttcagttgcacgcccttttctcaagcgccttattgttggttgtgattttgtggatcggcgcttggctcgaacctttgccaatggtaatttcattttataatgttttaaagcaattaattcttttttatttgttaccttaaggcaattctcgcgtgcattgtcaccgtcagtcttaggccacttttcatccagtttggcgaattgcctaacctttggcggactgatcgctacgaattcgtaccattttcggcagtccattttttcctattatagggagagcttagttttttgcacaaaaaatcgcataataggcagtaattagtcatagattatatttttcgtttttattgcattttaaggattgttcccaaattccttaataggcactaaaaatggcgaaataggcacaaaataggggtccaggcattaaccacaaaaagtccaaaataggcattataaaagacatcttagacaccccaaacaaagtataataaaatgcttttaactgcgcaggaattttaggcatttgcctaaaaaatgaagcattaataataattaaactaatgaatatttttaataaagcaattaaaaatactaaacgtccgtccctttcccccattcctctcccaattttcagttcgtttggttggtcgcctttttcggcaccgctttcctcaacattacgttcggcttggccctttctctgctgttctccttggccatgttcggccttcgcaaattgaatgatgccatcgccacaaaagggcgacgcgcttcgcccgaatcgtccgccgacagcgaaaggcaattggcaaaattgccacaaattgtaaatgttacgctagcggaggaaaagtgattttatagcatagcaccacacatcgatgcattc

SEQ ID NO: 36829 - DNA, 887 bp, Heterodera glycines
attggtacgggggggggaaggaaaaggatgaaaatgagaaaatgaatttgtatccatcgccgttggcaattaattctctttatttttaacagtggtggcgaaaaaaagcataaaataaataattaaaatgcttttgaggaaaagccgaattatttattccgtcgctctttcctttgtttttgtttagcttaaccaaagtaaaggcaaacttttggcgatttttgttaagttggagaaacgggcgacaaatcgaagaaaaggccaaagaaagggacggacggaaggaagggaaaaggaaaggacgaacatccgtcactttttcattttctcccgtctcaaaagcgattttaaatgtgtttgaagacacaaccgccgattgagggggaaaagggaaagggagagaatgcgttggaacaggcggaaaagaggggggagaaacagaaaaacgagactcaaacggcggaaagagacaaacacctcacaacacacagagcagggatcctcaatttagagaaattttccataatttgaaatttaactcagttaaaataatttaaatttaataaaaaaaaattaaattttgttgcccgtgatttttcaattctttcgttacatttagcaaagctttttttattttttaattttaaaaaattattaaaaattttttttattttggttttgacgcattaaactgctgctaattgagtacagtttctttctttttaatcaacaccagaaatcaccaaataaaaacaacaaaacaattgcgaatacttccacatgaatacactgtctcaattaacaatctttgccttcttcgtctcttttccttcctttttcgtctcttttccctctggccccttttgcgctgcgtttttcgtctctct

SEQ ID NO: 36830 - DNA, 511 bp, Heterodera glycines
taaaaaattttgacaataaataataattcatttcaaaatcatgcacaaaacggtccctaaattgaagatcacattgccaaaattggatctgaatgatcctgccagtttggcggcatttgcatcgcccgaatcattggactcgcaagaattggacgaagacgacattttgttggacaatgaatggaacgaaccgatggacgatgaggaggaggaggaggaagatgaagatatgatgatgatggaagaggatgatgacaacaatgatgtaggggacctttttgatgtagaagatgttccaccagcggaagcaatgctcagatgcagtcaaaatcggtgattataaaaaataaaatgaaaattttattatttgctattggtttgatgtgccacaattttgaattacttagcgattatgggtccgattaacttcatttaaatttaaaaacccttttttttaattgcaaaaaatttttaaagaaaatttcaagaaagaaaaaattaaggaaatttt

SEQ ID NO: 36831 - DNA, 1110 bp, Heterodera glycines
agagcaattgaacgctaacggacgacctaatggaaaaaaatccccgaaggagagaatttaattaaatccattccttcgggggaccgtgccgggtgccgcggggtaagcagtgctggttcgtttcatcacggcaccgaaccttttggctagtcagcaatcgttgcttaacttgccagatcggacgggtgcgcatgattccactgttccaagcaccccaccaaaagcaaaacgatataaccaaaatataaggaaaaattttttaaaaaattttttctccatcttcctttttgatactaaagcatcagagtgctaaaattaagttgtaaataaaatttggtgcgctttagagcactttctgaaaaaaatatttatgaaacaaaaaaatcgattttttcaagtgtccgtttggggtactcaaacatttatggggagcaaaaatccaacgcagaattaaagtacaggctatagggaagctattcccgaaggattcggtctccccataaatctgggcgcatcggttcggggggactgccccgaaaacaaaaaaatcgattttttcaagtgtccgtttggggtactcaaacaattatggggagcaaaaatccaacgcagaattaaagtacaggctatagggaagctattcccgaaggattcggtctccccataaatctgggcgcatcggttcggggggactgccccgaaaacaaaaaaatcgattttttcaagtgtccgtttggggtactcaaacaattatggggagcaaaaatccaacgcagaattaaagtacaggctatagggaagctattcccgaaggattcggtctccccataaatctgggcgcatcggttcggggggactgccccgaaaacaaaaaaatcgattttttcaagtgtccgtttggggtactcaaacaattatggggagcaaaaatccaacgcagaattaaagtacaggctatagggaagctattcccgaaggattcggtctccccataaatctgggcgcatcggttcggggggactgccccgaaaacaaaaaaatcgattttttcaagtgtccgtttggggtactgaaacaattatggggagcaaaaatccaacgcagaattaa

SEQ ID NO: 36832 - DNA, 1248 bp, Heterodera glycines
  unsure (1)..(1248): unsure at all n locations
gattgctcttttttgactttttaagggcaaaattgatggaattatttttaattatttgctatcaataaagagttaannaattacccaagtgattagataaatgcgaaagagaagatttgcaattgaaagcaaaatgatgccgtacaccattcgacnttcaaccacggtgactcctctgcttcaaattcattgcctaaatccttcggcacattaacggataagcaaagagcagaaaagccaagtggcaaatggcaaacattttggtgatattgtaataaatttgctaaaatgatgaaaatttagaaaaatattattttaaaaataattaataattttaaattaaaaattagaccgaagatcataattccaatgccaggttttcaaaaaagttttgaatcagagtttagaaaataaaaaaaacaattaaaaaaaattatataaattacttactattgtatttaataacccattgtataagcaggaaaaaattattttgagttcgatttttagtgatatctctagaaatttattgtacattatttcttattttctgactgtctgattatgttattgtgtctgatcactctgatcaactttatctccgaagctattttaaggctaaaaaaattaaagcttttatgaatatggaatcgtacgtcatttcaaattataaccacaagcaaatagaagattatataattttttataatcatctttccagaattttgaaaaaacacatgtccgtcgggcaaccattcaaaaaacatttaagcccgagcacgaggcctgcagtttgaaaatgccgacctctactaagaatggcaaaagcacacaatatgccaacgaggtaaaaaaaaatcggaaaatctttgctcaaaataatttattcaagttttaaaataaattttctttattttgtgctcctccattttttacttgtgttggaatttccatgaacacggggccgtccattttgtgctgtccttgcccaagcggtgttctcacttcagacaaccgaaagcacacagaatgccaaagaattggtgcagaaattgccaaagcgaacaaaagaataatggccaataaatatttgctaattatttgtgaccaatggcgccgatacatttgggaacaacaaatggcacaaaaacggttcaatgacattaggaaattcactgaaattttnaataaggttcttttagcctanattagaaaaatgcttttaaaaatattttaaaataaaaatgc

SEQ ID NO: 36833 - DNA, 1185 bp, Heterodera glycines
ggggtacagcagtgattagaagaggtgcagcagtgattcagtaaattaaaatgaaaatattttttaacaaatttaattaaaaaaatacatgaaattctatcaattaaaaaaataattaatttaaacttataaaatttatttatcaaaaaaaaattaaatataattttttatttattaactcaacaaaatattttaaattaattaaaatcattgaaaataacgtaaaaatgcacagaaaaataatgttacaccgtccggatccgaacctgccccctcccccctcaaaatgatgcctcagaatccccaatcacacagggattctgaggtcttgacgatgtcaaaagtaaaatctgatcacgtattagtgatctgcatcgtaaattacccctaatgacatgtttttggaagatttttgtgaaaaagaattttccactcaaaaatcctggtcacccccctttggacccgaagcacaaaatcacttttatttttatatcttttttaaaaatgtgataaaaatgtaaaataaaatttatataatagagcaaaaaattgcggatttttgttgtattttacttttcccgaatagcttttcagaaggcagctacgaatttttttctgaaaaacgaaaatttccagaaattctggaataacttttttcttttttgagataaaaaactcaaataaatcccataaaattctccttatttttctctatttttaaagctttaattaacttaaatttaccaaacctgaagttagttatgaattttccaatattagcccaaatttccaagggccaaaaaattgccaaaaaataaagaatttttaaaaaattccaaaaattatgaaacttaaaatagacatcatattcgtactcagcaccttattttaccccagaaaaatatttttcacccccattttcgtccgaaaaaaaatttccgaaaatttctagggggcctagctcgaaaaattttgaaaatttccggccatatggcacaccattcgatagagcttaaaaagctctacaattttgccctaaggcgttttttttgataaaaccaacccctgacgagttatgggcccgggactcaaatgtcccgctcaggccaaaaattttttctatttccgggaaaaaatcgaaatttttccgaaaaaaataccagtcgatagagctcgaaaaactat

SEQ ID NO: 36834 - DNA, 1649 bp, Heterodera glycines
  unsure (1)..(1649): unsure at all n locations
tttttaatttttaataatcttgtttcaaaatatataattataatttaatagaattttataccttttatatcatcttgtttcaatactcctgcagcgcatttagtaagctttcaaaagtgaacgcaaatatttgctgttgtcatatgacgtttttttctgatacaccaattgtcgtcacttaatttcgtccgatatgagaacatcattcgatgcatctatccatcacccataatggaatagttgtctaatcggaattcgatgttctgatgacaggagaacattccggcaaaaataccatcttcattagcaatgtgattgatggcattttgtccgatgaattgatgcaatttgtgcacttctttcaagtcctattccaccaaattttgaggctttttaatggtagtatatatttaacttgatgtcagaggtgaatgtataagagaaggaatcttatcaaaggaatttaaaaaaaagagtaattattgaaatatactatcgatttttttatcttcgaattattaaatagcttttagtcatataggcaaatgtcgagccgcaaaggtcgggaccgcaaatgtctgggccgcaaatgtcgggacacgggaaaaggcataaaatgaaaaaatctaaaaaaatgtgactaaaaacaggaaaaattacgtcttgggaggcttatctgctgacagtgaggggagtccttctttaccattttaaaaaataatttatgtatttttttcgctgacaggccacgtgcagcgggctcgacattttgtgcaaaacgaagtgatcccttcttcgtcccatttcgactcgactggcgaggttataccacataattttcgtgccctcaaaaaaaaatggaaaatatttaaaaaagggtgttttttggattttcttaaaacccaaaaaaaagggggaggggactccttgattagcagtttttttgtcataataagtcgttataattaattccattgggttttctgagccgctacgaatctgacgcccatggaccgattcctaacccgaattcgaacaaagggccgaacaaataaactattcataatttagtgttttggttcgaattcggttaaggaattctgaatggcggtaatggaggctctactgcagaattaagcatccaatcaggatggtcattgattggacgcgtaaacggcaatagagccgaaatggggttcagatcttcaggttcttgaccagccccgcaaagcccccgggaaacggtttattatgacgaaaaaatttgcaattccatagtatttgccccctttggtttttaatagcattcaaaaaatgccttaccaaaattttgactcccaacttggcacttttgccctgttcatacagttcggcactttttccaatttgatgcttttctttagttcccctggccgtgggtgcgccgtgcccatgcgcttgggttgatgaacaccggcatcccccctgaacacggcggcattgggctaccactgacggccaaagttggcattttcgagaccatcgcttacggcgacatgggccttgggngtgttttttatttggtgtggcttgaacattttcgttngtgttaattgtgntattttagtaccactnttgatggtcagtgaactgtctcaacagcctctgct

SEQ ID NO: 36835 - DNA, 1205 bp, Heterodera glycines
  unsure (1)..(1205): unsure at all n locations
cagggatggagttccgaggcactaaaaatnttcggaagtcggaagtcggaattccgaggccccaaaaattttggaagtcggaagtcggaattccgatgccccaaaaattttcggaagtcggaagtcggaattccgatgccccaaaaattttcggaagtcggaagtcggaattccgaccccaaaaaatgtcggaagtcggaactcggaagtcggaatttttcaaaaaaaaatataataaattttttaaaaaatatttaataggctaaatttttaaatttttaaccatgtaaaaggtaatttcaaactgtttttagtttatttctatattttttaaaaagatcaaaatattttaagtaattttacattattttggattttttttttgggaaagttacaccctttttttgcggcgcgctttatccaaagagaatttgagaaactgtggggaaggaagggtccggcggtgccgatatgcgccgccgggaaaaattttgtaatttttaatgtaaattgttaacaaattttgtccaaaaaatggaaaatttagcgattttgagcaaattttcaagaaaattaagtttttttttgagtccggcggtgccgataggtgccgtcggaaaaaaaaaattgaaaatttctatgcaatttattaacataaattgtacaaaaattgctaattttttgaaaaaaaaactcaaaaaaattccgaaaaattccgacttttcatcaaaaatttcggaagtcggaagtcggaattccgaggccccaaaaattttcggaagtcggaagtcggaattccgaccccaaaaatgtcggaagtcggaactcggaagtcggaagtcggaattccgtgccatccctggtacacaatggttaaaaagggtacaatcatggttttaaaattaaataaatttccttttattaattaaaaaagagagttttaaaagtacaaggattgaatatttatttaaattgaaattaattttacaaattctaatttaaaaaatacaggagttctttaataaaagtaaataaattattattttaatttaaaacatcacaaaaaaataatttaatttaaattaaaaatttttattttttatggattaaacaaaactatttatatttattaaaatccaaatttaataatataaatatttatttaaatttgaaatggaataaacctggaaaaagaatcaaaaaaa

SEQ ID NO: 36836 - DNA, 799 bp, Heterodera glycines
aaatttatggccaaaagttcttattttacctatgtataaatttaaaaaatttatgcaatttttagacaaaatctgttaacaaatcgcattaaaaatcataaaaaaatttcccggcggcgcctatcggcgccaccggacgcccctgtccaacctccaaaattttttttaaaatgtcgcaaaaaaggccttttgaatgtaaaaatggtcgccaattgtctcaatggacaccagtactaaatgtaatgcagtgaactggtgcaaataggtcattttggttattgcgctaaaaaactgccgcaaactttttggacctgttcaaatgcaattttgccgcccaaccggaatggaatgtgcgaaaaatttggcacaattttcggacagcgcttggctttcgcgatttggcaaaaatgtttgaagagaagtgagtgcctttcttactttttagggacgaaagaaattttaagtgatcgggtgagaaaaatagagtaagcaccgatggttcgcctacataccattttcggcaaaaaaaaatttttttgaaaatttttttgtgtctaaaaaaatggtctaaatgtaaggaattttttttcatgccctttgtgtacagtttggtcgccttctcattttgttggttcgtgtttcagtttgccaagtccaaaacgcgcaacgaacggctggcggttgcggttgcctacgttttggctgtcttcatcttttggttctttgaccatgccgaacagatgcggacggtggtcaaactgacattgcatgcatggcgttgtgagtggtgggcacggac

SEQ ID NO: 36837 - DNA, 810 bp, Heterodera glycines
accacttatttcaatctatgattattacaaatatgatgtttgtcacaaactctacaaaacatgatatcagtcaaatgaacacattcgaaaacattaataccacttatttcaatctatgattattacaaatatgatagtttgtcacaaactctacaaaacatgatatcagtcaaatgaacacattcgaaaacattaataccacttatttcaatctatgattattacaaatatgatgtaataccacttatttcaatctatgattattacaaatatgatgtttgtcacaaactctacaaaacatgatatcagtcaaatcaacacattcgaaaacattaataccacctattacaatctttgattattacaaatatgatgtttgtcagaaactctacaaaacatgatatcagtcaaatgaacacattcgaaaacattaataccacttatttcaatctatgattattacaaatatgatgtttgtcacaaactctacaaaacatgatatcagtcaaatgaacacattcgaaaacattaataccacttatttcaatctatgattattacaaatatgatgtttgtcacaactctacaaaacatgatatcagtcaaatcaacacattcgaaaacattaataccacttattagaatctatgattattgcaaacttttggtgtttgttacaacttacacatcatgaaatgtctgatcaaaacattcgaaaacattaataccacttattaatatctttgattattacaaatatgatgtttgtcacaaactctacaaaacatgatatcagtcaaatgaacacat

SEQ ID NO: 36838 - DNA, 724 bp, Heterodera glycines
cccccccccccccggataaactccgttcccccgtccatatattccatcggaagatcttcccccctgatgtctctttctgtatctcctccccctcgagcctctctatttctctctctctctcagaaacttccccttcgctcttccccgctccctctctcactctcaccttttggctgtgattgggcaatccttcgctttcgttcctttcaccgtttgtttccattcaccgaaaagagtgggagaagctttaaatggaagaagtcaattgaaacgaaatgttgaagttgtttgtgcttcacagaattcggcggacaatgcgccgacaatggtacaattggcaaacggagggggcgcaattggagacgaagttgggacggaagcggaacagcagcagagggacagaatgggaccagcaaagaaaaagacgaaaaggccggcggagagggaacagaacgatgatcaacagcagaaagggcagaggagggccaaggagagggaagacaaagaggagaagaaagtgggaaatcaaaggaagaaaataaacggaggggggagagtgatagccaacaaaaaagggaatggccaacggattgctaattcatttcacctgtaaactctgccgcttttaagcccggggctgcttctcttccgctcccttcaaaacaaaagccttagccggactcgtcgccgggcattgtcacaacaatggaagcccagcaattgc

SEQ ID NO: 36839 - DNA, 994 bp, Heterodera glycines
tttcgtttacaaattccttgcctttgtcgctatgaatcttttttggcgcccctagcactaaaatgaaattttttagaaaattttgtgccacggtttcagcgtttttgttcggaatgggattcgcaaccaaatattttgaaaaatggtcaatcgtaaccaaaatataatggttcgacgaatttgctggcccaattgacaaaatgtcaatacataccaactctaacggttctgaagtctcaattgcatttaaaggaggttcatttgaccgtggtttgcgagcgtgtgcgcaaactcgacatcgaagtgctgctcttatgcaatctccgaacatatttggccaaaagtaaagctcggatagttgtcgaaaaattttaattccgctgaggtgttcagcacaagtaccggagtgtctctctcttatcatcttttcacggaattctcgtggtacgaacaattgtagtttcccctccttgccacttcggaaaagcaatccctcgattaaggtataattgtgtagataagacatcaatttttggcggtcacgaatatcattcggcaagacacgtttatccaaaaaatcataaacaaaccctaattcacttttctttgatttttgggcccagtcttttctatgctcattttcaatttctttggcgtgttccgctaactgtatttctctaatttggcctataaatgcgattttgtcagactctcacagttttcagcattctccgattttaacagcgtttttgaccgagacaaaagatcggcaattatattcattttgcctggttggtattcgacttgtagtataaaacgggaattcattgctagcagccacttatcaactcggctattacccgtctcttttttgctcttaaacatagggacaagcgcacggtgatcagttatcactcttgttggtatcattgtgataaactgagcatattttttggtaccgaatccgattgctaatgcttcgagctcggtgggg

SEQ ID NO: 36840 - DNA, 975 bp, Heterodera glycines
  unsure (1)..(975): unsure at all n locations
tttcgccgccttttccgatcagtgcgccgaccgccgccgatgggatcaaaactttgatttggaggttgtctaagagaggaaagaccaattagattagcaataaacaaaggaatcaccggactcaatcacattcgccttcttcgaggccgggccgccgttttcagtattttgtcgcttctgtccaataatagagccatcaacatcttcaaatttttcctcagacattgccttttgatcagtaaatgtaccaaaataggaacttaaaagatacaattaattatacaccgaaaatggcattaggaagcaaaacaacgcattaacaaataggtaagtgggcggaacggaggttaccaaccgcaaatgcgccacactcaacacaatcgattttattatacggtaaacaaaatgccataaattctaaatacatttgaaaataaataatttaaaaattttcataagttgctttatggtacatctcggcatgcctaagatagtccatcagatcatggtaattccgtcggcatttaaaacagacgaaaaaatcggaagacgattttcgaaagtccaaataggggtagcagctgagagcatcactaaaactgggatttgataattaatgtggtttttgatcacgagtgtgtgcacctttcactgccgaacaaacaccgcaatgtcggccacaattcggtcggatggtaaaggaacgtgtgaatggccagcgaagcgcactccgagtcgcggttcgccgtctgcataattctgtgccagtctctgttccccctgctccatgtcggtgccatgccttcgcccttctgaaccatcgccaaatcttcagtggcgattttctcaatttgtttcccgcaacggccacattcactgcagtccatctggtcaaagtccaagcgcaatttctccatttttcgtgccctgaatattattttanaaagcagcataaacgcaatagagaaaaaaaag

SEQ ID NO: 36841 - DNA, 1220 bp, Heterodera glycines
gtgggagggcgggggacgcgacggcggaaaatgtgtacaataaatgggcaatgaatggggcgattagaataaataacaaacaataaaaaagacaatcaaaacataatatagaaaagctagcagatgttgtggattagtgagatttgtgatggtgatgatggtgaaaatggaccagcaggacaaagcaaaagattgatcaccctgatatgatggattccacatatttgaaaggaatgtgccgataaaaatgccgacttaacccaaaaatgacaaaatgtcaacaaatccaaaatgtgtcaaaatttgcatatatgatcatcagttttgtgcctgaactgatcagccttttgtattgttcggtcatcatgaatatgaacattggtaaaaacgatcgatgatcactgatgagtagagggcttcggtttatagttgctaaaaagtgccaaaataattagtttttcgtttctaaaaaacccccaaaatagttgctaaaaatggaaaatagttgctaaaaactttcaaatttaggggtgtaaaatcgtaaaattttatgcaaaaaggtaacaatattaattcaaatcattattgaaataataattttaaaaatcacaacttcttcaagaaataaataaataaattttggagattaatttttgaaaaatttttcatttcttaagggtgtatttttgaaaattttttggtcgaatcttaggcgtgtatttttcctttttattccatttttgttaacaaatttttgggcaaaacgctaaaatagttgaaaatagtttttcaaaaattttatagttttttagttgctaaaaataaaaaactagaaaatagttgctaataactcgaaaagtagcttaataacagccgaaaaaacatgttttcgtgcatttcaggctacggggagctcaggaaaaaaatagtgaaaaaactataaatcgaagccctattcattacagttgaagaatttggttagaatgtttaaaaatacgaatatttcgacttatacgatgtttctcgtggacggatcccgacaaatatagtaccaatcgatagctaaaatttccgattcccgacttccgaaaaatttttgtgccccggaattccgatttcccaaaaatttttgggtcctcggaatgccatccctagacaattcagccgaggacaactcagctttacgagaatttacaaaacgcaactcgtacaatggctta

SEQ ID NO: 36842 - DNA, 1625 bp, Heterodera glycines
cgtcgctttgtttttatgcaatttcccatttttggctaaattctcacgccgtttttctcggcattgcctccgttttttgccgttttttctcaaatttcaagttttgtacagactatttttggcactcgcaaaaaaattattttgctatgctcaacagaagacattattatttcatttgcgtaaaataaaatggaaaacaaacaaaaaaaaagaaaggcattttggcaattcattcactccatttatccattttcatcttatttccatcattttcatttcattcacttttggcacaatttacatttttgctcttccgcggcttttggcaaataaaattattttcgttcaatttaagtctgttgtatatatacggctttaaagtttaaacactaattgccaaaaatggaccatctttcctcctccgccattggtgcctttgtcgcccctcccacctctcccggtgccgctccgtcttcgccgtgccatcggcagctgccgctgcagctgcagctgtcatcagcttgcagtacgtatatgactgagttggaactagtcgccgaaaatattctcgtttcattgtttatttttagaaaagataaatttgacttctttacaatgactgcttcatcccgtcgtttgcaaaaggttgactaattacgggcttttaactttattaccatatgggatcagaacttgaatctcttggctgacctaaaatctcacttcagtgcttttttaaaaattctttttcatgattgaaactattcttctaccttactaaaatatttactatatttactaacaggaactttccgaaatgcgtgggaacaattcgggcgctgttcgtgttcttgaggttgatgagtctaatttgcttcgctggagccttatgctttatccggtaatgttttatacgttatagcaaacaaacaattagattaatgtgctttctttaggaccgtgaaccatacaacaaaggtgcttttcgtgtgaatgttgattttccaactgagtacccattcaaaccgccatccgtgacattcgcaaccaaaatttaccatcctaacatcgacgataagggccaagtctgtctcggcatcattctcgcggagaattggaagccggcaacgcgtgcagagcaagtgatgaacgcgctgctgtcgctgattgccgagccggaaattgctcatccgttgcgctccgatcttgccgaggaattccaacgggacaagaagaagttcttcaaaaatgcaggtggagtgtcttgctattttaatttttcttacaattaattttagaagactacacgaaaaagtatgccgaacgtcgcgactgagtttgtttggacagatggagttatttgtgcatgaaagtcccgctggtatctacgaataatctctcgccactcaaattgttcaatttataaattattgtgttttgtctgtcgttgattattttgacttttttgtatcgatttaaacttgaagaaaatatattaataaggattctttgttaggatgtggaattccagaccattttgttttttgttcgtttgtcagtcgagtttttttttttagtttttcaaaagtttcttagggcttacaactgatcgatgtcaagtgtta

SEQ ID NO: 36843 - DNA, 640 bp, Heterodera glycines
ttaatttaaataaaataatttttgataaatgctttgtattaaaattaattatttatttgttataattaattaaatattgtttgtttgatttatgtttaatttttttgatgaataaaagttttattttatttgacttttcgacaaataatttcctttcaatttcaataaatatttcatattatgcatttaaaaattataataaagctttaaaaatagagaaaaagcgcgaagcgcccgtcctgaggccgcgaagcggccgaatatcccccacaaaatttaaaaacgggcgcgaagcgcccgttctgagaccgcgaagcggctgaatgttccccacaaagtttaaaaatgggcgccaagcacccgtcctgaggctgagaagcggccgaatatcccccacaaaatttaaaaacgggcgcgaagcgcccgttctgaggccgcgaagcggccgaatgttccccacaaagtttaaaaatgggcgccaagcgcccgtcctgaggctgagaagcggccgaatatcccccacaaaatttaaaaacgggcgcgaagcgcccgtcctgaggctgagaagcggccgaatgttccccacaaagtttaaaaaccagcgcgaagcgcctgtcctgaagtcgcgaagcggccgaat

SEQ ID NO: 36844 - DNA, 1021 bp, Heterodera glycines
tgaccagaacggaccggggctaaatccgccttttgcacggaggccgccttgtctttggtcaggacttttgcaaagctaaagccaagcgcagtaaattgacaatctttgcggtttcatcaatcaatgtccgtccgacctggcggcaatcacatcgcccggcagtccgactttcatctgtccttcagccgattcaccggcgaccgtcgcattgcgcaacgtaagcgatgttcttctcgcgacgcttcaaaaacccacaaatataaatttaaaagaagagaaccgtatggaaatgtaaaacagaagcattgccaaagtgcacattttgatttttgacgaaaaattaaaaaaaaagattttaatggtactgacaagagccgatggaaagttcggtgtttttaatacccgtcgataatatctttttcctcgaaccaaatcctaacttcacgttcatattcttcgacggagtctgacgcatggcacacggtgtcccttctgcgtcccaaaatgaccgaatttgcgtacgttgcccgaatcgttcctgctggtggcacacgcacatcagcacctaagattttgcgaacggatgaaatcgcgttcggccctaaaccagatgattgatagaaaaataagtatttgggcagttgattaccctcaagtgcaactgcgataacagggccggacgtcatgtacgcaatcagttctggttgtgctccaggataatgacggcgaatcgtccttgccctcggtttaaccttctcaaataccaattagttttcaaatttgttacaaatttttaattaaaccattttcattccaacgattcgaaaaaaaggcggttcttccaagcgtttcaaaatttctgcggtcgctttttggaggacgctttcgggtttaatcagaaccaatgtgcgttgcacctcgcagcattacttttatcaaacattgccatttctgctaaaagaaatatacaaattaggtattcaaaaagtttattggaatgaagggttggatttcagaggtg

SEQ ID NO: 36845 - DNA, 832 bp, Heterodera glycines
gggggggggggggaagaacagctgctcccggactgtttctgcccgcgcctcggttttcccaaattggttgggttagcaaattgttactccgcttgtttggtttgtttttctccattggttcacctctctcccttttccatctcttttctcttccttcgactcgtcgcttttgtaccaccgtttcgctgctttgtcttcaccttccccgtggcgtccgtttcgctcatctctttcccggtttcgcgaccgctttcttggctcctcccagcggtcttcttcctcactttcagacgaactcgcgtgtccgcttgaactcgagtactttcctgcttctgggattttgaaaattattttgatattataaaactaaaaaaggtcaatcccgacacaattccacagaataaaactaaaaaaaattgagttagctcaaaaaatgttttgaaacgtcaggatattgttgtattgaacacctgcggttgttactgaactcgtcacgtgctgtccttccgccttcggttcgtatttagtcggtccattttgggcttgatattgatccttttgatgaattgtcagtctacaaaatgaagttttagtgtctaattgtacgtaatatgtgtgttttttaaatagattgcaatagacttacggaaggattatatcggacacatgcaatttgtcataattgaaggcgggctaaaaaagaaaatgaaatccaacaaaaaacaagcgtttatgtaattatcaaaaaaacgaaaattttaagcatatgatgcttttttcgcataaaatttcgtgtgaggggggtcttgggggggttagtaaaccccccccc

SEQ ID NO: 36846 - DNA, 1258 bp, Heterodera glycines
ctcagtaggcttgttgataatgatgtttaggttttaggatatttagttcccaaccctcaactaaaattgcttttgaaccacaccgcagtttcgccttcacacattttgatgcggtggtcagatttgtttcccgcagagatcaatgtggcaatgcgaccaacagtggcggacagctcagcttcaaatacatgtagaaagcaattaaaattaaggaaggaaaagccaaaaaaaaaagtggaactccaaataatggaaattgaaaaaataataattaaaaccattcgtgaaaagggtacaaactgcggtactttatgccccaactcataaaaatggacaaattccgacaatttttttccagtgatttaacaaatttaacaaaacgacttctgaaacctacatatgtacaaaaaacttcaatctttgggtcaaataactaaattcctaggctgctatatttgatgcagaatttttttctcaatcatcacgcaaaatttaaagaaatctgtaaggcacaaaaaaattctttagataagctaatgatattttttacattgttaaaatgaagagatagtatataaaactgagagaaataaaaatataaaggccaataattgaaaattctcttctagtttaaataaaaacatgaaaaatgcatttttgtaaatagaaaatgatcgctcaacgtcacaaggagtaaagaatttagatgggcttaaattttttaaatttaattttttttatatttttccatgtttaaacgggtaaaaattatcactttaaacaccatacaaggcattaatttgcatattagtgaacaaaaaattcacggtcgtttaaccgaaccaaaacaaaaagcggctattttgggaagccctaataaagacattaaaatgatgatttcgggataaaaaaagttttttcgtgcatttctcacaaagaaaggtcaccatttgtataatagtgtgtaggtcaccattttttgagtcccaggttcggattccctatatgaatccatttacaatttctattttttgatttataaaagtcaattattaaaaagtaatttttgaaacaaatgctactttttatttattccatttaaaataaaatttttaaaaaaattttttaacatttttattgagtgtcttatgtgtagggctggtatttataggtgctaaaaactgccaaaataggtaggttttaggttctaaaaacccaacgaaaataggtgctaaaaatgcaaaataggtaccaaaaa

SEQ ID NO: 36847 - DNA, 783 bp, Heterodera glycines
ccttatgtcaaaaggaatgtttgatttaggaaactttttgattgggcgcgtaaaagtcgattggccgcgtaaactttggattggacgcgtaaactgtgattggacgcgtaaaagtcgattggacgcgcaaactgtgattggacgcgtaaaagtcgattggacgcgtaaaatgcagtagagccaaaattagattatggacccgaattggtaaaatgtcggaattaaattttcaaatttcgtgtttctcgttcaaaactaaaactgccgatggtagggagggcccccctttcttgaaaaaagtcactaaaaatatatttctttggcttttcaggggcaccaaacaagaatttgactgttttcgacgaatttcgaatccctactagcattaatcatcgaatattttttagccagaaagtacaacatttcggggctgatcagtcggtgtctgaaaattccgatttcaaatttgtccaatgttttcttggccattgctcaggcgcgtcttttcgacttggaggtgggaaagacgatgatttctttatcttcttaatttaagtagagttcccaagtttttgaaatttggcataaacagaattggaattcattttaaaataaggggagggtggtggaaatttagaaaattagggtttgtcgatacggctgagcctgtaggcgctacaggggaaaaatttaaaattttatgaaatttgatgttaaaatttgattccttaaaaaaatttacagcccttaattcagaaaatcagcaagaatataaacaattat

SEQ ID NO: 36848 - DNA, 678 bp, Heterodera glycines
ccgggttagtcgcattgttgttttggctcataattgcgtgagtgaacgacacgaaaagacatcacattcaaatgaatggcacggttacagtacgccaaagggatgccaagggccctaattaaaagcccaaaatggcgggggggggggggcaatgccgcaccgaaatgattaaattcgagtgtcccaccttctgttttggtaccacgttttcacttgagtgtcggtgagtcccatccgttgtgccaaactcactctgtcctgcaccgacaaataccttcaataatttggcattttgcttattgcattttcttggttttctgtacttttgtgatccgaacatcgtttccaattcctaaaataattaaaaacaattaaaattgtttgaattttgtccgtttcgcttttgccacctgcagctgtttgtccgtgaaaattgtcctcgccttgcgcgcctttttccctccgctgccgccccctccggcgccactggcgcccgtctcagacggagttggcggtgcggacgaacggggcgaaaatcgcccgctggtggtcggcgaagcggagttgtttcgaggggcgagccgagaagcgaacgaatcatcgccggcggcgatgtcggcaaagtgattttggtgggcgaggaaaatcgaaggacggaagagatggcgtgaggacaca

SEQ ID NO: 36849 - DNA, 1172 bp, Heterodera glycines
aacataaaccaaaaccatacatatgtataagaagaaaagtgaaggcttacaattatgaattttgtaaaaaaataaaagaaacacagtgcacgaaaatcaccccttaattaattaattacctttaattggttaattagcatatgtaaatagctatttaattgggataactgggcagcaggtaaatttcattccatttcatctcttccttttcacgatcatcattagttgttttgttcaagaagttccacaaattggggctctcgaaagaactcgggaattgtttctaaaaagaaattaaattaaatgtattcaattaaaattaattaatttgtaatctctcaccatcaagttgctggatgactttgtaaattgcctgaaataaattttatttttaaagatttaaaagtattttatgccattctctaaccaataattactttggaataaattgtaaaaataaatttttaatttttggccttagatcataaatttttttgtaaaaaaaacttaaaatttcaaccaaaaatgcttaatttacctttttccaagacgattccttatcacggccttccttcaatgcattgtagaattcctttaaagtttctgtatcacaaaaagaagcctttcgggagtgtggtacttaattgaccttttgacttcttttatgttttgaatgataattatttattggcgttttattttcttttttttatggaccttaaaatattagtgagttttttttttactgttcggttcttgtttggttttttgtcttgttttctctggaattgttttgaatttcttttgatgctgacttcttctcaattgattgttgtggtctcgtctttttaattattattgttgctgtttaaaatttatcgtcgtaaattattttgttttgtttatttattaaagtgtttgcgaatttgttttgaaacaggtgctgacaagccgacagataattgtgttttgatccatttctgaaaagagacaacccatccctatccaattttgttgattttgtacaacttggcgctcctggggacaaaggtttggcttagtgacgactattcattaaaggataatatcggccataaaatttttgtgaaatcaagtgaacaaagtgattactgtaccctcgtgttgggtttaaagcatcattcggcgtattt

SEQ ID NO: 36850 - DNA, 765 bp, Heterodera glycines
  unsure (1)..(765): unsure at all n locations
ccaaatatgttataacttcaaaaatttaccaaatttcctttgattattttttccattttgaaatgctcattttcaaggacgtccttgcatccaaggacgttttttattttcaagaaagagggcccaatttcaaggacgtccttgcatccaaggacggatggcagccctgctttaaagggcattttaagtatctttttttcattgtcagctaaaaatgagcccggaatgaaggggcccgacaacggcgtggtctgttacgtgctcagaacggggttcaacacgcagcagggaagtctgctgaggacaatcatggtaagaacaaacaaagagctatcttattactggtagcaattaataattgaatgctacattgtcatagtaattggatcacagcaaattcatccacagaaacccatgttatggcattttttttacatatggatgagttgggtggtatatggcaggtggtgttgcttgtctcgtttcctgtattctcttattttagggcatctcatagttactttaatttttttgtccctcattatgggtattgtgtttaaccctcactaatttgattgattgtgagattaaaaagtctcatttttactttttgatgccccgttttgttcgtctgtctatggaatgtttcatctccactttttcagttcggtgtgaaacgcgtcagtgccaacanatttggagacgttcttcttcatcctttttctgctcatttttgccattgttgcggctgcctatttgtggatc

SEQ ID NO: 36851 - DNA, 1024 bp, Heterodera glycines
attgtaaatagtcacaaacaaactttttttcactcccaatatctaccagttatcatacaaaaaggcaatagttaagcactgagatataaaaaaatcgtctagaataattatctaaacaatttgtcgggaaagctgtataaattctcgggaaaaaacttttcaagaaaagctgaaaaattttcaatcgcatcagaagcagcctcaaattcttcaacaacataatgtaaaaaatattacgcaagaaattatttttagatcctttttagaaatgctgcataaatttttattgtaaatagtcacaaaaaaacttttttttactcccaatatctaccagttatcatacaaaaaggcaatagttaagctttgagatataaaaaaatcgtctagaataattatctcaacaatttgtcgggaaagttgaataaatttcagttgcaataggcatattggcacaatacataaatgtagagcaggctcaaaatagaggaaataccaaagattaaaaaattcgtgtttatggcccactctgctttggctggacataactcgccagagagtggagatagaccctttgttgatacatttgaaaatgtagagctcggctagcgcattcgaataacacaaaatttgttttcatttgcccccaaacaatccgcttatgacgggccgaaagaaaattcacaaaaatttggcaccggaaaaactccatttttttatgggccagcataataaagtaaacccaaaatgtaagggaatttaaattggtcatgtgagatgtttagttttttatttgacccatccgttttctgggaaaaaacttttcgagaaaagctgaaaaattttccaattgcatcagaagcagactcaaattcttcaacaacataatgtaaaaaatattacgcaagaaataatttttacatcctttttagaaatgctgcataaatttttattgtaaatagtcacaaacaaactttttttcactccccaatatctacccagttatcagacaaaaaggcaatagtta

SEQ ID NO: 36852 - DNA, 987 bp, Heterodera glycines
  unsure (1)..(987): unsure at all n locations
tttgggaaattttatacgttaaaatcctctcgagcatgataggaggggcggtgcgcatcgccaattaattgcncngnngattttaaatttatctatatccaagaaaaatgactatctctattttgagaaattttatacgttacaaatgcgctcgagcgtgagagggagggcggtgcgcaatcgccatttaatttcacagagaatttttaaatttatcttatatccaagaaaaatgactatctcttattttgagaaattttatacgttacaaaagcgctcgagcgtgagagggagggcggtgcgcaatcgccatttaatttctcagagaatttttaaatttatcttatatccaagaaaaatgactatctcttattttgagaaattttatacgttacaaatgctctcgagcatgataggaagtgcggtgcgcaatcgccatttaatttcacagagaatttttaaatttatcttatatccaagaaaaatgactatctcttattttgagaaattttatacgttacaaatgctctcgagcatgataggaagtgcggtgcgcaatcgccatttaatttcacagagaatttttaaatttatcttatatccaagaaaaatgactatctcttattttgagaaattttatacgttacaaaagcgctcgagcgtgagagggagggcggtgcgcaatcgccatttaatttctcagagaatttttaaatttatcttatatccaagaaaaatgactatctcttattttgagaaattttatacgttacaaatgctctcgagcatgataggaagtgcggtgcgcaatcgccatttaatttcacagagaatttttaaatttatcttatatccaagaaaaatgactatctcttattttgagaaatttatacataacaatgctctcgagcatgataggaagtgcggtgcgcaatcgccatttaatttcacagagaattttaaatttatcttatatccaagaaaaat

SEQ ID NO: 36853 - DNA, 940 bp, Heterodera glycines
  unsure (1)..(940): unsure at all n locations
atttaaatttcatttagtttactcatttttcttttattattattttcgcatttattcaagcattttccggctatcaatttcattatgatactatttaattattaaaaaatagctttgtttaatctttttaattattaataatttttaactgaacttatggctttgacaatccttaacttgattttaaattttaaggaggtttattattctctttgtatatcatttattaccatatacaaaccataaaaaaacttatttaaattggtgatttaattaccacttttttaaagttttatcaataataaatttaaaatttaatttaataaaaattttaaataattaggcaaaattggtattattagtttctctattttaatgttttttccaaaatcttatgattcaagatttgcatttttgttaatcaatgtttgttaatgactttgataaaataaatattcgttatcgtctcattacatattactgattctttttacaacgaattaatttaatgttttattcttttattttttattgtatatataaatatctttatttaaactcatcgttatgcccatattacacatattacagagtttgtggtatcgaagttgttttccatttagtcatgttcaaataatagcaaaattttcaattatccatagtaaataaatatagtttttttgttaaataatttttaaattacatgaacgggttaacgaattaaataagttaatgttatttatttatttgatttttgtctatggaaacattttattcatttattattttatcttgtatgtttttttttacaagtcttgttctgtgtcccgtttcttaattatttgttatttatttgctataaaaatgtccaataaaattgacattgctatttnaatatgattcannagggtatgtctgtttatttttatttttaaaaatc

SEQ ID NO: 36854 - DNA, 992 bp, Heterodera glycines
ccaattcagttccatttccaggactaggtcaaaatttaaatattccaaatgaattcctcgctatgaatccggaaaagtttaaaaataagaatctcataaataagtgaaatcatcaataaacagttataaaaagcaacaaatctcattgataggatgagtcaaaatgattaaattaggaataagcattcaattggttcacctcatcaccgttggccgtgtcgcagatgcgcactttgtccacgtaagtgaatggcatttcgttggcggcgccttcagtttgttgcgcactttggactgagttggccgcctccaaaaatgtttgtccgtcggacaaaattcgaactttggtgaacaattccaaattggccacattgtcaagctgaaatatgcagccgtgaaacttttttaagtggatgcccgacttaagaaaaattacgtttttgagctgtaataggttaaatcagttaaaaaattgcaagacaaatttttaaaaaagaaagaaacggaaacgccagtccgaaccgctctcttttggcatccccggctcgttttttatggaatgagtcaaacaaaatttgtataattaatcagctcagcgtggtgcctgtccaaattttttttcaaatttctatttttaggcgatttagtgatcagagattgcgcaaaaaaaaaactaatggcgctcacttggtagcttagaatgccatctgagagcgaggggtcccagcggtgtcattgccagcgcttgcttttcccagcaaagaaaaacttcgggggagaatggtcgaactgttaagtaaaaaatgaccagcaggtgatcaacaagctacaaacgcacccttccgataaagccatttgaagaagccatttcctttggcatttttttggactgtttttttccgatttcgcaatcgtgtagaattggccctgaagggggaatcagaagaatttaatgaccaaaattcattaaaatttaaaattttttgcgacag

SEQ ID NO: 36855 - DNA, 1037 bp, Heterodera glycines
  unsure (1)..(1037): unsure at all n locations
tgggagtgaaacagccaaaatgagtcatgcttggatcacaccatcgccataaacagaagtaaatgacatattttgctgttttcaatataattaggataatgaggggcatggaatatcatttgaacagttgttgaagctttttgtaacaaactgacctacccccaattattgctaattagtggggatatgcctttaaattaggcccgtgtctgcttcttctgctgttgctggtccctgggcttttccccttggacagtgtcagccttttggggtgttttgcttctgctctggcctctttccactccccaattttgggaactgatcgctctgttccaatttgggccccttaaataccgattagccggccattgttttgttgttgtgttatgagatgacactactcactcgcttctcccggcactgctgcggcgccaatttcagtttaatgtgtccattaccgacggagtgtcggcggctgcagcgaccgctttttgtccgtaggggtggaactttcatttcatttcattcattttaaatatcggcggcgcgatcattagagttctcctaattgtctccagcagcagttcatttctacgattagcgcacagcaaaaaccccggggcaaaacggacggacgacgccaatttgccgagggcgcccccccccccgccgcgggggtaaatagtatttcgtgtccatatttttaggccgaaataaaaattaataatgttttttttggaccgatggaattccttccttctatgatgggaggggagagaagcagaaaaaaaacactggctggaagaaaacctgtagggctggaaaatcggggggaaattttaaaatccattttttcgataaaatttaaactgtaaaatttgtttttcccgttttcttcggtgcatttaacacagtaaatggttttattgctctgttattgagcaaaacaaataaaaaaaaattctgttccaaaggtatgtcgtgaaattttacccaaattctttttcattcgctcgnagcgaaatcttttggaaatt

SEQ ID NO: 36856 - DNA, 1071 bp, Heterodera glycines
ccaatgaacggttgacccgatctcttcgtcggtgacccatttgatcatttgccgctcaattccctcaatcggcaaactgtccgttgtccgcgtaacaatcgccgctgttcccccgccattggaagtgccgggcattgccaaatggtggcacttttgttccgcttgttgttggtgaatttggtgccaaaccgactgtcgcaacagtgacagattttgctcgaccttaggaaaaaatggcacataattaaaaatgaatgaattccccggggctccgtcgcccaattcggccgcgctgttccccaacaattgcagcccattctcgcgcagacatttcagcgcggcggaaagattggccaagtgatgaacgcgctgttttgaactgacaccgccggaagagtgccgtctttggactttcctgacaattaaattacagtaattacagattatgaaaatgcaaaagtctgagtttcggcacaaaatcacccacccgttcgattgtccgttttttgacattgcgacaacggcactttccgtaatgacgagcttaataatgcaatcaaaagtaacggaactgcggaactgctattcccattaaagcctaattagcttctattttaagcccaaacactcaccaaaacttggccagtcaaaacttccaacaaacggcacagcaaaacgccgtcacgcatgtcaatgaaaaggtcggtgactctgccagaagaggaatgcttaaaggaagaagagaactaatgggataaagcaaaggaggggaaagtcaaagccaattgattgatcagtaaaaagccattttagatgattaaatgcccaaaaaggcaattaacaaaatccaaaacaaagtctaaacggaaaatcacctcttcgagacggaaattgacccaattagtgaaggttttcttctgcatttgctgttcagcttctaaattaaaatttgccaaaatattttccattttgagctaaattcccgtaaaatattttggaaagtcaattggcaatgaatgattcgatttatttttgcactctttccaaggaattaatggccaataaaacgcg

SEQ ID NO: 36857 - DNA, 818 bp, Heterodera glycines
atcaatcatttatcttttttattgttatataaatttctaaaaaaatgtttttattcccttttaaatccattttggttgatccctccaaagaacgtcaacaatcggaaatagtaacagtcattcatccgttgccatatggccatagccatacacatgtggtcccagttggagtcagatttctgagtgagacgtagctgaattgacgacgaaatccggcggatgatccaacttggattttcctgatcacccgaccgatgattgatcatccatctcaaaccttcttttgtttattcattttgagcaatcatctggtggcataccaacaacacacatgtgttgtgttgaatgccaccacacatcattggccatatggcagcagctgatcctgatcagtcagtcagctttttcactcactttaatgaaaatcacccgtattttggtgcctgatcagattaactaatcattgaatgaaattaattttaatatttttgttatgttaataatctttttaaattgaaggaattttttttgttcctgacgcatatgcaaaagcaaactttgttctctccaaaaaaaaatgctttcttttgtcaatgggcttttggccatatttttttttgcttggccctaaagtcagtctcccgcccgaatgagtttgatccgcttttatccaacatttggccaaaatgctttcaatttcacgacatcatagggggaggggggggcaaacagtgggtgatggagaaatggggcaacgaaagtaaagttgatccattcgatcaattttttgtgcagtacccctccccaaagagaatttt

SEQ ID NO: 36858 - DNA, 797 bp, Heterodera glycines
agtgattgaaatgttggtgggtggagtatcagtgattgtaatgttggtgggtggagtagcagtgattgtaatgctggtgggtggagtaccagtgattgaaatggtggtgggttgagtggcagtgattgaaatgttggtgggttgagtgccagtgattgaaatggtggtgggttgagtcccagtgattgaaatgttggtgggttgagtagcagtgattgaaatgttggtgggttgagtgccagtgattgaaatgttggtgggttgagtgccagtgattgaaatgttggtgggttgagtccagtgattgaaatgctggtgggttgagtaccagtgattgaaatgttggtgggttgagtcccagtgattgaaatgttggtgggttgagtcccagtgattgaaatgttggtgggttgagtcccagtgattgtaatgctctagggttgagtcccagtgattgaaatgttggtgggttgagtgccagtgattgaaatgttggtgggttgagtgccagtgattgaaatgttggtgggttgagtgccagtgattgtaatgcagggttgagtcccagtgattgaaatgttggtggattgagtgccagtgattgtaatgctggtgggttgagtaccagtgattgaaatgctggtgggttgagtgccagtgattgaaatgttggtggattgagtgccagtgattgaaatgttggtgggttgagtcctcagtgattgaaatgttggtgggttgagtcgcgcagtgatagaaatgttggtgggttgagtccccagtgattgaaatgttgg

SEQ ID NO: 36859 - DNA, 899 bp, Heterodera glycines
ttttttccctttcttaactttttctataataattctcctaattgcatcttttctctttcatttcgtccctaattaagagcccttcccaaacccaaaagtaacttcgatttgcttattctctccacaaaaagatacatataataaagggtcttgataataaagaaattattttaactaaattttttaatatttctcacttttatgcattccgtcaatttgtaccgattgaatccattcggcgctctgttcaaagttcagtgcttcgatcagttccatgcttccattctcgtgaatcctcaatggtcccgattccaaattcattttggacactttctcatcggcgctcaaaggaattcgctgaaattcgccattcatttgcgttatgccatccgccgtcagtttaaagcttgtgacctgcttaagtatgccattggactgatcttccggaaggccaataacaaaatcgtcagctctgtcccttcgatttcgaattggggcagccaaaggactgtcttttcgggactgaaattgctggcgttgattcggctgtgctgatgagacttttcgctccacgtcgatttcgatttcgcattggccttcctaaagcctttttcatcaggtttttcagccaattaattggacttggcccgctgagtctacggcaacaactctgaacgcatatcgccctgaatccaaccgctccttggcaaaaatgtcaccgaacaatggggccacgtcgaacggagatgactcgggttcaacacggaagatgggcattccgcgcgaggttctgaaccagcaggcggtttcagaagggtgaggggggggggatgatattgatcctttgtgctgagcttaccatgctttcatctgaatgccgctttcctaattttaccctc

SEQ ID NO: 36860 - DNA, 896 bp, Heterodera glycines
attcgtattttacaaaatattttccacttaagagttttcttgttcaatggaacacatgcactaaaataattttagttatctcttttttatttaaatttacaatgattatttcttttgtatcataaaaaaatgatttttttatgtctttctatcaatattaaatattaaaatgaataatttattctcataagaattattttttcgtttctccttagaaaagaaattaaacaaaattacttatttttttctatgaataattaatttctttgtaagaaaatttaaataaatattggaagcaaataaatatgaaaatagtttatttaaaaacaattatccatgaatgaaataattaaatcaataataataaatctaagaaaatttattaaagtaaaaagattaaaaaggattattatttattactttgttttaaattgtgttttatttaaaatgtaaacagatgacaaaatgctactatatttcactcaaacatttacttaatttcagaaagtaattaaatacatttaattaaataattttttaaatatcaaaaaattctaaaaatatttgtttaattattatttcttcaaaaaattttttgaaacaaagattaatagaaacttaaaaaacacaattaattagttcaacgttgaaattcttgtatcaaaatataagtaaattaaataagggatttaaaatattagtcaagttatcaagattaattccttctattaattaaattattgactaattttgctcggcgtctctgtttcaagaggagagttttccaacattgttatgtcatatttaaataaataagaatacgaagtagtattttgtttaacatataatttttacaatgataaacgaaataagtttaataattaacgaataattaa

SEQ ID NO: 36861 - DNA, 982 bp, Heterodera glycines
attttttgtgccgctctctttggcatttgtcgaaactcgtctcctccgtgaagcccttccccaaaacgtaaaaatgttgattaagctgtttctttaccggcaaatcgacaaattgcgccgcccgtttggtctgccggcctttgctttttcattttcaaacgcttttccaattcgatgaataaaagcaattggccgccgttttgcggcttctcgcttttcatcacttccgtactccgatgttttaattccacatgaaatgtgtccaaaatgttcgcttgagttgcaagacaaaaggcaaattgttcgttttgatcacagaattctttataaaagtcgagcaaaaatagcgccaaatgtttcacttcgatcggatctatgaaattggaatttaattgaaaagaaaaattaattaaaaaaactgaccaataaaaaccgaaacagcaccatgtattgctagggcaaaaagagaaaagcgaaacaaaaatgatttgatcatccttaagggttaaatataaaattaaaaataaaatgttttacaaaaataaaatcttaaaaataataaaaaaggaaataaaaaaatatgtgaaaggtgaataaagaaagaatttcaatgcaactgatttattggctaacaaataagctctcgtgattcaacggcagcaaagctaaaatggcaaaatggcattggattctatgattttgctgtagccaaagcttttggctttttcatgaatataattttgaaatgccttttcgatttcccccccccccccccccctcccaacgccgccccttcgcaatgaaaaccattgcaacgacccatgaagctaaaaatgtaaatgctggaaggaaatatatgcctattttatgtgtaaaataataaaaaaatgatgaagtgctgattggcattgtccataatattttctagggttacacgggtccgaaagattttgtaatttagaataattaaaataaaatattc

SEQ ID NO: 36862 - DNA, 279 bp, Heterodera glycines
ggggaattattggagagtgccaatgccaattctgccgctaatgccaaaggtttcgccctctcactgagtcagtctttgctttcccttcccttcccggcaaattaatccaattaccattcttcgcctgttaattgcaaatgcctccaagttgctccccacccttcgatgccaaaatggggggggggggggcgcttcttctcagttttcccattccctgcagatggcccctgtcattggcattccttcttccgatgccaatgccattctcttctccccccc

SEQ ID NO: 36863 - DNA, 1610 bp, Heterodera glycines
  unsure (1)..(1610): unsure at all n locations
aatgtttcttcttcagcaatctgcacattttgttgtttcatttggggcgcatgggacgcaattgtggcggccataattacagtaattagtcactgtttacggtatttatctttcaaaatattttaaaattagaatcataaaaaagaaataaatggtctccaatgatatttattttattatatgtgcacatatgtttacaatggcaaattaatactttgaggaaataatagggtaaattaaaaatatattgcggaaatatttatttgaattatttcactttttggaaatgattaaaattatgggcattaattaaaaaattttagaatgaaaaaatgcaaatgaactctcaatggcttaacaaacagcagaaaggattcaatgcttcttactattagctgcttaaccggggctcatttcttagcaatgtttgccgacatctgttgaagagccaaaattagaggagattatgcaaatgaaaagggggacaaacactttgccaaaaagacaaatgaattttgaaattggaaattgggaacatttatttatttatagggctgctaattttatgtaagaaaatttgcgaattatgtaaataaaatatgtataaaaaatgctaaaatatgtatgaaatatgtacaaaaatcctcaaatatgtaggaaaatatgtaaataaaatttttttaatggttattttttggaaaaaaattcttcgtaagtgaaataggcacaaaatgccataaaaatgaccaaaataggcttagaatcacatttgaatattttacaaattaatttttgatatatcattttttgaaaaaaatcgatttttagggatacattttcaacaaaaaaatttttaattttttacaaaaaatttctataaattctcaaaaatcctcaaaatatgtaaaaaaatgaaaaattgtacgaaaaattgcgaaatatgtacgaaaaagtccaaaatatgtataaaaatatgtacatatgtaatatgtagaaaaatccgaaaatatgtaaaaatatgtaaataaaagtcccaacttttgttcgcaaacacaaaaaagaaagtgtttttcctactaattaggctatggagaaaccaggaaaaaaaatatgtatttacataaaattagcagccctaattatcaaatatattaaaattataaatttttgcctcgtgtcagggctaaggtcagtcagagtgaatcgtttgctttttccaatttcaaaacggcgccaatactgaaattgcggtgccggttcttgggcgaacaaaagaaaatattgctaaaaattaaaatattttaaataattttttattattcaatacttcaggcccatgatttttctttggtgaattccatgtgattgttgcggtcattgaacttattgcgcacagttcaagcagctgtggtaccgtacagggttcgaaaattaaaaaatgctgtcataatttaattatttatttnaatttgccggtgtattcttgcaatcgagtcgtttctgaggtgcccattgttggtcgaaatgcgcacattaaactcgtacaaagtaaaagaccgaaaaaaattcaataaactaaccaatcaaaaattggatcaacgataatttgc

SEQ ID NO: 36864 - DNA, 1125 bp, Heterodera glycines
tttctacggtgaccgccccactaataacgcaacaaaacctgaatggtttttcacccaactttcctactgggcagagatcaacatcgaatacttcgagcagtacattcagcccattgctgatgaggtcaagtcgttatcttcttttcatttggcttaaaattgccaattcgtttttaaaaaaatggcactttctcttcttttttatatccctcggatttcagctgttttctcacggaatatctgaacgaacagcaagagatattttcctgcaacttttgatgtctttggcctctcaaaaagtgtcagaaattattggctccgatcggattttggagaatcgacatcaattgtcacatttgatagacgagacggtcatgtttgagaaggaattccagcagaactttggctattccgaggaggcgccagtgcatgtcgtttcacaactgtgccaatcggaggaagtgctggagaaatggataaagttggagagggacactctttgggcgggcatcgacgcgatcctcgcggacgaacaggcgtacgagccgcggtacaaagaggcggcggacgtggacccggtaaattgggggggggggggcgggcggtgattagacttgtttatttaaatggggacgcgagcgacaaaagttcgccgcaaaaaaatatccatagtttttgcaactcgttacaaaggcaactcatataaaggcttacaattagacttgcttgggcctaggggtgcacccatttaaattacataataaaatttcaggaaagaatgcgaaatttctttcattttattgctactaaaattataaattttctaaaaagggttttatattaaaaattaagaaatattctcgaggacattcatcggggctctgaaaaccatttccatgaatatttgaaaatttaactgattttatcaattctaaaaatctcatttttgcaaaaaagaattaaatttaaatgagatttgttttactgcttgctcttttgtttcatagcaaatgttgttttagtatcttctgcccaattttgccgattcctttgtcattttgatgcagtcgatgtccgaaaggtaccgttccatcccggaattgcgtctgcagtgtcgtttcctga

SEQ ID NO: 36865 - DNA, 1755 bp, Heterodera glycines
taagtcaaaaatcatctcttcaattttaatgttttttgccatttaaaatttagtctttttaaaataatttatgtcagaaatccgtggtttttttgtttgcatccttttgtataatgtttatgaattttgcagaagcaatggaaaaaatatacataagcagctccaatgttacaaatatattgtgtattgttacctctcaatttttaatataattttatttatttaagcattttaataaaataaaattattttttataaatttaaatttaaaaactgaaagcttgaatttattttagagtttctcatagccaacaaaccgttgccggtgatcaaaccaaggggatgactaagctaattcggaaaaaattttattaagaaaattcaaggaaataaattcacaatttttcagtaacacaaatgcaaaatataagggaatgctttttagtaatcaccaatataaaatgcattctccaatttgtcttttcacttcttaccattttcttaattcagcaagtaattgcaattattttccgttaatgggcaaaaacaaaactcgtcacttttcagggccattaataaatgaaaaatttacaacaatattttttattttctttttttttttttgccttcggttttctcttattgattctgcgcaacagtttcaaattcatcgcaattaaacagtccaatttattattattattattgttctgttctgttcaaattgcagcagaagtgatacaatcctttagaaaatgaatggttttattgtctaaaaaaatgcagaaatattttaaatttattaattttttgatgaataatttaaataaaaataaaaaagattaaaaacccttttgggtttaggactaaaaaatgcacggtaaaggatattttttaacaaattttaaatttatcttaaatattttttaacaaaaaaatatcttaacagttttttttttatattacgacaaaataaattattatttttattaactttaacaattttttcccatttatttttctccctttagaaatgccgtcattttttgccattttttcattttcgttgctgttcattttgtgccatcattgttcatttgccgcttttttgatcaccaattatccaaatccgttaaacaacgcttcgctgtggaaatgcggcatttcctcgccgggccctttgtgcgacccggactcgctgctcaacgaaacggcacggcacgaggcattggagcttttgaagcagttccaggaccaaacggacattgatgtgggagaaacaatgaaaaaaacaaaaaaaaacatttaaaataatgatatttaaatttaatagagcggatttctcgtttttattgtattttaaaaatccaaacattatttaaggaaatcagaaaaattaaattaaaattccgattattatcatttgtcacatcaaagaaatttaaatgttgaaaaaacataaattattataattttattgaaggacaatggcgatggcagctgcaaaggcaaaggagtgattgttgggttggcgctaacgaaacagccaatcattgcgagggtattaatttttaatttaatgaccaaattaccatggaagtcgatactcattcagtcttcggacttatttggcccattccgttttatcactcctttacactgccgaacaaaatcaaaaagcatattttaaaaaattgagggatcacggctaaaaatgccaaaaccgaccaatactacctaaagatccttcacgcc

SEQ ID NO: 36866 - DNA, 986 bp, Heterodera glycines
ttgagtaccccaaacggacacttgaaaaaatcgatttttttgttttcggggcagtccccccgagccgatgcgcccagatttatggggagaccgaatccttccggaatagcttccctatagcctgtactttaattctgcgttggatttttgctccccataattgtttgagtaccccaaacggacacttgaaaaaatcgatttttttgttttcggggcagtccccccgaaccgatgcgcccagatttatggggagaccgaatccttccggaatagcttccctatagcctgtactttaattctgcgttggatttttgctccccataattgtttgagtaccccaaacggacacttgaaaaaatcgatttttttgttttcggggcagtccccccgaaccgatgcgcccagatttatggggagaccgaatccttcgggaatagcttccctatagcctgtactttaattctgcgttggatttttgctccccataaatgtttgagtaccccaaacggacacttgaaaaaatcgatttttttgtttcataaatatttttttcagaaagtgctctaaagcgcaccaaattttatttacaacttaattttagcactctgatgctttagtatcaaaaaggaagatggagaaaaaattttttaaaaaatttttccttatattttggttatatcgttttgcttttggtggggtgcttggaacagtggaatcatgcgcacccgtccgatctggcaagttaagcaacgattgctgactagccaaaaggttcggtgccgtgatgaaaccgaaccagcactgcttacccccgcggaacccggcacggtcccccgaaggaagggatttaattaaattctctcctttcggggatttttttttcctttaggtcgcccgttagcgttcaattggtctagtcaaatttttcaaaatttttggtgaaaatatttgccggggttctgaaaggggggggggggggggggggg

SEQ ID NO: 36867 - DNA, 777 bp, Heterodera glycines
cctcagagagaagatggaaaggttgcgattggcaaccatccggtgctaccagaaagggaagttggtgtgggcccgaaaaataggaatacgaaaattgccgagtttaaacttgtcccgtggaatggagtttggtcccaatttgccccttccaatttaatatttaatttattctttaattcctcgtttaatcctccatttcctctctctctctctcaaatcgtccaaattccataactaatttatttgttgaaaagaaaaatattccataattaatttatttgttgaaaagaaaaatattaagtgtgaaatgaaagtgtgcgaagtttgattaaatagaaacgatcgatcgtctgaataattccgaaataaatatgatgccaaaaggaaggaaggaccgaggaatcacggacttcggttcctttagtgcccggagggtatgggaatggtttttgcggaaattgaatcgtaaatgtgtcctgaaggtggagaagggactggggagagttaaaaacggggacggagaagaaaatccttctccggagttttgctcgtaattgaccgggggagctaactgatcttccgtttccctacggggaaaaggatcagcgaaatgctgatccttaatccccgccttcttttgttactgtgtgtaagggggggggacaggggtactgtacgttacattgtcataattgaaaaaagtattatttatttagatgtttaaattaaaatttctaatgcaaaaaggacgaaaaacattttttaaatttttaaaaa

SEQ ID NO: 36868 - DNA, 737 bp, Heterodera glycines
ggtgaaatggcttaaaggaagttcaaatactgtgcttgtttataagcattcctttgggctacccctcggtgaaaattgcaaaaaaaaaaaaaaaaatttttttttaaacccatcgccaaaaccacgacgaagacgatgcctcactttgcttaatttcatcgcacataaaagtgacgtgttcattgggattctgtccattattcaactgaaaagcaaatcatttttagcgacacatttaagaaaggaaaatttgtcgaaattgaaaacaaatttgttttacaaatattcgcactgtcccattttcagactcaccacgccacgtctctccaaaacaaaaaagtttaatgtggcgaagataaagcggtacgagggagggggggggggggtcgttttggcaagaggacgaaacaaatcgccacccgaaatttaaaataacccaattaattgtttgttgtgccttattaccataatttccaccaggtatgtctgttccttgagaagcacagcccaaaatggtgaaagtgtgcctgaattggaaatgaattaatgatgataaacggcatttgtcacactgactcatcgtaacgaattgaattgtgacggacgaatcggtgccatcggttggaccaataattgcgctcttttccaactaaaagtgtaataagccaaacaaacaaacgaaaatcaatgagtagaacaaaaataaatgaccatcaatccgcccgcgtttcattgca

SEQ ID NO: 36869 - DNA, 937 bp, Heterodera glycines
  unsure (1)..(937): unsure at all n locations
aaaacaaaaaaatcgattttttcaagtgtccggtttggggtactcaaacaattatgggggagcaaaaatccaacgcagaattaaagtacaggctatagggaagctattccggaaggattcggtctccccataaatctgggcgcatcggctcggggggactgccccgaaaacaaaaaaatcgattttttcaagtgtccgtttggggtactcaaacaattatggggagcaaaaatccaacgcagaattaaagtacaggctatagggaagctattcccgaaggattcggtctccccataaatctgggcgcatcggttcggggggactgccccgaaaacaaaaaaatcgattttttcaagtgtccgtttggggtactcaaacaattatggggagcaaaaatccaacgcagaattaaagtacaggctatagggaagctattcccgaaggattcggtctccccataaatctgggcgcatcggttcggggggactgccccgaaaacaaaaataaatcgattttttcaagtgtccgtttggggtactcaaacaattatggggagcaaaaatccaacgcagaattaaagtacaggctatagtgaagctattccggaaggattcggtctccccataaatctgggcgcatcggttcagggggactgccccgaaaacccaaaaaaaaattttttggataaaaattatttaaatgaactgactagataatatttaaaataggttatttctcttcctttcagtatccctgcaaagtttggtgcgcttctgatcagtttctgaaaaaaaagttaagcctaaactttttggcctgtttanaaaggaattaaaaatttttaaaaattttattcatctccctttttgatagaaaaagcatcagagtgcctaaactaacatgtnaataanattttggtgcgtttcagaaccctttc

SEQ ID NO: 36870 - DNA, 1501 bp, Heterodera glycines
cccttgcccaacttgtttcgtttccatggcgcaattcgatgcgtcctccgcttgaaccctcccacacaatttcccattcaccgaaacgactgccgactttggtcattcactgatcggaaaaggcatccgatggcacttttggagcttataaattgtggacccaatgtgataaggaaaagtttaattggttttgcttgggagaatcaaagtgacgaagaaggaaagacggacaaatggccaaagggacggaaattaacaaaaaaaagtgaaacgaattggccaacggggaaatgcccgcggggataatcagcggaagaaatgccaatgccatggcaacgaaaaagggcattatttgaaaggagaaacagctgaaaaagacgagctcacaatcaaagaaagtttaattgttatgcatttattattagcaaatttaaagtttgaatggaacaaaatttggaaatcttttgggttggttaaggcatttaaaggggggaggggaattaaggagaaaatgaggggaaaaaggaaaagaaatgaattcggatgggatggattgtgacgagatttgtgctttggaagagaaatggaggcgaatgaacgaatcaaaaacaaaggacggcactgaaatgggaagaaagaaacaaacgacggtttttggacgctatgagtggacactgtaacaaggggacgggtacggtaatggtccagagtgatactgtacataaaatgaatgttattgtgcccttcttcttctccgtgttcttcttcaactgcttcttttggtcattacgagttgacattctgatggatttggtggagctgtgctcttccaattggcatcatcacatttgtgatgaatctgacaacggccgatgccggctgatctgaaaagcaaaaagtgatcagaaaatagctgagggacgtgccgggatcaagctcagcaaaaagatggcacgcgttgtccacacttccgctgtggtcggacacaacgcatttgcgggcgacgaagccaaaaatgggtgcctaataaaaggaaagattgacacttttggcacattggaagcgatcatttgggcaaccaattaacaactcgagaaagtgacaaattagctgatgattaaaaggtgctttacctgacggacatacgtcggagggagttgggacacattgttattgtcgaacacgcgactttcggggtcaatgccggcgaaagtcactaaacggaaaagcaatttctttacaatttggggactcaatttgccgcaaggactgccgtgaatttaaaataatatttttaaattatccaattaggcatattcggcgattacctttgttggcggggtaatggcgtcggaagacatcgaccgcgtgttgtcctgaacaaaaggggtaatggggcgaagaggccatttccatgctattagtagcatcagtgcactcgccaacatattcttctcatattaatgccattcccaaacttttcatcccttcgctaattaat

SEQ ID NO: 36871 - DNA, 1635 bp, Heterodera glycines
ctgatccaaagttttattcataaatcttgctaatacttctctttattttcaaaaaaaaaatttcaaaaacttcctttagtgcgggaccataaaaacattggcattttggccggtcattcactcataaatttggtcattgacgagtaaaacatccacaattagtatgattttcggatcggcaattaagcaaattgatcattcagtcactacattggtcatcttatatatttattgggtaatctattaaaatgagccgacaataatatcataataatcaaatccttttgaattaattcaattttggtcaatagcttccaaaattgtggcatttcctttttctgatcgttgatccaatgactttctgctgatcacttgcactgatcagccatcccttcgcggcgtcgcctcattggcattgttgttgttgcccatcagcagaatggtgccattgcgctgcttgtccacattgggctgcttctgatcagccagcgaagaaccattcagtttctgatcagcactacggtatttggacttgccaccaccgtacacataggcgtggaggaagaagttgatgaacagaatcagatacgatactgtatatgaaggaaattttaaattttttttaaaaagtcgtatataattatttgtttttatgcaaaactagttaatttttgtttaaattggacctaatttcataaaaaccaagttattgattgaaatttatctaatgatgtctatcaaaatttcattagaagtttttttaatttatgcccacaaactgatcatttttggacagaaatttgtagaaaaattcccataccaaaaatttttttgacaaataactttaaaaaattaacattatgtttaatggccaaatattgtttacaagttcatttttctctcggttttcgttaccgtacaccaacataattaacaacagtaagaaaaaagcataccgtccattgcgacagcaaaagtgaacactctcgtgtccaagtcacagctaaccttaaaaaagacgaaattaattttttatggaatgttttgttttttaaaccagatactttttccacgaaaacaagccaccccaggtggcacagaatggcgacggagatgatgaattgccaaatttgaatggtggtcacaaatttggccattacaccttgttggaaaaatatttttaaatttatattaattattttttcgattaccgggcacacgccatttcatcgaccgcatgaagtagtactgtaataaaaaacataattaattagaataaaatcaaatgcaaaaaatagatcattgagttggcaaaaattatcagaaatttgaatgttttcgttggaaaaattggcataatcagaaaaagatgaaaaacaattgttggaaattgaaattttctgtaaatataaaaaaagggttaattatttctatttaaattggctaaaatgaatttattaattcgaaaatgaaatattaaaatacgaaaaaaaattgggatcacaaattgtggtgtaaattttcggaaaccattcttaagaattttgctttttaggtattatagaattttaagtcattttaggagtgaatttttatttttatttgttatgggaaattttgcgaaatatcaattaa

SEQ ID NO: 36872 - DNA, 595 bp, Heterodera glycines
aaaatttttaatttttaatccgatttattaacagattttgtccaaaaatgaccaaattttgccacaatcttatattttcttcgtaaaatagtgatattctgacataaaatttcaaaattatcttgctttttatataaaaatacttatttttaaataatattaaaaataaaaaacaatcgcttattaaataaattttttttaaattggtccaaaattgccgcggagtcccaaattccggggactaggtcgttttggcgccagcctcagtttttttattataacttttttctttgtcgaccaaatctaacaatcttggtatcattcgaaagcccttcacaagctctattagccttacaaaaaaaacaaaaaaaaatttagcctgtaaaaaagttattaagaaaaaacttcaaaaatttcgacttttttgcaatttcatgttataaattttttggtaattgtctaatcgcgaagtaatagcttagaaatagcttctaaacatgttaagctttcgaatgataccaagattattggatttgtttaacaactaaaaaagttatagtccgaaaacttgagctggcgccaaaacgatacggac

SEQ ID NO: 36873 - DNA, 776 bp, Heterodera glycines
aagtgcaaaagtggtggtgtctgcaaaaaattttccaccgggtttaaaaaatctaggaaaattagtaagcatttgtagtgttccgatacgtatccctgcaaaatttggtgagcccctgatcaattacaaattatttatggacgatcaaatttttagaaatttttatttatttttgcataattaattcataaatatttttttcagaaaatgctctgaaacgcaccaaattttatttacatgctagtttaggcactctgatgctttttctatcaaaaagggagatgaataaatttttaaaaatttttaattcctttttaaacaggccaaaaagtttaggcttaacttttaatgaaaattcaatcactcatttttcgagtagtgatcagaagcgcaccagattttgcaggggcctaaaaaggtcaaggaaaggcgtctctgcgttgatttagcagtagtacctatgaatttaaattttctatgaatttttaaagttttttgaaatttttttaagtgcaaaagtggtggtgtctgcaaaaaattttcaccgggtttaaaaaatctaggaaaattagtaagcatttgtagtgttccgatacgtatccctgcaaaatttggtgagcccctgatcaattacaaattatttatggacgatcaaatttttagaaatttttatttatttttgcataattaattcataaatatttttttcagaaaatgctctgaaacgcaccaaattttatttacatgctagtttaggcactctgatgctttttcta

SEQ ID NO: 36874 - DNA, 1210 bp, Heterodera glycines
  unsure (1)..(1210): unsure at all n locations
aaaagagatagccattttctgagaataattcacatttccgcagctcttgcggtaatgaaaaattttgaagaggctctgcggaacagattagcatcggggttacgagatagaatattgtcctaaaacgagatagccatttttctgagaattaattcacaatttccgcagctcttgcggtaatggaaaaaattttgaagaggctctgcggaacagattagcatcggggttacgagatagaaaattgtcctaaaaagagatagccatttttctgagaattaattcacaatttccgcagctcttgcggtaatggaaaaaattttgaagaggctctccggaacagattagcatcggggttacgagatagaaaattgtcctaaaaagagatagccatttttctgagaattaattcacaatttccgcagctcttagggtaatggaaaaaattttgaagaggctctgcggaacagattagcatcggggttacgagatagaatattgtcctaaaaagagatagccatttttctgagaattaattcacaatttccgcagctcttacggtaatggaaaaaattttgaagaggctctccggaacagattagcatcggggttacgagatagaaaattgtcctaaaaagagatagccatttttctgagaattaattcacaatttcagcagctcttgcggtaatggaaaaaattttgaagaggctctgcggaacagattagcatcggggttacgagatagaatattgtcctaaaaagagatagccatttttctgagaattaattcacaatttccgcagctcttgcggtaatggaaaaaattttgaagaggctctgcggaacagattagcatcggggttacgagatagaaaattgtcctaaaacgagatagccatttttctgagaattaattcacaatttctgcagctcttagggtaatggaaaaaattttgaagaggctctccggaacggattagcatcggggttacgagatagaaaattgtcctaaaaagagataaccatttttctgagaattaattcacaatttctgcagctcttacggtaatggaaanattttgaagaggctctcccgaacggattagcatcgggggtacgagatagaaaaatagtcctaaaaagagatagccatttttctgagaattaattcacaatttctgcagctcttaaggtaattggaaaaattttg

SEQ ID NO: 36875 - DNA, 1178 bp, Heterodera glycines
  unsure (1)..(1178): unsure at all n locations
aaaaaatggtgtaagtaaaatcgtattancgctcaaaaagcttctcaaacaatttagcgctttccaattccttctacatcgccctttatacatcccattatgagcgctaaaattatcagagtgccgaaaatcgcatgtgatctaagcctagaaaaaaatggtgtaagtaaaatcgtaattacgctcaaaaagcttctcaaacaattttaacgcttccaattccttctacaatcgcctttatacatcccattatgagcgctaaaattatcagagtgccgaaaatcgcatgtgatctaagcctagcaaaaaatggtgtaagtaaaaatcgtaattacgctcaaaaagctcctcaaacaattttagcgcttccaattccttctacaatcgcctttatacatcccattatgagcgctaaaattatcagagtgccgaaaatcgcatgtgatctaagcctagcaaaaaatggtgtaagtaaaaatcgtaattacgctcaaaaagcttctcaaacaattttagcgcttccaattccttctacaatcgcctttatacatcccattatgagcgataaaattatcagagtgccgaaaatcgcatgtgatctaagcctagcaaaaaatggtgtaagtaaaatcgtaattacgctcaaaaagctcctcaaacaattttagcgcttccaattccttctacaatcgcctttatacatcccattatgagcgctaaaattatcagagtgccgaaaatcgcatgtgatctaagcctagcaaaaaatggtgtaagtaaaaatcgtaattacgctcaaaaagctcctcaaacaattttagcgcttccaattccttctacaatagcctttatacatcccattatgagcgctaaaattatcagagtgccgaaaatcgcatgtgatctaagcctagaaaaaaatggtgtaagtaaaatcgtaattacgctcaaaaagcttttcaaacaattttagcgcttccaattccttctacaatcgcctttatacatcccattatgagcgctaaaattatcagagtgccgaaaatcgcatgtgatctaagcctagaaaaaaatggtctaagtaaaaatcgtaattacgctcaaaaagcttctcaaacaattttagcgctcccattccttctacaatcgcctttatacatcccattatgagcgataaa

SEQ ID NO: 36876 - DNA, 968 bp, Heterodera glycines
ttttattttttttgttgtaatacctgaaaaccgatgcaataatccgaccattggacggacgtaaaaaacgggcaacagaactcattttaacaattcattggcacttgacgaaacatatgaatgataaaaaatgaacatttattgaaaataggacttaacaaaaggaaatatggtatttttccacattttgacaaagtataaccttgcttttggtgtgtcaaaatttatcaaaaatcaaaaaattgggctcgcgtacaacacataggtatattgtccgcatcaacaacaaaacaattgatatcatttcattcattcaatccttaagcccgtcatcagcaccttcgcgagaagcgccaccaccgccgccgccgaggctgtacatcgcgcctacaatttttttttaatttaaagttttgcatagagtttagcaatcacctggcttggacaacgggtagatgctctccaagttgactgaacaaatgcgcggggagcgcgacccgtccgcgttcagctgaccgccagtgtagtgaagacgtccggtcaagtaaacacgggtcccttagcaaaaaaaaacgtaaatttaaaatggatggggtcccttagcaaggaaaaagtaaaatccctaaatcggacggttccttagcaaagaaaaaaataacgtaaatttttaaatcgggtgagctggctgttgcagaaaaaattgtataaaatccccaacaaaatgtgcacaaaacctcggtcgacgttcttctccacgtatctggccatgccaccgaatgcgatcacgttgtgcacctccgtgcttgtcattgtgcccccgctggacagccgacggtccacattggtgtacagattgaacgacgcgaaggctgacccttgggcagtctgtttgaccacccgttgtccaccgacaccaccccaacactccacacggttgatcctgcattggaaagtggaacatcaaaaat

SEQ ID NO: 36877 - DNA, 942 bp, Heterodera glycines
tctaattccaaaattaatttgtaactgtttgttttcaatttctctaattttattccgttctttgtcccaccgaactcgcactttcctctcccctccccgcccccttctctcgctcctttctctcttccatttccttctgtctgttcctttctctcaacattccccattcttttctttcatttgataccaacaacttttccttatcaagacattcgttttactcctttcgtattacatagtcccactaaatcacccccccccccatccgcttgcatcgtttgcattataaatccaaccaaatgccttcgtgcaattcttattgttagctaaacgaatctccttgccaagattaatttaagttattaaaagccagttgttttataaagaaagacaattaaatgatttgttccttttttgggtgttccttaactcattattcatttaaagccattaccaaaatatcctaaatacatttttcacacagttcttaatgcatatttatctgtgtaaaagtgtctcctcccgtttatttgccgtttattgattcatttggggggggcggttgggcgaatggaagatagaacattttcaccgctcacagaaatcataaattttaattatagaaattaaatttggcagttaatttgtcggctgtttttaaaaagcaaaaactaacgaaatgaacttttttccgttgctttccttccgatgaccaaaggcccaaatgtgtcgatcgatcctcgcctaatcccaagcaaaatattcgaaaaacagaaattcacaaaaaaatcggtacttgtaggttttgctactcctcccccataaaaatgtcacaatcccaacaaaagaaagcactttttttaacacttgtcataagacacaaacaaaaaaagttataaaaagcaaaatttaaaaaatatatgtataaaagaaattgccatt

SEQ ID NO: 36878 - DNA, 926 bp, Heterodera glycines
  unsure (1)..(926): unsure at all n locations
cccgaaggattcggtctccccataaatctgggcgcatcggttcggggggactgccccgaaaacaaaaataaatcgattttttcaagtgtccgtttggggtactcaaacaattatggggagcaaaaatccaacgcagaattaaagtacaggctatagggaagctattccggaaggattcggtctccccataaatctgggcgcatcggttcggggggactgccccgaaaacaaaaaaatcgattttttcaagtgtccgtttggggtactcaaacaattatggggagcaaaaatccaaggtaaaaataaagtagaggtatatcgaagctattcccgaaggattcggactccttataaatctgggcgcatcggttcagggggactgccccgaaaacaaaaaaatcgattttttcaagtgtccgtttggggtactcaaacatttatggggagcaaaactccaacgcagaattaaagtacagactatagggaagctattcccgaaggattcggtctccccataaatctgggcgcatcggttcagggggactgccccgaaaacccaaaaaaaaattttttggataaaaattatttaaatgaactgactagataatatttaaaataggttatttctcttcctttcagtatccctgcaaagtttggtgcgcttctgatcagtttctgaaaaaaaagttaagcctaaactttttggcctgtttaaaaaggaattaaaaatttttaaaaattttattcatctccctttttgatagaaaaagcatcagagtgcctaaactaacatgtaaataaaatctggtgcgtttcagaaccctttctgaaaaatatttaagaattaattttgcaaaaataaataanaaacgaagactcagattttcgaaaatttttttgagccagctagctcggcgctcatttca

SEQ ID NO: 36879 - DNA, 921 bp, Heterodera glycines
tgttaatttcaatttcttttacagaagaaggcagaattattttttcattaataaaagttttcgtggcaataaaaaatcatattcaaaaagcgttggttacgtacaacatcgacaattttatgaaattttcttagcttataacttggtgaatacttcagcaaataaaaccattttatgctcattttgaagggaaaattctggagaatattgtaagttttatttggtttggccttaaatcgaggacttggctaaaaagaattaaaattatgaaatgttcgtccctttcaaaaaatttttctagctttttaaatttttttaaattttgcatagaccaatattttgaccccctctagcgattccaagtttattttgtgaaacttaagtttttaactcgagatcggctcttctatttttacaagggaaatccaaaaaaaattttaagttttgcaaagttttggcgttctgattactaaaaataataaacttatttgtacttggagcccaaaattgaatcgccgtgtccagtaggtattattactagggacgcgatttctagtgaaaaaactttttttgctcgtttgatttgaagaaaggagctcaaaaaacgcatttctgcattaaaattttttcatttggacgtcatttttcgtcactagaaatcactatttggcgtttcgttacttaaaatagtgaaaattcacttttttgccgttttgtcactatttttcactatttcgacattttttggaaaatttgttaacaaaaatgcaataaaatcaaaaaatacacccttaagaattgatctaaaaaaatttcaaaaaaatacatccctaagaatcgaccaaaaatttttttaaggctctactgcagtttacgcgtccaatcgacttttacgcgtccaatcaaaagtttacgcgtcca

SEQ ID NO: 36880 - DNA, 1215 bp, Heterodera glycines
ctaatagaaaacacttagtgctatttaatgatatcaagaattaaaaatttggatgcttttgaacaaagttatatcaaaaaatattttcatttgatggtttttgactaacgcccattatgatggttgttgactaacgtcatagcaccttaaaaaactgtgccgattttcaattatttttagcactttttttaagcatcgcttgtccttattttatgaatgtcttatctacaagtactggacacccaaaaagtttccaattttcttcatttcacccaaatctaatcgcgtaaatttttagattttgtcaaattggaaaaatgtgagaaaaaataccgtgtacaaaaaaaagaatatggcgttgaattgccggaagcccacaaaattggcacgagatttaattagcctctgggaaaaatgtttagcgaatttcggaaaaaaaattaattaacaatgatgaaatattttcttacattgacgttatccaatgggaaaatttataaatttaaattgtcatagtttttaattaagtatgaaatattgaaaattaaaacttggtgagaaaaagttactaacatcaattctttttgtttttcggcaaataaaatttaaataattaggcaatatttttataattcaatcacctttgaactgttaaaaatgccctcaattaacaccagctcgcagaatacaattatagaagatgtaaacccaaacattcattataatactctagttttttttaaattaagatttatttggccttccgtttcgccggtccgtccgccgatttgattgtgccggccgttgcgctgtatttggttgcgttagttggcattgtgatgaacggcacagttttggtggtcactgtcaaattcaggcaaatgccatggcatttctgaatttaattttaaattttcccatttaaatttcatttttccatttaaaatttttcagttccctccgcggctccgccaattttctgatggcactgatttgtctttgtgaattggtccaccaaattgggcacatttttttcctggttgttgtcatttcgggcataaattttgtcagtttgctcactgctgacttaattatggcggtaatttttttttcaaatttaaatttaaatttttcaaattttagccttcgatttttgctttaaattgcggattaatggcaatgttttgcgctgcttttgaccgcctctttactgtt

SEQ ID NO: 36881 - DNA, 886 bp, Heterodera glycines
  unsure (1)..(886): unsure at all n locations
ctgaaacatacataaagtttgaaactatttccttggttaaaatttttactcgttgaattgcttcctcgatgtactggtgaattcgtctttggatttcgggatcggcaagcctctcctttgaacacactccttttccgaggacaagttgcacagtttccaatccatcttcttcgattgcgcagacctagttacgaaaaatttaacgaattgaaaaaggtttttacgataaattccgctgcacgacgagcaaagtgcatgtcgcactccattccaggtacaaacggggccgcgaaaaacaacaattcagcggcggttgatccttacaggaaataacttcagtataagtattcttcggtaaatcatttaccaacaaaatactccacaattacgagaatttgttgtctgttgtagctttcacggcctactacgaccgttttcccattgtagggatagcgctttccgtcctcctttacgtcaacgcctgccgcggcagttatctgaaaaacatttgtctgggtccgatccccgcctcaacctttgttacttacaaatctaatttacttgcagtccttgtttcttctacaagccacagcatgccctgcctcgtggaatgaaactcggtgaatttcacttacgatctctccctgcatctaaatgccgtcacgatttttttctgaaacatacataaagtttgaaactatttcaacggttaaaattggataacgagatacgaacatagtttgaacaggtacaaccactgttagaagaggtacaaccatggctggaagaggtacaaccatggttagaagaggtacaacagtgattanaagaggtacaacagtgattaaaagaggtacaacagttattagaagagggtacatagtga

SEQ ID NO: 36882 - DNA, 1000 bp, Heterodera glycines
  unsure (1)..(1000): unsure at all n locations
tgatagtgaaagcatcntgagtgcctaaaataacttgtaaataaaatttggtgcgtttcagagcagtttgtgaaaaaatatttatgaattaattttgctaaaaaaataaaatagtgaagctttaaaaattaataaaaaattttaaattcagaattactggagttagcatcatagcagtgcttttccttgtctttttgatgccctcgcaaaatctggttcgcttctgatcagtttataaaaaaaaagttaagcctaaaatttttcgcaaatttaaaaagcaattaaaaatttttagattttttattcatctccctttttgatagtgaaagcatcagagagccttatttaacttttaattaacatttggtgcgtttcagagcacgttctaaaaaatatttatgaattaattttgcaaaataataaataattaatgaaaaagtcagaatttcgaaaaattttaaaaacaacaagcgttggcattttttcaggttaagttagtcctttacaatggagaaggcctgcaaaatttggagagattatatcgattttagtgcgctaggttcgatgaaactttttaaaatataagcctaaaatctttcgcaaatttaaaaagcaattaaaaatttttagattttttattcatctccctttttgatagtgaaagcatcagagagccttatttaacttttaattaacatttggtgcgtttcagagcacgttctaaaaaatatttatgaattaattttgcaaaataataaataattaatgaaaaagtcagaatttcgaaaaattttaaaaacaacaagcgttggcattttttcaggttaagttagtcctttacaatggagaaggcctgcaaaatttggagagattatatcgattttagtgcgctaggttcgatgaaactttttaaaatataagcctaaactttttggcctgtttaaaaggaattaaaaatttttaaatatttattcatctcccttttgatagaaaaagcatc

SEQ ID NO: 36883 - DNA, 1006 bp, Heterodera glycines
tattattttgtaaagtcttttttccccaataaacttgtcaaaccccatttttcgcaccgtgaatgttatttttattgaattctgagccgttttgagtagattagactagaaaaaattgaaaattttgaaatcatgtttcccactcccttctcccaggggtattattttgtaaagtctttttttccccaataaacttttcataccccatttttcgcaccgtgaatgttatttttattgaattctgaaccgttttgagtagattagactagaaaaaattgaaaattttgaaatcatgtttcccactcccttctcccaggggtattattttgtaaagtcttttttccccaataaacttgtcaaaccccatttttcgcaccgtgaatgttatttttattgaattctgagccgttttgagtagattagactagaaaaaattgaaaattttgaaatcatgtttcccactcccttctcccaggggtattattttgtaaagtctttttttccccaataaacttttcataccccatttttcgcaccgtgaatgttatttttattgaattctgaaccgttttgagtagattagactagaaaaaattgaaaattttgaaatcatgtttcccactcccttctcccaggggtattattttgtaaagtctttttttccccaataaacttttcaaaccccatttttcgcaccgtgaatgttatttttattgaattctgaaccgttttgagtagattagactagaaaaaattgaaaattttgaaatcatgtttcccactcccttctcccaggggtattattttgtaaagtctttttttcaaaataaacttttcaaaccccatttttcccaccgtgaatgttatttttattgaatttctgaaccggtttgagtaaattaaaatagaaaaaaattggaaaattttgaaatcatgttttcccactcccttcctcccagggggtattatttttgaaaaagtctttttttttccccaataaaatttg

SEQ ID NO: 36884 - DNA, 895 bp, Heterodera glycines
ctctttgtaggtagaaatttgcagaaaaagagatagtcattttccggggccggaaggaaaaattggggaaggctgatttagagataaaattcgaaaaggacaagctaaaagcagccttggcctttgagtcatgggcttttttgccatttgctctttgtaggtagaaaatttgcagaaaaagagatagccattttccggggccggaaggaaaaattggggaaggctgatttagagataaaattcgaaaaggacaagctaatagcagccttggcctttgagtcatgggcttttttgccattcgctctttgtaggtagaaaatttgcagaaaaagagatagccattttccggggccggaaggaaaaattggggaaggctgatttagagataaaattcgaaaaggacaagctaaaagcagccttggcctttgagtcatgggcttttttgccatttgctctttgtaggtagaaaatttgcagaaaaagagatagccattttccggggccggaaggaaaaattggggaaggctgatttagagataaaattcgaaaaggacaagctaatagcagccttggcctttgagtcatgggcttttttgccatttgctctttgtaggtagaaaatttgcagaaaaagagatagccattttccggggccggaaggaaaaattggggaaggctgatttagagataaaattcgaaaaggacaagctaaaagcagccttggcctttgagtcatgggcttttttgccattcgctctttgtaggtagaaaatttgcagaaaaagagatagccattttccggggccggaaggaaaattggggaaggctgatttagagataaaattcgaaaaggacaagctaaaagcagccttggcctttgagtcatgggcttttt

SEQ ID NO: 36885 - DNA, 947 bp, Heterodera glycines
  unsure (1)..(947): unsure at all n locations
ccggggatcctcttctggtcgaatctaatggaggcattaataaatcaattngggttactccccgcattcaaagtaaacaaaaaaaattcccgaaaatatttaaaaaagtgacgaaaacttcgatttttaagagtttatttttcaatttcttctatattccttacaaatttttttaaaaatggcaaaatatgtataaaatatgtgccaaaccctaaaataagtgcgatatgtttttatgtgcaaaatgccaaaacatctgtttttatgtttttgaaatgataatctaactaagtaataaaaaatgaaaataactaaatttagctaaattaattaaaatatatgaaattaaaacttcattaaattttttacatttttgaaaaatattaaatattactttaatgttgctaggtcgtttttagccaaaaaattactattttgggctccatttttcaaaatatggtaaaatggaggttcggcggtgacgataggcgccaccgggaaaattttttgagtattttaatacaattttttaagacaattgaataaaatttcaaaaaatttactgaatttttttagaggacattgcgggatttgagcaaaaaacaaacaaactcaaagaaaagcaaattttaactaaatattagagaccggaattttgaaatggccgggaccgggacttggaaaatcgaccgggacgggatcccgggaccgggactcccgtttttccaggatttccggtcccggtcgcaatttttggaccgggatcccgccgggaccgggactttttcaaaatatttgaaattttgattaaaattcgaaaattttttttataattttaatttttagcttataattatattaagcctgtaaatcggccgtttttgcttttcaaaacccttttttttacggcgcattttttcaaaaaaaatttggctacgggggggggg

SEQ ID NO: 36886 - DNA, 886 bp, Heterodera glycines
cttaatagtgatcactgatcagcgcttcattttagtagcattttatatccataaatgccaatttttgtcatatgccaccaaaaattgatcagccggttaattgatccactactattcttaatttatgacacaacattttcttggcattttaagtctaaataaaatgccaatcaatgctgagtgtgccgtcaaaaatggcacattgatcagcaattccctggctaattattccaatccgtgttatggtgtttttgatcacagtgatcactgatcagagcattcatttaactgatttgatgactagcggccgacaaccacttttttggcatttccagtctaattacttcattaaaatgtcaattagtgtttggtgtgccgcacaaaatggcacatttaatcttcaggctcattaatcataacccgtgtgcccagtcttttcaggcgcccgcacttcggtccgcggcccgcgagtttggccgtcatttggccggcacattgagcgccaagcgtgaaggctccaccggtccggcatcatcaaccgcaatagttgttgatggcacagcgtcacttcaaatcatggacaggcacaaaagtgtgaagaaaagttcgtcgcccagttccatcggtagcatactgtcaccaccggtgactaccgtacctaccgtacacaaacaacagttgcctgtgaccacggtagcggccaacaaatcgcaacaacaacggatgcgcacatcgccgatgtcgacgagtacgcattcgaattgaggaggcggcaaaaaagcggggacggcacggcacgcggcacacaaaacctaacgccacaacttttgggatggggcaaaagcggacacgcgcggcacggcacaaaaacataatgccacaactt

SEQ ID NO: 36887 - DNA, 923 bp, Heterodera glycines
  unsure (1)..(923): unsure at all n locations
ataatgcgcgcccataatttacatttttctcactgtctgacttcacgctgtctgcactcctacatagatatatagacaaaaaaaagttgggcaaaaacgagttgggtgtcgtcctcaaaaatgctaactggtggcaaggcaaacgacgaaatggagccagaaatgactgctttttgctgctattttccgtgcttattaagcattttccatgcttattaggtgcttaattatcattttggtgcttaaaaatcatgtccctacttaggaatattgctttttagtagagatcggattttctggatccaccggaccggactgatattttcagaagcaaacggtttccagatccgttctctcaaaatccgaccaatccagattttcaaattgcctaattcggaaccggtttcaagattgataaaaattaaaaattttacatgtaattcagcactaaaattgaaaaaaaacgtgcaaaatgttaaattttggctctatttaactattggagtcaataaattacacctttattcaaaaaacctaaaaatttttttataatttaaagaatttatttagaaaatttaagatttttggaatttttttttagaaaaagcaatttatattaaaaattgaaaatcgtttaaaattttttaccaattaatttattgattgtgtcatgaaaatgaaaagaagtggaaaaaactacaagtgaaaaagtgcaaaaatacaatatcattcaactttcatagaaaggtgaaaaagtaagtggaaaaattatgataaatggaaaaaagtgaaaaaagagtaagcctgattttaattgagtcataaaagaagaaaaaagatactaactcagagatcgcattcgtcctcggatgccaaggacgtccttggattagggcctcgctgatttgaaaaattgnggcgat

SEQ ID NO: 36888 - DNA, 586 bp, Heterodera glycines
aagaaaatggagaatgggccgggcttttataccctcacaaatcaataggggcggggccaggcacgtaaaaatgtgcacaaacagatggacaaaaatccataaaaatatgatgaagagaaaagatgactcataattaaggagcgagcgaatggaaaattgatcgatgaaaaggatcaaaaataagtgaaatttcatttgtgtcgcttttggcgacaagaatgaattttagtcaaaattttcccacttctatgggatattaaaaaaatttcaggacaatttaaggaaaggccatagccagaaaaaattttttctgatgtgggaatccaaagcccttttttgttttttgacaggaatttgtagcggtttagcgccaaaaaatggcaaattctagcagtttttactaaccaattgcttggatttaattttagcaaaaaaaaaacagctcaacgaacttctgctgatatgcggccgtttttcaaacaaggccccatgaacaaagcattgcggctcggaacttatggcacggaacattaatgtgagtattgatctggctaatttcgaaacttgtttaaacaaaaattgaaaa

SEQ ID NO: 36889 - DNA, 1090 bp, Heterodera glycines
  unsure (1)..(1090): unsure at all n locations
cttatccgtttttttcgcaaaaattcccgatctctaatttcaactaattcaccaattttcctttcgttttaaattcaaaaatcaataatttgactaattcatgaaaatttaatatattcacaaataatttagacaaaaacccaagaaaaaaaacaaaaaattatcagaaattcattttttgcacaaaatctgttaaccgacccatccaaattttcaaaattttttccggcggcgccttataaatgacaagaaattgatgaatttgattttttcaaatgaaaaatatgtcagttaactgattttggatgggcggaatggggggcaaggatgattggggaaggaaatggcaaatgcaccaatttgtaaggattaacagcaaagcacgggttgggtcgacgaatgaggtttttcgaaatcatgctaaaacattaaattcaacatcagcagattatttcgactatttgctgcaaatgactcttttgaaattcgtctaattttaaattaacaaaacaaattaaaaaaattaattcgtttgataggcaatcggcggtttcaattaattcaatgaaggactcaaattgggactcattctgccgcgctcaatagtacgaatttgtgccgagcaccaatctcttcttcagaagcattaccaccagagaagagaagaagctgaggagggagatgaagcagccgacaagcaaaacgaagaaactgtagtggagggaacactttgcgacgggagacgacgaaggcgaagacggggaggaggtcaaatgggagacgaagtctgaccaggccaaagcgattaattgggtcaaattgatttaaatgattactgtcattttcgctgcatcctctgaacaaataaatgacagcggcgaccgatgccaaagaaaaagtggaaaatgccaatgccggaagagcccaccgaggtttattctcccaaccggagaacaaatcaaacagaatgaccagtgaccagaggaaggcgaacagtccgacgaagacaccaaaaacacataaaatggagacaatccgttcgaagagagagacattctgaggggngggggggggtaaaggataaaggggg

SEQ ID NO: 36890 - DNA, 1256 bp, Heterodera glycines
agtgccattgggcgcgcgtgtgggttcatggctgatttgcagcctttgtgacttaatcatttctgatcaaattcagtagaattaatcatttgatgctatgagttccagggcgatctgagtcgagcatttaaacaattttgtttttattgtgctaaatccggattcattggcttatttatcctgctgctcatatttttgtgttattttgcctagtcatctggtccctagctgatccataccatgatcacattttatcatttgccttatccttctctcctctgatcggcaggtatcagttctttctccaacttcggcacgacattcaaacgggccgtttggactgtcctcgagaggctgtgatcgatttggctgcattggcattgcaatgtaatcgctgatcagagaccttaatgccaaaaatggtcactcactttccatcttatttagccgagttcggtgacttcagtcccaaagagcactccatggaatttgtgtcagaatttcgctttcacccggcccaggacgagcacatggaacgcgacattttgcacagctatgccaccaaatgcagcggaatgtcgccctcccaggcggagttggcatttctgaacaacgcgcgactgttggacttctacggggtggacatggtcaaaaaacaaacattcataaattaatttaatttttaatagggaaatcctgtttttttttgtaaattagaaaaaatgccattttcagcatccggtggagggccgtgacgggaacacctaccgactggggctgaccccggtcggcatgcaagtgttcgacgggcgccagaagatcggactgttcgtgtgggaaaaaatccaacggttggactttcgtggacgaaaattgaccctcgtggtggaggaggacttggaacagccggtgagccaaatatcgcaattttggggggtttatacagtcagaaggatgcttatccaatttcatttaatttttgaaaatttgtccgtttttatcatgagagtatcctgcaatgtatgatagtctgactggtaaatgctcgagtaatttgccaatcccggtggatccgatcagtcctttcgggattagtctcgactcatttctccgtccaaataacttctaagaggaattcaaatctctttaatacatccaaaataatttattattaattttctttaattgattaaccccaagttgccatttgctttcttatctgttttcgttttttggcattttccctcttttcccat

SEQ ID NO: 36891 - DNA, 1269 bp, Heterodera glycines
  unsure (1)..(1269): unsure at all n locations
atcttataaaaatttgatttgttttttatttntggtttttataaatgctatatgctaaaatttatatcatttcgaatttttcaaaacgataatattggggtagaaaatttaattcattttattattttgttaaaataaacaaagcaaagtaagctcaaaagcgcaaatggcaatgtaaaatgtcataaattcgttgatgtaactcgcaatgaataaatgttaattttccataagaattcggcccaaagggcaatcaattatggcataatttgcccgatcattttgatctcttcttaaagacgatggatcatttcctccacccaatccttggtgtttctggtgcccacgctgtagtccgaccacatgtcatcgtaaatgcgctcaacgtcctcgtaggttcggttgtaaatgggtccactgattttcaccggatgtatgtccgtgtgacggccgaaagtgtcccatttggtaccattctggcgaatttcgtaggttttgtgcacaatttggccacactgctcacatttgaattgcacctccaaactcttttggacaacatctaattaaagtttaaactgaattatcaaacattttggattaaatattcgtttaaaaaaaatgaatacaaacaaatataaaacaattctatacctccgcatatttcctcttctgcattgagaacgaactctgtcgcgggcttgaaaggccgaggccggtcaaggcggacaatcccgcacgattgatctttcgcattccacccaatatttttgcgctatcatgatcatcatcacagtcatattcagcctaaacgcgaaaataaaattttattaaaataaataaaaataataatttaatattaaagtcgctgtcttttgtcactttcattttaattgaaccatctatacaatgattaattaccacaatgaatttggtggcaataagctgcgaattggggcatgaacaattgctctcagacttaaagcctccataatcataggccatttgtcaatgtgtgattcaaagtagttatgtctattatgctattgagtaaacattaaatttgaattaaataaaatttaatatccaaggcacaaaataaaattatgttttgaaatgaagcgctggggaggtttaagcgcgtgcgcgaaattaacaagacgagcataaaagggatgtatgaattttccggggttccattgggccaaggacaggtctcgaggcttcgaaattaaaatgaaaaatgacatttgctataaggtttggttgggc

SEQ ID NO: 36892 - DNA, 1011 bp, Heterodera glycines
tctcactcactttttcgtgtcaattctctcctctctctctctctccccctcccccccctgtttccttctctcttcttaactcccctctctttctctcactcactttctcgtttctatctctctcccccctctttctctctctctcacttactttgatcattatttacgtgatcaaatatcccacatgaacaatttgtgccagatttgtctttttattttttgaagcaagagtcaaatgccaaatctcaccaatcacactgatccggagaccgacctattttttgccataactcctccttccaactaactctgagaacacatgtgacaaaaattaaaggcattataaattacggaaaaagcaataaaagttttattgaatttctaattggcttaaggtaaaacaaaattttagcaattaaattaattttttttttactttattgcgttgaattacacaataagaagcagtttttttgttataatataattttgttctctattctttcataatatttatttgttccataaaaaaattatttttcaatgctaaataatttctcgttacttaaagtgaaattaattttaacaaagttaaatttccttttagtttatcgaacaaaaataatttttcctttacattttattcatcccttgcggcatgcaaattttaaactaatttttaaattatttaaaataattttttaagcaaccgttttaaataaattaaatgactgaatctgacgaaggcaccaattgggttgagtctcatccgtgccgatgtggtgccaaaaattggacagccagtcacatggagcgtgtgatggtcaaactttgctgcggtagcgaagaagtccaaaactgtaagtaaagtactaaatttaaaacatttttaaaattttatttgtttaatttttttatttcaaaattattcattataataaaaggtttcttgtggtgtcaaagatcattgtgaaaaacttgttatcacaaaataagtgttgaattattatt

SEQ ID NO: 36893 - DNA, 1097 bp, Heterodera glycines
  unsure (1)..(1097): unsure at all n locations
ttcctttacgccgttttccttccttccccatataaccattcccaatgtgtatttgtgggggcattttttcacattcccatttttcaaaaccgagagaggataagggaataaccagcatgtgatgcggctcggggctgcaggaggaataattgcaatacagagagagagggaataaataaaaggacggacgaactatgagcatccctcagagtttttgttgtcaatatttgggaaaaaagaaccccattttattcaaaagcgaatgtctgatatattttaatgatttgttaatggggatcgaattctagtccggctcaaaaaattgttgaaaaactaatacgtaattcgaatgtcaaccatccccaaatgccaccanccanccaacacaagacgaaaaggaccaacaagtgccataaatgaatgtaattcaaagtaaaactgtaattaagaagaaatcccaatggaaaccgctggagataggaagtaagtctgagagattaaggaacaaagtccggaactttcagtccaaaacgagattttttgttcagcaacgaaaattccggacccagaagaattgcctttcggaattgtacagactgcattccgagcttcagatcggatgcgcacgacctcagaagattcggccgagtcttttgacgcctatggaccggagtgggaagggaagggacggggaattgggaacagaagggaattcagttcgccaaatatgaccagttcggggagacgaatgagcatcacagaacgcttatttggacgtccagtgccccaagaacgaagaaactcattgggagaggaacaaatggggcaggaaaagccgaaaagcatcgcggaggtttattcgctaattattctccctgtattctatttctattacagaacaaagacttcaaagaattaatgaagcgtcagcgaaaaattttgggcgatgatgagtggcaataaagaaaggcaaaagaaaagaagccattagaggaaaacaaagtcggaatggatcaaagggtagaaaagggaatgacaatttatttatttgtttatattatttaacacttcttctgatttttcaataatgaaataaa

SEQ ID NO: 36894 - DNA, 1182 bp, Heterodera glycines
  unsure (1)..(1182): unsure at all n locations
ttttctttttctgttttagaaaattaatgaaaatagttttaaaggggttttagaggtcgctgatcatgaatccgggctcagaccagcgctactgttcaccacatgagctgtacagaaacgaattgacagactccctgtaccaagggtaccctcatgggcaagatgcccatgaggataccatcaatacaaattttcgaattacacatgcatataatcgtaatgagtttaaataatttttattgctgttaagatgattttaaactcatttttatgtaagaatatggttcgacaaaaactcgaaacccgaaaaatttaaaatttttgagtttttgttcgagttcgggtaaaggtgttcgaaattggcaaaaatgatgctgtattagtgatccccttaaaacttattttcattaatttctaaaacaaaaaagaaaatctattaggtaaacttaaaaagtacccatgtaattacctaaccattgttttgcttgttagtaaaattgttaattgatagaaaaattttttactataataaaataaaattgcctggtaagaatcgtcgcccgggtgcttgtcagtctgtactcttaccaattcttggacattaaaagacaaattcgacggagcatcaaaacgacggtcgaaattcaccacaccatccatttcagacaacgagaaatgttttgtttcatacaatgcgcagaacttaaaaagtcatagataagaccaagcggactcgatcagtcgttaaatttcaccaaattctattctccgtgtcttttagcaaaaaaaaaaaaacccgaaaaacctcatcttggccggctacaataaggaattggccataatacggctcatccgacaacgcaatgcagtccatgttcatgctggcggattggcctgtgtcaacaacatcgctcagtcgcgcaaccatttgattagaggattcatagattcccttttgaaggtcgaaattgctatcatacccaagcaaaaaaagctaaattcggtatcatttcaattgctaatatcgcaaaagatttgaaaatttgtttanattgccntgaatttnggtgngaactccagtttttgcacttcctccacccccgcccattagaatatgtcgacaccnatttccacgcaacagtaagctgggatagaacaatagccgccttgcttgatttttgc

SEQ ID NO: 36895 - DNA, 1000 bp, Heterodera glycines
ttaaaaaattccaaaaattatgaaacttaaaatagacatcaccattcgtactcagcaccttattttaccccagaaaaatatttttcacccccattttcgtccgaaaaaaaatttccgaaaatttctagggggcctagctcgaaaatttttgaaaattttacatcatgtagtacaccattcgatagcatttaaaatgctctacaaaaatgttctaagacaatttttcgataaacttaactcctgccgagttataggcccgggactcaaatgtcccgctcaggccaaaaaaattttctatttccgggaaaaaatcgaaattttttcaaaaatatcaccaatcgatagagctcgaaaaacggttgcttgaaagtggtctccgtttttctgggaaaattcgttaaaaattcctaaaattcaaaaacccgaaaaccgttttttaggcctagctcgaaaaattttgaaaattttcgaaattttaaaaactggaaaaatcgggcttttaaagctctacaataagtctgctggccaccctgcgctcaggtcaaagcctaatgagttattcaacggggactgaactggacaaagttggtactgaaaagttctagaagcacccagcccagggggttagagctagaggcctagaattttttttaacttttaggcaacattctcacttagggccctcacagcgggaattttttgatccgattttcagaaaaaaagttatgggccgtcaaacgcaagaaaaagtgagaaatcggtccccgggactcagtcgtccgcgcagaatttttctctatagttttccctgattctcctcaaaaagttgtaagacccttccaccacttttagacccgtcccattagccgttaagcccaaattagtttttgaaacgaaactccttgtcaatataacgtatatattaactagcgggtgcgtgaaccgtcggctatttagctgggaaaaagcgcttcgcgctttcggagcttcgctacctaga

SEQ ID NO: 36896 - DNA, 1536 bp, Heterodera glycines
  unsure (1)..(1536): unsure at all n locations
aagatgatactgatgattagcgtcttgttcgatttggcgctagtgcgatatttattctcatggttcttggaaagtactcaggaagtattcgatttnttgtaaataaaccatcagctgatataaaganaagcattgttgtctgtccttttccaattatattgccatttcggcatcggtctaacaaagctgcgcatggctttgggaaattcctcaggaattaattttcgttgtctaaagaaatgcgctagtgtcgggcattttgacattaaaatgccattaaggcaccgttgtagcaatgatgcacgtggtccttggaaattcctcaggaattaatccctgaatttcttttattttcttatcactcacaaatcacggggggaaaattaagatgattctgatgattagcgttcttgttcgattttggcgctagtgcgatatttattctcatggttcttggaaagtaatcaggaagtatttcgatttttgtaaataaaccatcagctgatataaagaaaagcattgttgtctgtccttttccaattatattgccatttcggcatcggtctaacaaagctgcgcatggctttgggaaattcctcaagaattaattttcgttgtctaaagaaatgcactagtgtcgggcattttgacattaaaatgccattaaggcaccgttgtagcaatgatgcacgtggtccttggaaattcctcaggaattaatccctgaatttcttctattttcttatcactcacaaatcactggggaaaaattaagatgattctgatgattagcgttcttgttcgattttggcgctagtgcgatatttattctcattgttgtgttcttgccaatgaacacacaaagaataaacaaatatttattgattggtcggtggacaatgcaaaaatataataaaaacgaatgaatgagggaaggaccaaaaaggaggggaatggtctccttataaacacaatgagaaggggggaaagggcgtggagaacaaagtacaaatatgaaaataattaaaaaggtcaaaacgccaatttaacatttccaacattttccatcaaataattcagctgatattgctcatagtctcggtataatttaccagcgacaattaaaataattgcgtctttgtcatcaaactttttcctttaatttgattaagaaattaaacaatcaaaaaatatataaactaataataagccttatataaccaaggaataattattgtatttaattttcattttaaattaattttaaatgtttaaaaaattaattaatccataacttttatttttccattttatacaactcttttctgctaaataaaattaaatagatgctaatgccagattggacttaccatgccattattaatgcattgatcagcatggtatcgcacggattgtccggcattttctcttttgacgtgtcaaacccggccaaggccatcgttcgtctgtgcaattttgtgatatttgctgaattcacgaagccaccagattggccaatgttcacttcaatcttaa

SEQ ID NO: 36897 - DNA, 555 bp, Heterodera glycines
atgtttgaattatttctctaaaactgatcgaatgaacgacgaaacggacgaagtgaaagtgccaacggcgacaaaaaaaagaaagtgaaagtgaagaagggcccggccgactgtacgacgcatttgcgcaagcggaattggtggcggaacggcttaaattgttggactacgagcgcgaatttgtgcccctcggcgacagccttaaaccaattccgaggcaaatgccgatgaatgaatgccatgccaacgaattattttttgattttaattgtttttttaattatttaatgggtcagacattacttcgccctctccacaaacattggcgagcagttccatttgttcaccagcctttgcgcgtggctcatcagaaagtcgggcgtcgatccatcgatggaaatgccacacgaatttgacgaccctaacgcaacgatcgcacaaattttggaatcactgaaagcgaaggtggcgggcggggggagacggggctaaagagaaactgtcgagactcttgaccgagcttttcccccaacaaatcccaattaggatttgcat

SEQ ID NO: 36898 - DNA, 1084 bp, Heterodera glycines
  unsure (1)..(1084): unsure at all n locations
tttgaaaaattaaataatatttataagatatttgatcagataaaacggttggtctatcaataaaagttgaatagaaaaaatagtaaaaattttgattctaaaaatgtcaaaaaatattgaaatagtaaaacatttagccgcaagatttgctcaataattttgagaaacgatattctttttcctaattgatacttactgaaatattaagctaattaattaataaaaagttaaattaatacatttctatatataaatattaaaaatcaagaaaaatgccaaactcattaagcacaaaaattttgtcgattttttcatggcacaccacacaacttacacaacgggtgacccattgacaattggcacgaccaccagctcgacgagcagcatgacacacagaatgctgtagccgttcatttttttttggaaaattatttttaaattaatgcaattaaccttcaataaaatttaaatatttgccattattaatttaatgtataatatttgtgtaaaaaatgttacgggcttcaccttttcggtatacaccagggataatgccgacactctcaaaaaattcggcaatcagcaaattgaattccgatcgcatttgaatttttttttgccttttgccaacccacactttctcagtttcattccatttttgagtaagtttttatcggaatttgtaaaataagatctaattgattttccgtctttcaaaatgaattattttagtttaatatattctaaaatagcatataaaaaaactcttggaaattgattaactatttaaaaaatactcttaaatccatttaattattaaatttaaatttaaaatgcttaacattggctcagaaaatgaactctgttcttgggaaacgagaatttcttaaaatcttcgctggtcatgtgaattgtgatggctgtgattttttcaggaccaaagttttggggccaaatgttccactttttggcagtttggccaaatccaattttatttcgggtgattaatgaccggccaccaaatggaatgtgtacattcattagagttaggaagatcagctgatccgatattgngaaatgaata

SEQ ID NO: 36899 - DNA, 980 bp, Heterodera glycines
gattttttaaatataaaatatttttttttaaatttgatctttagcggtgtatttttgtaaacatctttggggctgtatttcgaagttttcggtgaatgccgaaatagggaaaaaatatcggagggtcgaattttaaatatggagaaataaaaaaagtttcaaactaacttaaaaacacattcacatctatttaatcacatacacttttttaaacaataactcacattaaaaaggaaaaggaatatgccagcaatgaaaacgtcattagaaaacaacttatttgtaagtacaaaaatatttactcttgaccataccatttccgattagtccgaccaggaagatcaatgcatagaaggcagaatacgtcacctgaatgggcataattatgtcgaatgctatgcatatctcaatcagcaagcagacctgaaaatttgattttcctagccctatttgtactttgggaaagcggatatagcaataatttttatcaaaattatagaaaaatgccaatttgctctggacttatcgtttaaagagaataattatttgaacaattcaatgtttactcaattgctaaaaattcaaaattccaaaaaaatttgtaaaaaataaaaaagccaacgtatttaaaattctattaacactctctaattcgaattttctcgatgaaaaattgttttatttaattacgaaaatatcaaaataatgatttttaaacttttatagagggttgttctaattgagattttttttacaaaattccaaaataagactcccatcataagaactttaaacctaatagttaatatatgattttcgtgaacatttcaggccctctctaaatttttattcctaattatttccatttcctccattgcctgcacttccgtcctcagggtccaatcgccgaacgaactcataaaggtgttcaggtcaacacagtgctgcttaattcgttcactaatcatcgccggcagcgg

SEQ ID NO: 36900 - DNA, 1323 bp, Heterodera glycines
aagacgttcatttttcctgtgcattagggatggcatatttattagccaggtagctaaacggggtgacgttgttgcaattgttaaatgactccataaagtaatttaagcgctttgaaacaatagagatccgactgtccgtacctgaagttgcccggatgggttacgtgtcagcacaagatagtgactgttcgccattgctgtccgaatatttcgcccatacaggctctgagttacgaaaattacgtttacgttccagttatgcgaaccgcgtgtaaacaaaagatccaaaaaatcattgttcatattcagcataaggtcgtccagcacaagtaggagaggtttaggtttactattaatcaatgcctgatctggaatcccattatgggtttctattccacgtttcatcagatcaatgaccgaatcgttcatttcagaataacaaaataaaactttttcgggaggtgggttaatcagttcattatggtgtttcaacaacctcatcagccattgggttttaccacttccggtggcgcccgataatataagagtgaagggggcattaaacattttttaaagttcaatttttctaattgtaacttatttatatagtgtttgtcctcaattttgtatgggacatatgccgcacattttgggcacatccaacatttttctgcccaggggaagtgtacggtgccaaaatgcaatagactttgtttcctacatcttttacaaatttcataatgacatgggcagtaatgacaacattttacttgatgaatacaaattttgttcatttttaataatttgtaacaaattgaaaaaaacagaattgtttaaatagtgtaattaatatgtagggggatcgggtttcatgatgtattcgagccattgtgttaaatcagccgaactgccagataattctactgtttccttctgcgaccactcttttgtcaatttggctgttttaaacagagtctgcgggtcggactcggatattttttaggtggtggagatttctcacatgacaaatcgttttcaaaagtttgagggactgttggtataaacgatgacgatttttcttgtgggaaatcttcatcaggcggttcgatttttggttgtatgagcggttgttcgcgttccatttgttggtccggcggtggtaaagtttcacgctccaattctttatcaaccgataattgtatatttttctccatgaatgtttagaggtaatgggtacaataatttctattaactgtacatttcttaaaacgagctgcttataaaggacgctaggggcgggggtctggatcctttaataggaca

SEQ ID NO: 36901 - DNA, 1272 bp, Heterodera glycines
aatttaccatctttttcggagtttgaaccatttacacaaataattattactagaagaagagaaaagttggcataatataaacacatttcggcaaaacaaaaattttcaattcgttcagagtttctctataaatgattgaaaattttttgtcatgaaaaataatttaataaaatttatacattaaactagctattataatgacatcatcttttaaatgaatgaaaaaatattataatttaataataataattaaaaaaaaatcaattagacgaagagaaaatgtgcttgaaaaatatatgtaggaatgagaaagcttttgcttcacacatgataaaagtggaaatgaaaatttcagaagatgccgattgactttccctaaaatcccaaaaaaaatgaaaatttttgtgaaggatattttggctgtatcgctccaaaaaatttttaattttaaagaaaatttggttttttagggctagttttggtgatttttgaccagtaaaatctcatcatatttataatttttaaatatatggcaataaaattaactcaattttccaaataattttttttttcttaaaaattccttggccttttcgccgtttttccaaactatttagttgaaaaattcaaaaaatcttcaagaaacagagggcaatcatggcatgaaaataaaatttggtgcgtttcagagcactttctggaaaaatatttagaaattaattttgaaaaataagtaaaataaagaaaaactcagaatttcgaaaaaaaactttaaaaccaataagcgttgaaatattttcaggttaagttagttcttttttttgagaatataagcattcgagtgccttattaattaacatgtaaataaaatttgttgaaaagggtgccaaattatgtaattgagaatgactggccttttttggagattatgtattgaatgatcagattgatctttatacatttgttgctcattaatttttataatttctatttcattcatttttgacataaatactagaggtgtgccgtgaatcacggtcacggttaccgtgaatttcacggattttttctatcaaacggtcacgattcacggggtcagttcacggtttttccgtgaaaaaacttacattggataaaactgaaaatttcagaatttcgaattgttttatagagaacttgtcatttttggccaaagtttgctaagaaatcggatcaaaatttgcatttaaagaaaaagaataattaatcctttacaaattaataaacccatat

SEQ ID NO: 36902 - DNA, 1032 bp, Heterodera glycines
  unsure (1)..(1032): unsure at all n locations
gcagtatctntggtgagacttgaagtatatccaaaatctttcgtctacatctttttacactgttttaagactttctgatgtattacttttattacttaacctaattttcaaaattgaattttttcggattctggacatgattccgcatcaagtatcttggtgtgtatttgacatgtaatgcccaaatacatgtagggcgtctttacacattattttaagtatttccagtgtaaaaaattcatcataattacccatcaacccctctgaatccctgcgtatcccccctaattctgaaggcaaatatttttggtcaaaaaaaaaatccgtgaaatccctttttagggtatttcccgaacccggaccaaaacctgccttataccatctgaaagagcaaagtctgtagatgtgtcatcaactcttcttttttcgattgcaccgattttaaggcaggatatgagccatcaaacacaaactgtcaaaaattttcgaaaaaattttcaaaaattttctgaagaaacttttttttacgtgaaaatttcaaaaaatggttttcaccattcgatagagaatccttaaaaaatagtagtgctcttttgttcggagccgatccgagcactttgaagagagttattcaaaaaatttgccttcaggtgctagattcctcttatatagagaaccagggccctgcgggccctgtgaaagcgccgggggcgctttcaacgctggctctagtgggagatataatttggggcgtgcaaaaagcatctattggccgctaagcgatcctcatagtttaggaatatgagaatttggaaatgaacaaataattaatttaaaaacgatattgttttaaatttaatttaaatgcgacatttttatttatatgcttgtgatttttatgagattttttgttaaatgttataattctaaaataaataattttcgagttgtcgctcttgctgctctgacttcctcttccactttctcttccactttttgttcttcttccactttctgttcttcttccacttt

SEQ ID NO: 36903 - DNA, 772 bp, Heterodera glycines
tttttgaagaaattttttgattttacaccctaaatttgaaagtttttagcaactattttcccatttttagcacctattttgggttttttagaacctaaaaattaattattttgcagtttttatcaactataatattgtccccctcccctatccataagaatgaaaaatgtttcttgataaaattatttaatcaaaattttaattttaaaaagaaatgtctaaattcatgatttttttaaaatttttttgagtttcttacttacttttatgttaaattaaagtttttaaaacattttttgaaattataatcttttagcaaattagttttaaaatattcaatctaatttatcgagcatatcctggtaaatttgattttttatttggcaatttttatgcgtgaccggataatgcgtcagtggtttaaaataagtctctgtagcattaagtattgtaatataaaagtagaatatcattatgaattccgaaacccgggtccgaattcaaacaaaaaatcgaaagtccaaatgttcgaaattagcatttttttgattcaaaatcggtttaaacacacggaaacaaactgaaagccatcaacccttcaatagaaattcatttatgccttttttgaaccaaaaatactaaattcgaaaatttgaactttcgatttttgttcgagttcgggtccggggttcgtaattggccgaaacatataccggattcgtttcaatgacaccgaaaacccaagaaaattatttttatgacaataaaattt

SEQ ID NO: 36904 - DNA, 1014 bp, Heterodera glycines
  unsure (1)..(1014): unsure at all n locations
ttttctaaatttcagtcaacgaaacaatttcccatttctgccacccatttcattttttggatttgcgaaattatccccccataggaaagactcagatagttcaaggtcatggattccacccatccactgccatcaagtacataattgttaatgttgcaactgactatttttgctaaaaaactccattcagtttgaaaatctttgtcccagttttacaactgtaatcgtaggtcaatcgcacaatcagtcattgtgttttggcaccccattttcgtcatttttccttccaaattttcactcttcagtttttcatccattgcctataacaatttgttcacataaaaataaacttttcttttaaaacccggcatatttttcagtcatcatttgtcattacaaggcggaaagcgtggcccctctgctcacatttggctctctgtttggcattgtgttggctgttctctccgcctattttctcatttggaaaccctccgccgtttgctcactcgtcaaaaggtagtgagtgaccaactttataaattacctttcctatataaaattcaaaaacattttgtttagatatgaaaattttctatttatattaatttaattgcgttagccaaaagatggataatgaatagggattccttttttcgtaagaaaaatcgcgaaataggtacaaaaaagctcgaaatcgttattaaataggtgcaaaatcccgaaataggtagaaaaataggtaaatttaatgaattcctttaagactaaaatttcgaggtttaacccttttgttgcttaccaaaaccactggacataattttaagcttaatcaaaaacctataaaaatggcangtttttagtgaatatcttaaaaaataggcaaaatttgcatccttcnaatttataaaaatatttatctacagaaatgttcagcgtcggcttcttctttatgattacgagttttctaccttcggatgcaacatactcaaggcaagcatttaaacaactgtttat

SEQ ID NO: 36905 - DNA, 802 bp, Heterodera glycines
tatgcaaattttgtgcaaattttttcatttttactcatttttttcatcattttttttctatatttttgggttttttgaaaattttatataattccggcacctgaataacataaattattctccttaaaaagtggtaataaaaattcttaagcccttaaaatcacgagccccaaaagcttaattttaaaaaaatcaacaagttgacttcaagcagcatatatagcatttttttgagatagtaaaaatttcattttccaaaaataagttttattataatattaaaattaattcaatatacgtaaagtaataaaaattaaaatataaatctaaattgatcaataaaataaatgtaagtaacatttatcggcagatcctcctggacatctttattcgtaaagataatgacgaattatgaaagtgcacacatcacatggaaacaatcataaacaatgaagaaaaagaaaaagaaagtaatggcacaaaaggatgaaaattatttagcatgagaaaaagagtattttcaataatcgaaatataatggggaaaagaaaaagagctaggcgaaatataatggggaaaagaaaaagagcattttttatttaagaaatagcataagaaaaagaaaaactgcatttttaagcattattacaatatattcattcattcacccgtttgcatggttgcgaataaatttttatcaagcattgtcattgtaatccacgtggacataatgccaaacaatggcagagagactgtgtaaaataagggcggggcaccagcagaagccacattttaaaattaa

SEQ ID NO: 36906 - DNA, 979 bp, Heterodera glycines
  unsure (1)..(979): unsure at all n locations
catgatcgagagtatttgtattatagattatccaaaaaagagatagccatttttttgggatacagatgcaatttaaaaattcataaaaaataaaagggccattacgcaccgtcttccctctcatgatcgagagtatttgtattatagaaaattacncaaaaaagagaaatccatttttttgggatacagatgcaatttaaaaattcattaaaaaataaaggggccattacgcaccgccctccctctcatgatcgagagtatttgtattatagaaaattatccaaaaaagagatagccatttttttgggatacagatgcaatttaaattcattaaaaaataaaagggccattacgcaccgtcttccctctcatgatcgagattatttatttgtattatagaaaattacccaaaaaagagatagccatttttttgggatacagatgcaatttaaaaattcattaaaaaataaaagggccattacgcaccgccctccctctcatgatcgagagtatttgtattatagaaaattacccaaaaaagagaaagccatttttttgggatacagatgcaatttaaaaattcattaaaaaataaaagggccattacgcaccgccctccctctcatgatcgagagtatttgtattatagaaaattacccaaaaaagagaaagccatttttttgggatacagatgcaatttaaaaattcattaaaaaataaaagggccattacgcaccgtcctccctctcatgatcgagagtatttgtattatagaaaattatccaaaaaagagatagccattttttgggatacagatgcaatttaaaaattcattaaaaaataaaagggccattacgcaccgtcttccctctcatgatcgagagggccattacgcaccgccctccctctcatgatcgagagtatttgtattatagataattacgcaaaaaagagatagccatttattttgggatacaga

SEQ ID NO: 36907 - DNA, 1024 bp, Heterodera glycines
aaagggaaagagtgggggggggggaaatggatttggtgttttggtgttgtttcgagaatgtccatgaaggtcatccattattcacgcactttggcattgctgatcaatgaccacagatcagtagggcaccaaatttaaatgttttttatccaaaattcgaaaccaaagtttccgaattgaatgaaattttgtataaagcaaaaagaacaaagctaacattttgaagccgataatttcatgccgttttccttcgtttgatggtttatttggtcaccagtggaaacaacaacgagcagttcagtgaaaattgttaaacaacaaatttgataagaaatgaatggaagcgaaaacagaaaaggggcgaccgatcaatcagttttatgatcagtgatcggctaaatgaatgacacagacactttgccaatgaatgagcggagccaacgccaaaccgaaacgaatcatcggaatggccaacttccgcccatttgtgggccggccccgtcggcgaactttcgcaacattccccccccccctcttctgatcacatgtcgcgcgcgactgatcacttggcgaaaatggaccccaaaatgatgggcgaaggtcgtttcactcgtaaatgatccaattctttttccccttttttattttcctttttcggccgtttgtatttatttttttggccttcccccaacaaaacctgtccttccgcttgtcccaaacacaacaacaatttacaagcaatggcaatgtttggcgtttggagggacaaaaaaagcgaaaaaaagagaggaaaataatggacaaaaatggaaacataatgacaattggtaactcataatctaattaattaaatattcaaatgatggaaagaaataaatgaaagtgaaaggcgtcggcgaatttttggtcatttcgccccgagggaaagagcgccaacgaaacgcgaatgaatcttcggcgcggctggtcaattgcacaagggttgggtggatggatcatcaccagcgccagcatcatcagcaga

SEQ ID NO: 36908 - DNA, 80 bp, Heterodera glycines
tgcaggtcgcaaatggacagacaaaatgccaattcattcggaaggggtggcacaaccgacggaggacaaactgccgaaca

SEQ ID NO: 36909 - DNA, 1657 bp, Heterodera glycines
taaatgaaaattttgtaatttaaaaaaatatttgctgaccggcggttcattttgtggttcaatcagcacaggtctcaccaatttttttcaatttaatttgtgtgtcacaaagggcaaaaaaaactgtgttaacttaaagcatagacaattaggaaaaatgagagagcaaaaagaacacaaaatttagagaaggtacatgaaaagtgaaaacagtaatttcacattaaaaactttgaaattaccgaaaaggagaaaaaatggcaattttatactaaaatattaaaaatgaattaaaactcgaaagaaataagagtcaaacaaattttggtaaaatatagtgtgggtaatgcgtgggtaatgaatagggctgtgacttttagtgaccaaaaatctcgaaatagttaactaaaatagtgagcaaaaatgccaaaatagtgacaaaaagtccaaaatacatagtgatgaatagtgacattattttcaaccaaaaattaagcaaaaaaaatctttattcactagttgcagttacaaatgaggtacattcctttcttacatttttttagcaaatattgaaattttaaaccaaaaattttgtcaagaagaaaaattttggggaaaaatttttatgaaaattttccaattctaactggtattttttgaaaaatttttatgaaaattttccaattctaactggtattttttgtaaaatttttaggtcgattcttaggggtgtatttttttgtttttattgcatttttgttaaggaattttccaaaaaatgtcgaaatagtgaaaaaaatagtgacaaaatgccaaaatagtgatttctatttctagtgaacgataatgacatcagaatcgaaaatttttaatgcagaaatgcgttttttgagctcctttcttcaaaacaattgagcaaaaaatttagttaaaacctaaaaaagtcgagatttttgaagttttttcttaataaaatttttccaggcttgataatcctttcgattttggtaaggttaatagagcatttgttggatttggatgccaaagaaaaaagctatcgtggaaaaacgagctctgctggtagggttttttccgaattttgtaattctcaccgatcggttcatgctcaaatgcacgaaatcttgtttttgatttgaatgttgagcgcatagcatggattcgtacttgaatggcaagtgcgtacttgaaatcgactctcatgcgagaaaatttaaaatttgcttattttcatgaaaaactatttcgagttttcttcattaaaatcgcaaccctacttatgtattaccctagtaatttttaattttttttttctaagcgggctggagggaaacaccttaactactgtatttctaaattctctagacaatcgtttcattggtaataaagaaattgtccaaaaaaaatcaagaaaataaatgttttaataattggaacgaaagaattaactgttggatagtgaataatttgaatttatgtgtaaaaaatgagccacacattgatgacttaaattttcgaataattttcgttcttataaaatgttttaccttgattttcctaagaccctagccattcgctgcatgttttttgcgtcatcacggacaatgggaattaaaattctcatttttaatccgttttc

SEQ ID NO: 36910 - DNA, 1257 bp, Heterodera glycines
  unsure (1)..(1257): unsure at all n locations
aaagtgtgcgcgactcgtcgctttttttttgttgaanaacattggccaacagcacagcgaatcaatcatttggcagggcaaaagccggtcgcccccggcgattattgtccgatttgcgcatgagagaagcgacggaagaaagtgtaaagatgggacaggggaagaagctcacattgtgaaaaagcacaacaaatacacaatcacaacaaacagtgggggcgacgcaacgcaaagaaacaaaacaaaaacaacggaggggggggggagacgaaggattgggcccatttggtgccatttgcaaccattttttgaaatttcaatttgctccttcgtgccgtttatcatattttggccagaggcaattcaattgacaattttatgttgtgttatttgaatctgcttaatcttttccttgcataaaaatacttacaatctctcaatcagaggaaatcaaggagttcgttaaagtgtaatttaatttattattattttctttattttttttttattatttatttttgtttttctgtttctgtcactttcttatgcaaagtgtgcttcttctttctttctcttatcaattatcatatgcacaaaatgacaacaaatgttgcactttctttccttttttctttttgtttcgtccccactttttcacttttctccccttttttatcgtcgtttgatcggtcgttgtgtgaatgtttggacgatgatgacactttgcagaatgttttgtgaagataaaaaacaaaaataaataaacataaataataatatttgcataatttacttttcgatttactttttctttcctttttaatcaatttgaaaatgttcactgatcatccaatactttaattataaattgtgccattcgccccgctaatcccccaaaaatgcctttgattcgtccgccaattaaccgcttccccaaatttgtcttacaaattcaaatttgcgttacccccccccccgccctctttcattttggtcttttgtttcctcaagcgaatatttgaatttgacacattttctacacatacgataatccccaacagtgcattaagattttataatttcgtacgctcatttgtgccattttgccatttccttccgaatggcgtctttttccctttttcttttctctcccgcctttttaataaataataattttatttttatttttttcattcctctggtttctttctaaataatttatttaaatttccgtttggttattcaaaattccgtcgt

SEQ ID NO: 36911 - DNA, 1143 bp, Heterodera glycines
ctgtgtacaatgtcttctgccacagtaatgcacaatttgatggttcggtgattgtggtggtgacggaagcaaattcatgttcttgctcctccacgtgtagtcgttgttgttgttgtcttcgcaaatcaaatggcaaattttttggcgctgttccgtcaagagtcgggtccatttgaatggtaatgattggctgcttggcattgtccctcctcgcttcctcttctgttgttgggcttttcatcaaacgatattgttccatcggcagaaattgaaaacagtgaagccaagggatctagtaaaaaaaaagaagaatgatcagattaaacatttactctgatcagattaaacattcactctgtttattgcatgttgcatctaattgactgattaatgatgctcgggaatcctatttcaactagacgagatacaatttactggataaactatctaaatttttcatatccaaatccctggaatcctattttattttccagaattccggcataaaaacaaaattcaaaaatattgtcacaccatctgatcggatgctccacttctgtacaccggttgcattgacttggaccaatgccgtgccgaccggcgtttgtgcgttgagccaaagttcagtttgaaaaggtgcccacaaatgaatgccatcatcaccaccgcttgcatcatttggagtaagtgttgtttcagtgccgttttgatcgacaacgatcaacaattggcacaccgatgacaatggcatttctgagctttggtcttccgcaatcagaatgatggagcgcggaaatgaagaagaagaaaaagcagccgtggcatggccaagatcaatcggacgacgaaggaagagatcaccggaaatttgaaaatttttaaagaaattaaacctagctttgcaaacgtgaagaggggggagggactcaatttcggcatttcatttgtgaatagaaaggaatttcgtaaaattttcggagataaacgataaagcactgataaagatggaacttttacaaattggaaaaaagtaacaaattttatattttttaaaatttatgaaattgatgaaaaatcgaaatttcatatgggtttgaggtcaatttcgtaaaatttttagaaaattgaaaaaaaaacattttt

SEQ ID NO: 36912 - DNA, 887 bp, Heterodera glycines
  unsure (1)..(887): unsure at all n locations
tttctttcctctctttcgcacgattgcgttgttcgaattccaatctttagcaaaaggtccctcctgtcaatccttttgaaataaactaaattgcctgttcttgatgatccgctcaatgattcgttccgttgtcatctcatttccagaatcaaccgttttgaaaattcccaaatgccttaaaatgcaattccaatgccaaaatccaatttgttccctcactttggcacctcataacaatctgcttcctcggtagcagtgtggtgttcggttcggatgccttgcaccacaaaattaatgcgaaatcggtcgatcaattctttcgtaacgcacagaggggcgccgatgacgacctcagaaacgggctgattggaaaaagaatggattactatggtaataacattaagtggaaacgtaggtaccttataggccaaaacactgaggactctttcgtggagtgtcataattgggtaattctgtcctttgtacgaattgacgtccttaattgaattcaagatgccattgaaaggaaaagctgtttattggtccacttggtctgagtatattccgacgattaaataatcgccaagacgacgagcttcttccaagaagcaaaggtggccaatgtggaaaaggtcaaaagagccacagacgtaaacaattcgatcttcgggggttggagctcggcctgtaataggaaaatgaatatttatgatttcgggactggaaataccctcagaaaattgcataattgtctgagttgaaggcagaaaacgtgaaatgcatgtccaaggggagcgggcctcttggtcctanagtattanatgaaagagtaaataaaaccaaacaaaaaaaaaaatcgttttaaaaagatacaacccaatgaacac

SEQ ID NO: 36913 - DNA, 1149 bp, Heterodera glycines
  unsure (1)..(1149): unsure at all n locations
gtcatatcaacaggaaccggttaagaataattaaaatttgtgctatctaataatgcataaatatgtcatccatcacncaggggatcggaggaaaattatgcattttttgccggtttttttaatttgtttttctcttacattatgtgcttttgcttattgattcattttgtcacagctgctgctgccatttcaatttgttaagcttttcagcagcagtcagtggaatgaaaagggcagcttttcctttgaacagataaaaggatttgttcactccccaaaatcctttaatttcacacaaaaaataaagcaaatatacgagcaaaaaaaaaacaagaaaaagaaaattttcagacgacagcccttaaaacattttcgttatggatagagaaagaccgacttttgaggcatatgccttttttgctgcgcattatttccgatatattaagcataaataacacagtttccacttggttttaggcttctacgttgacttttattatgcctttttttcttggttaaaaattttagttttaaaaattttccttttcgaaaacattataaaatatttaataatcaattaaatgaccaaaattatgttgtttccctaaaatccttaataaaaagattttagtgctttttcttgcttttttcgggattttcgtgccttttttcaattttttggtgcctattatagtgcctttttcgcgatttttggtgcctttttagtcggtctctaattatggaacaactgagcccacctattaaaagatgggcacttatgtttacatgaaaaatgacaagtgcgcccctgacaaatgagccgattatctcattgtttgcgcaagattgatgaatttgaattaatttaatgatttaaaatttctgtaaaatggtaaaaaatcggtgagcacggattgttaaattattttcactttaattttgcatatcaaataatttttaatgctttttattaatttaaattgttttttcgcattatttaattacagacctagaggagtcgattgatattaaatcccggaagcattctttacttttaccgttcggngaattaanattttttttanatgaatataagaattgaattttcgaccctgaaacccttgatcattatatactcatactcatatg

SEQ ID NO: 36914 - DNA, 523 bp, Heterodera glycines
attcgtaaaaaaatgtatggggtaaatgaaaattttgtaatttaaaaaaaattccttaccgtcgattcatttttgtggctcaatttgccgtttttccaattgattggtgtgtcacaaaaggcaaaggcaaaactctgttgttatgtaacttaaaaagagagagttggaaataatgagagagcaaaaagaacacaaaaacagaaattcatccaaaattcgcatttatacacaccgtccgaaaaaacgagatgtgtaccaataaatagagagtgccagagaaaaacattatctttttttctctaattttttgtctccttttggcgtactatctaatatttctattattaggaataacaacattcacttcgctctatagaactttttttccgccttacagaatttcttcatattttgcatatcgatagagaaaaaaatatagaattgttcaatcgctttttaaagaaaacaatcgcttttattttggtctaaaatttaaaataaaatttcgaactcctataacttt

SEQ ID NO: 36915 - DNA, 1394 bp, Heterodera glycines
atgtttttattgcgtttccttcacgcaaaatatagtttttagaaaaatcttattttttggggtcagaatcttagtttttaggccattttgtcttatttaaaaaaaaaaaacttgggaactctgcataaatgcctcttgtttttcagagttcgtcgtctttcatctccctcggtactcttcgccacacattccaacccttcccctttctctggtgcaccgtttgatcgcagcggccgaatccgtccgagacgctcttcttttaggtttagtctgatttgaaaagcctttgatcaatttcagtctttgtcagtgctctgtcccatcgcttcgtttgccctgcaattgatcaccgctgcacaaattgtggcaaagcgttcaccggaaactcccaatttggcactaatcttagccgacttggccagacgggggttacggtgagcagcattaccgtattcatatcgttttttgtccgttgtttcagcagagtgacgccgactcttcgcctccatccgtcctcccccctccttttgcttcctttggctgcgtttgtcgacgtccgtccgattcggcactttccaagcatcgtttgccgtgcaaaatgtcctcgacctttttcaagcctatgatgatgcagcaatgttttgacaaagcatcgccgccaaatgtgcaaaattggcatcgtccggccgaccaccgccaccctctccccaacattttcctcaacgatgcttcacctcccaatgaaatgacggcatccgcgtgccgtgtgggtggtgccgccgaatgtggcatttcggaccaattggacaatgtctgtgctcctttttctgctcataattagggatcggatttttaaatttttacttatttttctgcggctttaactcgacgataaatgcgcgaaaacagattttttgttcgaaaatttttcgttttatcgcccttattcgatcttagaaatccttattttaggtaatcgcccttaaaaatccttattttagatgttcgcccttaaaataagattttgcccattttgacgtttcgtccttattttcgccattatttcgtgattttttcgccattatttacggccttattttggacttttttgcccttaaaatcctcgcgctattcataatcccctggctcaatttagtcctcctcttcctcctcctactcttccattgcttcgtctgcttctgattcgcttccactttgcaatgcttacgattgccgctcggcagacgaagacgcgtcgactccgacgccgtcgcgagtggatgcccccgcggtgccgagcgcttccgcccgagcgtcgtcctgcgcggatggtgtgcccctgggcaaagaatcgctttggacttgcgccgctcatcagcttttgccggtgacgt

SEQ ID NO: 36916 - DNA, 755 bp, Heterodera glycines
  unsure (1)..(755): unsure at all n locations
aggcactgcatacttantgcaataggaagaccaaaagccaaaaagagagcaatgtgaagctaatgaaggtgggactttgggaggggcgagagtgagtgacgagtgactctcgaggaacaaacggacgaaactgacgaaacgatcccactgccgccacccctcccccccccccccccgtcggactgactgcaaaggcggtgagttgggttggccagcccattagtagtgaaacgatatcacaattccttcctctcatcagttcccctcttatcatcgcccattaattctctcgccattttatttttaatgcttttccatgcaacccaaaatttattccattcgaatggcctttcacacgggcaatgtaaaagataaactgtacactttcattgtttccgtaagcaaacaaaaaacaaataaaagccgaacgattttaatcagtgatcaatcaattccaacaagtcataacttcattttgatcaatgttcgaattttccttgaatagcgttgatttaagaattcagcttaagcggtcgtttcgtttcgtttcgtttcgtttcgttttccattcgtcgccattctctccctttccccgccgggggattgagtgagtgagtgacccaaatgttatttcgcgattccggaacatggcgtgtgagagcggagtgggaggagggatcaccgagcgttggttaatcgaacatacggcacacagagaaaggcttcccacttctccgatcactttcgatcacttt

SEQ ID NO: 36917 - DNA, 724 bp, Heterodera glycines
aaaaaaatttattaaaattggaatctggagtagagatttactctcgacggtaattatatggaaaaggctcaaaaatgctcgggacagggtcattgacataaaaaatcggatcaacccctaatttttaatttaatttatttagttagaatttttatgtaaaaacctttagacaatccgatggttgctcacgaaggtgtgatcagtggccacttggacaggccgttttcgaacggcgccgccgccgccgctgctgctgtgcatcaccagcaacagcaacaacaattgttccatcaacgacatcaccaactgcaacaacagcaacaccaccatcaccatcaccaacaacaacaacatgctaaacaacacccttcctcatctgttggtgattgtggcgaagaacctatggacagcgcgagtggcgcgggcacattctgtgccagtagcagcaccatcagcaacacaaccagctcatccaacatggtggagaagtgcgagccgagcacggtggcggacgaggcgggcgaaccgatgccggcgaacattgccagcagcaacagtgggaacaacaccaacaacaacaacgccatgatggagtgcaacagcagtaacaagttggagatgggacagccaccaaatggatcaacaacaacagcaccaaaacagcacccatcaacaaggggaacacgttcgtttttgaataaaaaaattgaaaatgaaataaatg

SEQ ID NO: 36918 - DNA, 659 bp, Heterodera glycines
  unsure (1)..(659): unsure at all n locations
accaaattaatantttcgtggtatcattcaatagctttctttgttctctttcagaatataattttcttatatttttaacttaagtataaaagaagttataaagcattgaacaggctatgttttttgcaatggtaatgaatatataataataaacatttaaaattttaaagtctttaaaatgaaatttaaccaaaattaatttatatttcgataaccctaagaattctctatttatatttaaaattttagaaaatttcattgagtttcaaaaaagttctgaacaaaaaatgctgacttaagattttttgcaattttgtgaccataactttttttatacttaagttaaaaatataagaaaattatattctgaaagagaacaattaaagctattgaatgataccacgaaatattaatttggttgaatttgagccaagctattaatttaattattttacccattttttgttttcaaacccattggcagttttaacaaacgcgccagcacgaatggaatgcaattacaattaaaatgagaaataataaataataattcgatttattattaaaactattaattacaataatttataattaaaaaaatggagcaattcaattaagtaatttgtcaacagatttcgcgagaatggtctcacaaagca

SEQ ID NO: 36919 - DNA, 989 bp, Heterodera glycines
atgtttcccactcccttctcccaggggtattattttgtaaagtcttttttccccaataaacttgtcaaaccccatttttcgcaccgtgaatgttatttttattgaattctgagccgttttgagtagattagactagaaaaaattgaaaattttgaaatcatgtttcccactcccttctcccaggggtattattttgtaaagtctttttttccccaataaacttttcataccccatttttcgcaccgtgaatgttatttttattgaattctgaaccgttttgagtagattagactagaaaaaattgaaaattttgaaatcatgtttcccactcccttctcccaggggtattattttgtaaagtctttttttccccaataaacttttcaaaccccatttttcgcaccgtgaatgttatttttattgaattctgaaccgttttgagtagattagactagaaaaaattgaaaattttgaaatcatgtttcccactcccttctcccaggggtattattttgtaaagtctttttttcaaaataaacttttcaaaccccatttttcgcaccgtgaatgttatttttattgaattctgaaccggtttgagtagattagactagaaaaaattgaaaattttgaaatcatgtttcccactcccttctcccaggggtattattttgtaaagtctttttttccccaataaacttgtcaaaccccatttttcgcaccgtgaatgttatttttattgaattctgaaccgttttgagtagattagactaaaaaaatatgagtgatcaaactttcactaaaaagttaagcctaaactttttcccaaagttaaaaagcaattaaaattttattcacctccattattgatagaaaaagcatcagagtgcctaaactaacatgtaaataaaatttggtgcgtttcagaaccctttctgaaaaaatatttatgaattaattttgcaaataaataaaaacgaaagactca

SEQ ID NO: 36920 - DNA, 1218 bp, Heterodera glycines
gggtgggcaatggcgattctcatcgagcaaatcgaaacttgaaacgaaactgcataaaattatcaaaacgaaactcggaacccaaaaaggcctgaaattctcgaaactttcgaacgctcgaacacatttttattattattttttttaattttggaattaatttattttgatttctttttattccattaaaaaatatcaaaaatttgatttttaatatcggatttaaattagggtaggagccagaaagaaggggcgggggaggagggggcgaatcgcgctcaaaccggggaacggggatgaaatattctatcttataaaagaaatattttattataaattttactcctctttatattttcatttactaattaattgtgatgcgccattttatttttattttttttgcattaaaaattttcaaataaaaatcttttcattgaattaagctgtcgattggagctgtaagtgttcagcttcgcttcgaattctttctcgatcgcaaaatgaagaacgcgagaatttcactcggagattcgataagcaaatttttaatccaatttcgaacatttggggcttcaattcgttcatcactttcaaggcaattagttataaaacaattacaaatggtaaaaattaattaaggaattgatggacacgcgaaacggactgtacaataagaaaaatacagtaaccctgggcattcaatttactgtggaaggcgaagacggaggtgaacaacaagcgatggaagccgactgaagaagcatttcgaaacacaaagcttgaagccggacactatcagtaccaaaataaattccaaaattttcgtcagcaatttgctaacaatttgctcctcttttttaaaattggacattcattggtgatgcttcaccacatccgtgccgaaggaaagaaaaataaatatttattgaatttaaaagatttttctcgaatgcaaaatttaaaggttttaagtagagtagagcgggaccgagaattttgggcaaaaccgggaccgggacttgccgggacctgagaagccgagaccgggacctcgatttttcttcgggaccgggaaccgggaccaaccgggaaattttaaaaattcaaaaaattcaaattttaatttatttcaagtgaaaataatacaaaattaaattttatattttttttatttaataaaatccaaaagttaaagctaaattaaattaaagaaaa

SEQ ID NO: 36921 - DNA, 777 bp, Heterodera glycines
aagtgcgctaaaaatgatcaaatgattatcaatttttattttcttaattccaaaatgaattcgaacgcaaaaaattaatcataatacatgtggtaaaaatgcattaaaaataaaaaattcttgaatttgcttctgaattttttaattttaaatagaaaattactttttcgaaattttgcacaaataagaggcgaagaaattcaacgaaatttttattaggattttgatttaaaatgttgagaggtttaacaaatttgtacactgaatgttggatcgtcaacaccaatgagaaatgactaacagaaaagagggagaaaagggcgttggcttaggaaaatagcttataataaaggagagacgagcagacgatgagtgagagaaaaatagtggtaaaaatggtcaactgctgcattggcagagtcagagaggggtcacaaagagttcgcacagcatcgaatatttccttcattttgggcgtcattcttccccactgcacttctttcttcggtttaattacccaagtttgaggtacttggcgtgtcctgcccataatatctgtggcatggaataaattttggaactgcgctgcctaacggcggtgcttaaagtgcgctaaaaatgatcaaatgattatcaatttttatttttcttaattccaaaatgaattcgaaacgcaaaaatttaatcataattcatgtggtaaaaaatgcatttaaaaataaaaaaattcttgaatttgcttctgaattttttaattttaaatagaaaattactttt

SEQ ID NO: 36922 - DNA, 966 bp, Heterodera glycines
gttctgctcccgctgctgccattccaatctcgaatcgcctttgacaatttggattgcttcctggagtcccctctccatggccaaaagtcgcgccgcttggtaccctgcctccccttcggtaaggtcttggtcgatcacttctcgagcctccgcaattcgagcggcgagagtcccggatgctctctcgattctgtcccgcgctgtccgtaccgggatggatacactccgcaaattgcgtgatgggaagggtagcatcccttgctgatttgtcgccacgcctgtcgccatgttgcttcctctcgttgcttcgtttactctggcaactttttgttgctcttcgttcgttgaagcgacgggaccatccccgtcctgcacattttcgtcgtgctgtgcgccgttgcgatggccctcattcgctaggtccatgttgctttcgctcccgtcctcgaactcgaatcgttgcatttttcgtttccgcctgctctgttcgtcgacagaaatgtttcgctggcgaccccctgctaacggcaccagtttgccgtgagcttctctaattcgcagtctgggctttggctgaccgatcgatttgtcgttgcagatgccccctgctaacggcaccagtttgtcgccaatcttttactctggcggggtttggccctgtgcggcttggcccagctgaggcgggattggtccccgctcctcttcaccgctctcgtcccttactgctctgctttctccgcttgctttgccgtaaagggaattgcgccctttttgccgttcgttttgatgggtctgatgctgctgaccgatccgatcagcgccaaagggggacgagaatgggagggggaggggtgacaaagttggactggtgcttgagggaattgtgcagcgatttgctgcttgcttaacggcaccaccgacaaggtttggagaagggcttgtcggacccctttgacttgccgaaca

SEQ ID NO: 36923 - DNA, 981 bp, Heterodera glycines
attttgaacgaaatagtgcacaaaagggagggatgcttagacgaaaagaggaatttttagaaaagagcgcaccccatctgatattcccatttttccgttccacaactggccaaaggcgactgtgctcattgacacgtagttgtccaataaggtacttggactttccacagtaaaatgtggtacaaaattttggaactgtcccgcctcacggcggggcttaaaagcattgtacagcataattaaaagctaaaataattttcgtatatttttcacaatttatttcaaaagacaaaaaaaaatgattcaattttgaaacgaaatagtgcacaaaagggagggatggttagacgaaaagaggaatttttagaaaagagcgcaccccatctgatatttccattttccgttccacaactggccaaaggcgactgtgctcattgacacgtagttgtccaataaggtacttggactttccacagtaaaatgtggtacaaagttttggaactgtcccgcctcacggcggggcttaaaagcattgtacagcataattaaaagctaaaataattttcgtatatttttcacaatttatttcaaaagacaaaaaaaaatgattcaattttgaaacgaaatagtgcacaaaagggagggatggttagacgaaaagaggaatttttagaaaagagcgcaccccatctgatatttccattttccgttccacaacaggccaaaggcgactgtgctcattgacacgtagttgtccaataaggtacttggactttccacagtaaaatgtggtacaaaattttggaactgtcccgcctcacggcggggcttaaaagcattgtacagcgtaattaaaagctaaaataattttcgtatatttttcacaatttatttcaaaaagccaaaaagtccggaaccaatttaaaaactaaaatagtgcacaaaaggggagccgccgcacggcggggcttaaaagcattg

SEQ ID NO: 36924 - DNA, 1185 bp, Heterodera glycines
aaaagaaatggaaataaaagtgaacggatggaaaataatgtgaatgatatagagataggcaaagttggagaaatagcagaagaagaagaagaggaagaagaagaaaaagaagaagaggaagaagaagaggaagaagaagaggaagaagaagaaaaagaagaagaggaagaagaagaaaaagaagaagaggaagaagaagaggaagaagaagaggaagaagaagaaaaagaagaagaggaagaagaagaggaagaagaagaaaaagaagaagaggaagaagaagaaaaagaagaagaaaaagcgaaagaggaaaaaacggaagtaaaaccaaaatggaaaatttaaaaaaaaattaaattaaattttaattttaagctaccaaataaaaatgtgaagaaaaattattcagaagaaaaaaagcaaaaactcgtgaaaaaactattgaagctaaaagaaaagttaaaaggaaaaattccacagcaaaaaattgataaagcatttgcgaataaagtgggaagagatttcgcaacaattcgcaaatggaagcgcgaatttggactaacaggtggctaattatgcaacgataatgtaattgatacaaaaataactaatattcagaaaaaagacgggaatattcgactaaagaaaaaggggaaattgttgagaaatttgcccgattaaagaaagcatttgccaatgaaaaatgtgaggaaaaaaagacggcacgagaaattgactcaaaaattgaaaaaataattggctttggcattgcgacaatttatttgtggaaaagggaattggccttaaccggtaataaagcagcaaaggaggggaggaaatatttgacaaattattgtaatattattccattaattaggccaataattatatcaaaataatacgaaaaatttaatttcagaaaaatgtccacgtaaaaaatattcgtcagaagacaaaatgaaaattgtgcagcgatacgacgaaatgaaggcagaaacgccgtacctccgcttgaaggacatcgccaaaatgttggaagtgccggagagaactctcatagcaatgagaagggaactaagcacagagcaaagcccaaaagcatcgagtaattaaagataaaagggcaattaagacgctaattaataaatgacagaaacgaagtcagtttattggaattggcatcag

SEQ ID NO: 36925 - DNA, 830 bp, Heterodera glycines
tttttcatctccctgctgaaaaagggtcaaagcgacatctttccgccatttatcccaaaaaatgatatagccatttaattgctcatcggttggttcttggttcgcatatgtatccatatccatccctcatctcccccgccccaggctatgtttgatcggatcactgacaccgccacacatttttctttctgtgtgggtgctgaacaatcgaaaaaacgaggctagatgaagcattaccctgcaattacaacaaatgatgacaacacgactgaaactttactatggtggagttgttgatccatctttgacaaattttatgagataaagtaaacagtgctttaaatcttctaataggttagtgcttctacaatactcgattcacaattatttaattaggacgtaacaaaatattttcaataaaattatttccagttgtaaaaattaattttttgcttttaatatttattacgtgggaatgtcatttttaggcgaatgcctaaaatttctttgcatagataagtacaaaaaatgacgtttttcacttggtagaggaccagattcgtgctaagcgcctcggattatccaggaaaatatctttttagcaatttatttaaaaaaaattcgggaccaatgatctttatcattgccctttttgctttgcagccaattttcagtattttggaaaattccatatacaataaaaatgaaaaaaaaattgttttttttcatccgaatcagacatagcccaggggaaaaacggcgggtgattttctcgggccaatcgaacagtccgtagctgccgttggatgttgtagaagaaaagccaacct

SEQ ID NO: 36926 - DNA, 1513 bp, Heterodera glycines
agttattgtataaaaaccaggtattgtcaattcattggactcataaagtgcactagtgccgaattttcaatggaaaagcgagttgcaaacttttgccgcacactctgtaggaaaataggaataaagtgatcaccactgatcaatcttgatttatcatcacaggctttcggtttcggttacggtaacagtgtgaccatgaaatacgagacgctttcgctcaattcattttgcatttataacacaaaaattaaaagaaattgaattgggcgaaaacgaattgatggagcagaactcaattagaggttggaaaatagtgtcggacgcttcgtaaaagtgccacaattggtcgaccataatgtccgacccagcagaaatttaaattcttggtatcattcgaaaagttctctatgagccttggaactacaagaaactttccttaatttcaacaaaaaccaaattgggtccaacatggagttgacctggattttctggacaaaaatccaggttgccgaaaaaatatctcgatgtcaagttcggacttatgcccatttggcggatttacgaaccgtccctggcaccctgcgtcgccctcacacaattgggagtaatggcgaattcaaaaatcccaaaaatttgtttcggtatttcttccacttttgctcgtccgtttcttcttccatttcgaccttctccttctccgcattttccttcgtatttttgaacattaagctcattttcacctcaaaaagtttccgaattttcacttccgaatttttctgaaaattattttgaaaatatttcaactgtttttcgttcagcaaaattggcttcgtttccaattgggaaaagcctttcaatttgtaactttcagtccgtttgaaattctcgtcaaaataaaacattgaaatgcgaattaaatgttcgatttcgtcaagcacgggttccagcaattcgtcgtattgaaattttggcttaaccgcgggcatttgttggcttacggttttgtcactggctgttcaattttaaaaaagaaaaataatttttttctatatatatatatatatatatatatagtgatcattattgatttaatgatttaatctcactgctggtgagaaaatacggtagaggaaaatgcatgagagatcgaaagagagttttactatagtaaaattttctgaaaacttttaattgttaattggtttgtgaaggaacctacctgatttccaattacagtatacaattttcatatgaatttttctattcatcaaataacggaattaatgacttcagaatcagtacaaattacaaccctttatactaggactgagactccgaggtcagaattgggaaaagtcggagttggggtttgacggggtcagcaagttaggggccgggggcggggttgaccaattagtcggtaccggtgcttagagagtattttttctttgtcccataaagccaaactttccccccacgtatttatgtacgtggagaaatagaaaaattgaaa

SEQ ID NO: 36927 - DNA, 949 bp, Heterodera glycines
  unsure (1)..(949): unsure at all n locations
ggcgctgtgattgtctcggacgaaaaagctttacagctttacagtcctcatgacccaccacccaccttcctctgatgaatcgtcaatgataactttgcgatgacggcctgcaatctcctgatcatttctcgggacggtcttctgtcttttggcagcaactaaaatatttagtttaaaaaattgtctgggagagaaaccatccccataccacttgctagggggatggatcacatctaaagggatggcagccatcctttttgattatactttttccttaccagttccactgactgaagtctttttcttggtttgcccaactgctggtctacgacgtcgcacgcttttaagcgcacgcagccgcgtaattgcgtcggtctgttgtcgaaggcgcgcagtaatttggtcatacatccggtcattcttctccttcaatgctctaactttcgcatcgagctcaagagcggtcaatccgcgcgttaactcacgcacgtcatcagcggtgatgacgccaccctttaaaacacttgtcgttattttaatgaaacgaaaagggatattagggctccatccctttaccaatgcccatagggatgggttccatccctttaccaaagaccataaagatgatacccatttcttgtcttttctatgaggatagataaaacaacctgtgcttcgaattcttgcaccggatccaagtagataggctgctgcagttcctccggatcggctgcagtctcccgtcgcataagatcctgagccaccgcatgtctcaccaatgcgctgtccatttgatacgttaacagcttcacatcngggaggtttgtcgatgtnggcgtgggtcgtcttcattgatggcgatgtaacggccaaggcgagcattgtttgccgcatcacgccttgcagggcatgtgctctgcagcaatccctggcgccactttttcctgat

SEQ ID NO: 36928 - DNA, 987 bp, Heterodera glycines
  unsure (1)..(987): unsure at all n locations
ttacatttttggatatanaagaaattgaaatanttgagaatctcacaaaagtgatcatgaaaattgtaaattggagattattgggacttatcagctcggtcctccgcaaacactgattcagtttatatttagaggataaggagttgaaatggtggaattccaaaaaggtgaccaagaaaattgtaatcgaagattattggcgattatcagctcggtcattccgcaaacactgattcagtttatatttcgcgaagaatgagctgtaattttgcgaattagacaaaaatgatcataaagtaacaaatgagagaatttcacattctgctaattaggctttaaatataaactgtttaagtgttgcagacggatcaggttgataagcgccaataacctcagatttactattttcgcgaccccactttttgaattctgacattttcagctcattacgctctaaatataaacagcatcagtgttccggaaggatcgatttgaaatcgccaataacccccaaattacaatttcctactgtaaacttatacagattacatttggatataagaaattgaaatattgagaatatcacaaaagtgatcatgaaaattgtaaattggagattattgggacttatcagctcggtcctccgcaaacactgattcagtttatatttagaggataaggagttgaaatggtggaattccaaaaaggtgaccaagaaaattgtaatcgaagattattggcgattatcagctcggtcattccgcaaacactgattcagtttatatttcgcgaagaatgagctgtaattttgcgaattagacaaaaatgatcataaagtaacaaatgagagaatttcacattctgctaattaggcttaaatataaactgtttaagtgttgcagacggatcaggttgataagcgccaataacctcaganttactattttcgcaccccanctttttgaattctgacattttcagctcatt

SEQ ID NO: 36929 - DNA, 1109 bp, Heterodera glycines
  unsure (1)..(1109): unsure at all n locations
caaagaaaaaatttattttttaaaacctaatagagtcgtgnaagagattttgaccttagaataattaataaaattttgttttaaatntaaaaaatgtgtaacgctttatcaacaattttccccaagaaatgtgtgtctgatcttttctatatttttttttggcctatcaaattttcaaaaattttcacatcagaatttcttccaattcttcttccttcatttctttcaatgattcggcagaccctcaaaaaattgtgcttccgtgaaaaaattttgggacttcaaaaaatctttgatttgttttttggccttaagaattaaaatttaaaatagttaaaaaacattttacgactttttgcttttgtcgtggtgtgatgtcttcagcaaacataattttatgtggttctgttttgatgtctatcttttcaatcactaaatcacatttaaacatattttataagttaattaatgctaatttgtctaatgtattttttaaattattaaatataaagttttttaaataaattaattacaaatataaactttttatttattacttaattatcgctaatgtattttgaattattaaatttaatgttttttaaataaattaattttaaaaatatttattttttaaattactacttaattaacattaattgtattttttgaattattaaatataaagtttttaaataaattaattaaaaaacacaaataattatttaaatttttaaatgtatccgtacagtttttgtatttcttgtcacgtaattgttcgtgcatttcttctgcaatatatactggcacagaatctttgccggacaatgcatgaacaacgcacatgatcgtagaatgttcgataaagtctgccaccaattcttgagaataaatatttcccgatggttcccaactttcctcgtccgggtaatctaaaaaacaaattcaagtacaacagtcctggaaatcagattgccgctgtgatttagggcactttttttatttaaatttttttttatttttgccttgatctattaagctttatcgtgtttaagggttcgacatggacctggatccaggtctggatttttcctggatccaggcccagg

SEQ ID NO: 36930 - DNA, 1371 bp, Heterodera glycines
  unsure (1)..(1371): unsure at all n locations
gcacgacttggcaactgactgtacgttttttcattctcgaatctttgtttatgaattcctcgtgatcaaattaacacttcaatntagtgctttcacagagcgccgctgggccattgtcgcaaaatgctctgtccttaaatcagcagcaacgttccaaaggcaatattttttctcgttgcccgaaaatcatactgttaaaacattatgtttgtagatccgttttatggccttcattctgcgctgaatgaggaggagcctcaaattcggctggaaaaatcgaacattgtccttcttgggccttcgggagttggtcggtttttcttttttttcattctattgagtttattcgtgttgttatattattaaggaaaaacatttgtcacccaagtcttggccaggatactcgacgtacctatcgctttgtgcgattggtaatattcaaataaacattttaaatcatttaaattacttcttccatttgctatagcacctcaatgacccaagcgggctatgtgggcgaagacgtagagtcagtgctgcaaaaattgctgcaaaatgcgcaagggaacgtggaaaaggcgcaacgtggcatcgtatttttggacgaaattgacaaaattgctgccactcgtgaggcgatcagtcacgcgtacagagacgtgagcggagagggcgtccaacacgctttgctaaaaatggtcgaaggtcagcaaaacattaaaaatccaaaatatcagtaacaaaattttcaaattaaataattataaaggtatagaattttactgctttattcgcttctttgttacaatactaaatttctaggcactgtcgtaaatgtgaagacaggacggaaaggacagcaggtaattcgagtgccactttcttgttaatggaaaatgtttcattcggaggaatctgtgccgatggacaccactgacattctcttcatcgcaagcggagcattcaatggacttgagcgggtggtcagccgacggttggacaaacggacagttggatttggttggaacatcttcttaatctttgtgtagaaaacgaaggattaaaggtgctgcattgctggaaaatagcataacggacgacgacaaagaacagcaggtgatcaaccagaagcgggacaaattattcctccaagcagaccaaggcgatatgatcaaatttggcatgatcccagaattggtaacctttttgaagaatccaaatttaacggaactgcatctctttaggtcggccgtttccctgtactcgttcctttccacagctttgacaagcaaatgctcatccgtgtgctgactgagcccaaaaactcattacttgcccaaaatgaaatttcaattctcaatgngataacgt

SEQ ID NO: 36931 - DNA, 1167 bp, Heterodera glycines
acctccctccctaatcactcttcattcatcacattatgcaatttccctttatcccccctttatgaatccgttccaccgcctaaaattgagtaatttaacggatgagatcaacacggtgaagaggggacaatgctctttgttgttgtcctggcgagagtgaagaatggacccaactaatccgggaattattcaatcagttgcagagaatgcatccgccatttcctttcaaatcccccaatgtttccacaacagtcatttcctctccctgtcgagacgagaacatttgatgtcaccgactctgtttctgattttttttaagtacttgtacatttgtttattcaatgtttttcatttaaacacggcgaaaataataatttttacgtttttcgccaaattgttaggaaaatttgttaacctcctttttgactgaaaaaaattttatgttttaaagtcctgaaaatgtgtgtttttggggttttttggaatcagttgaggtttttccttatttctacgatttgtccttgcttggagggagggttttagccccataatctgtgaacaaacgcattaaattttcaaaaatcttctcaacggcgcttccggcccaaatacttaattttaagattaaaataaggactgaaataaacaaatacatattataagaaaatgaataaatttataaaaccaacttttaactaaaaaaattagagctgcctacctatttttaaaatttttaagtcgattcatagggaatgcgaaacttcattagccgaattaccaaattctgctctcacagggattttgatccaatcataaaatattggttacacattatatacacaccgagtcaaaaaacgagacatgtgtcaataaagagagagtgcagagaaaaaaacatctctctttttggcgtactatttctttatctctgttaatagagaaaaaccgaatttacttctctctaagaaaattttttttacgttaacagattttctttaaattttgcatgtcgatagagaaaaaaattacgaacaaaattggagggtttttggaagcaaaaagtgggttagctaaaaagttattcgagaaacaaaatttcgaaccctcatatctttttcctaatcaatccaagtgcttagcatttgcttaggaaaagcttctactcat

SEQ ID NO: 36932 - DNA, 873 bp, Heterodera glycines
gcttcgtaaccgccataatgtggccattgttttggcaactggtgaccgtcggttggcattttcttcttccgaattggaaatcgtttgtggcactttcaacggccttcaacgatggaaatcattaacgagtgcaaaacttgagcctcttcatattggatatgcacatgcgccgtgtcgattggcaatttatcgcatcgtttgccaccctttccccttcaaaaatctgtccccgcggattgggctgaaaatcgaccaaagtgacccgattaaagttggctttccgatcagcgaccgattgattgtttggctttcagatcaaagtgacttttgctgatcagactccccgtcagattgtcgtctgtccgggacgcgtcttcctttttgagcaggtcctctttgtttgctcttcccaagtcagctaattgaatgtctcttccgttccgcagtggcatttgctgctcacttcgcttgaactgcatcgtcttcatcgtgttgacctcgtccttgtccacgtcctttccgtccatccctcagtcttttcgcttcttcgtttgtacgaaaaggagggtttggtttgggttcggcccagcctcaaattgccctccaccgaaagtggcaattcgccgacattcgatgcaaattcggagacattgtggaataatcagttggtcaatttccacgattgcctttacaccttcaaggaaagggtcgttcgtgcatttgatcatcaatcttccacttcagcttctatgttcagtaccgcgttcattgcttttcccgattgggatgaccttcttctcaccccctccccatcctcggttctctcttccacctcctttccttcttacgttccctcttcctctgccaccacct

SEQ ID NO: 36933 - DNA, 976 bp, Heterodera glycines
  unsure (1)..(976): unsure at all n locations
attacttttcttttcaatatttttcccaactgatcttatagcctcccccctcccttcccaaaaacagggccggggcgcttaaaagtgggggctctatcttgaaacactagttgatttatatgtatccaaaattgctgaatgaatgcatatcattatttctaattagcgaaaacgtttcaaaaaaatccaaatttaaattttgttgcttttgtcccaccaatttgaatgctttttcttcacttcgccgctttgtttaccatcgcttcgttttccgctcgccgcctgttttccaactcatttagtatatttattttctgtttgttcttgcgcccccgcgacgacactttcgagaaacaaatgcccccgggggcggcgattcgccggcgggcaaaaggcctccgccgccccccgggggccaaaagtgtaaagcgaaaaattaaaaaacacggagccattcaatttttggtcggctctttccggcttttctccaatttcacatatcacatcatcactcacaacaacattctcccatttatttatgcatttgaaaacattcatacttacgcttggtaaacaaatttttaattactaaaatttaaaaaaccgaagggttaattttcaaatttttaattttcccccgctttctggctttctttacttcaatttgttttaatatataaattttttattttaaaaatcttggaaatcccattattacctgggcttccaaatttacttactttagacaaattatttttctgcattggattaacatgaaattactcctggtaaataattttgttattaattatattttaaaattatatttcaactttgaaatttgatacctcttttttggtcttanatataaaaaaaatattattttatttcttggtttttattttctaagtgttttatttttttatattataaaaaagtgaggaaaacttcttcacttaaaaagtttcttttttaa

SEQ ID NO: 36934 - DNA, 1047 bp, Heterodera glycines
aaaatgattttcgggcctgttgagttttatggggggtatggtcggtccaaaaaaatgggctatctcttttttttgtcaattcgggtattagaaatctctttggaaacaatgacagtggctgtcatcagttgttatgctctaaaaatgattttcgggccgtttgagtatatgtgaggtatggacggtccaaaaaaatggctatctctttttttggcaatctggtaatagaaatctctttggaaacaatgacagtggctgtcatcagttgttatgctctaaaaatgattttcgggccgtttgagtatatgtgaggtatggacggtccaaaaaaatggctatctctttttttggcaatctggtaatagaaatctctttggaaacaatgacagtggctgtcatcagttgttatgctctaaaaatgattttcgggccgtttgagtatatgtgaggtatggacggtccaaaaaaatggctatctctttttttggcaatctggtaatagaaatctctttggaaacaatgacagtggctgtcatcagttgttatgctctaaaaatgattttcgggccgtttgagtatatgtgaggtatggacggtccaaaaaaatggctatctctttttttggcaatctggtaatagaaatctctttggaaacaatgacagtggctgtcatcagttgttatgctctaaaaatgattttcgggccgtttgagtatatgtgaggtatgggcggtccaaaaaaatggctatctctttttttggcaatctggtaatagaaatctctttggaaacaatgacagtggctgtcatcagttgttatgctctaaaaatgattttcgggccgtttgagtatatgtggggtatggtcggtccaaaaaaatggctatctctttttttggcaatctggtaatagaaatctctttggaaacatgacagtggctgtcatcgggcgaaggcccaccacgaggccgcgaagaggccgagtgagtttcgggccgtttgagtatatgtgagggtatggacggtccaaaaaatggctatctcttt

SEQ ID NO: 36935 - DNA, 885 bp, Heterodera glycines
  unsure (1)..(885): unsure at all n locations
tttatcttcgattgcactatgaaaagataaggtttaacaatttaataaaatcatatcatgtacctaaatctaatgaattattatttattattaattaaaaattatattaaataaaatgtttttatagcttttaagaagtaacgaattgtctattttactggtaattttgtaatatttgatttaaaattttcacgatagtattttattaaaaattcctaaaattttctagtatgatgagaagatttcgtcgatttcttcagggtctcaatttcatcattattatttgacaaattataataatattgttttatttattatcataaaataggcaattttagttagcaatcataaaagggtttttttaattttcataatttttgtttttttaattattatgacgcatttaatttatttttgcgaatgttagaaattaaacataaatatgcaataaatataaatatcctgtaggtttataaaaaaatatttttgtatgatttttttttgagtatcttatgtatcaaaatgattgaaaaattaaaaataaagtttttttttataaataattttttgataatttactataaatgaaattacaattacaaaattttcaatatatattatccaaaattaataataaaattttttgtaaaaagaactagttagaaaacctatttaaaataaaattatattactatatctaaactagagtgcagcgggaccgggaacgggcaaaaccgggacagcgacttgccgggacctgagaagccgggaccgggacagggacctcgcttttcgtccggcaccgggaaccgggacaaacccgggaatttttanaaattcaaaaaaattcanatntttatttatttcaagtgaaaataatacaaa

SEQ ID NO: 36936 - DNA, 1408 bp, Heterodera glycines
  unsure (1)..(1408): unsure at all n locations
cccccccctcatcgtcgccttttcccctcactttttcacccccaatttcgccccaggggtcgttttacgggtgctgccttaaggtacaaagtgcgattttttcaactgcacccctcgggaaaaagataaggggaaaagacagaaacaaaacggaaaaagggacgacaaacggcgggcggaagagaaacgaaaagagcgaaaaagtgggggagagacaaacgacgacgacagatgctaaccccccccncctcgtttcctcatcaattttcaattttgagattggggtgcagcgaaagagtgctcccggcctcggctggggggaaagaacgattttgggagagagatgaaagtacagggaacagcgccaaaggacggaggacggggaaattgagggggggggggagatttgtcacggagattatcatttattatgcgaggagaacgggacggggaagccgagggggggggggaatgggttggcgcggcgtttctccttttttggattattgagccgggggcgaggggagatgcaagaggatgggggatcaattgggttttcataagccaatatgccagctgctgctcactaatttataagcggatattcaaacgcaaaatctatggcattaaatctaagtccaaaaccatttaattctaaaaatggccgcaaaagttaaattataatgcccaaattataatgagtatgctttttccttattatttgtacaatgtctgcgcatatttctttttgggctgtccgtcagactgattgtgagccgatagctttttaaatgagtaaatggcaatgtttaaaaggatgggcaagggattaaaagggaattgacattaattaccaaccgtagattttggtcctcctcacttaccgtaccttttcaatattattaataaattgtcttgactttttttttcatataatttaatggtttttttgtgtgacaaaaaaatgcaattaatttttcttcggcgtttaaaatattccaaatttaataggatcgaataaaaaaaaaatttgttctgcagcatttgtgggaaaacaaaatttatcattcattcattcatttcggaaaatcacagtcactgacaaatgaaggtttttttatacaacaaatacatatatatgtggatgggggggagggaaagtctcgtgactttttgcccatttttaaatggcctcgtgcctcgagaagggatggtagagagcggcagagccttggagttttaaatttttttttgaaatcttttgaataaattcagggttcaatgatcgatgttaaaatcgtaaataatacaaatagataattattaactaatgggtgcatacgcaaacaagtggcaaaaatgggggggaaggggtaatttgttgtgtgcacagcggccgaaagtgcca

SEQ ID NO: 36937 - DNA, 985 bp, Heterodera glycines
  unsure (1)..(985): unsure at all n locations
gcatantcattttttaaaaattantcggatttaaaaaacatataaacaaaatcagatttaagaaatagctcaatggctaattcaaattttatggattttttgacttatccaaatgttttttggaaataaattcaatttttttttaactttaaggacaaagagcttggctttggacaatggtttcatcatttttcggcttttactatttttggttggtgaagccagctgttttttcgccatcctacggcaattggttcctgaacccgtaccaggactacagtaacattagcgtcgatactcggaaagtaagaaattctcaaattttttttatatattttaacttatttttctaaggagacatgagaattaaatataagaatatgagatttaatatgtataggtttcggtttttatagctaaaaaccgacgaaaatgagaaaaaatgagctaaaaatgagaaattattttcatagcttactccaaattattacaaattaacaaccaaccattttgggatattttttggaaatttaaaatgtcgttctttgcaaggtagatttctatggaaaatatgatcatagtcaccaaactcaaaattgcttaaaaacgttcagaatcgatgtaaaaaggttagaaatgggtcggaaaaatagaattaggggcgcgcttgcctttttcaggctgaaaaagttgccggaattggagtgccaaacttagctgggactcaagtgaccgcactataaaaagcactaaaaagacattttaaataattttctagggtaatttgtggcggtgatcacgaatatgacctttattttgcaaaattctgaaccccgaacctcaattcgaacaaaatttaaaatttataaattaaaagaaatacaatttttaggggattttaaaagaacgtcaaatataaaagattgaatttagcttattgcgctaaaaaaccgccgcacactcgactacggcggccagtatgtgg

SEQ ID NO: 36938 - DNA, 907 bp, Heterodera glycines
  unsure (1)..(907): unsure at all n locations
taaattaaattatttgcaattataaacatgtaattagcatactttaatccggtgatcggagaccaaacgttgcaaaatgttgaaggcgtaccgcttgctgcacagcttacaccgtcccgagtccgccttgcgccgcgctttcgccaacaaatcggcagtgacgagcccacggaccatgaccaaatgccgttccaaacctaataatgtgtagatgatgtacaattgtaatcaagggagtaggacatgatggacaattatagatttaaatcgcggagcaagtcgtttaccgccctatttttttaaatttttaaaacagaaaattgaaagaaaaggatttttttaaaatttccagcatattctaaaacgataaaattttttattattttttaatttttggggagaaacgacagggagaaaaagaagttcatccttcagcagcagcaccttcgtatgtccagaaacggtctctgcagcgtgagcacgccaacggtgcaccgctggccatttccgcgttgttcttccccaacagttgacgatgtgcggcctgcaaatgcacccggtactgctcgcggtcggtcaactgtgccaagtcgcaaatttcgcacacataatggtgttggtgcgggtggctggtcggagcagcagcaccaccaccacncaccaacggcggtggcggccgagtgcgcagcggcggcgngcggcggatgttgcctttagctaaaatgaattacaattttttaatggcattaattacattcagaaataattgtaannttggggttgacatgcatagcatacaaataacataanatatcgaatgggcccgtaattcagtgttggtaggatatgagtctgngatgtgatacgaatccgcaactttttttttccttttttatttggatgcaaa

SEQ ID NO: 36939 - DNA, 1091 bp, Heterodera glycines
ttgaaaattcatgcaacaaaaagccttaagtaaaagtaatccatccattatatgttaacccttggaataatcaaattcaccaattatttattcacattattttaaaaatttgttttattttatgtaaccctaactttaaaatacgcataataaattccctccgtctcacgagcctaaccatcggagatattcatttttatatttggggggggggggaaggggcattattcgcggcgtacgccgggctaaaaaatggaataattggccaaagcaatgacaatttttttattgcatagcaaaaattttaaaaatcggaaaaataaattcagactaattcgctggggggaaaattttttcagtttcattaatcacacaattcgagaagatttttttaatttacaaaaaaaagaataggaatatagacaacaaaaaaggttgctgaaatctcgtgggattagtcagttgtgcccatttcggtcggcacacgtccggcaacagtaacgaccgtaacgcagcgtggcacagagtccgctcacagataccgtatggcacacatgcgggggcccattgtcgacggcgcatgcggcaaattgggggcctactgaggtgccgtagtggatgggattaggaaaatttttcaattccgaatgttgacaaaaatttcaatctcgagtatcgaaaaggaagcaccaaatcccaagtcttgactaattgtaagaaattttacaatccccaatcccgtcactcagaaaatttcagtcccgttaattaacaaatttaaaacccgactcgggttacccgagtaataagagttggaaaaatcccaatcaattattaagtcgggaaatttcaatcccgagtcaaaacttggaaaggcttccaatctggattctgaaaaccgagagtatcgagcaaccaatcactgttgatggcggatttcgatcggcttaccccgctgctccacaacacggacagtcactggatcggaaatgagagtgccaaatgagcatgcgtacgcgccagcatccgcagcggtaaccgtgcggaagcgcaattcgccaaccaccgccagccctccgtccgccgcctcc

SEQ ID NO: 36940 - DNA, 1263 bp, Heterodera glycines
  unsure (1)..(1263): unsure at all n locations
tcacttaatggaattgggcaanttgagtgatcanctttaattgtggcaaaaattaaaatgcaacagatttatattcacataaattggctcagcttcaacaaaattaatacttcctactgatctcattcaatcctgtctaggtgctggtgacaggaattacgtggataaaaattctaattaccctaatttgtaaacaaaaattgatcaatattaagaaataaaaatgtctgtgcaattattatatgaaaaacatttttatgcaaatcgatgtttctcctcttttcttgagcaaaaaaataaatgttttattatataattttaattggtcaattaaaataataaatgctaataagataaacagatttgtataattcaactaccaaactaatcagtgtagcaagtgctgaaatataatgcatcaaaaattgggcgctagtttaaaagagtacttttttgaaatttttttgcacttttttggtctggtttttttttttgttttttttatacataatgatgaagacaaggggattttcgaagtcgctgatcacgaatatggcatccatttcgaccaactcgggattccggccccgaacttgaacaaaaaagtcgaaaatttgactttcggattttcgactttttgttaaatttgaaaaaaaaatagacaaaaaaagtgcaaaaaaaaaaagaataatttcaaaaaagtacattttaaactagagccaaaaattgcgtcaaatgccgaatcacggttaccccacattttcgtcccggacatttgcggcccggacatttgcgcgcccagctgaacgcagacaactgagaccacgacgaaagagaatacatcaaattcgacaaaaatgagaaaatcgccgaacgatacgacgcagcatcaaccaaacttcgggatttgcgagatctcgaagcaacactcagtgccgcagccaaactgcacagaggcagagccgacagggaagcaaaggcggatcaattggccaatccgcagcaacaaccgcccatgccaccagcaatggcagcaccaatgacaatgccaacattcacagcaccgctctaccaattccagccaattcaactggataaatttttcggccaaaagcgaaaatggcccgaattctacgaatccttcaaatcggcaatcggcagtcaatcaatcagtaaagcgcagaagctgaacttactccgcaatctactgggcggagaagcgcgagaaactctaccgggcttccggttggaagaagcaaacta

SEQ ID NO: 36941 - DNA, 1286 bp, Heterodera glycines
  unsure (1)..(1286): unsure at all n locations
aacaaaacggtgattgattaccctnttgcgcttcaaaagtgccaacccaaacgaataatggtgccgaaagatgaatcaactgcggagaatggatgtgatgcatgggcgggggtttttatttaaaagcttttatttttataaaaattatatattttttaaatgtattcattcaacttttgttttgtattttgcatttatttatttatattgtagataaaaattatatatatcgtagctctacgatcccagttcggcagttctggtgaatttaagagtgccaaaatatttttaaaattgtcaatcgcagaattaaactaaatttttatttgtggttaaatgcctcatttgaaatttcgtattttttttttgagaaaaagatatactcgaacaattttttagctttttcatttagtttcaacacattcttttttttggggtcttagcatatatttgagcttttaagaaatattaagtatcaaaaaatctctctttttaattgtttttaaattagaaaatggaggaaatcatttggcataagtaattgctaaaatattagagagaaagaaaaatgaataagtttggcaaatcaaaaaagaactcaaaaattagtgaagagaaataaaattacaaatgggaaaagcaattttgaagaattaatctgaattagaagcggatggaaatttaaaaattgccaatattttttatagaatgaaaaataaatttttaccgttattttgttttctttttgctgaaaaaaatgaaataatttctattctttttaataatatttcggctgtccaattcatcataaaaaatattaaacaaaaatcatttaatgaaatatttggaggaaattgagaaaaagaaaatttgtaagaagagaaaaaaattaggggagaaattattagagaaattgcgaaaaaatgatttttttttctcgattattcgctaattttcgaaaattttaaaatacagtgatattttttaatgcgtatttattttaaatattaaagttatgtttcgattttcatttactaaatacataatttggaaaaagtgcaaaaatcaagcattcatttttacacatgatttttaatctgattattagattatttaaatatgtagaagagaattaatttttgctaattttcaaacggtataaaatataaaaaatttttggggtgtccccagtcaccatgaaggagtgatttgatcaatttaatgcaaaaaaacattttaatcagctaaaaattatatgtgggcatttttagactttctaggcaaaa

SEQ ID NO: 36942 - DNA, 1104 bp, Heterodera glycines
ataagaaaatgagaagaagcgcccgcactggggaagtgccttttttctcttcaaatcgcacctgaccattcccttcactttgccatcaattgaaattgcccatatgtatggatgtgaaaagtttgaaaagatggttcccaacttttggacgggtggcggggggggggggggtaagtggaacttatcatcctcatcatcatcatcatctcatccgatcacctgccgaccaccctcaatctttccccccccccccccccgaaggcgtgcgatcgaatcactgactccgtttgcctctgatcacttcgcttcccatgggaagcgaatttgaggcttctttctgctgatgttgggatgtctttaatggcaattgtcagtgtgaaatgggaggagacacacacagaacaaatccattcgatttgaagtgagcgagcggataaatgtttcaattggaaatggaaagaggaaaagcatttccgagcaaaaaagtgatcagaaatatgttaaaagcatgttttaagttttcgggaaatgggaaaggaaaatgaaaggcaaaaaaaactgatgaaattcgatcgcgattgattgactttggcatttccccgctgtccttccagcaaactttgacaaccaacaccgatctgaaacagcaaaatgaagagttgaaaattgtggaagggatcacaaatttaaattaatcagaaaatgaaaatttgcctgaatttccaaaataaatattcaaataaaaaagagacaattaaaaatggaataaataatttttaccctttttaggctatgggaagatcgaacccgaaactatccaggtattttttattgcttatcaatatttggttttagtgttcaaaaaaaaactggcaataagaaggtaatacaaatttaaaaaaaatttttgtttaaactgattttttttgacttttgctgtaaaggctcgccttttcactgtcgtttggggctttttcggcgtccctttcactgtgatcattctcaccaacttgggcctttacatgcgccgttttgaacggcacattcggcgccattattgtcagaagaggcaaagggaacgcttcgcggagggaatcgacgatt

SEQ ID NO: 36943 - DNA, 1023 bp, Heterodera glycines
  unsure (1)..(1023): unsure at all n locations
ttttactgatttttgtgttttaaattttaaagtattaatgcaaatttccctacagaatatgtaacaaattatttttaacaaggtcttgcttaaggactaacaagcattacgaatcaaattattttcaacacatcgaaatacgaaaatcgtcttttttcgtcttacaaaatttttccaccggacgcccctgtccatctcgcaaaattttttgaaaaaacgcgccgcaaacaaagcgtttttagaggcaaaaaaaagttcgtcacttggctattaattgcaaaaattggcctttttagtgaaaatctgttaacaaatcagaaccaaattacanaaatttttcccggcggcgcctatcggcaccggcggaccctctctccttcgaccatttcccaagttatttggaaaaatctgccgcaaaaaattgttaaaaattgattttttgatcccgaatgtgctaaaattcatgagttgttaattttctccccaaaattgttaaaatcgttaatgggagaccaaaaatataatatttgatacatttttgatagaataaatgtaaaaataactgatttgaagtaattttgcaaaatgtcctgattttcgacgccaaaatctggttttttgggtccgatgtcctgattttgaaaaatttttgatcgcacccctgatttaggggcccgttgtgccaattccttaccagttgtggttgccatcatctgctgttgtttatgctgttcgtgttcactggaaggtgttttttcttcttgagttattctctgcctttgttgttgttgttgggtttctcctccgtttcctttgtcctttccttcctccttttcatgtttactgtttttggcatctccaaaaacggcgtcttctctccgtcttgctcttttcctccttgcgatccttccctttttcctgttcaccagcgtcggcgtcgtcgtccgactcgggcagtaaatggtcgatggatgaacgccggtggatgaggagccgttcggccaattcctcagcagataaatc

SEQ ID NO: 36944 - DNA, 1156 bp, Heterodera glycines
gaattgaaattgaaggaccaataaattatgcggtgaattgtttggtcaaaatttcgcaattttattttaattcaattgacgacgacctttattctgaatataaattaaacatacatttcaataattataataattttgaaccaaaattgttgaatgagcaaagattgacttatttaattaattttgaaaatgaattaccaaaagtgccaattaatgaaatgattttgcaattggcaattgacacagcgaatgaatggcaattaaatgaaattatggacgtaataattcgagaaatttttgatcaaaatttagaggaaatgtttaaaaaagcggaagaaaaggcaaaaaaggacaaaccatcgagagcatatacaataaataatgacaaacataacataattttatattcaaaattcgacgatcaaaatacatgggtatgatttaattaaattaaaataaaaaataaattattacccaattttagtttaatgatgctttgttttgaaaaaaatttacgaaagaaaaagattcgaaattgaatataattcgcaaatatgatggcacacttacgacaattcatttcttactgttttctagtccaaaagttttacctaaaaatgcgcttttttctaaatttagttaaaattataaaaaaaaatttcaaaactacgttttcggaaaaaccattattttggttttttgaattttcaacaatctttttcgttggttttacctcttttttttttactttgtctgaaaattctcttatatatttttttggataaatttagaaattatttgtgggaattaatcattttttcggtattatttttaattagtaccctaatttaaagtagataatgatttagaccaataaattgttttcatttactgaattctgaatttagattcgttaaaaaatcggaaaaatttttttctcttagtgttgatttttcatttttccaatttcattaaatttacacaaaattgtatcaaatccgtaacctacgaaatcttcgtttttctattttgtaatttttttacgaagttggatttagtttttattttataaattttatgaaattctatttcttgttttccaatttcgttaaatatctaagaaattgtatcatttttcgtgatttgcgaaattaaa

SEQ ID NO: 36945 - DNA, 1103 bp, Heterodera glycines
  unsure (1)..(1103): unsure at all n locations
ttaaaagaggtacaacagtgattagaagaggtgcaacagtgattagaagaaatacaacagtgattagaagagttacaacagtgattagaagaggtacaacaatgattagaagaggtggaacaatgattaaaagaggtacaacagtgattaaaggaggaacaaaagtgattaaaagaggtacaaaaatgattagaagaggtacaacaatgattagaagaggtacagcagtgatcagaagaggtacaacattattagaaggggtacaaatctgattaaaagaggtacaaaagtgatcagaagaggtacaacagtgattggaagaggtacaacagtgattaaaagaggtacaacagtgattaaaagaggtacaaaagtgatcagaagaggtacaacagtgattagaagaggtacaacagtgattaaaagacgtcataagtgattaaaagaggtacaaaagtgaattaaaagaggtacaacattgattagaagaggtacaacagtgattagaagaggtgcaacagtgattagaagaggtacaacagcgattagaagaggtacaacagtgattagaagaggtacaaaagtgattagaagaggtgcaacagagattagaagaggtacaacagggattagaagaggtacaaatttgatgaagaggtacaacagtgattagaagaggtacaacagagattagaagaggtacaacaatgattagaagaggtacaacagagattagaagaggtacaaatttgatgaagaggtacaacagtgattaaaagacgtcataagtgattaaaagaggtacaaatttgatgaagaggtacaacagtgattagaagaggtacaacagagattagaagaggtacaacaatgattagaagaggtacaacagagattagaagaggtacaaatttgatgaagaggtacaacagtgattagaagaggtacaaaagtgattagaagaggtgcaacagtgattagaagaggtacaacagagattagaagaggtacaacagggattagaagaggttncacagtgatcagaagagggttcacatattgaancaggancacattattcaaaattaataanataaggaaat

SEQ ID NO: 36946 - DNA, 715 bp, Heterodera glycines
atgattaaaggcattattatgctcagttcgccagcggatgagtcattttttgcccaactcgataaatatgatattccggtggtggtgattggcaaagttgaaggtcaatatgcccatgtttattctgtcgataccgataattttggcgacagcattgcgttgaccgatgcattaattgaaagtgggcatcaaaatattgcctgcctgcatgctccgcttgatgtccatgtttcggttgatcgcgttaatggttataagcagagcctggctgcgcataatattgcagtgcgtgatgaatggattgttgatggcggttatacccatgaaactgcattaaaagcagcacggcaattattaagccagtcaccgttgcctgaggcggtgtttgccactgacagcctgaaattaatgagcatttatcgtgcggcagcagagaaaaatattgctattccgcagcagttagcggtggtgggttatagcaatgaaacgctgtcatttattttaacgcctgcaccgggcggcatcgatgttccgacgcaggagttaggtcaacaaagctgcgagttattattccgcttaatttctggaaaaccgtcaccacagaatattaccgttgccacgcatatgacgctgaaataaataccagctaccttgcctgaatgccagatgcgatgctagcgcatcttatccggcctacatttatagatcggataaa

SEQ ID NO: 36947 - DNA, 389 bp, Heterodera glycines
cccaaatgtcgggatccccaaatgtcagatccccaaaagtcgggtccccaaatgtcgggatccctaagtgtcggatccccaaaaggcgggtccccaaatgtcgggatgcccaaatgtcgggatccccaaatgtcgggatccctaagtgtcggatccccaaaagtcgggtccccaaatgtcgggatccccaaatgtcgggatccctaagtgtcggatccccaaaaggcgggtccccaaatgtcgggtccccaagttgcaaatccccaaaagtcgggtagccgcagagaaaagcctagtactatcacgtcgttactctttttctttgtaatttctctcactttggcgtactatctccattttttaatagaaaaaacagcatttacttacta

SEQ ID NO: 36948 - DNA, 993 bp, Heterodera glycines
tcgttttggtttggctttatgataccgaataacattcggaaattatggaaacaaaattggagaattcgattaattttttgacttcaaattttttcccagttttgattgggttttaaaatagtagtttggttcagaatttttccctctacaaaaaaaaatttataatagaattttttattattaattcgaaatctttaatttattggacaaatccaagacttaaaattgggagaagcatggggctgtagctgaggaccaaaaatggggccccattggggaattttacatgatttctgaaaagtccctgaaatgtcgattttttctttctatagcttcttgtagagctcgagctgctctttccaatggtcttatcccggtctcgatccgtgcagaactcaaaaagttatgcagtgaaatgtgaaatattgttttcgccacaattgggagaagcatggggctgtagctgaggacccaaaatggggccccattggggaattaaacatgatttctgaaaagtccctgaaatgtcgattttttctttccatagcttcttgtagagctcgagctgctctttccaatggtcttatcccggtctcgatccgtgcagaactcaaaaagttatgaagtgaaatgtgaaatatgtttgcaccacaagggattttttctgaaacccatcggaaccaaaaatctagggtttggtataagcgttttagaaattgcggagaaaaaagcttcgatattgagaaaccaagtcaagtccagaaaagaatattttaaaacgaattcgttttggtttggcattatgataccgaataacattcggaaattatggaaacaaaattggagaaattcgaataattttttgacttcaaatttttcccagttttgattgggttttcaaatagtagtttggttcagaattttcccctctacaaaaaaaatttataatagaatattttattattaattcgaaatcgttaatttatttgacaa

SEQ ID NO: 36949 - DNA, 1217 bp, Heterodera glycines
  unsure (1)..(1217): unsure at all n locations
tccgaaagttattcggtatcataatgnccaaacaaacgaanaatcgtataaaatatttcctttctggactgactnnggtttctgatatcgaaagctgttttctacgctatttctaaaacggtttataccaaaaccccangatttttgaatccggttttcagaaaaaatgccttgtggtgaaaacaatatttcacatttcactccataactttgtgagttcggcacggatcgagaccgggataagaccattggaaagagcagctcgagctctacaagaaggtatggaaagaaaaaatagttatttctgggactttttcagaaatcagaattaattctccaatgtggcccaaattttaggcccccagccacagccccttgcttctcccagttttaagtcttggatttgtcaaataaattcaagacttcaaattaataatcaaaaattctcttaaaatttttttgaacccaattcaaaaaaggaaaaaaatttgcagtcaaaaaattattcgaatttctccaattttgtttccataatttccgaaagttattcggtatcataatgccaaaacaaaacgaaatcgttttaaaatattcctttctggacttgacttggtttcttgatatcgaagctgttttctacgctatttctaaaacggttataccaaaccccagatttttgaatccggttttcagaaaaaatgccttgtggtgaaaacaatatttcacatttcactccataactttgtgagttcggcacggatcgagaccgggataagaccattggaaagagcagctcgagctctacaagaaggtatggaaagaaatagttatttctgggactttttcagaaatcagaattaattctccaatgtggcccaaattttaggcccccagccacagccccttgcttctcccagttttaagtcttggatttgtcaaataaattcaagacttcaaattaataatcaaaaattctcttaaaatttttttgaacccaattcaaaaaaggaaaaaaatttgcagtcaaaaaattattcgaatttctccaattttgtttccataatttccgaaagttattcggtatcataatgccaaaacaaaaacgaaatcgttttaaaatattcctttctggacttgacttggtttcttgatatcgaagctgttttctacgctatttctaaaaacggttataccaaaaccccagattttttgaatcc

SEQ ID NO: 36950 - DNA, 918 bp, Heterodera glycines
aaaagagggagcgaattgaggccgaaggcgcggtcagtccaatgccatcatcgatcactcgtccgcagcgggtttgtccgtctccggctgttcttctttgggctccgcggcgccatcagcagcaggagcatcgccgggcggttggtcggtcgtcgtctccgcatccttcttgcggctttcctctcgcccttcttcgataatttcccctcttcttgctgcgccgcttctccttgtccttgccgcccttctcgtccttctcctcctctttcttcggctcctccttctatatacctaagtgtctttttttgttttaaatttctaaattaggcaattttttgatgaagaccgacacattttaggtcttaggattgccaaaatcatccttttttcttttttaaatttttctcaggtcgccaaattttctcaacaaatttctccatagcataagaaaatcgccggaagcgtttccctccggcgttcactttcgtctgttccaataattttgccgattccaattgttcgtctccattttctttcagtggttgtgtaattaattgcttgccatgcgtaactgtcctggagcaataatattggaaaaacgggactgaccaaataaagctgaattgcatcttgctaactaatgcaaattaaattatggtaaatatcgttcatatagtccagagtcaaaacaggacgaaatatataccaaacgacgtctctcggtctgtaatggaagaatccgaaaaaaaaattgttgggcaaccaatccctgaagagttacagacccgggactgaaatggccaaatgcctttgggactgaaccgtccaactggtaaaaatgcatgtaattgtgacaaaatagatatcaatcgattcatctcggcatgtaaccctcgaagctgaaagaattttggataa

SEQ ID NO: 36951 - DNA, 117 bp, Heterodera glycines
cgcgatcaggcatccctgctggagcagctgagcgcacgcctggctgcgctggagggggcctctcaaagtaccggcgtggcacccggcagcgatgcgggcctcgatgcacaggtggct

SEQ ID NO: 36952 - DNA, 974 bp, Heterodera glycines
  unsure (1)..(974): unsure at all n locations
ttgcaaaatttttnttgtcataataaatcttttataggcgttttcggtgtccctgatcatgaatgtgccactaattttgattagttccgaaccaaactcggaaaaagtagaaaattcaaatttttcaagttacgactttttttgttcacgtttgttttagggtgttttatcgaaatggtaccaaatcgaagtcgttcaattttactgccattcattagaaaaaagatttattatgacaaaaaaattttgaaaaacaaaagggtccccccttttgtttcaaaatctgtcacttttacagtagcgcctgttaccgaatttgccaattgtttggacttcttcagattcgtgaccagcgccctagcagaaattttaaaaaaattttgcaaaccaaaagggtcctccccccctggggaaaagttcgaattaatttaccatttatttattgtggtacaaaaaaaagcgactttttttgttcgaatccgggtccgggcttcggaattgggcaaatccaacttcatattcgtaatcagaaccctcgaaaacccacagaaactaaatatgagcacaaaagaaataagttaaattagaaacccccattcttctggattgccatattttttgcgtgtttcaggcctacaatagtcccggaaaaaaattggacttagccgacaaaattttagtcttttgttttttttgccctaatttagttgcatttaaggctaattcgattgacacaaatatttaccaacaacaaaatgagtgaaaaaaacaaaaaaaaaaaattcagagcgaaaaaaacaaagtaaatttgagaaaattattaacaaatcttccgcccgccccgtcacatcgtcagttgccccgggtacgcgtccgcgcggtgtttgcgcaccaaaaatttgagtttgcggtcgcggtcctcctccagaattgccttcgacgcctcgatggacagttgagaacgctgaaaaaaa

SEQ ID NO: 36953 - DNA, 835 bp, Heterodera glycines
tccttttcctctttcgtccacgttttcctccttttcctaattgcttccgtgcctcagggtaaacatttgccaattcatttcactttttcatcggtgcctttttcggctccgccgttttggccccggactcattaggaggccataattaaaatatgttgtgttgaagcacttccgctcactttgggtgcccaacttttgctggtcgcgcgtcggctgcgtcaaaagtgcggcggaatgctcctgcgccaggcgggggttgcggatgccctcgggcgcacttccctattaatggtctgtccaccaaattcgctgctttgccaagtcacaaaacaaaggtccattcgcccttcgttttgtgctcaaattgtccgacggtgtccgatctttggttggctgctcaaaacaaaacgataaacgcggcaaaaatggcgggcgatggcaaaacgccaagcgaaagggcggaggacgaaatgttacgaacgatcgaactgagcacaaagagagccggaaacgaacaaatgccgagaggaaagacgcaagaatgcgcaacggaaggacatcccacggaaagggcactggcgaaagtaaacggcgaccgatcgatccaccgccggcacttttctctcccctccctttacagtttttgtgccaaattcaaccgccaaaatcttttgggctttttccgctccgagaaaacgaatgccccgagagtattttgcaatctgtcaagcgacacccttctctgaatttggtggcgtccaaaaggcaaactccgccaaaaaattcaaataacggcgcgaatgaaactttggcgttttgccatcggaaggcagcg

SEQ ID NO: 36954 - DNA, 1395 bp, Heterodera glycines
  unsure (1)..(1395): unsure at all n locations
ggggagaagcatgcaaaacagacggagagagaagagaaaatgagacgatcagaaatggaagttatacacaaagcaatgaggacggagaaattggggtgatggtcgaacgaggacaatcactttgtataaattactgtatagtcactctgtattactgtaaatttgtagatagaagagaaaaatgatttgtgctaaattgcatttagttaaatggagcaaaggggtcaatcagtgagtcaatgactcattaaattagtttttacaaaataaaacagcttaggcctagcctgagccattgtacaagctgccttttgtacgagttgtcatgacacccaattagtttgtcgtaaaagagaagcaacgcaattaaacatatcgatttccgttgctaggaaatacacacggtagtcgagtggcattattcccatgaatcattccaaaattttaagaatgaaataaatacacccattttaggaccaacaaatcattacaataaaaagaattgaaagaatgaaaaaattagaaaaatgaaaaaaagatctaaaatgtttgtttattgtgcctcgctttcaaagaactccgacggatgtccttgccttgcgatttgtccgttgctcatttctgtcaataaaattgattgtgaaattattcttgaaaaaggcatttgctaaccgatgatccagtcaaattccgccagtccggtcgtccgatgtaaaatggccaacaccgtacagcccatcctcgcgattaattgactgtaataaaacaaccatttattaattctccgatcacttgttgtttgcccacctgatcagcttgtgattgttctcgtccatgtgcgcggtggcctcgtcgatgagaataattcgcgggttggacaaagccaaccgaagcagcgaaatcagttgcctctccccaaaggacaaattccgtcccccttcggtgagttcggcgctcagaccaccaaaatggtccaaccattggccaagtccgatggacgaaatgcaattgagcagcgattggtcgtcgacggagggcgaggaatcattggccaagcgaaggcaaaggttgtcccgaagagtgcccgagaagaggaacggatgctgggagcagaagccgaactgaacagcagcaaaagggacttaatgagtgctaatgagttgcccaaaacaccgaccaatgaccgcgccgagtccaatccgacactgtccaagtcgatcacttcgtcaacaaaaatcttcccactttcaagtggcactgctcggagaagggcctttaggggataatcaagagtcattaggaaagaaaaaaagaaaagtcgcctgaagaatggtgcttttgcctaagtggtattnatggcattcgatgaggacgatctgacagtaaccgacctga

SEQ ID NO: 36955 - DNA, 671 bp, Heterodera glycines
tcgtaaatcttattaaaaaaattctctaaaaattgcaaaaacctatcattttttggacaaaatctattaacagatccatcagttttcaaaaaattttcccggcggcgcctatctgcaccgccggacctctacgctcgcacattcaccaagtttttttttttgaaaaatgtgccacaagaaaatatgttacaaatctgagttccaattttgcttgagtaaatcatgataatttaatatattaaaaaacaaaaatttatctaaaaattttattttttttttgtaaacatctgttagaaatcgagcttaaatttcaaaatctgccaggcggcctatcggcaccgccggccccccaaaaacctattttttcttaaaaaattagccaaaaatctctaaaatttggtaattctttagacaaaatctaggtaatttatgccaaagggaattgaattgaggcgatacattgactaaaggaatgtggagccatcacatcattcataaaaaattaattttttgtaaaatttttggagttaattcaaatcaaacccccgcccccgcccccgcccccgcgggggcggaattatcgtgcccccgtccccgcccccgcgactctgacccccgccatcccccgcccccgtgaaaagccacccccgcccacggggtccgaaccctaa

SEQ ID NO: 36956 - DNA, 784 bp, Heterodera glycines
  unsure (1)..(784): unsure at all n locations
ctctgagcacgaatttgatatcccattttatcaaatccctcaaagtagtttgacaaaataaattatctaacaaaacattcctcaaagcaaaaagcccanaccgcangaangaagngacaagcnncncagcggcngannccggcngcngcngctgcccgggctgattgntactgttattattctgctgcgctggtggcggtggttgttgttgctgttgttcaactgctgctggtggagctgctgaagaagttgacgtaagaacaatggaagacgtagcgatggaaggggaggcactcgtacaaggaacagaaggcggaggaggacagtgcgacgacgacgacagcggcggcggcggcggcggctgctgctgttgttgttgatgttcaacagcagcgacaacgacgacaacactgtccggtggtgcactcttggccggaacagcaacagcatcaacagtttgttttggttgttgttcttgctgacaatgagactgctcctcctcaacgatgatgatgctgggcgagttcggtgcctgagactgctgctcctccacgatgatgggcgagttcggcacagcattctgattcaattggtgttgttgttgctgagactgctgctcctcgatgatgatggtggacgaattcggtgtaggtgtagtatagctttgttgctgctgtccttgctcatcgacaacgatgacaattgggtggtcatcattggaaacaacaacagggcaatgttcgacgataggggcaaccgccgatgacaatgatggactctagag

SEQ ID NO: 36957 - DNA, 155 bp, Heterodera glycines
  unsure (1)..(155): unsure at all n locations
ctatgttactagatcggggatcgatccccgggcggccgctcgagcaggacccgcagaagctagcttgatggggaccagacngccgcccccgaaaaacaggaaaagganacaggagagggaggagagaggcggaagaagaagaagggaggggggag

SEQ ID NO: 36958 - DNA, 1198 bp, Heterodera glycines
ctggaaataagcttaattgggcctagttaagctgtaaaaatatttggggcgatttgaaagagaatagaaagaaccaggttcgatgaagttttggtaagccaaaaaaaatgcaaacatttaaaaatctataaaaaatttaaaaatgagaattcatgcgagattttctggaaataagcttaatagggcctagttaagctgtaaaaaaaatttggggcgatttgaaagagaatagaaagaaccaggttcgatgaagttttgttaagccaaaaaaaaatccaaacatttaaaaatctataaaaaatttaaaaatgagaattcatgcgagattttctggaaataagcttaatagggcctagttaagctgtaagacacccaccacttttgcacttaaaaaaatttcaaaaaatttgatcgtccataaataatttgtaattgatcagcggctcaccaaattttgcagagatacgtatcggaacactacaaaagcttactaattttcctagatttattaaacccggtgaaaattttttgcagacacccaccacttttgcacttaaaaaaatttcaaaaaatttgatcgtccataaataatttgtaattgatcaggggctcaccaaattttgcagagatacgtatcggagcactacaaaagcttactaattttcctagatttattaaacccggtgaaaattttttgcaaacacccaccactttttcacttaaaaaaatttcaaaaaatttgatcgtccataaataatttgtaattgatcagcggctcaccaaattttgcagagatacgtatcggaacactacaaaagcttactaattttcctagatttattaaacccggtgaaaattttttgcaaacacccaccactttttcacttaaaaaaatttcaaaaaatttgatcgtccataaataatttgtaattgatcagcggctcaccaaattttgcagagatacgtatcggagcactacaaaagcttactaattttcctagatttattaaacccggtgaaaattttttgcagacacccaccacttttgcacttaaaaaaatttcaaaaaatttgatcgtccataaataatttgtaattgatcaggggctcaccaaattttgcagagatacgtatcggagcactacaaatgcttactaatttttctagattttttaaacccgctgaaaaagttaagcct

SEQ ID NO: 36959 - DNA, 1194 bp, Heterodera glycines
  unsure (1)..(1194): unsure at all n locations
aaattttttttctttagacccatttcgttttctatttttgactaattttctaatatttacctttatctattaaattgctaaatntgatagttttttattaaaaacattttagantaattatagtttgatcgaaataaatttaattaattttatctaaataattntaaaaatcttttttatttatttttacaaaatggtagatccatctaaacatttaagagttatatctatttaattttaataaataaataatctcaataatagttaattgacaaatttcattgcttaaaattgtaatcttagtatacttctttttggttccttagtatgtttaatactttttatggtctaaaatgatttctaaagttaataataacttattatcttttttgtttttaaagtatattttagtttgtttagattttaatacaatttccgagtttattgttatccgtgttgcaaaattgtgacgtgaacatataaatcttttgtccacgcttgaagttattggaatattttcgattaacatccgctgaattacttttttatttttattttctatctttttatcatatgctaagtttattttttagttttggtgcataattttttagtttacaattgtcattatatttgcttgcattaatcttagttaaatcaaattaatatattatctgaaacttttttttattgtggtaaaacacaaaattttgatgcatttaagcatcgacgtaaataaatttaaacataattaaaaagcaaaaaaattgataaaaatcacaggaacaataaatgtttgatttaagtattttttgtgatgtgacctagcaaccccgagttataacatttttatgattttattctattaatagatattttcaacagcgtaattaataattattttagattgctaataaaaataattacacaaacttataatttataatcaatgaatttatctcaattttatgatatggtgcaaaattccaatgccgcgcaatgcaatggtaagaaaaaaaataataaaatctaaaatttaaattatatgtaaaaaaggtttcaacttcataaattggaatagatcacaagcgttttttttgtaaattattttcgcataaattaaagacaaattaatacatatataattatattatatatatctcatagatataaaaaatgttttctttacctaat

SEQ ID NO: 36960 - DNA, 947 bp, Heterodera glycines
atattcgcttgaaaaaattattcaattatttaatcaaaatcttttttgtcatttttcattattttagaacatttttgggaaaaggagtgactatttacacgttttttacagcgcgattttttcaaaaactttttgggaacttggaggagagtacagcggtgccggtaggcgccgccgggaaaattttcttaacagattttgtccaaaaaattacaaaattttgcgattttgagcaaattttgcaagaaaaatagggatttttatggtccggcggtgccgataggcgccgccgggaaatttttaaaaatttcagttcaatttcttaacagaaattgtacaaaacttactagttttttgaaaaaaaaagttaaaaaaatttacgacttttcatcaaaaatttcggaagtcggaattccgaccccaaaaatgtcgaaaattggaagtctttccgtgccatacctggtgcctatcgacatctgcgaaaaattttatgaaatttaatgcgatttgtttacagattttgtctaaaattgaccaaatgacgcagtttttgactcaatttctacaggattattaagtaaaagcctatccggcggcgcctatcggcaccgccgggaaaatttcacaaattttgaatgaaatttgcgatgaaaaatgagttaactttaattaaatttattatttaatttatttaaaaatatttggcattctgtcttagaaaaattttcaaaaaatcaataaaatcccgcatgatcccgcacaaaaaatcaaatttgcggatcccgctgcgggattggaactcaaaattctttgcgggacaggatcccgcgggattaatcccgcaaatcccgcgcgggatcccgtcccgcgccggtctctactttgaaccttcaactgatacaaaaaatgtaggcaaatgaaaaaagatatggcctgtaaaactgaga

SEQ ID NO: 36961 - DNA, 810 bp, Heterodera glycines
  unsure (1)..(810): unsure at all n locations
cctaaaatcatattgttggaagattttntggtgaaaaaaatttttcactcaaaaatcatggtcacacccctgtggtcccggatgccaaaatcacttttatttctataactttttttaaaaaagtgataaaaagctaaattaaaatttataaaatagagcaaaaaattgcggattttttgagtatatcatttttataaaatactttttcagaaccgagttctgaattttattctgaaaaatcgaatttttccagaaattctggaacaacttttttattttggaagatagaaattccaaataaatctcataaaattctcctgatttttctctatttttcaaactttatttcactaaatttgatcaaaaacgaagagagttatgaattttcgaaatttcactggattttccggggctcaaattttgacgatttttcaaaaaattttaatcaccttccaaaaaatccaaaacgcaatataaagcgtatatacgtattcagcacctcaaattatgccataaaaatgcattttggctaatttaggagtaaaaaaatttttcatgaaatgcaaaaccatggggtcccccctatggttttgagtttcaaaatcacaattaattttataactttttttaaactcatggtataaacatgagataaagcacattagattgggcttaaaattctctacaaaaaagctcttagacgattttttgataaaatcaactcctgacaagttatagccacagaactgaaattgaggcctaccaatcaaaaattttctatttccaaaaaaattttgaaaattttttttg

SEQ ID NO: 36962 - DNA, 851 bp, Heterodera glycines
  unsure (1)..(851): unsure at all n locations
accctcctctccttctgacataaatatattaatgattttttctaattaaaaacaattttttttgtgtgtgtaaaaatgccctacaggcaaatgttttagcaaaaaaaaagggataatgtctttagatcaccccttcttgaagaaaattctgaaactaattgtatctaatggtatgttttaggaattcttaacaatttttcttaattataaaaaatttttttgtgtatagacacaggttttacaaaataggggaaaataacctaagggtatatgttaacaggccaacaaaaggctttgggttatttaccaccacccctcctcccctcgaataagtgctaaaatatatttactttttaaaaaaattaatcacacacttttgattttaaaaacggtatacacttttatttaaaaattacaaaaaaaatggtccacacctttggatttttttaaaaaattgcaaaaaaacggtccacacctttggattttttaaaaattgtaaaaaaatatggttcacacctttgggtcgaagcgatgagatttaattctaaaaaataattcgcagccaaggggactcgaactttaggggccaaatagggggtagtaactacttaccttcccataccagtaaatgccataccattccatgacatacccatgttaagtcacacaaagccatttaaaactaacattatgaataattttactaaaattcttttaaaatttttcttatcataaactcganatttgatatttgtttanatataaatatttatgcgattcttagggctgtttttttcatttttattcttagcattaagcacaaaaataccaatttaagcaaaatcagcatg

SEQ ID NO: 36963 - DNA, 1863 bp, Heterodera glycines
  unsure (1)..(1863): unsure at all n locations
aaaatgatcatttttgttattgcttttttatattgaaataatgttttgttttaaataaggacgccaacgnaattaggcttttttgtaaaccaaatgaggtttttgagaatttttatctgggaactttgatttaaagatttaaactatgattaaaaagaataaagttgaaaatttttgaataaattttcagaaatacccagaaataaaattaaataaaaaaaactaatttatcaaaatcgtattgaattacttaaatgatcgcttacaaaaaatgcagcgtgaggtataatgaataaatgatcgaatttcccttgtaataattaacaaattccattttaattgcatcaaatcccccattatttgtaatttattccttctcatttttggctttgttagccttcgcacactttgctgatcgcacttttttgaccaatttggcgatggcattcatctgaaaaaagtagacttaaaatactgtaatggaggatgaaagagggggtatacggtagcaaaaattaatttaaaaaaagactgactggaaaagtgacggcacgccaaaacaaacgacggcacttggcacggccacgagcggcactgaccgaagtgcaaccgacagaagcaacgccaatggcattggcattcagctgagactgcggcaccgtttggtggacaatccgttggccacactcaacacaaactttggcaccaacaacagcagcattttgttgttgttgtgccttaaaattattttaataattgatacgataaaaatgattaccgtatatactctttttatatgccagtctccattaatctgccggcctccaattatatacccccttctgaggaggttgaaaaataatatgccagtctccatttatgtgccaggggggataaatagaattttttaaataatttttttggcacattttccaaaaaaaaaaattaaactcaattcaacagtaaaaggggctaataaatgaacaattcgttcccatctccgactccatccagcccgggtcggggtcacttcggcgcggaccatttcggcgccgcaaattttgaaatgctatcttttttatttgtcagttagctttagccaatctggcatcatttgaaagctctatgtgtgctctatatttacacgtaaaaatagaaattaatgattcaaaaataaaaaagttatgccacgcggcgccgaaaaagccaagaaaaagttaatttttgaggttttttggcaataacttttttgtaaactgacgaaattttttgaaattttacaggctaatagagaatctgaagagctatcgaatgataacaaaaatttttaatttggttgatcaggaaaaaagttgttagcaacggcgccgaagtgggcggttcccatccagccctgcatcatcatcagagtagggtcgctacttttagtgacggaaaatctcgaaatagttaactaaaaaaaaaaaattgtgggaagaattttaaaatcgctaaaaaatctttctcctcgtgaagaacatccctangaaaaacaaaggatttgctgagatgtgaacagcggggaaaggacggagggagggagcgcgccccggaggacaaaaaggaacagaacggacggatggacggacggacggctctaggaaaatccccgacacaggaaaatccgacactaacattaaattttaaaaataatttttgattctatgagttaatatttaaaatacatataaaaagttacagtactgaagttatttaaaataaatattcttattgccataatctattctatctaggtgggcatatgaantattttttgtatgcccttttttgattatctcanaaaaatanataatctctgtgatc

SEQ ID NO: 36964 - DNA, 521 bp, Heterodera glycines
ataataaaatgaatataaaaaataataaattaattttacaaaaataattgatgaaatttaaagagaaaaatttaattaggtagttatattttttaaatttaatgaatgcattatctatcgcctattgtatatgattattaatagtgaagaaagaagacaaaatgagacggacctataatataaatccaaaatgaaaccatttattaaaattattgtagtgtcctctttttatccaggcggcaatcctgaagaatggttgtccctaatttttaatttttttttaattttgtgctcaaaaccagtttttaggcgtttttgagggtgctgataacggatcttaactcgggtttgcccaattccgaactccggacctgaattcgaacaaaaaaatattgagtttttttaatcaagaatagttttttcagggtaaaagcttctaagtcattatgaactattttggtgtaaaacaatgtttcaatttttaattaaataaaaataagcaattttcgccgaaaattgac

SEQ ID NO: 36965 - DNA, 1305 bp, Heterodera glycines
cgaatatttttgtgcagaaaaactctctgtaaaaggcgaatatttaattgcttttgcattttcatttttgattattttctttaaatataatttataataagaaaattgtgcacccaaattgtgcaaatagctttggtaacgtggcaccaaaaaggtggcggaatcggcattatatgccgaaaactttttcattattccgggcaatggagcaaaggtcggcgaaatcaaaaggtcgtcccagtcgagaaaagcgatgaattcggcactgtctctgtgttcatagagacagtcgtgcaggtcgacaaccttaggaggacgaacaaattaaaacccggacgacaaattcacctaataaatgccaaagctaagaaaaaaaacgtaaaaataaagtggaattaagccgcagatttacagttagattttcatctcgaaattaaacaaattagcaaacccctgaatgggtttgtgcctgaatggcaaattctgccccgtccgtccctccttcggcggttgtctctcctttctttcttcacctggttgctccactccgtctcgccgttcggattgaatttgtcggccgtgccgtgcactgtctccgtcggcatttccatgttcgccctcactctgagcagtccgtccctctcgtacaatcgcataagttcgtacagtgtcgggtgcacactcatcacataagcgactacggtgtccacgcgttgcatacggtacatttccatggcggtgacgaacaaatgccattgctcgaagaagaacacgcggcccatgcacaacagcagcgaggcctttttcattgtatttggcaatgggtcaggcacagagacggggaactaaatgatcaacaacatacttacaattagtgggtgaaattaggggtaattaattgacaaacagtcgaccccctcctccttctcctccccccccccctcgttcgtcaaaaggtggagagaggggatagaccaccgtggggcgtgggggtcggaccgtgttgggtcttttgtaaaatttgcatttgaattattggaattgtatttaatcaattatattgcctaattattttttctatgattacgataattgccaataccgtaatcggtttgctgcccgcgaaacggaagacgacttcgtccacggggcgcccgtggggacagatcagtgcgcagatggccagccgacattggcccacgctgtgcagaacgatcagttgaggggacacgtgccgagtggggaaaaggccgttggacgaatggaccaggcatttggcgtcgagccaattcaatcggcggaaga

SEQ ID NO: 36966 - DNA, 931 bp, Heterodera glycines
  unsure (1)..(931): unsure at all n locations
tgacccgtcccattccttcataaatgcaaaatcacttcatatggaggcggcggttcatcgggcggcactatttgctggaagctgaaattgctcatctccatttggttctgttccgtcctggtggagatgggcncaagcaacggttccctgtcagtgccgattcgttgttgcgggtgatgcttttggcaccgaatcctttaaaatgcgaaaatggaattcaattcattcaattttctttgtccagttttgttgacctcgtcattgttggcacgtgccgcgtttttatgctcaattttcgcggcctatgcggatccgctgatgcaattgcagcaatacctttaattaaaatgatattaatttaatttaatattttaaattatttatttaatttttctcttttgttcgaccatcaccttctgaaattgtgatggaacgtggtggattttggcgatttgttgttggcatgcctgcccgagttgacagatggtgtttcttcgtcggtccattagaatttctgaaatattcgaaaatcggaatttcggggacctaaaaatttcggaaatcggaattcccttaaaatgggttaaagtgttgaataaaatttatttacatgaggccaacaaattaaaaatctaattcgtttatttacccattttctctcccaaaaaaggaaatggagcgactgcgcttcatcaaatcatttgtcgccgttggaactgtcagatttttcttaaaaaatagctgttaccttgcttttccaagaattttattttcatttcaactttgttataatgaatttatttctgtctcacaactgtaatcaccgattaccattaaagtgtactgtggctgttcatcatcgccaatggtaccgtaaaaagcgtgatgtgccgccacctcatggccaataggcacattaccattggcaggc

SEQ ID NO: 36967 - DNA, 927 bp, Heterodera glycines
  unsure (1)..(927): unsure at all n locations
actaaaaccaattctcctatttttggggaacgttngggaggaaatttttaattttttatccttttcacgaagtgataacagataatcccatttccacttcgaataaaataattgggtaagggtgctaattgagccccacatgtcagataagaatttttgcgtaatttggtttgggttatattcctggtcagtgtctggggtttctagtagggaattaacaaaattcagcgaatacccaaatgggcgcaggaaatcaatagggcgtaagggaagtggattagagggattattagacaaaaatgtgattggtcgagagttaattattgactcaatttctactattattgtgctaagatttggaagggaaatggaccgagctgagcaggcagagaaaacacggcgcaaatgatgtttaattagtgctattaagcgttcatagtggcctccacgccagggggcgaatggtaccctcaaataccattcaattgggtgtattggaagaatgaaatttttgaaagacacaaatgttggtgcttgatcggaaaagattgattttgggtatacatatttagcacaaaaacggcgaaatgctaataaaaaggtcggtgctgattggtctggcaccaaatctaaggaaattccacgtgtaattagacatacccatacaacaatccaatatttttcaatggctttgcgggcattttttcgggggttggggtcttcatttactgagataatacgtacagggccacaaaagtcaagaccaacagaggaaaatggggatgaaaaattgacccgctcttttggtaatggtggaaggggagggaggtcaaatgctcggactgtaaacttacgacaangtatacaacactttaaaatggcgcgtccggaaatttttcgttccttggggtacccaaaattgtcgtc

SEQ ID NO: 36968 - DNA, 869 bp, Heterodera glycines
  unsure (1)..(869): unsure at all n locations
ttttattcatctcccctttttgatagaaaaagcatcagagtgcctaaactancctgtaaataaagttttgtgcgtttcagagcacttttctaaaaaatatttatgaattaattttgcaaaataataaataattaatgaaaaagtcagaatttcgaaaaattttaaaaacaacaagcgttggcattttttcaggttaagttagtcctttacaatggagaaggcctgcaaaatttgaagagattatatcgattttagtgcgctaggttcgatgaaactttttaaaatataagcctaaactttttggcctgtttaaaaaggaattaaaaatttttaaaatatttattcatctcccttttgatagaaaaagcatcagagagccttatttaacttttaattaacatttggtgcgtttcagagcagtttctgaaaaaatatttatgaattaattttgctaaaaaaataaaatagtgaagctttaaaaattaataaaaaattttaaattcagaattactggagttagcatcatagcagtgcttttccttgtctttttgatgctctcgcaaaatctggttcgcttctgatcagtttataaaaaaaaagttaagcctaaaatttttcgcatatttaaaaagcaattaaaaatttttagatttttattcatctccctttttgatagtgaaagcatctgagtgcctaaaataacttgtaaataaaatttggtgcgtttcagagcagtttgtgaaaaaatatttatgaattaattttgctaaaaaataanatagtgaagctttaaaattatannaattnntaatcagaatactggagtagcatcatagcagtgctttccttgtctttgatgctctcgcaaa

SEQ ID NO: 36969 - DNA, 666 bp, Heterodera glycines
  unsure (1)..(666): unsure at all n locations
cttttctgccaattggtttttgcattgcttatctaagttttttaggtaaaacaaaaattaaattattctcaataatttttcaacgcaaattaattaattaccattttttttataaattatcaaaaaattattacgaaattttaatttccctttttattgcagttttggccacatttttaccacacattgatcgttcgttaaccaacggattggcatctgctgcggaaaatttctcaattttattcggtaaatttctttgaatatataaatttaaaaaaaaacgaaattagtaaatataaataaaaacaataataaatattatcataattagttaattaattaaataatgaatttctaaaatttatatcattcataacttatcaattatcttttttaacattaaaaaaataatttttttatttataaatagtttaagaacaaccaatttgcaaaaatttaatcgtttcaaaatactttttttcacattagaaataatattttaattacaaatcaattttagaaagcaatcaattagctcctctttctcccaattgcctctaacccaaatttttggtcatcatcaaaaattcgctcaattttgagccttgacaaatgtccccacctncgtcctgtgagtctcgaggcgacaattgtctcttgacttgg

SEQ ID NO: 36970 - DNA, 459 bp, Heterodera glycines
gtaaatgcttctttattttttatgaaagaataatctgctaaaagcggcaacatgcatatttatgtccattggctatgcatgtgaagaatgagtgagtgtttcctttcttccccgcccccccccccctccctttttattctcatttccgtgccttggaccaaaagggtcattttaaaaaatatttttaaaaataaatcaaaatttaatttaccattaaataatttaaatacgcattttgcatttgattttgctttaatttgtgaaatttaatattccacaaattgaattttgttctgatttccgttgccagggacacttttgttacccgcccttttaacataacacaaacaaatgaatgggcacaattcccaccacccatccgtggaaagttgcgacggagtgaaagggtcacttcatcactcattgccaaaaatgtgcccgcgggggaggggggggggg

SEQ ID NO: 36971 - DNA, 935 bp, Heterodera glycines
ctaataatttcaattttatcactttttggtccggatgaatgtaagcagccaattgtttttgcctcccaaaaaattgtttcatataatacagtattttattccaatttttttaggtttttattttaatgataatttttcatctttttataatttaattttattttataatgcaagcaaaaataaattgacgcacagccgagaatgtttcttttcaatggaatattctcaatggatttttaattatatttttggataaattttgtggagaagtattttagtttaatttttattttcaatattaataccttattattactttagcacaatattgtcgtaattactgaacgaaaaacggaagagaaaataatacataaatattaagtggcgctcaacacctcccctaaaatttgattattaattaaatgatttatttaagaagcatttactcattcatctccaatttttaatattttttagattcgacttaatttttaatatgaataaattggtattatccattaaacatctttgtttctattaatatttttttaccatggcgactaaaatttcttctgttgcccttccttccagtgctatatttttaattagttgtttttattgaaatataatttttaatattctatacgaatttcttttaataaatttcgcatagtaattattttttctgtttgttgaatctatttttaattaattaaatataagttttctttttttagtaaaacattaattttttatcggtattatgtttctcttttctctcatgccttccaactgctcctattatttttcttgctccgaaattttaatatttcttgctaattaaaatttttaaaaaaaaatttgcttttagtttttcttcataatatggctccgtccttttttaaaagggtaagccttgattgaattccatttat

SEQ ID NO: 36972 - DNA, 891 bp, Heterodera glycines
  unsure (1)..(891): unsure at all n locations
tcattgaatttaccctttttcgtgactttttgaagaattgtgctattttcgagcgaaattctggcactttgcctcagtcattgctcgaattgttcgactccatccgttttcacacagaaaatgacaatgtatggatatcatgtaattgcatctaaattctaaaaatttcatataaaaaggaccgcgacctgaacgttttgaccagtttgagactacattttgccaagctcatttcactgatcatcaacggcacgccaagtgagagagaaaaataaacaaataattggaggttattaattctgttatcagttgaacaacgcgagaaactgttaccaccggaaataaaacgttcgctgttctttttgtttttgtcgtggtgcggcagaaccattggtacaatcgacaaaaggttcggttttcctgctgattaaagtcattttacttttatgattcagaaagggcgtcgatgttggcatttctgttgaacaccatgccattcgggcgatgtgcgcactcgccacccttggctcaatgttcgaatgtccgggcagaatttgtgaagaagaagcaatgttccgttggttggaaacacttctctcgtcaacgaattcaattgtcagaacaattagcagtgtcaattatcccatttttgtaaattaattttcacaggtcgatgaaatttgtgagcagatcctttgcaatattctccatttgaatgaacataatccggcgggtcggttttttctgccgttttggtcaataagccaatgccttttagcttttgnagttnngtgtcccaatgtngtacaccaaaaatgacttggtcgncatccgttgtttcatgcaaaattcatgcttttctcacaaaggttttcttgtcaatgctgcaat

SEQ ID NO: 36973 - DNA, 1283 bp, Heterodera glycines
aattttaattttattattataatttcagtataaaaaaacttaataaacgaatataatatatgtaataatttcgagagtgttattatttatgataaacaaaaaaaaacacaaataatttaaatatttaagaatataaatagcttacgtacaacaaaaaagcatgagttatttataataaagctgtttaaatattatattttttgcttccgatttgggaggaaattagtaaatcgtaaattttagtgcattcaacaaattaaaattttaacaatttttttgcggtgcattttttaagaaacttgggaaatgggcgaggggatagggtccggcggtgccgttaggctccaccggaaaaacattgtaattgttaatgcgaattgttaacagatttctgtaaaaaaatgacaactttgccacaaatcttatttttccttgataaaataatgacattatgccataaaaattcaaaattatgagtatgttttagatcagaacaaattgggtcactacctccaaaaataaaatattctgagaagaattttatataattattttattattattattattattattatttatcacttagataaattatttaatatgtaaaatgtaattttttttttacattaagtatagaaaaaaaaattaaaaaggctgacaaatcactgcaacagaataaaatatataaaaacgcaatattcaaaataaagcctaattaattattttgtaaatcttcatgaggctcggaatcatgagatttaaaagatgaaaaataacgaatgccaaagaattcataaacaaaaaaaccaaactttaaaaaatttaatttttaataaaccgattttatttttaattagcataaactaaagcaacataataatcattagtaattttaataaaaaatttgaatggagcaattaaaagacaaagaagaaaataaacaatttcggaaaaatacctttataattatttttgcatgttaaaaaataggaaaaaaaaactactaacaaaataattaatgaatatggatttataaaaacaacaaataatattatactgacaatttttcctctttgggccaaatttttatgaaatatagcaaaccaatcaataaaaaaatatatgtttaaaatacatttttataaaatatgttaaattaaactgtataattatttatttaatccttttatttaaaaaatcattattacgcaataaatccataacaacattagataataattatattaatatcatataaaaatacgcacatttatattaaa

SEQ ID NO: 36974 - DNA, 1131 bp, Heterodera glycines
tattaattaacatataatatattatttataaggatattgcctcataagtataattataatgatttatacacccaaaagtaataatgcagtaaaaatggatctaaggaataaatctatcaacgaaaattactgcataaatgaatacctgatatgatttcacatacatcgcgaagatactttaccactaattacattagtaattgatacatcgaccaaataatttaaaaaaaattaatttaattcaagatatataaatttaaagaaatcagacctacttattaaaagtgataacgagacttttttagagtcattttgccgaactgttcagggctttttggaaatcaagagtataagtttaactaaatttgatcattacaaatgccatttttaatataaaaatagttctttatataagttgtcaataattaataaataaatatgtaatttgtctaataattagtaaataaataatttttgaaatatgtaaaataattatatattaaaacgttgaaatttaaatagtagttagggcacacaaatccgccgggtacggtagcctcccatacctatgggaggggtgcacggccaactgagcgccagccatttgagcgccgccgggtgagcgcgggccaactgagcgccaaaattttcagtactgaaaccaaaacctattgcgcgacttttttttgaaagcccaaacctattgcaggggtgcgcgacttttttttgtaatttttctctgaaaattatttgtttttttattttttaaataataattttttattcgaaaaattctgccgcagactagtggactcgatcttttggtctgccaccaaacccaacacactaccactcggccatgagaccagttgccagaaaaaggataattgtccactatatgctgcaaagatgatgacgtcaccactgcgaggggtacggtaacccagtgaaaattcgcaataaataagtcgcagactagcgggctcgaactttcgctctgccaccaatccaacacactaccactctgccacgcaaacacttgccagaaaaaggataattgtccactatatgctgcaaagatgatgacgtcaccactgcgaggggtacggtaaccccagtgaaaattcgcaa

SEQ ID NO: 36975 - DNA, 909 bp, Heterodera glycines
ttcgcatgctaccttttgcgaaattttgcttttaaattgttatttcccgtttattatttttcggtactgaagtgtccattttcactgggactcaattgtcccagtgctcagatggcatcggttcgaatttataccttgtttttttatacttagctcatcaagagctctcgaatgataccaaatttgtgtgattttgacccttttaaaaggtcaggtgcctcccttttcactcaaattttcaagttttaaaccggttcaaaaaccggtttaaatgctttgccgcgcagttttttgatggtttaggcgttttcagcacctaagaaaacctataaaaatgtttttatgcgattttgagtttgggacctatgatggatatttactataacaataaattattaagttattcaaaatgacccaaaaaaatgttcagaaaatacacccctaagaattgtaaaatttttcaaaaaaattatcacaaaatttaatatttttttcttaataaaaattttttgtttaaaactttgttcatattcgaaaaaaactttaaataaatcatttaataatttcatttacaattgaaatatttaaagttttaacgtgttttgttacctaaaagcgttaataaaaaattttattttcctatttttgtgcctttttgaggatttttgtgcctatttaatgcctattttgcaatttttaaatgcctttttaggtgcctattttgcgttttttttttttttttgcttaaaaaaccaagccctagatataacttttgaaaggccaatttatttatttttaatttacgcactgttaataaacagggctgcaaaaaatatgcaaatgcatattttttcctggcttctccatgctctaaatagcaggaaaaatactttcttttttgtgtttgcg

SEQ ID NO: 36976 - DNA, 575 bp, Heterodera glycines
gtcattttgtgtaatttttacctttgtaaaatcgtatttcagctgtatgctggaaaactccgtggctatctgctaatgcctgtcgaactccctaatccaaatgatccaaatggggatcgttttagtggccatgggcatgttttgtaagcattttttgtgtctttaattgaccgatttatgaaaaggatggaggatttggtgtggcaactgagaggcaaaacacgcaacgcaacccatgggattattatgttctacgtaatcagcaacccataacgtttactttataaaattttttcaaggtgcaatatgtgaatcggatgctgtataacgtcaaatataacttttagcggttggttaaaaaatagacaatttggcgctagtgaaaaagtcaccacatttgaattttatgtaaaaatatagtggggcacgagccttgggtttatgatatcgttgttgctataaatcccatgaaaattgtattatccggggtcatagaggatgccgatcatcgatcacgaatctgatatctaattcaatggcatggagccataaactcgattgaatattctaaaatt

SEQ ID NO: 36977 - DNA, 1270 bp, Heterodera glycines
  unsure (1)..(1270): unsure at all n locations
gttcaagtccacttgcctgcggcacatttattgcgatttttcaccggactacagtatccctcacagtggtgacgtcatcatctttgcagcatatagtggacaaatatcctttttctggcaagtgatcgcgtggcagagtggtagtgtgttagattggtggaagtgcaaaagttcgagtccactagcctgcggattatttattgcgaattttcaccagactaccgtacccctcgcagtggtgacgtcatcatctttgcagcatatagtggacaaatatcctttttctggcaagtgatcgcgtggcagagtggtagtgtgttagattggtggaagtgcaaaagttcgagtccactagcctgcggattatttattgcgaattttcaccagactaccgtacccctcgcagtggtgacgtcacaatctttgcagcatatagtggacaaatatcctttttctggcaagtgctcacgtggcagagtggtagtgtgttgggtttggtggcagagcgaaagttctggtctgctagcctgcggcagaatttttcgaataaaaaatttgaaaaaaataaaaaatattatttaaaaataaaaaaataaaaataataataaataattttcagaaaaaattttacaaaaaaaagtcgcgcacccctgcagtaggtttaggcttgcagaaaaaaagttgcgcacccccttcaataggtttagcttttcaaaaaaaagtcgcgcaataggttttggtttcagtactgaaaattttggcgctcagatggcccgcgctcacacggcggcgctcacctggctggcgctcagttggccgtgcacccctcccataggtatgggaggctaccgtaatccggcggtttggaagacactaactactcttaggtactcagttgtacgttttttcagtaccaggtcccggtccagtacaattctattaaaaacttccattgagcgtttcttaaaactgccacccccaatttaaaaatcattgaaatgaaattttttttatttcaataattctttcaagattttttaaggaaattaattgaacaaaatgctttatgaaaaatttcaaagaaaaaatttcagagaaaattagaacttttaaaagaaatatttcaagaacaaaaaatttaacacataaaaattcataattttgctcaaatatgactaaatttaagtttttaaggtaattcaatagctttaggtgttgtctatcggggagattaatgtttaattttttttaaagaangtataaaacgtaa

SEQ ID NO: 36978 - DNA, 1125 bp, Heterodera glycines
cagactcataagtaaataggagcattttaggacatcggggatatttttatcgccggcattcgcacgaaattgttgccaaaatgcaggccaactcaatggatccccttcaaaataaggccagggcatttttggaaaatttacattatcattagtgcttcctactctttggtcccgattatttcttctagaaaaattaattccaatttcattaattgatttcccaatttcattctcattttcctctctttttggttcttgatctgatatttttaaagatttgacactttcagctaaacttttccgtcttcatttactaaaataatatttattttgcttactgtttctcttccttcctctacccaatcgtaaaagtgccttcctctgtgagagagtaatcgatacctctcattttcctcattttgggcttctgcccctatatctctgatataagcatcccattccttatttttgacttcgattctttctaatagcccagtaaggagcactctttcttgtcttaatttatcaaatccctcctctgttctctcttgggcttctataatcggatgaacgatttccattctgtttattaatttttcaaccattgttgccaaagcagttcggattggctctgacatttgtaccaataatggaaatttcaaatgttaatatacgaatattagtattcataatttaattagttattgcgccgtttttcacctttggtcgttgcaccgaggggtcgttcttttaatatgatcagagggatcaggaagaccttccgtagtaaataagcataggggcacctattcttttttatataatacacagataaatttacagatctatttcaaatatatttaaattgtgtatcaatatcaaaattggaaatatttagaaggtaaggcaatctctcgatatataagatttgtccttagttagataaaggtcgaatagtcatcattatcattcttttcctcatctctttaatcgatgggcgaggactacccatgggagaagggagtgggaaacatcatttcggaaaattaaatttttagtagtataatttactctattaggttcagaatacaataaaaatagcatgcgcggagcgaaaaatggggt

SEQ ID NO: 36979 - DNA, 698 bp, Heterodera glycines
  unsure (1)..(698): unsure at all n locations
ctgccgactttccgcgtcgatgagtgcacgcggacgacgctcgccgctttcatcggactgtgacgaggagcggtcgctgagcggctcgccgagcacacgagcctgctgcggatgattgtggcgatttggagcgagatcaccggcagaatcggaactgagcgacgactcacgaccatccgaatcggaaaattaaaatggcaattaattaaaacgcaaaaaaaaagggaaaagcattaaaagcattgtcaaaacttctaaaataaataaaaacattaatagacaacatatttgttgcttatttatttatttttcaccttcctggcgaatattttgctcgtgcattcagttgatttaagaattgtttaaaaaatatgctttttgtttctcttgatttccaatgccaattaatttaatttccaaatgctttgtccgcatttgcttccgttggatctatcgtcctcctcctcctcctcctcccattgtgccagtcgcttttgtgttagtgtgccattatttttcagagtcgccatagataccgaatttattttattttctcgcggcattttgggaaatgccaattagggcttcgtttatttgcacaaacaaaagcgcggaatcggttaaatgaataaatgatacattaacanaattngcgccagccatcggaaaatgtgaattgaatttacaaacgaactatc

SEQ ID NO: 36980 - DNA, 1486 bp, Heterodera glycines
  unsure (1)..(1486): unsure at all n locations
cggaagttcatttagggcacatctacaaatgagcagattttgattacnngaattaactttccnactcactttcctccatccagactggcttcaaccattgttcaaagacacctcgtgaattgggcaaaattcgatggcgttatatgcgccgcatcacgggccaaaaacgtttcacagacttttagaaaagcggctggatcgtgtcgggataaattgaatgccagtacgatagtgccacgtttgaaaaccgaagaacagtttttgggaaggggcggtgggggcaactgaaagggatagccaacatatggtaagcatcaaccagccgaacagttgtttttcaactaataatagcgcctgaaacacacctcgaccatttctgccccgtcgattcgtcgcggtaagcggccgcgccgacagattccaaaagtatgaaaaacatttcccaatgttcgctcgcgtgtaaattggcagcatttgcgcggaggagctgatggagaccgaaagcaatttgacgggagaacagaaacaattcgggtggtcgaagtgccaacagttcacagcccatgaaatggagcacttcgtcggcacaattgctggcgcggtcctggacagtctgctgattggaagccagtgaatctgaactaaaaatccaatttataaacaaaaaattaacgtttcaatttgtttattatcgatgccctgcctttgttcgtcacgtcgccccgttgttgcttgtgctgtttgtcgtcgtccattgggtccaccacaatcaccacgcatttgttttgtccggcaatgatttgctgcgattgcttttgtcttgccaaattcggtgctatcaccgcttccgaagtttgtttccccttttcaattggagttggtgtgaaatgttgtcctaaacggaagagattccgattggaaattctgacaagtggacacaaaggaacactccatcgcctgttgttcgtgagtgcctacggcaatattgcaggaaaatggcacttgataatgactctccagaatgatacttatacgttaatgacgaaacgctaatggcaacaaataattccctataaattgggagcagtaaatggccatcaaacgtcgctttggagaactgaagaaatcgataactattatgtgtataagacaattgtttttacacgtgatggaatggatggattgaatacaccaatcggagagtgctctaattgcttttataaattaggcgaatgtcaatgcgtacaaattagtctgatttggacccccgacaagacccaactttgctcttttgtttggctgccacaatgctctggtgaatatgcaagtctaatatggacgacggaaagtggtgatttttgcattgagatttgaaaacacctcgtcccattagcagccccggtgctattccgagtcgggccaacttaattgtgtcggaccaagcgcatgccgtacctgtttccgacatccaagaaatggtcgagaa

SEQ ID NO: 36981 - DNA, 444 bp, Heterodera glycines
atttagggaacactcagtttcgaagcgcatcccttttggacccgaagtaagcgaaaaagcgaacaattggggagcataaaaattcacaattcccaggctttgactacagcacaatgcgggaaaagacacccgaactgtacgaacatttggcacagtccgccctcgtcattttcaagggggacatgaactatcggaagttggtcggcgacagggcgtggccccaccaaacgcctttttcggttgctctttcttccatgtactcaaaatcatttcccccttctttgctccctttcaggaagctctttgcggcttttgcccaaccactcttttggcacttcgaacattaaaagcggaaaccgtcgccggtgttccgctcgaatcgctgcgcaaaaaaaaagaaaagttcggagagaaggacctcagctggatgagctctagcgaata

SEQ ID NO: 36982 - DNA, 1603 bp, Heterodera glycines
ttgagtctaaatttttacaaaatttttagttacacttttttgtaaaatttttgctagattttttaattacatagattgaaagagaatacatagagccatcgaccaataacaagattgattaatttaactaagttaaagctaaattatgagtcattctttagcaaataaatataaaataataattaaatttaaatatttcaatcattgatactttttggctcggctcagcacgattttgaccactttttgtacatattttttggcagccatagaaataaataatggaacataaaaaggggaaaaatatttggcgttttattttttatgttccagccttaactcccgaaagatttttaaaaaatatattacaaaatgccagacataaaaaagcaaagcaaaacgtttgaaatttagtggcctaaaatgaaaagctattcgaaaaagtaacaaaatgaattcaaatcattattgagaaaataatttaaaaaaccaaacttgtaatgaaaataaaataaatattggagatgattttttgagaaaattttcatttattaaggggtgtattttcagaaattttcgggccgattcttagggaaggtatttttggtttttattgcatttttgttaacaaatttcgacaaaacgccaataggcaaaaataggttctttcaaaaattctttaggcttttaggtctaaaaataaaagcttaggaaatagacactaataactcgaaaggtagctttaggctttatgtcttaaaaatccccaaaaataggctctaagaaatggaaaatgcgattttaatctccataatcttttaatcctcatttaattcttcttcaaattgtttcttccatttgaaaatggtccgttgattaattttcaatatttttgaaattttctcgtcactcatttttggattttctcctttcatttgccaatacattttcattttttccattttttctttctccgatattctttttccactcaatccaaattgtttcttccattgtccaattactccttggccaactccaattttcttcccaattacggcataatttctcttccattcttttgtcgaatattttcttcctttttgtttatattcatttctcattgcattaaatttttgcacaatttcaattttttgtacatccgtttttgatttgtggcatttatatttttgaagatttaattctttgatccatttgtaaatgtattttagatttgtgcccaatgttttcgctattttcaattcaattttattccattcttttgttgaatattttcttcctttttgtttgatcctttctttaatttgatagtatttttgaataatttctctctttttctgttcattttctttttcttcccatttttctccaaatatttcgtcaaatgttttttgttccaattttttcttttccgctacaatttcaagttgagcaattaaaaaggcaattaaaattgaaaataggcataatttcattgttgacaatttttctttttcttaaaaattaaatttataatttattcgatatgaaaaaaaggaataataaatataaaatatttctcaaaaatgaattttctcttcct

SEQ ID NO: 36983 - DNA, 820 bp, Heterodera glycines
gattttaacgcgtatttttgaaaaaaaattcaacttttttgttcgaattcgggccctgggttcggaattgggaaatccaagttccagattcgtaatcagcgccctcgaaaaccccaagaaactaattatgagcacaaaataaataagttaaattagaaacccccattcttcaagattgcccaaagactcccttaattctaatcgtctgcctaatttcagcccagaatttgctcaagacttcgattctgatgaggacgcacaacaagcggaagaagaagtggagacggacctcagacagcacagagaagagaaaagagaacgcgaacgacgtgagaaggacgaacacagacacagcagaaaggatgggaaaaggtaaacagcgaatgaaaacatttaaacatttccaattaaaacaaaggcatcgcgaaagacgtgaccagcagctggacgagttcaaaagggagctgaaggaggaagaggcattggcacttggggaggtggaggaggaagacgaacaaacgcgggaggagcggcaccaacgggcgatgttaaggcacagacggacggagcgggaggaagcgccgttggaacaggaggacttggaggaggaggctgacgaggcgagtcaattgaaatgtcatttcgatccaccgatatactcgttccgatttcagaaactttattctttcaaaccatttacatttactgatttaggatgaacggcagcggaggagggaattgctgaagcgaattcgccaaagacaagagggagaaggtgggaaaaatgaaaaatttatgaatttcataaatttcattttgc

SEQ ID NO: 36984 - DNA, 531 bp, Heterodera glycines
taatacaggtaaaaaatactgactaattctacagtagactattacagtataattcaggaagaagggcatttgaaggtccgaacctaaccaaaaaatatttacaaaaaaaactttcgacaactattgatatcgaaaaatattttaaaattttagcgaaattattaaaaaaaatggaaaaactttcaaaaaaaagcaatttaatcatgaagcttatcattaatgtttaccatgcttatagatgagatcaacgcgttacatgagatgatgatggcactggaagctgactttgaagaagcggaacgtgaagccaaaacccatccggacatcaatgggggcgatctggtgcacaacatcatctttcctgagccggacggcatggcatttgacgagtgtcaaaatggcactgccgctgatcagactgagaaggcggcggaaaacggagttgatcaggaagatgaagccgacgaagctgatcagttgaagaacaagctgaaacagaatttggagctgtttggagggccaaaggaaagg

SEQ ID NO: 36985 - DNA, 710 bp, Heterodera glycines
ctgttgtatcctagggagaagaaaggggtaggttatgcaccccaccacatcccaaaattctgacgttggtaggtaatggaattttggcgacaccaaccttctccagcaagtggtggtggtgattgtgttgcttgtactgctcgtagttgatgtgcctggtcttcaactgccgacgctgcttctgttgtcgttcccacagtgtccaccatcgccacttccgacgacgctgttgacggtgcagcggatgacgtcattgtcgtcgacgatgccgttgcccggcgtcgttccctcgtgccgctgcaactgttcctgctgttcgcgtcctcctccggaatgctgggcagcgggccggccggctcagcactgcccatgccggcgtccgaccgcttgcgcggtgtccgctggccgacggttggtgacgacgcggaggaggaagaggaggactgaccagcagaattggtgccatcgccgccgccggcagcagtgccacaatttgcatcaccgccttaaaaattaatgatgcaaaaaactcatgggttcatggcaaaagcatattcaacttggaggaatggcttataaaaattttaaagcgctagatttatattaattccacgcggatctttttgggggtgcacttcatttccctcttccccgccgttttccattttttactaagaaatttcctaagaatttttttacgaaaaatttgt

SEQ ID NO: 36986 - DNA, 839 bp, Heterodera glycines
  unsure (1)..(839): unsure at all n locations
tggttggtaagggaagaaggggagggggggcaaaaatgggccaaaatgggaggggctgtgaatctaagacaaaaacgggaaatttttgctataaaaatgagacaaattaatgctttccgtcgaaagagggtggcacaattggagagcaaaacgaggaaatgcatttttcggttcagagaaacgtcgaacggactacaaccggcacggaatgtgccggccagcagaggcggcgttcgcctcggcacaccgacggcggacagcgccggccgattcccactacgcccaccaccagtcccaccctttccatgctcatttccgttcccctttcggtcggtcactttccccgtccgttcatccgcttcttctctctccccgcttttctcagatattttccgtgaatttttcggcgaccctttgtcatcgtccgactttcatcgttcgccgtttttcgcttttcccgccaacggcggaatgaaacgtaagttgagaagaaaggacggggaaaaagaaggaaaccaaattggacagagaggagacggcatacgacaaatctattcggagacggggcatttggagcgcattttgcgggaaaagacgagaacaattggtgggcaattgggaggaggggaagggnnggggggggtaaagcaatttaataccggagagatgggggggggagactcaattactcaaacattaagaagtaagtttactaaagtgaatgaactttgtccatttagcgaattctccacggtgattcggttcagcacgagctcaaaggacccgggaaaaaagatcaaaaagacaatcacacaaactgcaagtttgcaacattacag

SEQ ID NO: 36987 - DNA, 962 bp, Heterodera glycines
aaatatgtacaaaaaaccccaaatatgtaaataaaattttttttaatggtattttttgggaaagaaaatccccgtaaaatatgaaatagccacaaaatgacataaaaattactttttttggtatttttaggcaacattttcaaacttattttttctttataaattttcaaaatatgtaaaaaaatgaaaatatatatgaaaaaaatccaaaatatgtacaaatatgtaagaaaatcccgaaatatgtaaaaatatgtaaatattgtcccaggtcccggtcccgtggcactctattaaattctataactcaatcttttaagcttttttcgtcaattttgacatgagttcagaatcggacgaacagagtgccgatgttaacggactctgttcgcaatcgcttcgatcagatgaaaaagtgtgtcccgacccggacacaattaaaatgtttattggccaaattccgaaggtccgacgaaatttatgaaatgtttaaataataaatgcgttcttttgaggcgtgggacgagttgcaactgaaggaatactttgaggagttcggtccgatttatcagctgagtgtgctgcgggacaaagagacggcctccagccgtggtgactcacccccccccccttaattaattaattataataatcaccccaattaattcattttggagccaatttccaatttaggctgttgcttcgtcacttattatcaccggaaggatgcgatcagtgcccaaaatgagcttcacaatgtgcgcactttccccggactcagtcacccgattcaaatgaaaccggcggatgtcgaaaacaaaaacggtaaggaaaaggcaaacttcacgaaattagtgacaattaatttaccagtgacagttccgtaaccagaaaatttcaaagggggaaatccaaagacttctgttcttcgaaccaaatttttttgtcatttttcaaaactc

SEQ ID NO: 36988 - DNA, 827 bp, Heterodera glycines
tgtaaaagtcaactaaattagacattcttggtgtcttatgtgatagccctaacatttctctattatatcacctaaatttcaaaaaatttggtcaaggttgagcaaagttatagccaaaagtacacatgtggccaggttttcgaatatttttggtcataatttttttgaagcctaacaaaattttttgaaattttgcaggctaatagaggacacatagggctatcgaatgatagcaagattattttaatttgttcattctaagaaagttttgatcagaatataacggctcagcaccgagggaagtgcgcaacttccgctcggttggcgagttcgaaattgaaatgcttctgtgattacggaaaaagagagttaaattggaatggtttattttgaattttaatatttaaagttaattcttattatgaaagcaacaattttttaaatcaactttcaaacactaaaaaagaatgataaaaaaggaacgaccgcggtaacgaatgaatgctcaaaaaaaaatttttttttttttttatatcataccaaggtaataaagcacgcaaagtataaatgtaatttaataaaaactgaagttggatgaacggaaaattaatttaatcaaaatgagttaataaatttatttatgaaattgaacactgacaaattggaaatcaaaaatgtcattttttgccgacgaaggcaaattttgccattttcggttgcgcaaaatggaaaaatgaatttggcgtcatgtacattaattaaatgaaataaatgtttgatttttacccaaagatgaaataatttaataaataattaatacacaatta

SEQ ID NO: 36989 - DNA, 1289 bp, Heterodera glycines
  unsure (1)..(1289): unsure at all n locations
gtcagacgatcgattgncacgtcagaatcgcttcggacttccaccagagtttcctctggcttcatcctgctcaggaatagttcaccatctntcgggtctcagcgcatacgctctgtctccgccncatcgcatgcgatcgagacgggactatgttgcgccccaacaccgcagtgccagggatcacacatcagctccgtaagaagccttcactttcattgcgcctttgggttttgaacacccaatgacttgcgcatacgctaaactccttggtccgtgtttcaagacgggtcgaacagatgaccggcttttacaccgagaacgcacaactgagagcccgagctggaccgaactggttgctggtacgtgtcgcacgcgaccgccaccgacccccagctcgagtcaacacggacccgaaaccattgcacaattcacccagagtaaacagcactcccccgatccgggtaccagaccccgaaaggctggcctcaagaccgagctcacgcagctactccgagcatctcagcgcactccgcctgcaaatgccccattcgccactgaacagaaagaaggacagcaaaccccagtctggaggctagcagcccaacgtacagcaacaaacgggtgaatgcagaccagatacgccagctctgtccgtttccacctcatcggtttcacgtcctctttaactctctcttcaaagtgctttgcaactttccctcacggtacttgttcgctatcggactcgtggccgtatttagtcttagatgaagtttaccacctgatttgggctgcgatcccaaacaacccgactccaagacacgtaaagatgggtaggcaccgccagttggacaggtcttgcaccttctctggagccccggtcaagggaaacttgaacaagcgggccaacccatgctcacggtctatacgctacacctcgcaaccccagaggagctgcgattcagcgctggactcttcccagttcactcgccgttactacgggaatcctcgttagtttcttttcctccgcttactgatatgcttaagttcagcgggtgttcacgtctgagttcaggtcgaaaaatcaaagcaggaatgccagtaatccaggcactccgccacagcatgcgaagcattggtgcgcccgagttacggtccgtaaaacgcgaattagaaccacaagttcgcgcctgcacaccaaaaccccacagncgagccgagcaagtaacgtaagaacacgtancagtacatgatcccacgaaagcacgcacaagcagtgcattttatggtaa

SEQ ID NO: 36990 - DNA, 1688 bp, Heterodera glycines
  unsure (1)..(1688): unsure at all n locations
tgacgagctctgattaattaatatctctttttatattnaagattaataaatatatacaaatcaatttcganttgtaanaattaatttgttgtatatttattagattcacctggttccttacgtatcacatccttcagttgtgttttgttggcaatttattattttttatatagtttaggatttattttaattttatgttttttatttaatttcatgacttgagatccctctttatgccaaagcattgaaatgattttaattagcaattatgctaacaaaatgatgaaatttttttgtgaaattcacattttttgaccagttttttttaatcaaattttcgccaaaaagttttgttccagaacagtgatagtttttgaataattttcttttaaatttgggggggggcaaaaaaacgaagaaattttcaattccaaaatacaaaaatttgagatacaaaaaatttttttggggggggagggcttatattttaggaaatacggtaatttcttattattacgagatctaaatggaaaaattacaacaaaatttattaattttcataacggtggtgcctatcaccatggcggacctgaaattcaattagatttttagaatttgagaaaagcaattttaaaaaatctgattttcttggtcccccatccaaaatttattcatgttacgggaatcaaaagaattgtcggtaatatataatttcaataaaattgtaaaaattcaaataacaatttattttttctatatcatttgatacttaattatagacatattttaatctgataaaagaatagaaattttcgattaggtatggtaaaaaatcctcaaatatatctaaaaaatgtgtaagaaaaaaatacaaaacatgtaccaactatgtacaaaaaaccccaaaatttgtaaaaatatgtaaataaacctacttttgttagcaatacaaaataaagagttttcctacaattcatcagataataaaaataaaatgtttaaaccttttaaattaataaacattgacatagaattatcagtcgccaaatgtcttacaataatttgaaataggtttacttaaattgatttcgaaaatttattattaaattcaaaataaaaaattaataacaaaagaatttcttttgtaaaatccttcgtaatctctatttaaaaaattaagcggatttaaaaactgaagaaattcaatttgtgcaaatcaaataattatttatataaatttataaaaaggattaaataaattaatacattaattcaaaaataattatattcataaaattaaattttaaaattacttttgaagaaaataagattttttaggtaaactacaaaaaagtaatattgaataaaataccaatatagaataatttttattgaatttataaatagtttagttattaataaacaataaaatttttcaagtagatccaaaattctcaattaaaatttatttactagcaaatttctttatttataattattaaataaatattatttcactttatttcacaaaaaaggaggactgtgatactgaagttgaaattaatttaacaaattaaactaattaaaatgcccaaaatacattcttatcaattaatataaataaaagatttaaaaaattgcaaaaaaatatattggtatgtataaaaatacaaaattttctcaaaaat

SEQ ID NO: 36991 - DNA, 790 bp, Heterodera glycines
tccaaaatatcttaaaaaattaataataaaataaattacatcttaataattcatttccttgatttataaattattgacacccgaacaacctgaacttcaggttaaatatacaatttatgaaaattaattattataagtaatttataaaaaacaacattatttaaaatttttaaagataattaacaaaaagaaaataattattactattagtggaattagaaaaaagaaatgaatattaattattaaatttaatcagtaatattaatagaaccccttaggtagaaaataaaatttttacttttttctgaaattattttaatttagaactaatataaataaatgttttatttctaacagtcgtctaagaatttatagatatgtatacaaaattgctatttaaataaaaccttaatggcagaaaaattaaacaaaataatttatttatattacaattgtgtaagaataattttatacttaatatattcaaaaagcataaaaattcaatggataatctaaacttaattaagaaatggtgaaaacaatatttaggaactcaaaagataaaaaatatagtatttttaagaataaaaaatgcagaaatgtgtttaagaattgaaaatttttctcaaaaagtttatttttttttgtgttttgcagcctaaaaattcttaataaaaaaaatttaatgactttttcgggattttataacttttcatgccttttttcaatattttggtgcctattttagtgcctttttcgcgctttttggtgcctttctttgcgaactcta

SEQ ID NO: 36992 - DNA, 902 bp, Heterodera glycines
  unsure (1)..(902): unsure at all n locations
atcatgaaatttgcaaaganaatgttaatgattcccgaggcggaatatttggctctacggagtgcgatgaatagtggtgattatctccaaaatgaaaaagcgagtttagacgcaaaaatttctcagaatttacaagaccccgacataagcgaggacctcaaggcgaagagacatgattggctctataaagaaagacgtacggtaaaggggatacttgaaaatagaccacagaaggtagtgattgagaaacatgtaccaggtccaaatgttgcaccatatctgggcctcaataaccaatccaaaccacaggagaccgaagaaccacggaaaataattattcctaggaaaagacttgaagagcaaactcctgatcctgaatcagataatgatacacttgaggagttaactccggagccccaaacaacatccacactcaaaacacacattccgatcaaaactattatacacccgacccttttaaacggtctttttaggtacgtgaaggaaaacaaagatttatttaaaattacggcggccggaaaggtacagtcgaacatgaatttgccgattgaaaacagtaattatagagatgttttgttgtatctcgcagggaagaaagatgaaacgccgcgcggtgcaaaatttctcaaagatcggttactgaaggatccaacagtaaaagacatggttgataaatcaaaggtcatgtggggacgtggaaggaaaaaggcaataaaatctataaaaacacccggcatagtgcgagagaagaaacccttcaaaccactaatatgggcaagactgtagagaaaattttatcaaaaatttattttaatttaaaatctgcggcaagttttgtgaaaattcaaaaaattttaaatgatgccaaaaagattgacccg

SEQ ID NO: 36993 - DNA, 474 bp, Heterodera glycines
  unsure (1)..(474): unsure at all n locations
ttttttttttttttttttttttttttgctcgccccccccccccccccccccacccccacaatataatttttttttttttttttttattaaaaaaaaaaaaaaaaaaaaaaaaaaaaaaaaaaaattttttttttttttttttttttttcccccccccccccccccgggggggggggagaagtatttttttttaaaaaaaaaaaaaaaaatatattttgggtggggggggggggcgggccctttttttttttttttttttttttttccccccccccgtttgtggggggngggggagggggggggggggcctcctcctttctcccctcccccccccccccccacccccccctttttttttatttttttttttttttgtttttgtgtcggcgcgggggggaggggggggggggtggcccccccccccccccccccccccaaaaaaaaaaaaaaattattatttttttttttcttttt

SEQ ID NO: 36994 - DNA, 1170 bp, Heterodera glycines
ttccttaatattttcctgcaccgaaggtactcactcggccgcttcgcggcctcgtggtgggccttcccccccgcccttcagagcacgacaaatatttcaacaaaaattttgaaaaattgactagagcaatcgaacgctaacggacgacctaatggaaaaaaatccccgaaggagagaatttaattaaatccattccttcgggggaccgtgccgggtgccgcggggtaagcagtgctggttcgtttcatcacggcaccgaaccttttggctagtcagcaatcgttgcttaacttgccagatcggacgggtgcgcatgattccactgttccaagcaccccaccaaaagcaaaacgatataaccaaaatataaggaaaaatttttaaaaaaatttttctccatctccctttttgatagaaaaagcatcagagtgcctaaactaacatgtaaataaaatttggtgcgctttagagcactttctgaaaaaatatttatgaaataaaaaaatcgatttttcaagtgtccgtttggggtactcaaacaattatggggagcaaaaatccaacgcagaattaaagtacaggctatagggaagctattcccgaaggattcggtctccccataaatctgggcgcatcggttcggggggactgccccgaaaacaaaaaaatcgattttttcaagtgtccgtttggggtactcaaacaattatggggagcaaaaatccaacgcagaattaaagtacaggctatagggaagctattccggaaggattcggtctccccataaatctgggcgcatcggttcggggggactgccccgaaaacaaaaaaatcgattttttcaagtgtccgtttggggtactcaaacaattatggggagcaaaaatccaacgcagaattaaagtacaggctatagggaagctattccggaaggattcggtctccccataaatctgggcgcatcggctcggggggactgccccgaaaacaaaaaaatcgattttttcaagtgtccgtttggggtactcaaacaattatggggagcaaaaatccaacgcagaattaaagtacaggctatagggaagctattcccgaaggattcggtctccccataaatctgggcgcatcggttcggggggactgccccgaaaacaaaaaaatcgatttttt

SEQ ID NO: 36995 - DNA, 1531 bp, Heterodera glycines
  unsure (1)..(1531): unsure at all n locations
tcattcatttgcctctttctcctaattttccactttaatctgctccttcacttcaacaataagtgagctgccccatatttcgctgtacaaaatgccaaatttcctttaactccgtaattttttccctcctttaattacttctattaatccttcttttagcaaattcttggcacattaatctttaatcctccaaagcgatgcttttcttctgttggcttttgccattccaatagcgatggctccaactttttcgtcccatttggccattcaaattgaaaaaccttcgaaaatgctcccctctcccagcgggagggccccaattgtgatcagcgaattggacttcgagacggagtcgggcgaggagagagacgacttggaagagctgaacgacttcacctctctgctgatgccagccgcgagaaaaagtgcggcccgacgcctcggggcactgaacaggcgagttttggcattttgccatttgaccggtgcggcggtgcctttgagttggccttttattgcggaccgatggtctctttcagtccgattggcaggagagtccaagacggccaaaggcagcgccattctcagcgcaacagtgtgccggccagcaaatttccggtgattgacgaggacctgctgatgttggcgacgcggaagatcccagcggacggctgttcggcaattccgccgccaaatttgtgccgacttattacaaatgtgtccgaggcacggtggacaaacaaaagcccgttgaacatgcaaaggcaatgctggacacngagcacagaaggaacgaccgaaatccgtgggacattgccaattccgcgagggacaccccacggnacaagcccaagaagcgcaaaatattctgagaaaaaagcgaccggacttctgcagggcgaataatggccaaggcaatggcacaaataagcaaacgaagcgcaacgacgaggcggcactgagacggatgtcggcactgtccgttgtgtccagctacacagcgaacatggaggaagcagcgaactgcgactgcacttcgctcgcaatggcagctttccgtcccaattgggtggcggcgatgagacgcaaaaagtggcagcagacgaagcagaaaacgcgagagcggcaggccgacgacgcgtaccgcaaagcgtcgcccccacccattccaacgcgcgactcgtgcgccaacgactcgggcatctcctcctcctcctgctgttcctccgagtcgagtcggtccgcctctttggccgataccgtgcagcatcagtgtcgcctgctgaacccaccaaatccccaaactccgagctcaaactgttcacgttgtgggcttagcatgaatttgccgccgaaaagtgtgccaaatgaaaaaaagcgaattgcgaatcaaaatttgcaacaacggcggaggcattggctggcctatttactggggaatatgttgagaatgattgagaaggagaagccggacgaagggccgcggaggagaggggtgggaggcggggggacgacggtggattgaaactga

SEQ ID NO: 36996 - DNA, 497 bp, Heterodera glycines
  unsure (1)..(497): unsure at all n locations
tttgattttacattttttagggttcggataagtccgatcggctggttgatcacttcattcattggccctccttttgtcccctccccgacccttttacgagactcccgatttcttttttatttttttgtatttttttaaggttagtaccaaccagtatgatcggcattccgtcacaagccacgcttatccaaaaaataaaaattctcaaaaacattaaaattccgaggcttactgctgagcaggctacgattttaagaagcaagaagctaggtttaagataaagttatatcaaagtctgctgaataatttctttacaaaatatttacccatttaatttcaaatccacacaaaactcaccaaaaagttactcacttaaatttatgccatttcaatgtatcccaaacgcacacttacacaaattttttttttaattctcggaaatatttaaaaaattccgaggcctactgctctgaggagggggggggggnggagggggg

SEQ ID NO: 36997 - DNA, 756 bp, Heterodera glycines
tcagaaggaaactcaaaggatcgaaatgagtctgatcagaaggaaagacaaaggatcgaaatgagtctgatcagaaggaaagacaaaggatcgaaatgagtctgatcagaaggaaagacaaaggatcgaaatgagtctgatcagatcagtccgtatctttcaatttcccaagggaatgcccacctccgtcgatgtcctcaaccgttagagcctctgcaaattgctgcttccagctgtgggtgccaacaagaaagccgacattggcattggtcaccattttgtcgatgaaattcttgaactccttgtcctcagtgatcaaaattttgcagcgcgaatgttcccctgaacaatggccttttgtggtgccattcgtccgtcactgacccaaaatcggtcttccgtcgggctgtccctccttgggccccacttggccctttccatccctccattccggcgtgcccatctccacaaagaattcctccgacttttcatattcgtcgtcattaataatttcgatgtgaatttcggctctgcaataattccttttgcatttaaattgtccaaatgtgattcattcacactttgtctgctcattcagaaacagcaattctttctcgtgaaccctaaagtcttttcccgcttttgcgcttccttcggtcactgtgaagggaattcgaacggagccgcgtgccccgcggtgccgtcggacttcgagaatgaattggccttggggttccgggacacagaatacttccg

SEQ ID NO: 36998 - DNA, 1188 bp, Heterodera glycines
  unsure (1)..(1188): unsure at all n locations
cattttgtattaaatgcttcttaagtgtggttaattgtaagtcgaaaataggtattgtaataagccgggttcagaagacccgttgaattttcttttattgttgttgtttttgttcaggttgcactcgaggcggccaaagtgttggacgacaagaccatttgggtggcgttgggcgaggccgcgctgctgcagggtaaccaccaaatcgtggagatggcctatcagcgaaccaaggactttgagcggctggccttcctctacctgatcacggggaaccgggaaaaattgcagaaaatgttgaaaatcgctcaaatacgcaaggatgtgcacggacagttccaatgcgctttgatgctcggcgacgcgcaagagcgcaccaaaggtactgctcgaacactatgtggttgtatttatgagtataggtgaaatgtagggggatgttggcccgactgcataccaacgaagatcaggagggttcgaaagacctccatttcatcccagtcattacaaagttactccattttcgcccccccccccctcatttttatttcactcctattttggaaaaaatttaccacttggagtgttcagactctacgccacccctccgcccccccgtgaccgtcccaggggtatagttagtcacaaatacaaaaaataatttaatctcgctgaaaatttttctttacggaagtctgtaattgactgtaaaaaatttgcagtgctcaaagaacttggccaacttccgctcgcctatttgtcctccgtgactcattcgcttgacgaggatgcggaacagttgcgtgccgagttggaacagcgtcaaattgcggtgccggaaacgaacacaagcgcaactccactgctgccgatgacacctctcaatccgctggtggacaattggccccagctgaccgtctccaccgggccctttgatgcacagcaactgttggccgcgacggcggcctccagcggtggcggcactctgtccaccgcaattggaaaatcgagtgagcgaattttaaagcgtaaaaaattgcttttcttaagaaaacgaatcagaataaaatataaccgggttaaaatggcattaggtcaacattaaatttgaacaaatgctctcgtctttattgttttttcaaanaataatttaatttaccgcccatttttgcccaaaantgtagggcg

SEQ ID NO: 36999 - DNA, 1082 bp, Heterodera glycines
  unsure (1)..(1082): unsure at all n locations
agtaaatttttaatttatacactganntcatagaanttggcagagcggagccaatttcagctgtcaaaatcagacgaaaatgtgggtgtggattgtgaaggcgaaatttcttctcaagttgagtcaaccattcggttgccaaatgcacatttttcagcagaatccatcttcctgatcggcttgtcgattgcaacgctttgtccgcttgttcaaatccttcggctgacccaagtgcaattgacaaaatgtccattttcagctcaaatgcaaggtcctccacgcgattagagacgtcatagcctgtcgctgaacacaacaaaacgggcactttgcattgaacctttaataagagatgttttataagcaagtggtatcttacattttgtctgacctcattcaaaattatttcacggaggttaaccactttgtcctgttgcatgaattccgaaccaaacgccttcgtcataagcatgtgtgccgaggaaagcacctgctcaggaggaagggctgtgagctgctccaattcctgttcgtaggcattctctgcaccgcaacagcgagaatagatccggagcaaaagagaagcgagcagaatttgatcattgtgaagcattcctatggaaacacgagagtacatcaccttaagcaagaggaactattgtagcagtaaagtaaaaaaagaccgaaaagagattttgaagaatgattgacaggcgagcatcgtagtctttcacattcccaagttgtggtgacttgagaacagttgtgaaaatgtccagcaaaaagtccagagaataattgtagagcaaatgaatctcgtccaaacgatgcaacatgagatagatgagtgaacacgcattagccaacttgtagtatttttgtgagacaatttcgacctatgggaaattggcggtagaatttagaagaatcgattcgaaacgatcattaaaaaacgtctatacctctttcatgacttggtcagttttcgcagatttcttgctacttctgtgcttcatttctcagttttcccagcgtcgcgatcacggagtcatcgtccagtattttacccttggactcgttca

SEQ ID NO: 37000 - DNA, 797 bp, Heterodera glycines
  unsure (1)..(797): unsure at all n locations
tgtaacattaagaagaggcattcatgcttttgccagtctctgtttttagcattgactttttgaatctgagctcagatttttgtatcaaatacttggttttttgtaatactgcagaattgcgattccgactaaaattcaaaaatttatttttaaatttttcctggggtaacaaatgtgctgattacgaattaagcttccatttagcaaaatccaattttatttttaatttttatcatcaaatatgcacttgatctaatgtgaattttgaaaaaatttaaacagaaaaaaaaaatcaaaagattgaaaaattatagacaaagttaatggcatatatctaaattctactctcggataaattctttatatctttttttatttgttttagcaaaatccatccagtgataaatttgttcattagcttccaaattatttcacgccaaaatggccgaggaaatcggcaccacagaaattgccattgagcccctagtgacaacaactccaaaaacaacactaacaatgggtgcaaaactgaaaaaaccgttgctgaacaaactcaacaaaatggtaaaaaaaaattggttttacgaaaaaattaaaatggggttaaaatcaaaaaattggcatttttgaaattaccccaaaattcgaaggtattttaaaaaaaatttaaggatcctggcgaactgcgccatctcgtggccgacatgcagtcaaggcttgnccaggtggaggacacgaatgttgaccccccatgtaaggctcagcacaatgccgtagaggagcgtgatgtgagtggg

SEQ ID NO: 37001 - DNA, 683 bp, Heterodera glycines
ggggggggggggggggggggggggggaggggggggagaaaaaaaaaaaaaaaaaaaaatctttcccattgtgtgggttgttggcgggttccgcccccccccctcctcccctcccccccctcctttttttttttttttttttttttattaaaaaaataataaaaaaaaaaaaaaaaaggggggggggggtggtggtgttttttttttttttcttcccccccccaccccccccccccccccccccccccccttccttttttgtttgttttttgtttttttttttttttcttgtttcccccccccccccccacaacaaaaaaaaaaaaggggggggggggggggtgtgtttgtgttttttttttttttttttggggggggtgaataaaaaaaaaaaaaaacccctccccccccccccccccccccaaaaaaaaaaaaaaaaaaaaaaaaattttttttttttttttattttcacaaaaaaaagaaaaaaaaaagaagggggggggggggggggggttttctttttctctttttgctccacccgacacaagccgacaaaaaaaaaaaaaaaaagaaaaaacaaaaaaaacaaagggggaggggggggggggggggggggggggggaggaaaaaaaaaaaaaaaaaaaaaaaaaaacgccccccccctcttttttttttttttttttt

SEQ ID NO: 37002 - DNA, 728 bp, Heterodera glycines
  unsure (1)..(728): unsure at all n locations
acttacagatttgaaggtttcagacgcggtgtagaatcttaaaaaatgaatattatttaaatcttttataagatttacgagatacaaattaaggaaatagtaaagttcatgtgatcttgatagaaaaaagataatgaaaaggtggtttattgaaaaaaatggtgctaattcgagtgcaggatctataaataaattaatattattttaatcattaaaaatattttagttatataaatgataaatcgaaatttattaatgctctgataaaaaaatcatttgataatggattcaacagaaacggaaaaattagcactttgtggaaaatattttacttacagatttgaaggtttcagacgcggtgtagaatcttaaaaaattaatattatttaaatcttttataagatttacgcgatacaaattaaggaaattgtaaagttcatgtgatcttaatagaaaatggataaagaaaaggtggtttattgaaaaaaatggtgttaattcgagtgcaggatctataaataaattaatattattttaatcattaaaaatattttagttatataaatgataaatcgaaatttattaatgctctgataaaaaaatcatttgataatggattcaacagaaacggaaaaattagcactttgtggaaaatattttaattacagatttgaaggtttcagacgncgtgtagaatcttaaaaaattaatattatttaaatcttttt

SEQ ID NO: 37003 - DNA, 836 bp, Heterodera glycines
atgaggcgggggtctggggttcgaatccgcttggctgcggattattttttatgatgtttgatgaaaaatcatagataaaagtcaatgatttttaaaatctgagttcatattcgtgaccagcgtattttttaaccccaaattcattgctaaactttttttttaaataattcaaaaaaatcaattagttaacaaaaaaatcttggataaaaatcaatgattttcaaaatctgagctcagattcgtgatcagcgcattttttaagccttgaaaaaatatctgggaaatttttaacatttttcttagcgaatattgttttaataaatatcaacattcacgttgatatgtatttatttcacatagagtgccacgggaccgggccgggaattcccggtcatccgaggtcccggtcccgggttttgaaaagctcaggtcccggtcccggtagggcaaccgggaaccgggaaaaacaagcactggtaagaatggggtctgagtgaaaaattagtgaaaattggagtcaaagggaaaaataataattaatatattctttaaaagtgacactgcccaagtgtgcaaatggcctaatggctagtctccttgactttcccttcttctttcccctggttcaatccctctacagaaattaaattattttcaattttctttttgtatactcgtgggtttcctatagagaaaatatgattcctcatagtttttttttaaattgatacatattttatccttttttaaatgaaaatcctaccaattgagcttaataatcgcaaaaaccaaccctttttttgttgaaaatctgttaacaaattgcacccaaattt

SEQ ID NO: 37004 - DNA, 513 bp, Heterodera glycines
ctgactgacatatcacaacaaaagcattcatcaaggtaggcatttcctcccctacctggcatagttaacgcattcggtaaatcgatgagttaactgctgggtattgatgcatactgctcccgtcagcaagcacattgctcagagtctgctcggtaatgtgaggacgtggttttggcaactgcaatagaggcgttatcttcaaaagaatccgttttaaaagccatcgaagaatataaaaaaattggccgagatgaatttttaaaacaacatgaaataaaacgatttaaaaaatacacccttcattataatggcgagaagtacgacatccgaggcattgccgctagagcatacaatgaacagtatggctatccgtttaagggaatcaacgccgatagcggaacggaaaaagccatccaatttctcaaagatctcggttttgagatcgtcgaaacaccgcatccttttgactatttaaccgaaggtaaactgtatacacgcaaagcgcttatcgag

SEQ ID NO: 37005 - DNA, 930 bp, Heterodera glycines
ctctcgatgccaagctcatcgagaacgcctgagatggcagttcggtcctcagcgactcgctcggacggcttttgtttctgcgattcgggtagacccattacgacgacgcttcgccgacgctcatggtcttgaatgacctcttccatcattttatgttgtttgaaatgttggagttgatggtcttgttcggagatgacggcctgttgttgctggacctgctgtaaaagttagacacaaattttcaaaagttgtttggtgatggggtcgacactgttgttgtccatttgttgggaaattgccgcaagttggtcactaagagcggtatatgggtagtcagaggtggacttttttgatgcgttgtctgagagaggagaaagatgggaagaaggacactttccaaacatgacaaatgtgaattaatgacaaacatttttgtttaagccaaacgcatagattagtgccgttgaaagtgcaaccttttgacacttttgtccaactttttccagcaatttctgttcaaattaactgattaaataattaatgatgaaaaataataaaatatcatttatattgctaattattggtcttaccaaatgagcagctcgcctcgacacaagaatcaggaccccagcaaaaatccagctttctagggtcatatgggtataaatcttcgtaataggagagagtgtcatggctagggatgctagttttatcttaatccatatttttttcactagattcagcatagctcaattagtaggactcataaagtgcactaaagccgaatcttggtgattgttttttcgtctttgtagacatattagattaaaccctttttgtttcatgtagtaggaccacccattgatctcctcaggtggagatgattctgaaaaggatgttacgccgccaccacgaatgggccgggttcat

SEQ ID NO: 37006 - DNA, 299 bp, Heterodera glycines
attgccatgagtgcaacgaagctacccggtgtgaacacccgacgcgatccggccaacaccgatcacgaagatgcatcctccccctacccacttggatttatcgccacactgcatcgcattggcgcgggcgccgctgccgatgggcagccctggcccgagcgcaatctgagcctcgggcgcagcatgcagatggccgatgcggattgcgcgctgggtggcctgcgcgtggtggcggagctgatgctggcggcggagcgcacgcgacagaacggcaccgacgaagagtacgtgggggatcg

SEQ ID NO: 37007 - DNA, 833 bp, Heterodera glycines
ttatttgataaaaaaatcggctaagattctctgttgtcttagcttttgatcatactctcccccctccctcttaatcaactcttcactcctccagattccctgatcattctcggcccctcctcccccggcctttgatcaatcaatcccccctccggcttctatgatcattttcccccctcctccctcggcatctcttatcattctcgtcccctcctcccccggcctttgattatccatcccccctccggcttctctgatcatcttcccccctcctccctcggcatctcgtatcattctcgttccctcctcccccgggctttgattatccatcccccctccggcttctctgatcatcttaccgcccttcccccatcaatcacagagccacgctggccgtcacggcacgacttgtagttggaggacatgccaccagggtggtagaagatccgcccagcttctacacatgggtgaggattttgtttggagaatggtaaaatgcagagatgccatttaaaagtgcaaaattggtgaaagtgtcgcttaaatctcatgaaggaccgatcagtcgctgttcagattgcgatttatcattttgataattactaatcaattcatgattttcattcggcccagaatagtggtactcaaatattgtgtgccgcccaactgactgagactgttcagggagaaaccgatgcccgactgatggccaatggaagcggcgagcacagcgccgccgcatccgtccgccattgtgctgacgtccggcttcaagctggacaagcgtaatcggatgcaggactataaggggccaaaactaaaaatgtctgttg

SEQ ID NO: 37008 - DNA, 77 bp, Heterodera glycines
ctccgtcggcccgacaaccagtatgcgtatggaaagttttgaacgtgaatttattgagcagaccggcgtgaaactgg

SEQ ID NO: 37009 - DNA, 895 bp, Heterodera glycines
  unsure (1)..(895): unsure at all n locations
actagggcttccttttttagccacaaaatgtcgcgaaataggcattanataggcacaaaaatcctcaaatagacattaaaataggcaaataaatttttattaactatatttaggtagcaaaacacataaggcacaaaaaacttcaattttattaaaaaaatttttcaaataaggataaatttttaaacaaaaaattttttattaagaaaaaaaattaatttttgggattaatttttgagaaattttttccaattcttaggatgtattttatgaaattttttcggtccatttcttcggggtgtatttttcatttttaaatgcatttttgttaaggattttttcgaaaatcctgaaataggcacattaaaaaccccgaaattcttgcttatctacacttattaagtacgcaaaaattttagggatttgtttaaaaaaggaagccctactgatcactgattgactagcccttttctgaacattaatatcctctcgacagtgatctaatgatttattcaatcttctctgatcagtgatttatgcagatttttacataatatatgtgaaattttacaacgatagaagcatgtgactttcctagtattgtgatcctcaaatccgtgaagaagtatccaaatggaatgatttgctctggctgatcaaagtccggaaaaacaatgatcagtgtgcattttatgccaatcgagttccgtcagacccacctaattcttaaacaactttggtacttgtaggttttgctaccccccccccccataaaaatgtcatggccccgacaatggaaagcacttttctagggtagttttaggcgctgatcaagaatcagaagtcaaaactgcaaaaatctatgattttcatccatgtgattttgtcaatgatt

SEQ ID NO: 37010 - DNA, 656 bp, Heterodera glycines
cggcgacggaatgccgcgggggaaccgcgaaagtcgaaaagacaattggcacaatttcagtggcattttcggcactgaaaggacaattagtgagtttaaaatgtgacacgccggtcattaaaaaactgttaccgattcgtttttgccttttcagaaattccctcgtcttttccacttgcttcttttgtcccttccgccgttgtcgaactttgggttgatgttgtgttcaatgctgaagttcatacatgaaaagcggggggagggtcgacccccccccccccccccttcggccgcaaagtgccccaaaattggggaccccttcgcatctaggggggccggtgtaaaagggggggggaggtcgccgacgaacgagaaaagagggaaatttctgaaaatttttggctatttcttaacaaaattcattaaagattcttaaaagtttcacccggcggcgcatatcggcaccgcccccccccctaaaaaacctaatttttttcttataaaattagcccaaaatacacaccgttttcaatccagtgcccaaaagatttgcatgtgtgggcaagtggtttttggaaaatagtaaaaaaaaaaaccgatgaagggggggaaggttcgagccccttggggaacattaatatttttttttatttttg

SEQ ID NO: 37011 - DNA, 1116 bp, Heterodera glycines
  unsure (1)..(1116): unsure at all n locations
aaaaaattcataactcccttcatattaggggtacaggtagaatttaatgatccaaaaaatccgtaatttttagctctacaaaaaagnttacttgcactatttatccatcacttcttcaaaaaaagttatcgcccgaaaagttgtttcgaatttcctgacgaaaggggagacccatttggttttcagatggacaaaatttttcttcaaaaatagcctgaaaatgatttttctgggctattttttggccactgatcatgaatataacatttattttgagtttcatatttttcttctggcgaaaaagtggtctgataactgttgcacctcttctaatcacttttgtacctcttctaatcactgctgtacctcttctaatcacttttgcacctcttctaatcactgttgtaccttttctaatcactgttgtacctcttctaatcactgttgtaccttttctaatcactgttgcacctcttctaatcactgttgtaccttttctaatcactgttgtacctcttctaatcactgttgtaccttttctaatcactgttgtacctcttctaatcactgttgtaccttttctaatcactgttgcacctcttctaatcactgttgtaccttttctaatcactgttgtacctcttctaatcacagttgtacctcatctaatcacgtaccttttctaatcactgttgcacctcttctaatcactgttgtaccttttctaatcactgttgcacctcttctaatcactgttgtaccttttctaatcactgttgtacctcttctaatcactgttgcacctcttctaatcactgttgtaccttttctaatcactgttgtacctcttctaatcactgttgcacctcttctaatcactgctttaccttttctaatcactgttgcacctcttctaatcactgttgtacattttctaatcactgttgtacctcttctaatcactatttcacctcttctaatcactgttgtaccttttctaatcactgttgcacctcttctattcactgttgtaccttttctaattcactgttgtacctcttctaatcaatggtgcacttcttctaatcattgttctaccttttctaatcactgttg

SEQ ID NO: 37012 - DNA, 946 bp, Heterodera glycines
tgcatttgaatcgattttgagcaataaatgtgaattttgttgaaaattgagtttttgactttttgttcgaatttgggttcggggttcgaaatgggtagaaatggatgtcggattcgtgatcagcgaccccgaaaacctatattttgactttttttacttagaaattaaaaaaaaattttatgggggacaactgaataagacgcgaaaatgtatatataaagaggggaattttcgtttacattcattcattcacattattttttataatgtaaccgtgtcgaccctcgtttgccactggacgtcaacactcagacgccgaaccgtgtcgaccctcgtttgccactggacgacaacactcagacgccgaaccgtgtcgaccctcgtttgccactggacgacaacactcagacgccgaaccgtgtcgaccctcgtttgccactggacgacaacactcagacgccgaaccgtgtcgaccctcgtttgccactggacgtcaacactcagacgccgaaccgtgtcgaccctcgtttgccactggacgacaacactcagacgccgaaccgtgtcgaccctcgtttgccactggacgacaacactcagacgccgaaccgtgtcgaccctcgtttgccactggacgacaacactcagacgccgaaccgtgtcgaccctcgtttgccactggacgacaacactcagacgccgaaccgtgtcgaccctcgtttgccactggacgtcaacactcagacgccgaaccgtgtcgaccctcgtttgccactggacgtcaacactcagacgccgaaccgtgtcgaccctcgtttgccactggacgacaacactcagacgccgaaccgtgtcgaccctcgtttgccactggacgtcaacactcagacgccgaaccgtgtcgaccctcgtttgccactggacgtcaacactcagacgccgaacc

SEQ ID NO: 37013 - DNA, 1600 bp, Heterodera glycines
  unsure (1)..(1600): unsure at all n locations
attaggaaaaagatatgagggttcgaaatttgtttctcgaataactttttagttaaccctttttttgctttaaaaacccttacatttgnttcgtaatttttttctctatcggtgtgcaaaatttgaagaagatttaacatcagagaaaaaaggtaaacatcacgaagtgaattcggtttttctctattaacagagataaagaaatagtacgccaaaaagagagatgttttttttctctgcgctctctctttattggttcatctctcgttttttgaaacggtgtgaaaaggaaagaataacaaaatgtattttccaaagactgtgattaaatattgttttttcgactaataatacgtttatcaaagtgtaaaaggtaacaatttttccgtttctgtacacagtcccaggcacactgatctgaccaaccattaaaggctgttttgaaaggggtaaaaaaagtgagtgagtgatcagtgactgataaaccttgatcgatcactgatcaacccactgattcaatatatataccgtattgggtggaaggagttacggtggcttcgatgcaggtgccgggtttttgggcggctccgttccaatgaaaaattgacaattcttataaaaatatttattcggcaatgagaataaatagcataaaacgtacacatacataacagggtaaatataatacaattccaaattcagtacatggcatattaatacgaacaacgtccatttgtgtgagaagtacattcaacaataatatgccaaagagatacggacatacaaaaatgtacacatacataggatataatttgtccatttttatttgggattagtattatcgcgattgtctcttggggcagcattccttccgacttgctcattcatttttgattctcctcgtgataagtgcccgattcgtcggaatctgaaaaattcaattccatttatactcttttccccccagggcgctgatggcgcccggactgtttctgattcggagtcgaattcagcgccgtggcaccggattcaaaaagcagcaatattacaagatcatcatcatcttcaatgatgtcagcagccgacggcattggaaggagagcatttagtttggcaaaggtgccaaaattggcgtgtgtaggaaagaaacacaaagtgccatttcattttttaaatattttattcacaccattttcaaatttgtacattaaaaaacgaaataaatttaattatttttaacaaaaaaatgataatttaattacagcaattattaattcatattttatataaacacttcaaagtacagcttataaaaggaaagaataacaaaatgtgttttccaaagactgtgattaaatattgttttttcgactaataatacgtttatcaaagtgtaaaaacgtaacaaatttgccctttttgtatacagtccgggcaaactgatttggccaaccattanaggctgttttgaaagtgacaaaaaaggaggttatccagtgatcgctctgatcagagttcccaaggggctagacaccanagcgtcgacatctgaagcagcaacgagcacgaacatgncgctgatcacacctaacaaaatgca

SEQ ID NO: 37014 - DNA, 1112 bp, Heterodera glycines
  unsure (1)..(1112): unsure at all n locations
ttcatgcaaaataataatctatagaaattctctaaaaaagtagttcntcgcagattcggggacgttttctataaagctagagacatatgcgctaaccataaaaaagatgaatcatttttgaaaaaatttatatagttcgactaaatttgcaaatcgatttatggtgtacaggatgttgntcgaaacatacntcgtcaggcctttaagatagacctgccattgctattcctgcaaatatgcagtctagtcagcccaatcgattgctattcgaatggtttggggtcgttggcccaaacaaaagttgtgctacttcttgcaaagaagacttagccaactgtaaacagcaagccatccaaatgcttcaatgtaaaaaaaaattacatttggatgcaacctttatttttcctcgcctctcttttcgaaaagaaaagctattagcaagcgtgtttggaccaattctaaaacaaatcggggtaattaatttaatctgactttataagataaatgggaatttaagcgaaggattcatgcaaaataataatctatagaaattctctaaaaagtagttcctcgcagattcggggaccgtttctataaagctagagacatatgcgctaaccataaaaaagatgaataagttgtgctacttcttgcaaagaagacttagccaactgtaaacagcaagccatccaaatgcttcaatgtaaaaaaaaattacatttggatgcaacctttatttttcctcgcctctcttttcgaaaagaaaagctattagcaagcgtgtttggaccaattctaaaacaaatcggggtaattaatttaatctgactttataagataaatgggaatttaagcgaaggattcatgcaaaataataatctatagaaattctctaaaaagtagttcctcgcagattcggggaccgtttctataaagttagagacatatgcgctatgcatgaaaaagatgaatcattttttgaaaagtttatatagttggactaaatctgcaaatcgatttatggtgtacaggatgtttgtcgacctataactagtcaggcctttaagatagtccttcctttgctattgcctgcaaatatgcagtttagtcag

SEQ ID NO: 37015 - DNA, 696 bp, Heterodera glycines
ttttaattttttatagttttaaatttgggatttttttgggctaccaaaatgtcatggaacctggctcttttattatcattcaaatcgccccaaattttttttgcagttgacataggccatattaagtatgatttccagaaaatctcgcatgaattctcatttttaaattttttatagaaaaatgtttggatttttttttggcttaccaaaacttcatcgaacctggctctttctattctcattcaaatcgccccaaattttttttacagcttaactaggccctattaagcttatttccagaaaatctcgcatgaattctcatttttaaattttttatagatttttaaatgtttggatttttttttggcttaccaaaacttcatcgaacctggctctttctattctcattcaaatcgccccaaattttttttacagcttaactaggccatattaagcttatttccagaaaatctcgcatgaattctcatttttaaattttttataaaaaatgtttggatttttttttggcttaccaaaacttcatcgaacctggctctttctattctcattcaaatcgccccaaattttttttacagcttaattaggccctattaagcttatttccagaaaatctcgcatgaattctcatttttaaattttttatagatttttaaatgtttggatatttttttggct

SEQ ID NO: 37016 - DNA, 853 bp, Heterodera glycines
  unsure (1)..(853): unsure at all n locations
aaaaaaaagtttggcacattgccttaaaaacaacaaaaattcttttaaaacaaatgtgctagcaaaaaacaaataaataaatttgttgattgtgagatttgaaagggagcttctctgaaaaaaagagaccaatttagcttctcaatttttaattttacttctaaatgtacttattttaaaattaattttttttcgccataatactatgatcataagcagggctggcagatgaaaattttcaaaaatgttcaaatgttatatttttgattgcacaagatcaatttgagcaatttttttttttttgaaataagcattttgtgaaaatctgagcacgaaaaatcgaagttgatttttttgcggcgcttttttcaaaaacttttggggaataaggggccggcggtgccgataggtgccgccgggaaaattttttgtaatttttaatgcgatttgttgagattggtccacaaaaatggccaaattttgtgattttcgagcaaatttttaagaaaacaaagtacttttaggggctggcggtgccgataggcgccgccaggggaaaaattgagaattttaaccatatttttagcagattttacagattttgggtaaaataattttaaagataacattaaaagacaatctaacaaacaaattcataaatcataaaaacttttctcagtgacgaaatgatagggagccgaaaactgaacctaactttccttctaagtaattactagnggctgggatttttatgtgctaaaaatcctgaaatatgtaataaaatatgtgctaaaaaatgctgaaatatgtgctataagcccaanaanatgactcattctttatcattttcgcc

SEQ ID NO: 37017 - DNA, 1335 bp, Heterodera glycines
caaaaggacacattgagcaccgctgacgagggacgccactgagcgatgtttttgatttcgccgtccttaacatttaaactattagtaaatgtaggtcatacgaacagtcattaaaccttaaaaatgctaatttctttggcggtggtgaagagcaccgcgccgcttttctcgtgcaatttgaagtcgtccactccgtccaccatttggccacgcattctttcgtaatgcaacgccaattcgggcggtattttccgaggcgatgcgtccgtcgaatgctccgcttcggttttatgcgaaaacagcggctgcaattccaaagtcggcctttgctttgtctcgtcctgctcgaagtcgtcgcccaaagaaatgtcgggcagttcggcttgcatgaccatttggacgtgtgccgaatcgcccggtgcagtcgcaaggccaacaactgccattgttccgtccgctcccttcaccaattggacattcgaaatggactcgcccagtgatcgcttcaccttaattagaggatttaaatgtttaattccatcaagggcaacttcgctgcgccaaaatttgatatgttggagatggccttcccaagtggaatcgaaaagcgaggacattgactcgaatattgtacaaaaaagagataaaataatttttttttttgtatatatgtgttaaacattaaaaaacaatttttacagcttatattaaattgaaacatcaatttaaatttttgggagattggattttttacaaaaccgcccgccgttagtgttagagaaagccggtagggccaggatttctgagcatatgcttgaatatttgtaagcattttaattttattaaatttggcatttaattattttgctttttgaattttttttttcaaaattaaagaatgtcaattaacgttgtttgtcggtttccgtttcttcgactgtgtttaggtatttcggtctgcagaaatggcttttgtaaattctttatcgtccaacactaaaacaattcactttttgaagaagtctttacttcttgcacacagtatgttctttgcattgttattttcaccaattttgttttttttaattccacaacatttttagattattgcactttttcgcgcgaatggtctgagatggaatatgaaaggcacgctgaggacactttggtggcactcactgagtatttggacacattgccggaccgtgtcgattgtgaatctgtaagcatttaatcagagacattttgatgtaaaataaaggccttcgatgtttcatattcaatgggcgttttgaccgcgcacataaggtacaataatacaataattcgggtact

SEQ ID NO: 37018 - DNA, 784 bp, Heterodera glycines
tttgctactttcaacgttttttattaatttattaattcaacctattttaaatcaattttctcattttaagcaaatgaaatcaattcgaacactaattgaacaacagcagctactgaaggcaccaaaacgcacaagaaagtcgtcagatttcgacgacaacagccacaattatctgccaaatccagtgtgcttccacgcagagcaaaaacgcaacaaaattaagaagacagcgatggaaaacccgcgccaaaatccatccaaaatgctggcggaagtccatgcagacaccaaggacgaaatctttgttgctatgggcattgatctcacactggcggcagaatgagaaggtgcgtctgcaacttttttagtcctatttgtttgtttttaggcagaaaaggaagatttacggcaacaggaccgggtaaaccctttgcatttttgctgcccgtgaccaattaatgaaggatggcgaaaacattgttgcacgacagcgaaggcaccaccaaaaagggagaagtaagttccgatggtccgtcccaattcaatggttttttcttcttttaagttttaggaacgtgaaacaaaaagaatcagcagcaattccgcattatttgaaccgctgaaatggagattgcgcgacaagttggctcagtcgcttctcgacggcactgaacaattgaacatgcagagccagaagattgaaattttataacctttattcctcataaatatcgttgcaatttagaattgtgtgaagcgccataaaagctatggaactgctttt

SEQ ID NO: 37019 - DNA, 680 bp, Heterodera glycines
agcaaatgatcatcatcataacaaacactgagcatgtgaaagtgatcagagagtggtattttaaatgtaaaaaatattccaaaacgaaaaaaatttttatcattattatatttaattttatggaccattatctttcaaggagaaaaagtatataagaagcttatcatcaatatatactcaaaaataaatgtaaaaaaatttgcatttttgtttatttatttcccatttcggtggccagcagtaaattttcctgctcaataagcggtggtcctccgtccgtcactgaatgatgcttatgtgtattgaaatgcagctgatgaatgatgagaagaaagaagcagcatcttctccagcagcagcagcatttttcgtttgaagccacgccggcggggatgtgacgacgataatggccacttctgctgcagcgatgaaaaagcgtcccccggggcgcctcgggggggggggggggagggtggagggaagacattgggatttaggacaaagggccccggggcggtgcgggggtgggaggatcaatgcctttccaccaaatccggcccattcaagtttaagaagatttaatatcgctttatttatttagaatatgtatggaagatatttcgggtgcattaagtgatctaaaatactacaatcattaataatacataaaactattgatt

SEQ ID NO: 37020 - DNA, 1328 bp, Heterodera glycines
caaagcattgattggagcaaagagtgggctaaatagctactatagaggggtaattaacaatgcatttacgaatgtttacagatttgccgagaggagacttatgttcgggtgcaagactcaggggatggccgaacggaagaagcgacacgtccgctgacaggacagagcaaaccgcgcacagattttgctaagaaagcggtggtacaaccgatgcgccaagagaagctaagcgtgacagaacagaagacccttttggcaccggacgaacaaaagattcgtgaagaggaagaaaggaagagaaaagtggaggaagaaacgaagaggaaggaggaagaaaggaagagaaaagaggaggaagaaaggaagagaaaagtggaggaagaaacgaagaggaaggaggaagaaaagaagaggaaagaggaggaagaaaggaagagaaaagaggaggatgaaaagaagaggaaggaggaagaaaggaagagaaaagaggaggaagaaaggaagagaaaagtggaagaggaagagcgtaagcaaaaattgaagcaagacgaggaggagagaaaggcaaaaaagaaagcagaggaggaggagcggaagaggaagctgaaagaggaagagcaacggaaaaaggcactttcggaagacaaatcggcacagcgcaaatcaacgctgaacatgcgagaagaggagcgtatcaaagccgaacaagcggagaaggtgagtcttcccgggatattaagcactttttcgccgcttttcaggagtcagctcggcaaaaagcgcgcgcgacgggagcagtcgaagagaagagcaagcagtacacgacgacaaaaacggaagattcattcgcttacaaacgatcaaaagcattggaaccgaaaacggtggacgaacagaaaaagcgcacttttcaaccaattcaaaaacctgatccaaaggctgaagaagcattcgaaaaacaggtgaagaaagaatggcaatggcagaatgccgtacctaaacccattcagatggccgaacttcgtgaacagatgcggcagggatcgcgcaaattacagagcgaattccgagacgtaagccaaggactgaagtcggcatcggatgaggcaaaactgaagacgaaggaggaacggcaccgaactgtcatggacaaagcatcatcagcatttggaaaagcggagcaggagagacgcagacagcgagagcagcaagagagtgaggcggagagagcgaagcgagaaaaggaggaaagagagagcaaagaacgtgaaaagagggagaaagaaaaggtgcattgggggggggacaacaggggaagagaaaaagag

SEQ ID NO: 37021 - DNA, 1293 bp, Heterodera glycines
  unsure (1)..(1293): unsure at all n locations
cgttgggtgccttttgatcgccntgatgaacgccttacaannatncaatggcaaatggtgcattnttcattttanaaaaataaaatnntatgaacaatttntagatcaaacgcaaaataagcgagcgaaagggcactaaagggtcaagagcaagctctgcggcgtcaagttgccgttcgctgtcaccagtcagtagcttggccgcaacaacgcctccaaaaccagcagcaaaaacgccacagataacaccagcaacaaaaggcacacaagccaaaaaacatctggcaattgactcaaaaccaggaccatccaaccggttttctggcgaaagcgttgctgtcgttccaccaccagctcccaaagtccagcagaaaaagccaactgcgcaaactgaccagcacgctgaagcaacaacatcagcaacaacagcaagcaaagcgtttttgacacgtgccgaaccaaatggcaactgcttcttcaatgccatttgcttgacattgttcggatcagaaaaccacgcagaccaacttcgcaagcgaatgtgcacatttctccgaacaattcttgctgatcagcggctgtttttgcggcagaatcccaactacaacaccagggaaacatttctgactcgcattgaccgcatgttgcttcatgggactgatgaaggaataacaacattggaggagtatgctggacggagggagaaaaaccgggactgggctcaggtgaacgacagcatgctgttggccatgttgtttcaacgaaccgtcgttatcattacaccaaatctctcgcgacgagaaattgaacgacaaaatccacagtggaactatgctaaccaaaatttatatgtctacttcccggacggcgaaatgcgggtagataaaacgcaaataataccttttaatattaaaaattcatgtagcaatctctgcgcaatgttcctgtggatcagctccaaaagtttaccatggtccaagacgttggaacccatgtggacagacggcctgtcaacaatgcaattgtgctctactacaatggcctcaaccactttgacaccgtcacttttgtaatgcaaaattaattttgaaaattaaaatactaaaattttctaggcgccacgtagttctgtggaaagagccggaaacgaagtcgtctatgacgacaactacgtacctgcagcattgacacagctgccgcaatgggttctccagctcaaccacagccaacaacaacggcacaaccctctcgtgaagttttggacagcggaccacttaaaatggctaaacaaca

SEQ ID NO: 37022 - DNA, 878 bp, Heterodera glycines
tcccggtctcgatccgtgccgaactcacaaagttatggagtgaaatgtgaaatattgttttcaccacaaggcattttttctgaaaaccggattcaaaaatctggggtttggtataaccgttttagaaatagcgtagaaaacagcttcgatatcaagaaaccaagtcaagtccagaaaggaatattttaaaacgatttcgttttgttttggcattatgataccgaataactttcggaaattatggaaacaaaattggagaaattcgaataattttttgactgcaaatttttttccttttttgaattgggttcaaaaaaattttaagagaatttttgattattattttgaagtcttgaatttatttgacaaatccaagacttaaaactgggagaagcaaggggctgtggctgggggcctaaaatttgggccacattggagaattaattctgatttctgaaaaagtcccagaaataactattttttctttccataccttcttgtagagctcgagctgctctttccaatggtcttatcccggtctcgatccgtgccgaactcacaaagttatggagtgaaatgtgaaatattgttttcaccacaaggcattttttctgaaaaccggattcaaaaatctggggtttggtataaccgttttagaaatagcgtagaaaacagcttcgatatcaagaaaccaagtcaagtccagaaaggaatattttaaaacgattcgttttgttttggcattatgataccgaataactttcggaaattatggaaactaaattggagaaattccaataattttttgactgcaaagttttttccttttttgaattgggttcaaaaaaattttaagagaatttttgattattattttg

SEQ ID NO: 37023 - DNA, 1217 bp, Heterodera glycines
  unsure (1)..(1217): unsure at all n locations
tttcatttattaaattttgcaaattattctccctccccgtgcgaacaaantaatatgatatnaatgaancaaaactccatagaaagggnnaattngaancgaanaaaaangagaattnaaaaaaaaaaaatttttttttttgatggtaatctttggatgaaaattnaaattaggagttttgaagaatgaagtgtnnaaaaaatttaagaaatgtggggggggggggtaaagggaatttattttgatgatgataattggtattaaaagaataaaaaatgatgaaatgtgaattggtatgttggaaagtggcaaaaaaaacgagaaaggccgcgaaagtcaaactcgcagcgagcagacgatcgcgaagcagtgaactcgcttttcgtccaggcgccttgcgcccttaggatgggggggggggcgcggggacgttgctgcatacataagctcggctaacagcgccacgtcaaaaaacggagagacgtgccgggttcgccccgcacgacggtctcgatgggagaaggccaccacacacatggtcagcaatggcgttggttaatcgcctgaaaggtgactagaggggcggagagcgaagtgcgggcatttatgcgctgcgcgagagtttcgatccaaaacttgctcccgggtgtaagatggcgccccccccgtccgcgaaaccttatgtccgatgcaaaagcgggcatacgggcagccgaagccgcggggtgttgcgaacccctaaatactcgtcccacgcccgggaacccacccccggcacacctcaagaaaatctcgcaaataggggttgaaagcaaaaccccaatgctgaaatactaacactactaagtcctcaccacatccaaaacaaaaaagcctcacaaactagattctaatccctccccctcacccaaaccccccaatccaactatagttgtcttttaaaacccccccccccccccccccccccccccccccaacccccccccccccccccccccccccccccccccccccccccccccccacccccccccccccccccccccccccccccccccccacaaccaaaaaacaaaccccctacgacacacaaaaaaacaaaaaaaaaaccgcccccacccccccccccccccccccccccccccccccccccccccccccccccccccccccccccccccccccaccacccccccccccccccccccccccccccc

SEQ ID NO: 37024 - DNA, 1013 bp, Heterodera glycines
ttcaaaaagcgcaaaattttgacggaaacatttcaacaaaaaactgaccaaaactttgctaaatccccactaaaattttaattcttaatatcattcgacagccctaaaagttctctattagtctacaaaatttcaaacattttcctcaaattttaacaaagttatgcccattactttttttgaaacttaacgaaactttttcaaatttttcaggctagtagaaaacacttatttgttagggttattgaatgatgcaagaaaataattttaaaaaaaatttatattaaaaagtttttaattataaaaaaataattttgaccattaaaaattctatgattaaaaactttcttataagcaataaaattaagtgatctggtcttattcgataattctaagtgttttctaaaagctgaaaaatttcaaaaaatttcgttaagtttcaaaaaaagttatgataacaagtacacaggaagcaggttttcaaacatttttggccataacttttttgaaacttagcaaaattttgcagagtaatagagaatattagggctatcgaatgatttgaataattaaaattttagcatggattaagaaagtatatggatagttttttgttggaaattgtcatttgatggtttttttttataaaaacatagcaccgttcaattgctttcccctcttatcaaatggactcaaaaaaagaaaagatgcttttttttgaaacctcaccaaccaatttgcacactgtttttggtgaaaatgatctctcccgtggctaaattgaggccacatccgaccacgtcgccacgagaaaaggacggatttccccttttgctagtgccgccaatacaaaagaggccattgcttgtgtaagcataagtgccggaacggctttgaactgttacgcccaattcgttgtgctttttggacacaaagccgaagagggaacgtctaaaaataatttgaaaaattaaaaatgcttttttattggaatgggaattgttaattaaaaa

SEQ ID NO: 37025 - DNA, 1715 bp, Heterodera glycines
  unsure (1)..(1715): unsure at all n locations
ctcatttttaaattttttatagatttttaaatgtttggatttttttttggcttaccaaaacttcatcgaacctggctctttctattctcattcaaatcgccccaaattttttttacagcttaactaggccatattaagcttatttccagaaaatctcgcatgaattctcatttttaaattttttatagatttttaaatgtttggatttttttttggcttaccaaaattcatcgaacctggctctttctattctcattcaaatcgccccaaattttttttacagcttaactaggccctattaagcttatttccagaaaatctcgcatgaattctcattttcaaattttttatagatttttaaatgtttggatttttttttggcttaccaaaacttcatcgaacctggctctttctattctcattcaaatcgccccaaattttttttacagcttaactaggccatattaagcttatttccagaaaatctcgcatgaattctcatttttaaattttttatagatttttaaatgtttggatttttttttggcttaccaaaacttcatcgaacctggctctttctattctcattcaaatcgccccaaattttttacagcttaactaggccctattaagcttatttccagaaaatctcgcatgaattctcatttttaaattttttatagatttttaaatgtttggatttttttttggcttaccaaaacttcatcgaacctggctctttctattctcattncaatcgccccaaattttttttacagcttaactaggccctattaagcttatttccagaaaatctcgcatgaattctcatttttaaattttttatagatttttaaatggttggattttttttttggcttaccaaaaacttcatcgaaacctggctatttctattctcattcaaatcgccccaaattttttttacagcttaactaggccctattaagcttatttccagaaaatctcgcatgaattctcattttaaaaattttttaattgctttttaaatatgccaaaaaatgtaggcttaacttttntagtgaaaattcgatcactcatattttttgctaattgagcagaagcgtaccaaactttgcagggatactccccggtaaaggactaacttacactgaaatgagcgccgagctagctggctcaaaaaaattttcgaaaatctgagtctttcgtttttatttattttttgcaaaattaattcttaaatattttttcagaaagggttctgaaacgcaccaaattttatttacatgttagtttaggcactctgatgctttttctatcaaaaagggagatgaataaaatttttaaaaatttttaattcctttttaaacaggccaaaaagtttaggcttaacttttttttcagaaactgatcagaagcgcaccaaactttgcagggatactgaaaggaagagaaataacctattttaaatattatctagtcagttcatttaaataatttttatccaaaaaatttttttttgggttttcggggcagtccccctgaaccgatgcgcccagatttatggggagaccgaatccttcgggaatagcttccctatagcctgtactttaattctgcgttggatttttgctccccataattgtttgagtaccccaaacggacacttgaaaaaatcgatttttttgttttcggggcagtccccccgaaccgat

SEQ ID NO: 37026 - DNA, 470 bp, Heterodera glycines
ggggggggggggtgatgtgttgtcggtgggtcgtcgttggaagcatttccatcccttttcattcaaatctctaaccccaacaattgttcaaatctctttctgccaatccctttgcgcattgtcaatttcatttgtccttgaattcttcagatcgaagcggaaatgaatttggattcagatgagtcgagtcgagttggggccataagattgtgccatgggttttctcattggtcgcaccaattcattccctttttgccacgggttgtctcacattccctttttctggtctttctccttttccgttcgtttgttctcttttttctattatttatgctataaacaattcgtttttctctttccttttaattaatatatattttttatttactattttgtttatgtagtaacacaaaactcatggtctaatatagtgaaccccccacaactgaatgcctggtaaagccgggcca

SEQ ID NO: 37027 - DNA, 854 bp, Heterodera glycines
ttctgacagcaattttcaaccgaccttttgtagggctcaaccgcagatagtaatgcgtttttggggaaaacccacatgtacaacggtgtagaaaaaaagagatagccattttctgagaatatctattcttctgagacagcaattttcaaaccgaccttttgtagggctcaaccgcagatagtaatgcgtttttggggaaaccccacatgtacaacggtgtagaaaaaaagagatagccatttttctgagaatatctattcttctgagacagcaattttcaaacctaccttttgtagggctcaaccgcagatagtaatgcgtttttggggaaaccccacatgtacaacggtgtagaaaaaaagagatagccatttttctgagaatatctattcttctgagaaagcaattttcaacccgacattttgtagggctcaaccgcagatagtaatgcgtttttggggaaaccccacatgtacaacggtgtagaaaaaaagagatagccatttttctgagaatatctattctgagaatatctattcttctgagacagcaattttcaaaccgaccttttgtagggctcaaccgcagatagtaatgcgtttttggggaaaccccacatgtacaacggtgtagaaaaaaagagatagccatttttctgagaatatctattcttctgagacagcaattttcaaaccgaccttttgtagggctcaaccgcagatagtaatgcgtttttggggaaaacccacatgtacaacggtgtagaaaaaaagagatagccattttctgagaatatctattcttctgagaaagcaattttcaacccgacattttgtagggctcaaccgcagata

SEQ ID NO: 37028 - DNA, 1352 bp, Heterodera glycines
cattacaattaaataaccaatcaggaaataaagtttctcggatttaaagctggaatttattggctaaaaggatttaaacggcggaagcacattgtaacacgaaaggtacaacaaatttttttgttggttttttagtataatttttagattaccaaatttgttggcaaaaaatgggcaaaagaccaagaaaaaatatacactgattcggcagaatttgtttctgataccaaaacactcattggaaaagaacaccctgatttggtccttaatacagaccaatcagggttcgaattagaaagtgctcttatatggcgccaaaaagaaacaaacaaataaaaagtgtcaacttaaaaatacaaaatgatgtaataaatgtgaaataaaaataaatcaaatgttaaattcacaggtgattattttaatgtaattgtggcacagaaatttcctactcagaactcattgcttttagtaaacccctgaattcccttgccttattaatttgcaccgctaaaactggaaggttattccagtttcttactatcctatggaaaaaattattttgagttttggccgtgtggcgctttacccgtaaaagtaaaggcctcctgagcctttctgagaaaaagaaacttttcccagcatcgaggctggtgaaccctttgattattttaaaagctgttgttaaatcattaatttttcttctttcttccaatttatgtaaactcgtgatttttagtctttccccatattttttgtacacaaaaccacattttctaagtgcttttcttgtaaaaaatttttgaacacgttcaattttatctatgtcttttttaagattagggttccaaacttcagtagcatattctaattgaggtcgtacaaaagttttataggctgctgttagagtttttatttccctgcttttcaacactctcgaaatttggaaaattctaagatatgcatttcgtacaatttttctaatatgttctgaaaaattcagtttcgtgtcaattataattcccaagtcacgaacattatccgattctgaaatcctttgtgagttaataaaatattcttttttcatattatttttcccttaatataaaacaaaacatttttcagttgaaatttctaacctatttatttttgaccatttttccaaagcctcaattgctttatccaactgattcgaatggtcatcattttcatgggcataatataatataacatcataggcatacatttttatgccaactgatgccgcttcatttgtaataaaggacggcagatcatttataaaaaattaaaaagagtgatggccctaagacacttccctggggcactcctgaaaa

SEQ ID NO: 37029 - DNA, 251 bp, Heterodera glycines
cggggccatctatggtactagatcgcgtgatctagccccgctctggccgctcgagcaggcacctgcagaagctagcttggtggggatcatattggcgtttcccgccttcaggttaaactatcaagagagggaggtggctggtgcaataacacaagggcgggggcagtatgatcatgatggccaatatggaggaaaagaatcagcacttaccaattttttttcacttcaatactgtaaatgtccgcatcgct

SEQ ID NO: 37030 - DNA, 797 bp, Heterodera glycines
gagttgacacatcgcataatgcaatggaaaccggaagtgcgtacaaaagtgattagaagaggtgcaaaagtgattagaagaggtacaactgtgattaaaggaggtacaaaagtgattaaaggaggtacaaaagtgattagaagaggtacaaaaatgattagaagaggtacaaaagtgattaaaggaggtacaaaagtgattaaaggaggtacaaaagtgattaaaagaggtacaaaaatgattagaagaggtacaaatttgattagaagaggtacaaatttgattagaagaggtataactgtgattaaaagtggtacaaaagtgattcaaagaggtacatcagtgattaaaaaacgtacaaaactgattaaaggaggtacaaaagtgattaaaagaggtacaaaaatgattaaaagaggtacaaaagtgattcaaagaggtacatcagtgattaaaaaacgtacaaaactgattaaaggaggtacaaaagtgattaaaagaggtacaaaaatgattaaaagaggtacaaaaatgattagacgaggtacaaatttgattagaagaggtacaaatttgattagaaaggtacaaatttgattagaagagttataactgtgattaaaagtggtacaaaagtgattcaaagaggtatatcagtgattaaaaaacgtacaaaagtgattagaagaggtgcaaaagtgcttagaagaggtacaaaagtgattcaaaaacgtacaaaagtgattcaaagaggtacatcagtgattaaaaacacgtacaaagagtgattaaaggag

SEQ ID NO: 37031 - DNA, 820 bp, Heterodera glycines
ttttttttttttttttttttttttttttttttttttttttttttttttttttttcttccttgtggtgcgggggggcggggggggcgggcgcgggggggggcgggggggggggtgggggggggggggggggggggggtggggattgtataaataattatatataaatatttatttttacaacaaaaaaaaaaaaaataaaaaaaaaaaataaaatatatttttttttttttttttttttgttttgttgtggtttggggggggggggggggggggccccgcccccccccccccccccccccccccccctccctcttttttttttttttttgtgggggggggagggagaaaaaaaaaaaaaaagaaaaaaaaatatttgtttggtgtttgtttttttgttttttttttttcttttcccccccccacaaaaaaaaaaaatatttttttttttttttttttttttaaaaaaaaaaaaagaaggggggggggggggccgcccccccccccctcttttttttttttttttttttttttttaaaaaaaaacaaaaaaaaaaaaaaaaaagatattttttttttttttttttttctttccccccccccaccaccccccccccggggcgggggggaggaggaaattttattatttttttcccccccccccccccccccccccaaaaaaaaaaaaaaaaaaaaaaaaaaatttctcttctcccttcaaaaaaaaaaaaaaaaaaaacccccccccccccccccccccccccttttcttttttttttatacacccccccccccccccctttttttttttttttttttttttt

SEQ ID NO: 37032 - DNA, 903 bp, Heterodera glycines
gttcagaaaaagcaaaaattatgtacaatttatttaaaaattaaataaaatattaaaggttaattaattaaattcgctcacgaagctaactctgaacacgatacttttcggcattaaaaaaaattttccatcgacttaacggcaccaaggctggacgtacttatgagttgtcgattccgtaattacggcagatgttgaagaaataaaaccaaaaaacgccattttattgtttttagtgctttgattttttgagtgccgatgccgtcccctgctgggctacatttgctttggtaaaagcaattttcaattaggtaaatagaatttttattaaaaatcataaatgtttacaaattctcgaatttgttggatgcaaatttttgatctgattaaaattattgtgtttatgtttcataaaataaatactatttgtgataaaaaaaataaaattaatattattaaaatttataggacttattttaaattataagttaataaactctgaaaaataaataaataaaacaggcactcgcgcaaaaacggagtaaaaattacaattacggataacaacaaaattctcggaattctctgttttgtaataaccaaattaaaataataaaaattttaattaatttaacataaaaataatgtttaaaataactgaaaaaaaaataataagataaatgtttataaataaattcaatttcttttctatatatttaaatgcatataaaatttattttattataccaacaaatctttgaaaataatttataataataaactaatcaaaaggaaaaataacaaaaacaattcgatggaaatgcagactgacagcaatcagctaagttgaaatttttgaataattatcaacaatatttttgcattctataaatattcatcata

SEQ ID NO: 37033 - DNA, 338 bp, Heterodera glycines
  unsure (1)..(338): unsure at all n locations
taatgaaagaccagaagtattaacncattaggctacatacatttgtacgctaatgaattaaaatgaatttatatttatttttttcacaaaaaaatctctcttttaccaccaatttccttcaaattttttcactcagacccccattcttaccagtgtacttttattcccgtttttgagaaaaaatttacgggaacgggaacgggaacgggaaaacgaaaaagaacggggcgggattcccgaacgggattcccgtcatttttcccgttcccgtaaaattcccgtcaggcaaaaaagacgggaaacgggaacgggattcccgtgttttcccgcgggaatcc

SEQ ID NO: 37034 - DNA, 200 bp, Heterodera glycines
atccttgtggtcccttcgctcaaattcgttgttggccatcactcggaaaagcatgtcaaattggcgttggtggaacaaagcgaaaagatacgcctttttgacggtggacgaaacggggtggcgcaaaaggcgaaggttttgcgcgaacaaatggacgagacgggcgccgtcctcccattggaacagacattggcagataa

SEQ ID NO: 37035 - DNA, 96 bp, Heterodera glycines
aaaaaagaaaaaaaaaaaaaaaaaaagaaaaaaaaaaaaaaaaaacaaaaaaaaaaaaaaaaaaaagaaaaaaaaaaaaaaaaaaaaaaagaaaaa

SEQ ID NO: 37036 - DNA, 1152 bp, Heterodera glycines
  unsure (1)..(1152): unsure at all n locations
aattcgaataattttttgactgcaaatttntttcctttttgaaatggtttcaaaanaattttaagagaatttttgattattaatttgaagtcttgaatttatttgacaaatccaagacttaaaactgngagaagcaaggggctgtggctgggggcctaaaatttgggccacattggagaattaattctgatttctgaaaaagtcccagaaataactattttttctttccataccttcttgtagagctcgagctgctctttccaatggtcttatcccggtctcgatccgtgccgaactcacaaagttatggagtgaaatgtgaaatattgttttcaccacaaggcattttttctgaaaaccggattcaaaaatctggggtttggtataaccgttttagaaatagcgtagaaaacagcttcgatatcaagaaaccaagtcaagtccagaaaggaatattttaaaacgatttcgttttgttttggcattatgataccgaataactttcggaaattatggaaacaaaattggagaaattcgaataattttttgactgcaaatttttttccttttttgaattgggtttaaaaaaattttaagagaatttttgaatattaatttgaagtcttgaatttatttgacaaatccaagacttaaaactgggagaagcaaggggctgtggctgggggcctaaaatttgggccacattggagaattaattctgatttctgaaaaagtcccagaaataactattttttctttccataccttcttgtagagctcgagctgctctttccaatggtcttatcccggtctcgatccgtgccgaactcacaaagttatggagtgaaatgtgaaatattgttttcaccacaaggcattttttctgaaaaccggattcaaaaatctgaggtttggtataaccgttttagaaatagcgtagaaaacagcttcgatatcaagaaaccaagtcaagtccagaaaggaatattttaaaacgatttcgttttgttttggcattatgataccgaataactttcggaaattatggaaacaaaattggagaaattcgaataattttttgactgcaaatttttttccttttttgaattgagtgaaaaaaattttaagagaatttttgattattaatttgaa

SEQ ID NO: 37037 - DNA, 1416 bp, Heterodera glycines
  unsure (1)..(1416): unsure at all n locations
ggtataacagtgattagaagaggtacaacnggtgattatctttttgtacaacagtgattagaagaggtataactgtgattagaagaggtacaacagtgattagaagaggtataactgtgattagaagaggtacaacaacgcgaaagaggtcaacatgatttaaaatgtaataaataaggaaattttttattaaatattaaaaatcgaatgcattttaattttaaattattaataaaaaacaacgttgaaaattaataatatttattttatttaaaatgaaattaattttttaaaagaggtacaaaagtgattaaaagaggcacaacagagattagaagaggtacaacagtgataagaagaggtacaacagtgtgagaagaggtacaacagtgtgagaagaggtacaacagtgattagaagaggtacaacagagattagaagaggtacaacagtgattaaaagaggaagaacagtgattagaagaggtacaacagtgattaaaagaggtacaacagtgattagaagaggtacaacagagattaaaagaggtacaaaatgtaaaaaattttttaaaaataatctacaacaaatcttcagattagttaaaaacattgaaaataacgtaaaaagtcatagaaaataatttacactggccggattcgaaactgccgccccccccccccccaaaattgggaattaaaaaaaattatcagcgattttaggccgcttccagtgattagaagaggtacaaaagtgattaagaggtacaacagtgattagaaagtgggcattcaaatagagcatttatggtaattaaggaattgtttttaatcaaaatagataaaaaatcgatgtgttatatttttcattttttaaaatataatacactttttattaatgaaaaacaaattatgaaatgtataataattgaatagttatttaaattgaaatgaaaaaaattttacaattaaattttaaaataatagctgaaattctttaattaaatataataaataatttaaatgaaaatcattattcatcaaaaaataatttaattaaactaaaaaaatttattattaataaaaccaaacatttaaatttattaaaagtaatgaaaattaacccaaaaaatacaaagaaaaataatgttcaccgtccggattcgaacctgctgccccccccccctcagaacatgtcccagaatccccaatcacacagggattctgagatcttgacgatgtcaaaagtaaaatctgatcacgtattcgtgatcagcggcccaataacgcctaaagacatgtttttggaagatttttggtgaaaattttttcacttaaaaccatgtgctcccccctttggtcccgatcccaaaagcctttttatttttgtatcttttttaaaaatggggtaaaaatg

SEQ ID NO: 37038 - DNA, 76 bp, Heterodera glycines
ccggatcgggtgggggccgcgcggccaacggcagttcccgactggccaatccagcccgatcaccgccgagacggcg

SEQ ID NO: 37039 - DNA, 798 bp, Heterodera glycines
aaaagggggtaatctacctaccctgaaagtttggttcggaagtcccaccgtcacttgggtacctctcctttgttagtgaaataaattgatttcatttttttttctcaaaatttgtcgtcctttaccccaatttttatcataaatttttcactcgacccaatgggcaatttttacaagaaaaaaataaaaaaatttgaaaaaaaattcaaaaaacaaaaaaatagaaagagactttttaattgatttttcatgttttcttaaaaaaaacttcgtttgactcttttttgaaatttgttttttttttaattttaaaaatctgcgtgttcatgcaatttgtctttttctttttaccttcttgaatttgatagcacgaagctgcggactgggacaggaacagcctttctcatacacaaattttccttcttcgcgtgcgccattacttgttgaactactgctgctgctggaacccattgttagtaggaggcgaaaaaaaaatgtaaattttgtaaaaccttaaaaaaagaaaatgaaaaccatttcaattggatttatgcagggttcgaaaaagataaaattttcaaaaaagacatcattaaatcggcaaaaaaaagaaatgattggggttgaaaaacatttttcatttcttatgtgtgtatttttgaaaaatttcgggtcgattttcaggggtgtgccaaaaagttgaaaatagtcttttttcaaaattttttaattttttggttgctaaaaaaaaaataattgctaataactcgcaaagtagtttaacaacacccgaaaaaa

SEQ ID NO: 37040 - DNA, 549 bp, Heterodera glycines
tatttctttctaacatttgtatgtatgtacgattttcttattttgcgatttatgtccgtattttgcagaattaaacgttaaagactaaaagaacttcatttgcacagctttgcttttccaacctgtccttttctccaaatgttgtttttatcgttgaaacattcataaaataacaaaacaaaacatataaaatgacagcgcaaaatgcaataaattttctgtttcactcattggacaatttaatgccctttttgcttttagcattttttatttgtataagtacaaagtgtgtaaaacaaaataaaaatgttttattcaaatattttcagatttattttttaattcgaaaaagttctttttatttggattaatcacatattttatctctcataatatcactggcaaaatcttttgggaaaaaagcgggtggggggggggagggggggggaaggtcaacaaaagtgctgaagaatctacgaaacaataaatattgagatgcaaaggccaacgaaaagaccgactaagacaaaagatgtcaacgaggctaac

SEQ ID NO: 37041 - DNA, 1028 bp, Heterodera glycines
  unsure (1)..(1028): unsure at all n locations
tttcaaaaatatccagatcaggattctgtgaaaatcctgaggatctgctggtcctgttccatgctctaattaaataatgtatntaaggaaaagtgtgtggattaaattctggaaaaaaagtattcaaatcttccagtttggagtccccaacccgggatttggtcgtcgaggcgggaagggacatcgaactgatgagcaaagcgggcgaaatccaaatcaattcaatctttgacatcaatttgaaagcacgacaagtgaatagaatagagaaacaatatttcgcattaaaacaaattttcaaattaattaattccttacctaaaataattcatggatttgtatcataagtgagttatggacaaaggcccgtgatatgaaattaatttttcttttacagttttgctttaaaaatactttaaataacttttttctatttttgatttttagtttgtttatgcaaaattcaaaggaaaaaatgaattttctacttttgttcgatcttaggtttggattcaaaatttgccggaatagatgcgaggttcgtgatcagcgaacccgaaaatcccaggaaatacatatgtttccacgtctttaagaaaaaaaaataatattttttttaatggggcaaaacatactattacaaattttcatttaactattattcaaaacgacaattacacatatttattccacatataaattaatatgtataataataacaataataattttctccaattttggtacgcatttttcgttgttttacagggtgaaattcggctggactccagtgccattttcatttctggcctagagacaagtgctgggctaggctcggcacagtatcagttgggttttatgcatttttgcatatgccttatttccccatggcacagattgtgcgtgtgcctaaatgggcgactgttttggcaacagtgaaggcccgattgtcgtgctggatcgaagcatatgcttaatgaaaaacaattttctttttttattatatggttaataattaataattactg

SEQ ID NO: 37042 - DNA, 752 bp, Heterodera glycines
tctagagtcaattcgaaggcaaagcaaaaggaaaagggcctttgtttgttcttcggttggagttcgttcactcaacggaaacaaaagtgaggataaattgggacaaaaagaaaaagcgatggtaaggaaaagccaaatgaaatgccattatcagcagaaaattcccccaaatgtccgctttcaaatgccaatgggctgtggtcggccgatgaatgaatgaatgaatgactcacgcggtgtttttgtggtttgccccccccccccgcccaattgcacagaatgtgtctcggccgaactctccgttaattcgattgaaaacaattccccttcccctcccccattttacactgtttttgcgcatttccctctggcctctttgtgagctcgggacaatgccgccaatgatgtgcgagataagctcgctgcctaagcgcatgaccattctttcctgaggggctgcgaagcggaaggagaggcgccacgcgtacaaaaatagacccgaggggacgtatggagcgtaatgtagcggaatgaaggcgccccaggttacaaaaaacccgggaggtcacacggtgcgaaatgcaaggcgcggaaaggcgaggcgctacgggtcacaaaagacccgaggggacctaatgggcggaatgcaggagcccttggattacaaaaaaccaaggggccagaaaccgcggacgcaaaatggaaatagcgctaatgccaagacgccaccaggttaccaaaaacctgtgggg

SEQ ID NO: 37043 - DNA, 974 bp, Heterodera glycines
  unsure (1)..(974): unsure at all n locations
tttttgttttcggggcagtccccccgacccgatgcgcacagatntatgggagaccgaatccttcgggaatagcttccctatagcctgtactttaattctgcgttggatttttgctccccataattgtttgagtaccccaaacggacacttgaaaaaatcgatttttttgttttcggggcagtccccccgaaccgatgcgcccagatttatggggagaccgaatccttccggaatagcttccctatagcctgtactttaattctgcgttggatttttgctccccataattgtttgagtaccccaaacggacacttgaaaaaatcgatttttttgttttcggggcagtccccccgaaccgatgcgcccagatttatggggagaccgaatccttccggaatagcttccctacagcctgtactttaattctgcgttggatttttgctccccataattgtttgagtaccccaaacggacacttgaaaaaatcgatttttttgttttcggggcagtccccccgaaccgatgcgcccagatttatggggagaccgaatccttcgggaatagcttccctatagcctgtactttaattctgcgttggatttttgctccccataattgtttgagtaccccaaacggacacttgaaaaaatcgatttttttgttttcggggcagtccccccgaaccgatgcgcccagatttatggggagaccgaatccttccggaatagcttccctatagcctgtactttaattctgcgttggatttttgctccccataattgtttgagtaccccaaacggacacttgaaaaaatcgatttttttgttttcggggcagtccccccgacccgatgcgcccagatttatggggagaccgaatcctgtcggaatagcttccctatagcctgtaccttatttctgcgttggatttttgctcccataattgtttgagtaccccaaacggaaacttgaaaa

SEQ ID NO: 37044 - DNA, 747 bp, Heterodera glycines
acactagaaaccaaattaccagcacttttaacacctaaaaacagattcctatgaattatttttgtcgctttttgttattttttgaattatttctcgctcttatattttggttttatttttctattagctttttaaattttaatttcaataatggaccaacttatcagtgggcttctcggaggtggcggcggaggagaagcaaattctggtgataatcagccgcagcagggcggcggaggcagtggcaatcagttggcagatatggccggggtaatgaacaatttttttttaaatttaacatttaatttttattcccccaggaattaatcggaggatttcttggcggtggcgggggaggaagcggcgccttgggaggaggcgcaggcggcggggtaaaataaccgtcgatttctaatttttagttcttagccatttcagctttaagcctaattgaaaatttaaaaataaaaaactgtcaaaaatgcaccaaaattggttaaaaataaacgaaatccaaaattcctattgacattaaatcaaagtactttatgcattttttaaatataaacaaatatgaataaaaatgtcaaaaatatattaatctcccgagagcgtagccagacccttggcttcggaggcttgagaaattgcttaaaatttcaaaaaaaaatttttactttgggttcgtgagggggggagagcggctttagccccctcaaacccccctcccccctggctacgcacatg

SEQ ID NO: 37045 - DNA, 583 bp, Heterodera glycines
atttaaaattttttattaatttttaaagcttcactattttatttttttagcaaaattaattcataaatattttttcagaaactgctctgaaacgcaccaaattttatttgcaagttattttaggcactcagatgcttacactatcaaaaagggagatgaataaaaatctaaaaatttttaattgctttttaaatatgcgaaaaattttaggcttaacttttttttttataagctgatcagaagcgaaccagattttgcgagggcatcaaaaagacaaggaaaagcactgctatgatgctaactccagtaattctgaatttaaaattttttattaatttttaaagcttcactattttatttttttagcaaaattaattcataaatattttttcagaaactgctctgaaactcaccaaattttatttttaagttattttaggcactcagatgctttcactaaaattttttccttatattttggttatatcgttttgcttttgggggggtgcttggaacagtggaatcatgcgcacccgcccgatctggaaagttaagcaaccgattgctgactagccaaaaggtt

SEQ ID NO: 37046 - DNA, 1056 bp, Heterodera glycines
ttttttttttttttccaaattttttattggtgaatggagaaaaattcagtcattttttcaaaaatttttaatcattttggttttttaaataaatatttttgtctttttaataatttctgttcgagaatgtctgttgatatcgagaattttaattttcttaaacaattttgcttttaaggacaattaagggtatattcttctgcaaattgagggaaatgcatttgattttcctactgattttgccaatcctttggccggccaaccatcgaatgccatggacaaaaagtgccaaaacattctgacaaaatgtcgaacgactcaagcaaaatgacaaaacactctgacaaagtgtcgaatgattcaagcaaaattcccacccaaattgccgtcgggacagattattttttgctcgaaaaatatggacaaaaaattctaggcaaaaatagcaaacacaatgaacaattgaagaaggacattaaagggctaaagaaaaaaagtaactattttaattgattttggaggtttggaggttcacacattaatcaaaaatataaaaaccgaacattgacccccccccccccccgaaacccaaaactcgcagacccaaactcgtactctttccatcactttgccttttgcggtctcactcctttcctctcttcacctccatctcccatcgccacactctctactcactctttccatcactttcccctccgctttttgccgtatctctctttcctctcctcacctacctctcccatttgccactctgtcttcctcactctttccatcactttgcccctccccctttttgcggtctcactcctttcctctcctcacctccctctcccatttgccactctgtcttttccaatgattattttggtttgcatcttttttgaaatgttcaaattctcttgttagctcgtatttaattaatatatatgttatattgacaaggagtttcgttgctaaaaccattttctcccggccgaaggccgggagcgccctgaaagtaatgcaagggccttacaactttttgaggagcatccg

SEQ ID NO: 37047 - DNA, 811 bp, Heterodera glycines
ttaattcttttactggtgctaatcttgttttagcaaaaattaaatatatttcatttgattcaattaatttcaagtaggctgtggatgcataggctgaacctgaagcgtcagaaaaaatgtgtagttcaactggttgaattaaagaattgctaaatggaaaacgtcttaaatgaatttccgccttacggacatttgcggacggacatttgcggacggacatttgcggacggacatttgcggacggacatttgcggacggacatttgcggacggacatttgcggacggacatttgcggacggacatttgcggacaattcctgagaaaaaattaaatgaaaaaaaatttttttgttataaaaatttctaatggaagagtgggcctcgtcagtgcggtgctcttccgaaagaaaacaaacaataagaaaaaaagtgtgttacggccctaccgcaaacacacaaaactaaagaagcacacatcgacaaattaaaaaatacaaggcaaaaatatttttttaaaagccataaacaaattaatttcgtaattatttaaatttctttattaggcttgctgaaggccccaccaacagccgtatttttacattctacaaaataattgggatgagctaattccactgaaccaacccattaaatgctaatcggaattgaagggccccttaagggattaaaccactttgttctggcggtggggttaggaactaatcaaattgcccctacctaaacccgaaaaccccatcgattttttgtacgttttgcttcttggaacgatacctaaaccccaatggtgggtcaa

SEQ ID NO: 37048 - DNA, 874 bp, Heterodera glycines
atcaatgaataaatattgaaatgatgagtcaccccatccttttaaatatttcattttatttttgaggggagagaacggacggacggcggagggccgacaaacggcggcaaaagggtggtggtgactcattggtaaaacaaaaattgtgagagtaaggagggacagatcgccaaaggggaaagaaatacaaccaaggcagaagaaaggacggccaaaaatgccaaacaaatgccatgtaatggatggaggatactttaatgaatgcaacttttggtcgttgatgggctaatcaatcttctttttttggagaatggtttctggatcgaggctgtctggtcttgtccctcacttttggcactttttagagtccgtatcttattttattaaaaaaaatatattaatttaaatgatctatcccctaaaactattttcacaccactggtggacctgagcttttagcttccccgccttatatttatttactcgttctgatcacgatcggtggggttgaaaagttgaaaatggtagcgcgcgttgctttgatccacagttttgatcactccggacaggattaaagccgcctctccgccctcaatttttgttagtgtcaggcgccgacagttcttttggcgtcatcgcccaaattttcgtcgccgcccgcccgatgactaagcaacaaaaaaagccaaggaaagctatgggtaaacaaacaaacaaatacacagtccgttagctgctttattgctggtgaacagtggccacgtcctgtggcaaatccacggattgtgaaaagtgaaaattggggggagggaatggaaattcaatcggacgcccggcgaccgccccgcaatctcagcgggcgccggctcggcta

SEQ ID NO: 37049 - DNA, 125 bp, Heterodera glycines
atggagcggagaatggggacaatgaatgggcccttggggggagagcttgtccaattttggaaggaccaaccagcgtcattcatcccctacggggctttgggagaggaggagggggggggggggaa

SEQ ID NO: 37050 - DNA, 1047 bp, Heterodera glycines
  unsure (1)..(1047): unsure at all n locations
tgcttctggccaccattttcccctccattatccccggccctttgcgctgtttctcggcattttctatggccttttgcattcatgtacaaaatatttaattttttttattttgattttggaaattctaatttttcagggctttcaatgtttgcagaagctttgcgcttcggcgatcgacgtttttacgcggtttgttcgcacagaaaaagagacaaaccgaaaaattttggtacaaaatgtccaacaacttttttttgccgcttttttggcccgttctggcatttcccaattaaagtgccaaataataatggcacacatttcgttctccccatttagaattggtggagctcacggaacatggccgagtattatcgcaattggaatttggtcgtccacgactggctttatgcctacatttacagggacatttcaatggtaaaatgggccgaaaaatccatggggatttggcacccctaggggagcaattgaaaaatggtgaaaagcgatgtcgatcagtgatgcaatcagacacgtcccgaattcatattctcgacatttttttgtggggggggggggggggggtggggtcgagagcaatntggattggtaattactaaattctattcaaatttttataaaattcacttttaaatatcattaataataataattattattattcttataaatattattattttcaaaactttaaaatttttattaaaaaaaacggatctctgaaccttttttgggacgtttcaaacaaacaaaaaatgtttataaaaaggataaaccgggtaacacaatgggaacacggattaaataccgtatgaaaatttttaagaaattttcaaaattttttaagctcctcggcatgcgctggggccctgcggtgtcccaatgcctcgtctttttcctctcctccttcttccatgagtattggtttgcggtcagtttgcgcatgtgttatccggccatcttcacactttacttcatttttttcgatgggttaaattttgttggcataacgcccaagtttttgtaaaa

SEQ ID NO: 37051 - DNA, 152 bp, Heterodera glycines
ggggggggggggggaaaaaaaaaaaaaaaaaaaaaaaaaaaattttttttttttttttttttttaaaaaaaaaaaaaaaaaaaaaaaaaaaaaaaaaaaaaaagggttttttttttttttttcccccccccccccccccccccccggggggg

SEQ ID NO: 37052 - DNA, 607 bp, Heterodera glycines
  unsure (1)..(607): unsure at all n locations
ccccccccccccccccccccccccccccaaaatattttttttttttttttttttttttaaataaaaaaaagagagggttttttttttttttattttctccccccccaaaaaaaaatatttttttttttttggggggggggggggggggggggggcgcgggggnctatttaaaaaaaaaaaaaccctctttttttttttttttattttttttttctggggggggggggggggggcgccccccccccccgggccggggggggtgttttttttataaaaaaaaaaaaaaaaaaaacaaaaaaaaaaagggggggggttgtttttctcccccccccgccgcaacaaaacaaaaaaacaaccgctacctcaaaaaaaaaaaaacccccccccccccccccccccccccccaaaaaaaaaaaaaaaaaaaaaaaaacaaaacctatttttttttttttttttttttttttttttttttaataaaaaaaacccccccccccccccccccccccccccccgcccgcgccggggattgttcctcacaacaaaaaaaaaaaaaaaaaaaaaacaacaaaaaaaaaaaaaacaaaaaacccttcaggggggggggggg

SEQ ID NO: 37053 - DNA, 571 bp, Heterodera glycines
atgagaaagatgcaggctgttttatcaagactgttctggtaccaagtgaaaagctgcagtaccgtattgtggtctgggacacagaaacgaggcttcagcaaatggaacagatgggacagcaacgccacaaagtaaatcaactttcagctcgtatcacctgcacagagtgctgtgattctgaaagtggggcacggtcaaattgccaaatttgcattaccgagcatggggaaatggagcgaaataaagattggtcagtatgttggtaaaatttttccaaactgtggctttattattaataggagtgaagcggaagggcatgagccaatctccgagtttgttgaatggattttgagagcatggacgaacaaatacaaaacttttatttgggtaagataaatcgcttcgttgtcatgtttttgctcatttatcacctttttgtttatcaggcacacaatgcatcgcgttttgatggccattttgtgttaaaatatctaggcgaaacaaaacgacgtcctgacgttgttatgaatggtctaaaaatttttgagttccgcctgcagcattcgcgacg

SEQ ID NO: 37054 - DNA, 518 bp, Heterodera glycines
tgggaaatattcacaatcctagacaaaatcactttggagtcagaaaaagctgaatctacgtggcgagaattcgaaagatgcaaaacttttgaccaggcaacaaaactcgaggaacaatcgcaaattctttaatggaagcccgaagattaaatttcgagtcacaaagggtgcagagccaaatgttaaattatgaaaataggccccaaacaattgtttgggagcatatgggtatataagaacaaaaaaaactaaaagggcaacactcaaaatggatgggtgttctattgagacaattcatgaggacttaaaatttggctttaaaaaatataaaactaaattttattttaaaaatcatttcataattaatgcgggagaaaattttaagatatcctcgcatcaataattgaagaaaattataaaaagaagcaaagaaaattcagaagcattttgaagcttcttttggtttgaatcatttattgcccctctagatacctagcgaaacacagccgaggctttgt

SEQ ID NO: 37055 - DNA, 1376 bp, Heterodera glycines
gcagttttagagcttaaaaatcccatccctaattattactaggatgagatttaaaaaattaaaaaaaatattatttatttttagtgccaattatttgttcgttgccggccattacccaatttattccattggaaagcatggcttctacaacaattgcttagccgaaatggaccacctgatgcgcaacaacaaagtcacggtaataaacacttttctgtttactgttaagaattttatttctttttaaatttcagaatttctgtaaattaaataaaatttgagtatcttaatacaaacttaaatttgtttttgtgtttggaagatgagccaattcatagaataagcatacatttggaaacgctgttaaaaataaaaatcaaaaataattaatttttggcaattgtttaaatttcttcaatttatgtacaaacttaaaaagaaaaattgatttaaatttaaatttatttgttttaatattttccacaggcttacctgagtggtcatgaccacaacctgcaacatttgcagctgaccaagccggacggcaacacgttcgactacataatttcaggcgctggcgcagcgacggaccgaagccaagaacattgggatgaattcaacaagacagccgccgaaatgaagggcaaagcaaaagtccttctccagtaagaaaagcattaaaaataatttaaaaataaaattttattattaaaaaggaaaataaacaaagataattgcctaatttaaattggtggtaaatttaaattagaaaaaaacaacttcttttctatcaaaagtattcatgaaaacttaaattataaaaaataataaaaatgagcaattattcttcattttgaactttaaaattgtgtctcagttttccgtccgcccattggtggattaaatttgctggcgaagaattgctaagttggacaaccggcggctttatccaagcgcaagtgacgccggacaaaatggtgctgaatttctattctggccaaggtaatttagcatttaatagaagatttgaattttctgtgtcaaagtttttgggaaaaaatattttccaaaaaaattttaactgttaaaaacttttcccaggctctgtttgtcttgatcaaacgccgcttgtcggaagtctgcttggcaaactgccatttgtcaaccacaattgcaagagtttgtacggcaccacaacattgtgtccacgggacaaaccaaagtgccgggaggaagcggctgctcaggacaaaactggatggttcagtgggccatggtggtgtatgaagttgtgctgatcagtctgaccaagacaatttgtgatcgggcaattattaattaaattggtcgcaccgtattaatattttttattgctt

SEQ ID NO: 37056 - DNA, 761 bp, Heterodera glycines
cccattccaactggccggtgctaatacgaccgtcccttacaaaaatttatagaaaactttttcacctttgacatttttcgcgacgcattcacttttttgctctaaaaaataattaaagattaagaattataggaaatttttggaattttgaaaatgtttttttgattttgatacaacaatctatataatttgtacatatctcccagagagtcccatgtattcggtattgtgtttccatattttgagaatttttttttttaaattatagcccacgagatgatgaaaatgcattttagcattttcttatcaattaaatttagaaaaaaaaaaaactttttttttaacgatataactagggcatggattcttaagtgttaaaaatcccgaaataggtacttaaatattgctaaaatagttgccaaaaaatggaacataattgctaaataaatacaaaaatttctaaaaatttaataatggtgaattttttgggaaaacatatggggtccggtggtgctgataggcgccgtcggtgaaaatttggaaaaatgaatgaagatttgtgcgtaaattttcgattacataagccaaaaatttcaaaattatttatttattttcataactattttttacaagaaaaaatagtagtttttaaaaaagttcacaagccaaaatagtcgttaaaaagtttcataagcgaaaatagttgaaaatagttgcttaaaagtcgctctaaaaaatggattgaagaaaatgtttttttt

SEQ ID NO: 37057 - DNA, 977 bp, Heterodera glycines
  unsure (1)..(977): unsure at all n locations
atatttcttcaaatgcttttttgttcaaattttttcttttctgctccaatttcaatttgaacaattaaaaagaataatatggacagtttcattgctgatatatttttttaattaaaattgatatttattcaatataattagagatataaataataatttatttctcaaaaatatttttatatttttctcttttctactgattggtcgctagacaataattttaaaaaatagtgaaataaaaaaatttcatcgttaattaaaattccaatcctactgattacaagaaatctctgagcgttttcattaattttcaatatttttgaaattttctcgtcactcatttttggattttctccttttatttgccaatatattttcactttctccattttttctttctccgttaatctttttccattcattccgaattatttcttccattttctaattactccttgggttactccaattttcttacaaatttcggcataattttggtgccattcttttctcgaatattttcttcctttttgcttatattcatttttcattgcattaaatttttgcacaatttcaattttttgtacatccgtttttgatttgttatggcatttgtataatcctaattctttgatccatttgtaaattttgtttcgatttgtgcccaatttttttccgattttcaattcaattttattccattcttttgctgaatattttctctctttttgtttgattttcgctttaattttgttgaatttttcaacaatttctctctttttctgttcattttctttttcttcccatttttctccaaatatttctttaaatgttttttgttgcaattttttctttgccgctccantnttcattnngagcattanaaataatacaatttgaaagaatattangcacagtttcatattttctaaaaaatttcattttgtattttatttaatagaccgaaaatgaaaagc

SEQ ID NO: 37058 - DNA, 793 bp, Heterodera glycines
aaagcatcagagtgctaaaattgacttgtaatcattttggtgcgctttagagcattttctgaaaaaatatttatgaattaatttttcaaaaaataaataaacagttaaaaactcagaatttctaaaaaaatttaaaaccaattacaattgtcattttttcaggttaagttagtcctgtaccggggagtatgcctataaaatttggtacgattttattgattattgaaagagctagaaccgaagaaaatctttttaatttaagcctaaactttttggcatgtttaaaaagcaattaaaaattttattcatctccctttttgatagtaaaagcatcagagagccttatttaacttgtacataaatttgatgcgtttcagagcactttctgaaaaaatatttatgaattaattttgcaaaaaataataaacagtgaaaaactcagaatttctaaaaaactttaaaagttatttctcttcctttcagtatccctgcaaagtttggtgcgcttctgataagtttctgaaaaaaaagttaagcctaaactttttggcctgtttaaaaaggaattaaaaatttttaaaaattttattcatctccctttttgatagaaaaggcatcagagtgcctaaactagcatgtaaataaaatttggtgcgtttcagagcagtttctgtaaaaatacttatgaattaattttgtaaaaaaataaataaataatgaaccctcctccttaataattttcctgcgcccaaggtctcactcagcctcttcgcggcctcgtggtgggccttcg

SEQ ID NO: 37059 - DNA, 908 bp, Heterodera glycines
  unsure (1)..(908): unsure at all n locations
ggaattaaaaatttttaaaaattttattcatctccctttntgatagaaaaagcatcagagtgcctaaactaacatgtaaataaaatttggtgcgtttcagagcattttctggaaaaaatatttatgaattaattatgcaaaaaataaacaaataatgaactctcttccttaataattttcatgcaccgaggtactcactcggccgcttcgcggcctcgtggtgggccttcgccccccctccgcccttcaaaattttgaaaaaaaaataaaataataggagactcagaattttgaaaattttttataaaaactgatgacaagctaatgtgataaaacaggttaattcttttcctttcagtatccctgcaaagtttggggcgcttctgataagtttctgaaaaaaaagataagcctaaactttttggcctgtttaaaaaggaattaaaaatttttaaaaatttattcatctccctttttgatagaaaaagcatcagagtgcctaaactagcatgtaaataaaatttggtgcgtttcagagcattttctgaaaaaaatatttatgaattaattatgcaaaaataaataaaaatttctaaaaatttgatcgtccataaataatttgtaattgatcaggggctcaccaaattttgcaggaatacgtatcggaacactacaaatgcttactaattttcctagattttttaaacccggtgaaaatattttgcagacaccaccacttttgcacttaaaaaaatttcaaaaaaatttaaaaattcatagaaaatttaaattcataggcactactgctaaatcaccacgcatacccctttccttgacctttttaggccctgcaaaaactagggagcttctgatcactactcgaaaaaggaaagattgaatttcagtaa

SEQ ID NO: 37060 - DNA, 1201 bp, Heterodera glycines
agggagttgctgctgctgatgccagcgaaacatcggcaacaaccgaaagcagcagccgccaaaccttcagcagcacagaaagcacagcgacaagttcaagctggtcaacaacggaaacgacaacgacgacaacggcaacagcagtcgagtcggataatgagtcgtccttgctgatgcttgactttttctgaatgcttttctcagtttataacgctttattgaagaatctcgagagtgctcttgattggggcttaatgggtttgaaggattacaaaataaaaggcctcccgtagctaatcggttagaggcattatttcttggtttgaaagggaggactatgggttcgactctcaccgggcgtgttacccatttaatttatcctactccagtcccatgcttggcattcattgatctcaataccgagtttttcgtcccaaatagagcacggattgggtccccgattcgggtgcactacgtcccccccccggcatgcatctttcatgcgcatattccaacccttttttttgtacataaacatagtcacattttgattttattctcattttaatattaaataaataataaatgttttttctctttttacaaattatttggctattcattttaaaacacaacacatacactcgaatagagcagaggtacaatagcagtgagaatgaaagtgaaagaaatctttgcgtaacttttttgcgacccgttttttgatgataattatatgattaatgatatgcctaatgatgataataatgataatgatatgccccgagggaacagagcaggaattgatcgatcgcttaatttagggaatcgagcaggaattgatcgatctattcatttctctgactctctactctcgatgaacccatattcctgccctgatctctactctcgggatcggctcatctctctggctttcgacatcggccaatacccatcccatttctgctctcgaccgatcagtctctctctcgaccaatgatccgttcctgctgctctgatcactgctgctgttgctattgctgatcactccacaatgtgtgtggtggtgatcagaccacctcgtactgggttgggcttctgtgatggtggtgttgagccaacaaaagttgctgtgccgacgacgtagacggcatttgctgatgatgtgatgctgccgccattgactgatgccgctgttggt

SEQ ID NO: 37061 - DNA, 818 bp, Heterodera glycines
cacttgaagctccaacattttaatttgcatctttttacattgaaaatgtgctcagcggacgttctcaggcggatgtgtattatttgcagtgtaacagttgccaatggacgagccgaacttcggaaggggccgagcggaacatggccaaagagtcgtggacagagccgaccaatcccatggagggcgaactgggcaaagtgatggctatcatgaagagactgagcaacttcgaacggttcgagcgcgaaatgaacagacggtctggcatgtcaaaactcgacaaatttggcactttcgaacgcgaaacgccaacgaaaaggtaagaaaagcggacgaattggataggcatttgaaaccattgattggcagaatgtcgggccgaggaatccttcgaaatgatcgcttttctcttcaaaatgcatacaactcacgcagaaaagcgttacaaaaacaagacgacgtggacgaagtgttggagttgttggctccctctgccgatgttcccggtaattgacaaacccaacaattgcctttctaaaatactatcgttcaaatcattaaataattggttccgaattttaaaaaattttgaggtcgccgccgcgggaatgtcgcctcccccggaaaaaaatcattcattccctttcacatggaataaaatcgttgccagtttttaggggaaaagaaaggttcttttcaataattgactgaattgaataaacttgataagtgtcttctatttgcctgccatatttcattatttttcaaaaaaaaaaaataggccgtaacttttttgaaacttaaccaaatttcaaact

SEQ ID NO: 37062 - DNA, 950 bp, Heterodera glycines
ggcaaagatttaattaactaaatacctgataaaatgtgccgttagtgacaaaattgagattgttgcctgagatgatgtccaaatatccgtcgtaagtgaaatgcttttttgaacagaaaggtcatttttaacacgttcaaaaagttcgtcgtaaatttgggcaatttcttgcgtaaaaaatttacgtcctctgaattagaaatgagaaattaaggataaactaatgaaaatttaatactttggttcataattaggtgccaaaaatttcaaaactctctggaaaccagttttttcaacgcatctaattggcagtatgtcaactgcgatcatttcagcaattaatcgttccaatttctttgttttttcaccatcaggcttccattgagctggaaataatatattaaaaaaatattagattttgttgggttacaagacattcctggatcgtttgtgatccgccggagtgaattcttgatcttttttccgggattggacttcctgattcatcatttctgttcgaagttgggtcagaagaggcaaaattggttatttttggcagcactgcgattgcgttctctctcttcttttttatttcgtcaacagaattttttcgcttcagttcgtgttccttatgtttggcgcaaaggtgtctgatgagattcccggtagacttgtgagaatcctgtggaaaatggcactgcaatatttgcagcgaattgcgccatttataggacgatggaaataaaaccaaatggaatcaggtttttcagccatttgctttgcttaaattcaagaaattcatacaaaatatctttagaataaggataataatgaacaacaacaaatacaaaattttcgattccattgaacacaatcgtgtcaaaaaaaaattctctatttccttacctaattttcacctagacccctttgttaccagtgcttagttcgac

SEQ ID NO: 37063 - DNA, 1196 bp, Heterodera glycines
  unsure (1)..(1196): unsure at all n locations
caattttttctcatttatcaccacttccaattctgccataaatcatttttcaccgcttcaatttgcttagccaaacctttcaaaaatgattttgttggcctaaaatgcaattttaacaaattttaaatataaaaataagatccaaaacacttgaaatttcatttttatatagaaacatattcatttcgttacatgaaatttaaatttgttttattaaaaaagtaataaaatttatttactcttttttggcgttttttgcagatttttgatcatttttgcaaaatgtggccaaagtttggttcaaattaaccccgcaaatttgttcaaattcggcaaattttgcccaaaattcgcccatttgtccctcaataacattcattttgttcattaattcaatgttctgctcattttctcttcttttcttttttctttaaattttgtagaaatttttttcggtgattccctaattgttgccattatttttttcggtgaaaaagttcctttgtctttgttcgttttgcttgtcgtcgctttgtcctccttttttgtattgccatttccttaatgccattgctcaattcttttttgagagtgccaatttcttcttcaaacaatttcatttgacataatttttgccacttttcacttgtctttgcatcaagtgatgatagaaagcttttaaaacgttattattattttttttaatttattttattaataacggcggtaccggtactaaaaatttttgtccgttatataaataaataaatcttgtcgcgctccattgctcccgactctcgctcaacggatatgataataattaagctagggttggtccccttaatcgacgcgggcttgttttttctaaaaattgccccccccgtcgaggggtttgctcccctatattttttaaatgcttcagccatgcccgataaattttgtcgccgaatttcatcaccaattcccgactttctctccccaagaatcggggaccaaccctaatttacactttcaattacccttctgttttgcctaaatccaaaaatatgccggcatcaattcgcctttcctccggcactttgccaatcatttcgttcaaattttttatctcattgtccaaaacgtgtttttcctctccaactttcttgattttggcgtcaatttctgttttttcttccanaaatttgatctctttc

SEQ ID NO: 37064 - DNA, 891 bp, Heterodera glycines
  unsure (1)..(891): unsure at all n locations
aaaatttcagatttttcgatatcgcatttttagtctatgatatggtttaaatgtttttttttattgaagcattcatgacttttagttttgtttccttgtatttaagtcgggtttgaaccaaaaatgtgttcggaaaatttgaaatttcgacttttggttcgaattcggatccaggctgcggagttggtcgaaattgacgccatttcgcatcacttaccctccctctcttttcttcatttgctgttggtgctgttacctctccattctctttcagcgcctttttgctgcaactcacctcactgtgctgctgttctgccgccaatccgccccgatcgccgctgctgcggtgtgtgactttttgtgttgtgttcgactcgactccgtccgtccgcaaatgacaacaacgacgaggaccaacaccagggacagcccgagacgtgtgctgatgcgccagttcgaaatgctgctgcagaactcgaacgccaacagcggattccgtgcgtgtctcaacgatggcaatgtgagagaatcagcggccgaactgatctgatctgatccgcttttccgttacgcatatttcagtcccatccctttaaacagatcttcaaatggcgcgttttcatcgatggtcctccggaaacaccatagtgagtgggcggcggcggcagaggaaaagtgcaaatcaatcaaattaattgtttccccattaatccctcctctccccttttttagcgcgggatgcacgtttacggcactgctcaattcccagcttcgttcccgttttatccgccnaacatgactttcctcaccgacattcttcatccgaacagtaagaaaagcgcgcatgaattcatcaaatcccagcaaagcccccaccgttcccttttcagt

SEQ ID NO: 37065 - DNA, 1198 bp, Heterodera glycines
tccttcttatgagaatgaatattaagattgtttaaaactcttctagcaattttaaattaaaattttatttattctatatgcagattctcttttgcttaaaaaaaataaaacgaatccaattaatcttaaatgaactttttttatatatattctttaaagttttatatttgtaagtgaagagaatttttggtgttttttgtcaatatattttggaaaccgatcgataagttttattttttatctcaatatttggttaaataatattcttgtctaataacattcctttcaatgtgaagcataattgaatatttgagattgatacgattcaaacattatttattatactgaaatatatttctttctattcttattttgattttttttattacccacctaaattattctttacggataataaattataatttttgagtcacttaaatttatcgactctcttttgttactattagtgtgacttgtagaatagtataaattgcgaaaacaaaattgaattaccgccattaatagtagttttatttttgtaattttttgtgattactaattttttacactaatttcaattaaagatttttattggcattattcttattttattaagagtttgaatgatattcgatatatattatttttacgcttaatatattatcatttttctagactatttgggtttattgactcgtttttgtcactattagtctagtttatatgggagaatttttatagcaaacaattcttttctatcattttctctttaagcattaatttaaaaaattaaattaaagttgttttcaaattttctaggtttgtaaataaattatatttcaagattttcttataattcaaggattgactcacaatttcttttttaatctttattttatttcaaaaatgttataataaaaataataaatttatttatatgtatgtaatatttaaaatttatcttctttaataatctattctaagaatattatatttatcattattttaattatttaaaaaaaatattctaaaaattaatattatctttattttatgaggcgcatcttcatttaacagaatgaatttaattatttttaataaattaacttcagctttaataatttttgaatatcaaatcatcatcttttgtttatataaattcagttacgcttaatattattgatttatttttttt

SEQ ID NO: 37066 - DNA, 1020 bp, Heterodera glycines
  unsure (1)..(1020): unsure at all n locations
attattaaaatcccgaaatatttaaataaatatttaacgaaaaatgccgaattattgaccaaaacattgaaaaaagtccgaaacattgagcaaatatttaagaaaaatgaaaaaatttgtggtttaaaaaataaacggctcataacactaccaaaaaatgtattcattgattattttaatttttaaatttttttaaaggaagaaattgggctaaccccgacagctgattaccaaattcaatcattgatgcttttctttctttaaaattttaaaattaaatttttttcccatcccatttgctaacactaagcctcaaaataactgactttcaatctcgtatttcaaaaattcgatcatcttataattgtcttgttcatcaattaggtccttgattcctttgatgcgttgtccattttggtcttcatttttgtccgtgtaacttttcacacaaatattttcaacaacatccgcctcaacatcggcactagattgcgtcatatttgtgccatttaaggcgtcctataattagtttttgaaaacctggcacaggaatttttgaatttttaggacataaatattttgaaaaattaactgaaagcttgttataaatttaaatgaattaccgttgtaaaaattttcagtttggtttctttgaataacattgtcttaaaattctgttcaaataacacatctcttcgtccattaatgaaatatgcttaaattttaatttatatttccatccttctcttgtgaaaaaggcttttactaaaaggtatagccaaaaaccgggattccggggctattaaaaattaatgaatcgggaattggcatgatcttccagaaaaacgtcaggttttcgaattggaattttgtgaattgttggttgactttaatttttttanaagttttccaaaaaaacataccaattttcctgtctgatttgcaattggagggtagcaaatttgaaaatgattgcgaacgccttcaatggctttaaaacgttgcaattgccttgatttt

SEQ ID NO: 37067 - DNA, 1722 bp, Heterodera glycines
gtgttgtaccacgtgacgaccagcgccgcgtcggcacctttcgcggccgcgcctgccacgccctctggaatttgtttgcaattttgtttttattttcccttttttttggcattttgacatgccctgcagccatcgcatcatttggtccaggaaatagtcgccgttggaatcgcagcgcacgtaattgtcggacgcggccggacacttgcgaaagcgaaagccgaagaagctggactcgggcatggtgccaatgtcgggcccaatgtttgtggccgtgccacggccaaagatggactggcgcatgatcagccggtagtaaatgccagccctcaatgccacgttgctgctttgcggaatctacggcatttagtcagcgtatagtaatgggcttgcaattagaattttattgcaaaaacttaaccggcattttggggaccaaaatttgtgattagccatgcttttcaattggagatttaaattgaaaattaaaatttctattttaaaggaataaaatattgctggtcatttaaaaaaatttgataaaatgaatttttttaaaataacaaagctccaaatggtcgaaaatatttattaatttttgccttttctgacccaattttgacaatttttagaaatttccttaaaattaattataaaaatattgcaatccttcggtttcttttaaattcaaaaaaacaaaaaatgaactcaattgaaaatgaattcaattcaaactaatcatttcaattctaagtaaggcaaattttgtttttgtttggctaattaattcctttaaatagattaattctttgtttaataattttaatatcattctgaccagtaatattgatcagcactaattacatattcatttacctgctgtttgcataggtaaggcgcgatcattgccgggtcctgctgtcgtggccaatctgtcgcttcggggcccacattgatggtcggcccctggtccaacacagtcgcaaaagccatgtacccgttgacggaaagctggcaaattaggcaataattaattttaatattaaattaatattttgcctttcgaaacccgagaattcattctttatgaagtctaaactcttctaccaactccaattttaaactcaggtcccctggcttttcaaagtatgataataataccgtagtgtaattgtaaagaccaccgtagtaagggaaatacatgtacagatctgagaatggcatgtgctttattttttcatgccattggcatgaatcacttgccgattgtttgccctgcggtcaaaaagccggggtgcactttgtggtcgccaacctcgggaccaaatggcaccaaatttactgtaaataatgccgaattgagcatttcaattttttttggacaaacccccgtaaagcaaattgtctgtgccaccggtgaaaagcgtggcaccaccgccgggcccaatgtttggcccggcgccagcgacgggtgggacgccacctaccccggcgggcatggcaccgggcccaattccgccggcgccaaaatcgccgccggctgtgccaccgagcgacggattttgcgggtattgggcaacggcaaattgcagtgggagaaaaatgagcataattaatgaatttgttatgaagagcaacagcataatgtgcagaaaagatatacaagggaagggcgaaggcattacgtaaattagtcacgggaaaattaccttaattaatatg

SEQ ID NO: 37068 - DNA, 810 bp, Heterodera glycines
tcagcttaatctcatttatatttctcttctcctcatctgtccactcattttaaaattcatttgtttaattaatttttccatttatttccctttgtcttttcccaggagggcggcactttgttggcgcccgaccgcgccgcgtatttgcgccatttcaatgtgaacgtcgtcggcaccgtggccaccaccgccgcctttttgccattgctgcgaaaagcggcggcaacaaattcggagggccaaacggaggagcagcaggcggcgcccgttgtccgcgtggtgaacattggcggagcgttgggatgcattggcaaagtgttcttaaagccatcggagtgtccgtatcagaacatggcctatggcatgagcaaggcaaaaacaaaggggcaaattgatggaagaagagacaatcttaagaaatggaaaaaataatttgaaataaaagcaaaaaaataaaataaaggggtgaaaattaattttcttaaaatgattattgattttatttcactaaaatttccaaaaagaaacgttttactattgaaaattttttttatttttttctccgattttcaatcaccaaaaaacttctgcaaaactttttaaaattttgcaaaataatataggactcttggggctatagaatggataccaagaatgtttaatttggatgattcaaaaaaagttatggtgcattaaattgccaaattattttatggtcgtgtgaactgaaacagagccaaaatttcttggtaatagtgcattacaaccaattgcattgttatgtaacatgctacaaacagcagcaatttt

SEQ ID NO: 37069 - DNA, 859 bp, Heterodera glycines
aattacgtcgcgcataaaaattgaaaaaagataaaactttaaatttaaatgaaaattgctaaaatgtgaaagttcaaaaaatgccatctcatcatttcacattaaaaagcataaattcgcctaaaagaaactaaagtttccaaattattttaactagataaaattccaaaaaaaaaacgctaaaattctcccaaaaagaggcaaaaaaaacataaaattatctattttatatacataaaatgccaacttttggcttggtaaaaaaaatggaaaatgccaaaatcccacaatagaggcaaagaatacaaattttataaaatgccaaattttgcgtgagaatgaataaaaattttcaaaaaaaacgtgccaaacaaattttgaaaaatgtgccctcaggcgatgccaaaggcgacaaaaaagtgggaaggattgattaatgccgtgccgtcgtcgtcgcccttttggctgcaaaattggttggtaaacgcactcattgactgtcttctgtttgtggggctgcctgttggaggtggtgggaccttattaacagtaatttatggtgccggagggcaaaaagattggcaccccccggggggaggggggaagccccaggggagaaattggggccgagaaacagaaaattattaaaatttctttatttttattcgaaaacagcattaaaaaggcatttatatgatgatgaatggcaacttatacaatcattttatttgttcgttgtttaaactttttttcaaatttaaaatcttttaaaaacaattaaataaaaaatggcaaaaaattatttgaatgtatttaaaaaaaaaaaaatttttttcattaatttaaaaaaaataattat

SEQ ID NO: 37070 - DNA, 459 bp, Heterodera glycines
  unsure (1)..(459): unsure at all n locations
ggggggggggggggggggggggggggtgttttatttaaaaaaaaaaaaaaaaaaaaaaaataaaaaaaaaaataaaccccccccccccccccccccctcccctctttattaaaaaaaaaaaaaaaaagaggagggggggggggggggggggggtggggggggtgtgtcccccccccccccccacaaaaaaaaaaaaaaaaaaaaacaaaaaaaaaggagggggggggggggggggggggggggnggggggggggggggaccaccccccaccacttattttttttttttttttatgtgtataaacccaccccaccacccctctctttttttttttttttttccccggcggcggcgggggggggggggggggggggggggggggggaggaaaaaaaaaaaaaaaaaaaaaaaaaaaaaaaaaaaaatttttttttttttttgctttttttttttttttttt

SEQ ID NO: 37071 - DNA, 1127 bp, Heterodera glycines
gaaaaaggaagccactgtcaattcgagatcgggactgttcgttctgccctcattctgtcgccgagccgtgacctggcaatccaagtgtttgaacaaggacggaaattgtgcaatggtgggcaccgtcgttccgttcgatgcctttaatcgggttttttctgtttaggttgcgatgtatctatttcattgtcttacggtgaaacagtgagccgcgaaaacattcgcaacatttccatcgatggctgcgatattctcgtcggcacgccggaccgtacttgcgattttttccagtccaaaaatgtcagaaaattgcttgtttcttcgaaataattcgtctactccttccttttagctcatgttcgaccttttgaaggtgctcgttcttgacgaagctgacaaactgttggacgaaagtttcattttggatatgcgtgtacttggcagtatgccaaattggcctacggtatttcataacaaaatatttgtttttttaccaagatatttgcaatgtccccacctcctttagactgagttgcgccagactctttgtttctccgccaccttttcaaaagatgtgctgaaatgggccgatgaatttatgcgccccaaccccgtgttagtctccaaaggaaaaatcacacccaacaaacgcatcaaacaaacatttgtccttgccgaaaaagccgtgaaacggcacacactcgtccgactgttgcaactcgagaaggaacagaacgaacaattggacagtaagtggacttttgaaaaagtgcatgttcaaaacaaaacgccaagttttcaggttccaaaaaactgcgtagcaccatggttttcgtcaacacgcgcatagataccgaaattgtgtgtaattttttgacctctcgagggttctctgcgaccacaatcagtgggtgcgttctctcattctctgctgaacttcactttgtctgattgcaaatgcttttttagtaggcgtgcccaaccaacgcgcgagaaggcggtgtgggacttccgaacgggcgaattcccaattatcgtcacgacggacgtttgcgcccgtggccacgacatcaaaaatttggagcgcgtctgttaatctaccatttattaagagggtggagggggag

SEQ ID NO: 37072 - DNA, 1192 bp, Heterodera glycines
  unsure (1)..(1192): unsure at all n locations
cttccactttctcttcactttctgttcctcttccactttctgttcctcttccactttctgtttctcttccactttctgttcctcttccactttctgctcctcttccactttctcttccgctttctgttcctcttccactttctgctcctcttccactttctcttccgctttctgttcctcttccactttctcttccactttctgttcctcttccactttctgctcctcttccactttctcttccgctttctgttcctcttccactttctcttccgctttctcttccgctttctgttcctcttccactttctgttcctcttccactttctgttcctcttccactttctcttccgctttctgttcctcttccactttctcttccgctttctgttcctcttccactttctcttccgccttctgttcctcttccactttctcttccaagaattattattttaatatttaaaataaattatttttaataaactaaattaattttaaaaaaataaaatcattcaaaaaatttaataaaataatggatgaaaacacccagaataggtgggacccgaaccgtcgaccaccaccaccaaaggcaaaaactaaaaatgtatgctattaaaacagcaataatttagttggaaatatttattgaataaaagtaggagcagtaaaaaaggcacttcccggacccggatccaaacaaatcgggagaaaaatagtaaaaagaggggtaaaatggaagactcagagctgtggtcgaaaatttgtcaaaatttggagctaatatttaaaaatcttcgggagtttttggcgcgggcggtgccgatntgcgccgccgggtgnngttttttngggtttttnncgttttttgttggggggtagcctggttntttgggcctttcctctttttcccttcgttagcctgccgcccctccccctttttatgtgtgttcgttggggctcgtggnggtttctttttgtggtggctgctcttccgggtngccgccttgggcgtgttcttgggttgccgtgccgcctgttgcggntccnnnttncggngtggtccctttcagccgtggcccgtnntccgtcnctccgntggggccgtcctttcaggggcccgtccttncgtccagccctgctncgggcctctaaggccctccccccgcgaaaaaattaaataaaaattaga

SEQ ID NO: 37073 - DNA, 57 bp, Heterodera glycines
gtcctgagtggcaacttgatggccgcgaccgatgattccggcgaaagactccaaatc

SEQ ID NO: 37074 - DNA, 1168 bp, Heterodera glycines
atttattgcgatgtgaagtttaaattaaaaattgttttatttaattttattaattattgttctgcattttgtttgagcttaaaacttattttaatcatcgcctaaagatttacaaatttcacaatttaacttattttttgatttattcatttaatccatttgaacataatttaattaattctatttgcaactagtcgcattgccgcttagatgacgatattatttcattatattatctataattcatttcaaaataattatgtaaaaaatcgaattattatgcataattaattttgaaaattatttttcattaaaatttaaaataaaactcaaacgctatccatataaattatataatttaaatgtatttcttaagtgaaatttcctttcaatatttataaagttctttttattaatcattgcaatatgtccgaccttattcttctataaaaatggtgttttggtaattaatcctattaaaatgttaataatttttaaatgcaattactagagaaagtattgtcacacattttacaactaaaaatgtagaacttacttatatatgcattttttaaattaattttcattcaatttttatttatatcataactttccttatttattctctaagtgtagatcaaggcaaatattcacaaataaatctaaatattctaaatttttccattttttcaaacaataaatttgcagtcaatttaatccgaaatccatcaatcaatcaataaacaatcaataaaatcaatcaacctttatacgcaaaagcgcgacgccgatatgagatagttataattaatgttatagtgctttgttgaatgataaataacttatatttttcgttatattcatgttttaggtttcatgttatttagaattctgagttcattatttgatttattcatgaagtttttatttaaagttagaaaagctcaacaagtggatccgatttttttataaattaattttatttttatttcatatttttcagcatattttttaatataattacattttggtattattacacggcttttaaagtattataaaattaaatattgtttttctattttattgactaatttagacaatttatttcatgagatacaatttaatttttataccaattttttttcattagcaaaaaagcatatgc

SEQ ID NO: 37075 - DNA, 922 bp, Heterodera glycines
agcttcacatgaattatgtgcataaaattactgcaaaattatgaccttaaaggggattaaagaacagagataatttgtttaaattctttttttttttgttcattcagcagaattctgaccccaaaatattttctcatatacgtagaggctcaaagaaaatgcgtaattgcatcaattgaagtgcgtcagcagaaaatgcttaagtaagacagtaatttttaaaaattaagaatttttagaaattaaaaaacattttctttaaactatgtaatttttgtttttctgttttggtaaattctaaaaattatcagcaggtggagtcacagtcggacttgatttttttttttggcaaaatgaataatttttgatcgaaaaactgttaaatagctggtgcccaaaaagttttttcaaaaatacgccgcaacaaaaagttgttaaaatttaaaggattcggaaatataaagtttaaacgttttttgttcgaattaatttataaaaaatttatttgaagcaattttaaatcaatgagttctgagtaggaaattttctctgccacatttaactatatttaatcacctgtgaatttaacctttgatttattttgtatttcaattgtattacaactcattttgtatttttatttggtcaaatttatatttgttttctttttttggcaccatgtaagagcactaatgtgcctttggtttgctcgataaattaaattaaataatattataagtttttcattaaaattgtttatttttttcattttatcgagggcacaacttgccttatggtcgccatatttgttaattttatacgaaattttgcttttttaagcgaatttaatttaattttcaatggctccgcccgtcgaaaaaaagaaaaagttttcttccgccgaccatttcttaattccttc

SEQ ID NO: 37076 - DNA, 833 bp, Heterodera glycines
attttcaatgaaaaccaatcaaattgatatttttaacttttttaattgaatgatataaattgatttaaaaaaatatatacaattgttgcgatttgaaatcaatttatttgcacacagaggtggagccgtcccgggtggagcagttggtcaagggagacaaggcggacatgttgctgtaccaaccgcagtttgcggagcgtggcgtcagttttgggagcagtggtggctcaacagtcggtgctagcgttacggcaattgtcaaattggtgccccatttttttgggatttttgttaggcaaattaaaattttttttgtaggaaatgccacccattccgatcattccaagcgagcggacggcacagccccatcagcaacaacaacatcggattgtgccaccgcctccgcctggtccgccgcctccggcaacgcatggctcacaaagcggcggtggtggtggggctggcggtattcaccatcaaccgagtttggaggtacaattatgtagggtttactcgtcattttttgccatactatgctattaaaatgtacgtattggttggataattaatgaaagattgactattttttaacacatttgtgcggggtttaaaaaaagccatagttacccattaatctctttttttcaaaaagcggtttttgactattatctgttcttacaagcacctttttcgagttagagcccctgggctataatttggaatccccctcaaaaaggggctttatttcaggggggggggttgtttcaaggatacgatatataccaaagattcctaccaattcaaacttcgaaaccggtgattcgcgaatgtgt

SEQ ID NO: 37077 - DNA, 1161 bp, Heterodera glycines
  unsure (1)..(1161): unsure at all n locations
atcaaaaacctttttaattttaccattttattcaacaagttcaatctcaaactaaatatattcattaagtgtatcataatttttaagatagttcaggattaaaatacttttcagttttgaactatagtcaattcgtacggaacttgtcgacaacgcctgttcaccagcgctttaaaaatcaaacaaaaatactgataaattataaaatagtcttaattatcaaattaattacaatttgtaaggaataatagccagtatatcgtttgcaaaaatatttatatttttgttttcaattttcttcaaatgcaaattttatatttatcataaaaagctactgacataataaatcaattttattctatgtaattaataaatatttaaatgaaaaattttaaaagcatcattcttaaaatataagttagttattattttaattgtattataaattttgctactcgaataaataaattcgataaagatgtgtattataattcattgagttatagtaaaaaataatattcaaatacttacgctttgaattaaacattttttttttgtaaaatggaatagatcattaaaacaatgaatataaattgaatttatatataattaaagaataaaattttctccagtaactaagcatataagaaataaatatggataagacatgaaataaatcaatacaaaatcaaaataaatactattaaatattaatgaaaaattaaaagaaacaaatgaaaaaatttacttaccaatcaccgatttgaatgttgcgaaaaaatgttgaagaacgttttaatgaaatctaactaaaaatttctaaaagtacgtgtaaaatatgacctttaatagaaattttaaatttaaaaaagaattgaagcatataaaaatagttttcgcgggttcggcaagtttttgaaataataaacacagaatcaagaaattaaaaaatagcgtgattaattttattctacatttttaacctttaatagaataataaaattatttttgttccaaaacaatttacaaataaaaaaatttgaacaataaacaaaaaaagaatatcaaaaaatgaactttgctcattaattaaaaatattttttaaaaaatattactaaactgtattaatataattgagtgcaacaaangtttaaaaggtt

SEQ ID NO: 37078 - DNA, 1000 bp, Heterodera glycines
gtatttggtgcgtattaaactcaaattaaaaacctaaaatatattaaaaaataaaaatatagaaaattttattactaactaacataaaaaaaataatacaaaataaaaaccaacgaattccgccaaattttgccacattttccgtacttccgtctgtcttgagcaattcgcaaaaattctatttaagcaaagtaaagacgaaggcaaccaatcaagctacaaacacattcattcatacatcatacaaaattttctgcgtttcctacgcttctctgctgctctccgccttcgccattgtctctctgctatgccaatgtttcacttcgccaccccttaaaaccatttaaatttaatttgaactttggcaccctttaaaaatcaatttcacagatttgctttagtgttgaaagcttgcgtaggaatttaaaagtcagctgagcttaatccccggctgtcgcagcgacggtggcagtgaatttgtgaaggaatcaacgcgagtctgccccaaacggacggtaggaaagtgatcagcagtcatttactgccactgattaaacatttgttgcttaagtaatatttcctctttcttttcttccgtccttattaaacgaattaacgcactaattgcccctttaatggccatttgacagcaaatgagtgctcgcgcagtctccgattcgtccgtgccatgttcgacgtcgccgcttttcatgccgacaatgacagcgcgtggggccaattggcggcccaatttcggcaccaaacccaactgattgacttaaaattgacgcggcattggcactggccaagtgcactttagcaacccgaaaggtaaaagtatttcaaagtgacgtgaacagttatgtttaaattattttttagctggaaatcacgcgcaagtgcccttggtggacaatgtgattattgcccgcccttcatgggcggctctcaccgccatgacaattaattagaatttagtaaactaaattattttttatat

SEQ ID NO: 37079 - DNA, 759 bp, Heterodera glycines
  unsure (1)..(759): unsure at all n locations
aggaatatatttttaaaagcattgatgacgctgaaagtaaaggagcacctattctacctgaggtcctcaataaacttcaaataaatagtcttcctgatcatgaacttaaactcaaaactaattgtgttacaaaattaataagaaatttaaacgtaaatatgggattatgtaatggaacacgtttacaaattcttgatatcgaaaaaaacgtattaagagttatgatcttaacaggagacagaatcggagaaattgattttatccctagaataagtttaatagaagataaaaaattccgtatgtacttaaacgacatcaatatccattaaaattagctttttgtatgacaattaatagtgcacaagacaaacttttgagaaaattggtgttgatctaacacgagatgttttcgctcatggccaattgtatgtggctttatcaagaacacggagctgggaacgaattaaaatcaaatattccaatgaaaataatgaaaaaaagcaaagaatatcgtatggttggaaactttaatataaatttcgatttttataaatttaaatatttttatgtttttaaaggagcaaataaaggtaagttaatcgctgcattaacggggagagtgcagcgtatgatagggcgggacataagttgtccctttaactatcatttaaactcccagctcctttggtacccaatgctttggtgcgttctcgccgcgggtatcgttagtaagctttatgctgaaactanatccaaagc

SEQ ID NO: 37080 - DNA, 1599 bp, Heterodera glycines
  unsure (1)..(1599): unsure at all n locations
atctcttctttttgtaactgtcatattttgcttagttaccactcatcatcgtttgcgaccgccatgacatggtccaagatttggtgctctatctctaccgcagcaatctcatgaagtcaattgaagtttttgtcagcaaagtgaatcccaaacgactgccaattgttgtgggtgcattgctcaacgttgactgcagcgaagaccaaatcaagcagttgattcaaatcacacgtggcaaatttgacatcgatgaactcgttgaggaagtcgagaagcggaatcggtcgggcttttggattacatcctaccggtttaccttttatttttagtctgaaacttctgaactcgtggttggagagtcgtgtccatgaaggaaaccaggaccaggcaacccataacgcactggcgaagatctacattgattccaacaacaatccggaacgctttttgcgtgaaaatcaattctacgactcgcgcgttattggcaaatattgcgagaagcgcgacccgcattacgctcttttggcatacgagcgcggtcggtgcgattctgaactcattgcggtaaagaaatagttacaatttggttgattggtttcctttttaaaggtttgcaacgagaattctttgttcaaaaatttggcccgttatttggttcgtcgtcgtgacagtgacctgtggggtgttgttttggcagaaagcaacccgcaccgtcggcagctgatcgaccaggttttgccgtggctgaagtttagcaattaatttgtccttgacaggtggtgcaaacaactctttcggaaacctctgacccggatgacatcacaataacagtccgtgccttcatttcagccgatttgcccaatgaactaatcgaacttctggaaaagatcgtcctcgaaaattcggcgtttaccgagaaccgaaactgcaaaatttgctgattttgaccgccatgaaagcagactcatctcgtgtgatggaatacattcaaaaattagacaattacgatgcgcctgacatcgcaaacattgccatcacggacaaactgtacgaagaggcatttgctatcttccgcaaatttggggtcaatgcgtcagcaattaaggtaacattttatagtaatcatattccatcactcgactttaatttaggtgctcattgagaacgcaaaatatgggcgaagcaatttcggattggcttggacagagacggcgctgtggacactgtcggatgtcggcggtgaatagatttatttcttttcattttgaaattccctttttagttcctgcgcatcttcaacgcgatgccgcaaatcgtcttccgcacccttattgatgtgatcagcttgtctcatcaaataatcttcagatgaagtgtttanatgaggaggacttaggaaaacgatggagggtaatattatagatggtggccattttttgaaggaaaatttgttctctataanaagtcgtgaaaacgtgttcatgggagtttctggcttgnagaacctaatgctaacacctattttgacaaatttttgagtccggacccgaattcgaataaaaagtcgaaaactcaaattcattttatattcccatctgc

SEQ ID NO: 37081 - DNA, 1103 bp, Heterodera glycines
caattgccatggcatggatgacaccaaattatgtcagaaacaatgccaacaacagaaacaataacaatgtgccacagcaacaaagaccagccggatcagtgtgacaacgatcagtaattactgatttgtgatcaatcacatgaaagatttttgctgattaaaaaaaaattaattctttggcataatgtttcaatctcaaatttcaccaaaaacatttttagattttttccaacatttgcttaactgtcccttatttatgtatttatttccttgtaattttttaaataaaattgttttttattatggaatattttctttctttttttccccaatggcacacaaggacaaattcataccctgatttatttacaaaaaaaaattaaatagctcaagaatgttgtgcattatactggcaccggaaaacaaaaaaaaaaaaaaatttttttttgaaaatttccatgattaaattggtcgggatgaggcaacaaagtctgttggatgaactttcatcatgggacagcagggatgtaccagggctgaaaaattctctgaattgtttgaaaaccgataaaattcttgaaaatctgctaaatttggcatttttttttggattttcaaaaaatttaaacatttttttgtcgtagaaaaatctattttttttcatatatatatatatatatatacattaattgtagtttctgcatcttttgccattttcttggtgcatcgattttctccgtttattctcaacattctacgccgagcggtcgttccgttacatccattaaatttgtcacctcatttttagtaatgatgcattcattttatacacccttaagaatctacctaaaaaaatttcaaaaaatacacccctaagaatcaagctaaaatttttcaaaatatactcctatgcaatgaaaaaaaattttctcaaaaatttactttcttggcaaaaaaatttaattttaaaaatttttttaggtaactattttgggtttttttgtcttaaaaatcccagtcctacgcatttgcaactgcaatcagtgaataaaaattatttttgatcgatttttggctgaaaattatgtcactattcgtcacta

SEQ ID NO: 37082 - DNA, 979 bp, Heterodera glycines
cacgtacacgtggttaggtgagtggtatttggggtaggaaagcaatacttcgtaagggatttggtggacatcttaacaggggaaagatgggcatttggccatggagagaaagtcgagagtgattctcgaatgtggcttttcgagactgactcccgggtggtttatatgaattttcgagactgattctcgaaatgcctttgctttttgtccctcaactgaccctcgagtccgttggccttccatgtttccattatcagatcggccacctttttgtttgcttctgtccccgtgacgtgcggcttctcagcgaatgcctccaaattggccgctattttatccgaattgatattggcgaagatggacgaacggatatcttaaatcagttcacttacaaaaatacattttccatttcatttctgaccatctgtcccaaattccttcggtttttgctcatattttgtcgcaatttgcgtgacgagaattgcgatgagaagggaaattatggtgatcagactgagaacgaccaaagcgacggaaagaagggcttggcaacgcgaaagtcgaaaagaattcattttggagaaaccattggagaaaaaggaaataattagaaaaaattagaaaatcgaatgattaattaacagaatgattagttacggaactgtaaaataaagtggcaaatcgaaaaatgaatcgaagacaacaattgcattttgtgtgtatttattaaaaaatccttatcaaatggctgatttcttagtcggttgataattttaattgagtttaactgcagagattaataataaattcatgaataatgaaaaatactaaaaattgaataaatttcgttttgaaattaagctctagagaacagactgatttttaggtttttaaatatttttttacggatagggtgctaggtcgtttcgtaaattccaccgccatgggcgttttcgtaaatccgcccaaggggtaaaaa

SEQ ID NO: 37083 - DNA, 947 bp, Heterodera glycines
  unsure (1)..(947): unsure at all n locations
aaaaaaancccaaaaggactattttttctcaataaaaatttttgttttaaaaatttgttcttatctggaaaaaacttaaaattatttaataatttcatttacaattgaaaatttttatgtgtttgctacctaaaatttgctgtttttttctgcctttttaggtgcttatttcgcgattttttgtgcttaaaattgaagtgagttatgaattttcaaatattagcgtaaatttccgaggcctaaaaattaataatatattcttctttttttacaaacctcatgccgtaaaaattttgttatggggaaaaattttttggcggggggcttaattcgaggaggctttatttttcaacagggaggttttatttcagaggggggctctaattcaaggggggggggctataattcaatgaattatgtggaattgaataattatttattttttgttgcaagataaaattggatcaattaaaagccatcaattttgctcctccgttttttcagcgcattttcgcctgctatgcaattctctaaccaatgagacttataatgaatgaaaagcattttgaatttcattttgttaaacctttatgtagccactgtttaaagacaatattttcggcaaaaaccaattttggcacttcagcagcaattgaaaaaagtttgaacaatttttagtggttttcctttatttctatgccgcatgcactatttcttccgacatcctttcttccctttctttgcttctctgcttgtttcagcagctgttggcggcgttagcgtaccattgttgtcgttattgtgcccattacagtatttttccggcacagtaagcgaaggttcggttgttgtctgcttgctcaggataacataatcacgaccatccngtccatcatggccaaacctgtgtgaaagaataaanaatttacagtaaaatctgaattact

SEQ ID NO: 37084 - DNA, 972 bp, Heterodera glycines
atttggctgtgtatcaaaattcagagccctgcgcaccccttttggagtctcgggtaactgtgtcttttatgagaattataaaatgccaaccggagttttagggcatatttcccagcaaattggtccaacgcatattttcatgcatccttttttggtgccagacttaaaagggaaatgaaaataaaataaatttaaaagatattgtgaacagtggttgaagcacagaagaggagcaccaaagcgaggctaaccaagaaaaaggagcgcatttttcgacttttcaattctaaataaaaaattggaaaaatgagtgactttttggatgttaattgatcattattatttcgtgctatttatagtctcacatttgctcaaaaacgttcttcgcatatcaattcgacattaattttttggaaaaataatacgaaaatgtcagaaattaattcaatggaataaaggacaaaattaaaacacaaacatatttcaattatcctcacaaaatcagcaaatcgaaaattggaatggaatgaattattttcatagtgaaggcgttgacaaaaagcagaaggatgcggaaaataatttataaattattatttttaccatttttattaaattaatggaattagccgaaaacgaaattttcgaaagtgttaaaagaaaaaataagtttgatcgacaatttatttccaaataaaatattttttaatgttattgtccgcgttatatttcatttgttttattgtacaaattaaaaaaaaatgattttttttataaaaaaaattaaatacatagtataataaaaaaattagggattcggaatatcaagaaaacaaatttgaataatttttctagcgattttttaaaaattttatgatgaattactaattgtttcaaagatttttctcaaaaatcgctgaaaattaattttttaaatttaaatttacttcccctcctcacaagaaagcccag

SEQ ID NO: 37085 - DNA, 75 bp, Heterodera glycines
cctactttagcggcgcgttgacggtgaaccgtacggtggcgcgcgtcggcgggaaaaaactgatgcaaaccggca

SEQ ID NO: 37086 - DNA, 1378 bp, Heterodera glycines
  unsure (1)..(1378): unsure at all n locations
aattgttttttttttacattttaaagaaatttgatccttaaattgccngannngcgcaccacgaaaacnaangggcccttaaaagagagcccacaaanaagaaaaggnnacaaannnngnnnnggnganngcaagnaaanngaanncaccaccaccnaanganggccaccaccaccacaaccangaggannngccngangnngnngaacannggcnggacgacaacaacaggggacgcannaacaaannggacaaannggannnggngnggncagacngagcggngacannganaaagcngaaaacgaaacggngaaaacggaaanaannaggacnanaaaaannnnaaaaaagcannaaaancannnnncgaaannaaanncnncagaannnggnaagaacnaanngnaaancccacaaagaagaagaaaannnnaagngnccnagnggnnangaaggnnncaacgaagaaggnggcaaaagnncgaanccccacngnnacannnannnnnggcaancaaannnaccaanacaaacggnnnnnnnnnngccaacanncgacccaaagnncaaacgcagggaccagaannnnnnnnaagnaanagcagnggaaaggccaatcacccaaacaaaaaccaaccgatattcaggccaatgcttgagcaacaggacagcgtgctgctcggcaagggaatggacgtcgtcgccgctgtcaacaatcggaggaccaccaccaccttcgggggatggggtggaggaggaaggcgatgaaatgagcagcacaagcggtgccggatggtattggccaaatgtgccacctccgcctgcactggctgcttcttcggtggccccacctaagaattacaaaaaaaaaaatgaaaaagcctgtaatttgataaataattaagaagctgtgggaatccaaaatagaaaatttgttgtcgagcgccatttccaagggtgcacatcgtacaccgccccacccccactcccctctccaaacacaaatatcggtccctttttaggtaaactttcttgacaaatttgaccaaagattcaaaattttccccggcggtgccggacgacaccagttccggttgcccctccacgaaatagttttttggatacgggactgaactcactcaccattcatccactcaccattcatcagcgagttgcgtcgttggcgacgcctgcgcaacatttgttcggccaagtaattgagcgtcctttcaatgttgtatttggtgcgtggaacggacttaaaaagggaggaaaggcattcaaaacaatccattttagatgttcaaagatatatggtcaaaaaaataagcaaaatgtaggaaaaaaagaaccgaaaatggacttgaaattggag

SEQ ID NO: 37087 - DNA, 960 bp, Heterodera glycines
  unsure (1)..(960): unsure at all n locations
tttttttggacaaatttttctttttaaaaaattgagnaactcaacactgatcggacttattttttacctttttgaatgaattttgtcattttacaccccctaaaaatgaggttttttaaagcccctattttcaattttttagtgcctatttttggggttttttagagcctaaagcctaactattttggcagttttttagagcctaaaaattgcatccctacccgtaatattaaatcatacatcttcattgcattaatggttttcttttattttcgcacaatgtttgaaacttttttttattaaggattgttttcgcgcaatgcatctttacacatattttagctataattgcttcagtttatttcgaaggtaaattttttaaacaatttaaaatacttttttaatttagtcgttggcccttactacccgtggctttattttatcgcctcattcacatgttatgcggcaattgcactaaaattggcatggattaagggtgagaaagccatgttaattaggttactgatcaattgtcaaaaaacatatagccaaatatttatattaacttttaaataaaatcaagcgtctaatcgcaattggaatacaaatggaacggcacaaaattcatctacggataataatagtgtgcggatcactgcgctttgctttacggcactaattttttcattgtgtgttacattgtataatttggcaagcaattccgaatggtacaatgaatttttgcactgtgattcccatccaattgggcaacagttgtattacccaatttttatgttcctgactttgcattatgtgttggatgaggcaagaaagcttaaaattatgttaattaatttcttggcataacatacactcaaaattggcatttctaattcaagcaaattcagctccttttgatggcactctgtagggaaatgcgcgtggaatttttgcgactta

SEQ ID NO: 37088 - DNA, 1138 bp, Heterodera glycines
  unsure (1)..(1138): unsure at all n locations
ccctggtgcgggtcgggtccctcgaaaaactttcacaaaagattatcgtaaatatcaggcagccctgacctgactcccacacccccccccccggccaattgtacgtcgtactggaatactgctggttgaccccttacacacttgtggtcataatcagggctaaaaattttaaaaattagtattttaccgacaataaacagcaattggggtcaaagagcagcttataccccttgaaaacagcaaaatgctgataaatcagcagagttgagagccctttgatcataatgaatagggatgctaattttatgtaaatgtgccaaacttttttttaaaaaaattctcagtgacgaaacgatcagtgacgaaatgatcgaccacccatttttgttggacaaaatctgttcagaagtagattaaattttcaaaaaatttccggtgggcatatcggcaccgcctgaccgacaatttgaataaaaattaattaattcattttatataaaatgcatgctgattacattggcgggtttataaaacgtcagcatgattaattaattcccatggctcgaaattccaactcttttaccggcatataaattaatcacctgttgatacgtttcttatcgcgagaaaaagcaataaataaatgacaactgccattaaaatgaacaaattgactactgtcatactgagtaccataaggaaatgaattccctgaaaaaggataaaacattatttaaaaaaaaagaattttttttacaaaaaaaaaccttaaaaaaatccgcataattgccagtgatcatcaggtcaccgaacccttttacttcttggtacattgagacagcgaaaaaacatccgaaacacacacaaataattgtaatcactgccaaatactgtcgcttttttagtttatcgtaactaaatattatttctgtaacaaagaattacaaaaataacaagcatacatctccgaaaaagcaactgaaatcagtctgtcgatgccaatgaaaagaatgattggataaacgcctcctgaatttgaaatatattataattattttatttaaaatttaaaagtccctaatttttccttcgatcccaaacatatgaanaaaattatccttaaattttattgtaaaaa

SEQ ID NO: 37089 - DNA, 969 bp, Heterodera glycines
  unsure (1)..(969): unsure at all n locations
ttttgagccgataccgtattcggcaattttacccccccgtattaggcttgaacctggactatgaagtcacggtcccaacccttcgccccgccggtccattttccaagtcccggtggtgctggtgcgtttcttaaatccgccaatgggtttggaaacaaaaaatgggtaatatttataaatttgtagcttggctcaaattccaccaaattaatcttaagtgatattattcaatagctttaactgttctctttcagaatataatttttcaaaaatttttccttaagtataaaaaaagttataaagcattgaacatgctatattttttgcaagtgtcatgcatatataatacaaacatttaaaatttaaaagtgtttaaaatgcaattgtcgcaaaattattttatatattcgatagcactaagaatctccatttgcctctaaaatttcagaaaatttcattgagtttcaaaaatgttctgggcaaaaattctgatttaagactttttgaaattttatgccataactttttttatttaagtaaaaaattaaaaaaaattctattcttatagagaacacctagagctattgaatggtaccatgaaatattaatttgagtgaatttaagccaagttatgaatttatttgtgttacccatttttgttttcaaacccattggcgggtttaagaaacgcgccagcacggtcccggtccaggcaattcaaaacttacgtaatctaattttaactcaaattttcaaatttttttaagttccggattccggtcgaaaacccagatccaggtccagtaaagtcccagtacggttttgcaaaaaattcctggtaccgtaatgctctagttgtgttcaatcggacgacacccaactcgtcnaatcaacattgttggtatccttcgataacctaagtgtcctctattagcctgcaaaatttcgaaaatctcgtaaggttcaaaa

SEQ ID NO: 37090 - DNA, 928 bp, Heterodera glycines
aatgaatttgagcccatttgaattatatatattattgttctttttgttgcggtatcaacttttatttgtgtatgcatttaggataaatttagtgattttctgaaactgtaattggctaagactgtttaagaaactgccaaataggaaccgtgttttcagatcctaataaagctattctgagaagcgtttcggacccctgaccgggttcgaaccaaaaatcagaaatcaaattttcgtcaaattatgcaataaaaagcacattttttaaaattaatttttcgtatgtcatatacatgatcggcacccccacaaagtgtccaagccacgaaatgtccaaaagaataaaaacccacgaaatgtccaaaatttttcaaaatttataaaaacaaaatgagtctaatttaggatttttagggttttcggggtcgctgaatacgaatataccatttatattatgagacttggacatttcgtgggctggacattttgtgggtcagcgacatgatcagaaaccctggaagtgtgatttcatctgtgtaagcacaacgcatttatagaacatctttaattaaatctataaaaaggcaattggaatgttgagaaagtgcaaaaatgggaattaattaattaagcagttggaatggttgaaaataaaaattctttttgcaatttttgtcggaggcgtcagtcaattctttttggcactacgcgcgtcagtgcacgcctggcgaatccactgggcatgagggccacgaaaactgtccaggcaggtggacagacagtcgcgcccggccgagtccgggttcttcagcggactgaactcctcgtcggccgacaccacccacatgagcacattcctaaacagaaaaaagcaataaaaaactaaaatagaattattaagccggattaacttgccaaatatttttaa

SEQ ID NO: 37091 - DNA, 1011 bp, Heterodera glycines
taatacccctggggagaagggagtgggaaacatgatttccccccctgaattttttctagtctaatctactcaaaacggctcagaattcaataaaaataacattcacggtgcgaaaaatggggtttgacaagtttattggggaaaaaagactttacaaaataatacccctgggagaagggagtgggaaacatgatttcaaaattttcaattttttctagtctaatctactcaaaacggttcagaattcaataaaaataacattcacggtgcgaaaaatggggtttgaaaagtttattggggaaaaaagaatttacaaaataatacccctgggagaagggagtgggaaacatgatttcaaaattttcaattttttctagtctaatctactcaaaacggttcagaattcaataaaaataacattcacggtgcgaaaaatggggtatgaaaagtttattggggaaaaaaagactttacaaaataatacccctgggagaagggagtgggaaacatgatttcaaaattttcaattttttctagtctaatctactcaaaacggctcagaattcaataaaaataacattcacggtgcgaaaaatggggtttgacaagtttattggggaaaaaaagactttacaaaataatacccctgggagaagggagtgggaaacatgatttcaaaattttcaattttttctagtctaatctactcaaaacggttcagaattcaataaaaataacattcacggtgcgaaaaatggggtttgaaaagtttatttggaaaaaaagactttacaaaataatacccctgggagaagggagtgggaaacatgatttcaaaattttcaattttttatagtctaatctactcaaaacggttcagaattcaataaaaataacattcacggtgagaaaaatggggtttgaaaagtttattggggaaaaaagactttacaaaataatacccctgggagaagggagtgggaaacatgatttcaaaattttcaatttttt

SEQ ID NO: 37092 - DNA, 891 bp, Heterodera glycines
  unsure (1)..(891): unsure at all n locations
tgcgtgagcccttcgggtccaactgttgcacaaccggcgccgcctgtggagtggggaaaattgaattggttacacatattttctattcaattcacttattttcccatgcaaaattatatttatgataagggcatggccagagccttggctttttttgttttttgctcttcgtcctcttattttttcgccacgattttccacaaaatttttgaagggtacggttaagcccaccggaaaaatttaggaattttgcctacttttaataaatttttccaaatttggcgctttctgggtcaagtaaggcccctctctcccgaataagtggtcttaaaaagtgtggtggggccacaagttttcttttagaaaattcattaaaaaaacgaaaaatttaagaattctgggattttttttttgaaaaacaacctagtaattcatcataaagttaaaatccgagaaatttttttgtttaatttggaaaacttggccccggttgaatgaatacatggttttcagtaccacaaaattaaaaataaataaataaattttgccttttcactccccccccccttcggcattttcgctgttgtgttcaccaccatcaccaacctgcatcatcgtttccgatgtgtatatgaccaactcaaagttggggtagccgaccatgtcgagaaagtagtcgagcgcgggtcgcttcacaaagtaatggccctttttgtactgaagcaaaattaattaaattttcaaatggaaaaatgtagcggaaattttttaataaaaattttttgttttggtggataaattttaaaatcaaatttttgaaaagaattaataaaacagacaaaggtttgagtgtttggcactaactctcattgatttgngaggagaattttc

SEQ ID NO: 37093 - DNA, 1520 bp, Heterodera glycines
  unsure (1)..(1520): unsure at all n locations
caaattggacgaagggctcacaaaaaagctaatcgaatctttcagagaaaacaatctaacagaagtgggtgattaattaaataattaatagggactccatttttaggcataaaggcacctataagtctgaaaaaaattgcaagatatgcattaaataagcacaaaaataggcaaaaaaattctttataacttttttgggcagcaaaacacataaaaacttaatcaaaatatttaaatttggttatatttcattgtaaataaaataatttaaatatttcaaattttcgaataaggccaaattttaaagacaaatttttatagagaaaaaaaatatattaaattttaaaggatcaatttttgggaaatttttttcaattcttgtgggtgtattttctgaattttttggtcgcttcatatggggtaattttttgtaagcataaaaaccccgaaatagacaaaacttgcctaaaaatggagtccctaataattaataaaaagtaaatcattattatttccacagacttctcaatggctggaaaatttgtgccgaatggaagcggcggttgaattgacaaactttggcatttttctgattttgccaagccacacttggcaaagtgtcggggccgaacgtcccaacagcggtgaatgacttattcgaaacaattggcaccacagaaattttggaacaaattaacgatccctgcgacacaaattgcattgatcagatggtgaagcaaaagttggagctgatgagtaagccattaagccgaagtttaatactgcgattttaattcattanaagactaaaacataaataaaattttgtttttanaaatagcattttcctttgttttattcgggttcgtttggccatttggatgtcattttcgcgatcatcgccactctaaaaatgccataaaaccttcattttttaaggccattcatattaaatttcagaccatctgaaagacaatccacgatgactgaactaaaaggacattgtcgaaggaaatgattgtccaagtgaataagtgtcttacagcgacggagaatatcaaaaaatatgccaacgaaaattttgctgttcctcgggattttgaaccgcattctcgacagattgaacagttcggaatttgcagaaattttgctgccaaaattgtcaatggaaaaggccaacggcgatcaatttctcaccaaatgtcttaaagctttgagtgccgattatgaatcattcgaaaagagtgttcagaaggaattggccgatttggcaaaactgcgcaagggccaattggaatgtgtaccgacaaaaaactgaaaatggccgaaagaggggacaaccggcacagaaaagccggccaattcagttatccagcaatttccatatttaagggataaatgtgttttttaatcctcttttctttatgttttgttgtctcattgattgataaatttctcccaagaattaaaaaaaataattaataggataaattttaaattataaatataatgtgccaaat

SEQ ID NO: 37094 - DNA, 896 bp, Heterodera glycines
ttctttattaattagagcaatgatttcttactaatggcgtaaattgcctgtttaaaaagttcccacttggttggatttaattaaattttcttaactgacatataagtaaaaattgttgaaattttaataaattaagtttgggtgattttaaatcactgcttcaacattatcacatttgtagataattagtgatagtatcttaaaagcgttcctaaattaaaaataaatttctactcaagactcacgatgtgtggtgggtgatataatctcttcacatcaataaaatttaaaccttttttgggcatttgccctaggttttggcgtagttaatttttttttttattaatttttgtttttaaggtcactaagacttctttctttttagaaaatttctgtaatttttctagtttttataaaaatttcatttaatgagaatatcttggaatgagtttctatgacttctttttttagaaaattattgtaatatattttttttatttataaaaatttactcctaaaatgagagttttgtccccatcattttttaaattcctcccatttgtctgggaatttcctgcctgatccataacttatctccccgaagctcgggacgcaacaatagattagaattcatttgtttaatttatctttttttatgaaatctgattttatttgcaatttatccattcttggccaactgtttttcttcaaaaatttctttcttaaatgacacgacatttcatttctattattttctctcaaaaaaattctttttgtttcaagactctcgatctgccctttctgcatagcagaattaattagaaatgatagccaaaagtcccaatatttgaattttgccccctcccctaccccattgatgggagagatttgttgat

SEQ ID NO: 37095 - DNA, 968 bp, Heterodera glycines
  unsure (1)..(968): unsure at all n locations
gctgtagattcattttgaatgctgtgctttacttgctcattgtggtgatcagaatcggagccacaacggccaatgccccgcggggccaaactttcccatttaccgccaaatcattttgcagttgtcgctcgaccactggaactgccgggaacattctaagactttcccgaatgcagcggtccatgtagcgcagttcgttcacatccgctggcttaaacgaaatttcctccacaattcccttggcattcatttcttggcatttggcatcaatttcggcatggataagccgttggtattggggatgacacgcaatgcaccacaatgtccagatcagagcgtgggatgttgtgtcgtggcctaaatgaaaaagccgaatggaaaggaacactttaattaccctaatcggggaaagggtcagcagaaaaatctaaacttttgatgccgaacatgataataatattaatcgttttatccaattctttaccttttattttttgattcatctttcacacttttctattttgtgtcccaaacatttgtttctctcctaatgggcggttctttgatctcctccctctttaattacgccgcccgggatctttctctcgatcactcttaattcacatcggtcctttccgccggcattctctgtttccgagaccgaatcgggtagaatggcctaagaattgtatccttccccggaataaaggcgttactgttggatactgtaccatggggcataatgggacacaaaggacgctccagtaatccaagacattcaaaaaatagcaaattttccgggagggggccgaatggacctgcgaacatgaacgtgtccacctgctcccgcaactcttccggctccaaagtgtcgttgccctccatgtccaacaaagtgtcaagaaaagagtctccgctcttcttagccctttcnttttgtcaatgctttcgctgctgcgctcgaattt

SEQ ID NO: 37096 - DNA, 793 bp, Heterodera glycines
  unsure (1)..(793): unsure at all n locations
aaaaatgcaataaaaaatgaaaaaatacaccccccctagggatcgaccttttttagaatttttttgagcgatcaaaagcagctttatcgggattttttcgngatggggaaaaggggacgganttaaaaatcaaaagtaattttttttttgattaaaaaaaaagtgtttaaaaatgtttttaggtaaattttgtaaatgagaaggaattcgatgttgaggaattgacgaaatttaacgagaaagcgcaagagctgaagtcgaaaaacggaagaagcaatgacaagccaaaagtgatcggaaatgaaaagactgtgcccaaaacggacaatggcggacagaaaagaggtcaaaatggaaaaagatgggcagaaaaaagttggcactggggcatcaacagtgaagaagactagaaaaggaaccgatggcaatagcaaagagtgatcggagatgaaacagactgatcacaaatcaaaattatgctcagagtatattattgttcattttttgcaaattggtaccgtacaaaccagttacagtaggaaactaaatcaatttttactgattttgaatatgatgatgacgacagtgcattaatgatgcctcaactcaacatgctaattgttatcaaaaatgaggcggcgaaatattagctaaaaaatcgcccgatttcgatcagcgttttttcgcttccattttctgctggtccttctccgctattttggtgatgttcatctctattcggatcatcattttgatcagcagtagcagttgtacggcagacccaaccccaaaa

SEQ ID NO: 37097 - DNA, 240 bp, Heterodera glycines
tgcggacatctacatttttgaattgaaaaaaaattggccttactctttctttttctccatattgaccatcatactcatactttccccaccctttccttctccaaccctctcctccctctcttgatagtttaaactgaaggcgggaaacgacaatctgatccccatcaagctagcttctgcaggtcctgctcgagcggccgcccggggatcgatccccgatctagtaacatagtgacaccg

SEQ ID NO: 37098 - DNA, 502 bp, Heterodera glycines
ttgaagatttggggatttgatcgaattttgccgatttaatgggggccattgagtcagcgtttatcatttgcatctttttaatcacagtgtgttcattaaagctcatcaaatcggtcaattgactcacggcacattcaaaaagactctttttctttttgtgatttgggtaaacattgacaaaaaaggaacgacgaagaagaggaaaaagacgagaaaggaggaaagaaagatggtgattatggtggtgcacttttgatggccacttttggccgattacccttaaagtgccccccccccaccgccgcgccgtccctttctttgtaaggtgacccctccccctcttcccctcttttgtaagcaaaagaatttgccggccgaattgttggttggttgggattggtgctgctactcttgagtggtcgagcgggacgggcaccttttcaagagttgagaggggtggggggaggggaggggttgattcaacagtggaggaatgaatgct

SEQ ID NO: 37099 - DNA, 999 bp, Heterodera glycines
ctcctccgtctttccctccgttccgtccctcttcacaaaggtgaccaccacctgctcgtttccgttctcgtcctttcctcgcttgacttccatctttccgtcccctccggcgccgttcgtcacttccacctttccattctcattaactctcacttccggcactgtctcctcctccttcgtcttcccttctttcccttcgtttgctttctctccgcctgcccattcggtcagtttgtcctttctcagcttcacttcctttgcttcttcgttcatttcgaccatcgcttccaaagcttccaagaaaagtcccaagtcgaattgtggcggtgccttcggcttttccttttcgatggtctccaattcccaaaacattttggccagtgctcgttggggctctgtcagctgtgagtcgagtgatgccaacgaattgcgcgggtccttccattgttccagcgacgaaatggccgaatcaacggctttcacatccgattggacggactcatcttaagggacagccaatggaacaaagcaaagggtgaggggaattacctgggatattttgcacattgagaagcagaggaaggaggaggagaagggcagagagagccatgccaatggaaaattggcagaataattatatgggggcaaaaagaggtataaataagagttcagaaggggaggagcgaaagaaggaaaagcgggataaatccaataataggggctaaatcaatggatggatgggcaaatgagtggtgagtgggtgcatgcccatcaaatgtgcttggattgtgttttttccattcggcgagggattgtgtgggttggctgcacacacgacactgctggtgacttggcaatttcaaaatgatttcttatgtttggcattgttaagcgggggggggggggaaagcgcatgaaaaggtgagtcatgccaatgccatgccaaatgatcccatgaccttcggcaggggcctgcacatgcattaaaattttatcgaa

SEQ ID NO: 37100 - DNA, 1033 bp, Heterodera glycines
agaaggcgaatggccgggccgaaagtgcaaaagaggtgggtgtagggagagagatacactgagggaaagagccgaccgatctgaggcatttggaaaaaccaattgctgatttgcgggagggggatggggatgaatatatgatcagagtgattaggctttaatgatcagaaacaataaatgagttaagcttttctaactgtccccttggctgatcaatggatttgaaccttcttctgaccgttcattctctgatcagtataaattttttttcttcttgaccaccgtttttctataactgattctacctaacgaaaaatggccaacaaaataaccgcaggagagctggacaactttgtctcctgctgatcaccattgcttttttacaaatctgacacatttaaacatttcaaaattcactcgtttccccatttcatccggataacaatttcttgaaggcatccaaaaatatgccgcaaactccaaatccatatacagattgattatccaaatcaatgacttttctaatcatttcccccggtcatacgatcccccacaaatccgctcattccaactgattagcattgcgattgttacgccttgctgatgatcattttcatcaccgtctcatcaccgctcatccgtatcactcttttccaccaaaacactaattagttttgccttatgcttaattcaatttgtcttcctttgatccccccgcccctcccccgccaataaatttattttagccgaattattggaatattttatttcttttattcccccaccgacacatagcattaacctcttctcttttttttttgctgtccatccctccaaaaaatgcggggaattgggtcgaaatgtttgttccgttcattccatcattttggtgatccgctaaataatgcaatttttctcccatttctaatgacttttttgatcgaaccgcagggcgatgcgcaatttgtttaatttgctgtccgttcaccgccccccccccatcccggtcgaatgatcagtttgattttatgat

SEQ ID NO: 37101 - DNA, 740 bp, Heterodera glycines
tttagggaggagagagattgcaaatcaacattgtgaaactctcgtaaataaatgcagaaaaaacaaaaattacggggttttcttagaatatacgccctggggagaggaagctatgcttcgtcttggttttacgtctcataaaatttaaggcacctattaatatcaagacaaaatttagtacggtataacaacactcgcttttaacctatttttgacaacatggcgcccacaccttgctcactgttgcgctccccccgaattccatgcttccggtcaacatccgttgcagggcggccactgggccttgatgggacactgaaaaagaaaaatatttattgataaatttcatcgttttataaaaaaaatttggtgattggaatagaaagtgccaaaaccccaaaacgcaccgatcaaaatgtcgccgtagcatttggcgacaattttgcggaaggtgtcctcaacacggggaaaacatccatggacgcctttgcctttctggaaaatatttgaaaaaatatattgtaatgtttcgagttccgacttcgctttccggaggtgccaagtacatcggttcgtactgccggttgatgttggtatatctgtgaaacttttttttaaatgtggcgtatcgttttgtgtccccaccgctgtgccaattctttgcccgtctgaaacgaaattttctgtacaccggaacgatcgcagatcagattagatgactaaaattcattagaaccatg

SEQ ID NO: 37102 - DNA, 1065 bp, Heterodera glycines
  unsure (1)..(1065): unsure at all n locations
tgaggtgaattgcgctggctttctgatggatcctcttaacggaangancatccatcccaaagcnnnanccggcagcttttacacccccccccncncnaagccacacccaaagaagaagcangagaagcacccccanaggnggnngnngnaccncaggnncggcccccacagcnnnaaanaaggaagaaaaaacnngancacganaaagcanaaaagggaaagaggaaggcaggnnanangancaaannaaaancgnnnaaaannnagggnaggagacaaaaccnaaaaaaggccnnaaaanaagngacaangcgcanncancggnngacannnnnncccaannannnnaaacnaannnaaanaaanaaanaaggaaagaangacgnnnnaagccgngggcanngaaagcaaggcgccgaaannggncaaacacaaacccacaacaaancaggngnaaagcgacggattaagcttaaccttcccgactcctttcagccgatcggaggatcagcagctttgactcggttggataattcgaaggcattttcgagcgtccatccaaaacctgcaaacatttcgcattaatgtgacaaaatgtgaaaatgtgcaaaaaatcggcaacgatatttctaaaattgtttttcccaattttatttttcgtcaaatttacaaaatgccaacaaacgatggaaggagggaaccgagtgaaaagtgagaagcaacgaagccgcgcataaccaaatcctaatattgtcttaataagcagtaatggcggaatgcgcgaacgaacagatgacactgcacgtccaattcaacgaggacactttgcaaaacggacggttcaccgattggataatcgtacgaagggaatgccaaaatgggaatggaattatattttgaaaataattcaaaataaaaattgaaattgaaaccccaaaaggtgggaatgacaacgcgacccgaatgtcgcctgaagggaaacggcgaactccgctacatcgtgcaaattgccgttctgaaggacccatgggccaccaaattaatggcccctggcaataaattgaa

SEQ ID NO: 37103 - DNA, 1016 bp, Heterodera glycines
  unsure (1)..(1016): unsure at all n locations
cttttcacannttctttttgaatttaaaaaaagcattggctaataaggaaatgttatttttcatgctttttgaaataaaaaatttgtcattctgatacatttcctcgtgaattatttaatgaattatcgtgttttaaaatttcaattttaattgataaatattattatttaagcggttttaaaaaaagaaattcctttttcggtgaaaaagtccattttacgtaaggctatttttaggagcacaatttcgagaaatcctaactgcttttgttaggttacttttcgagttcaaatctaccactaaaaatttttatataaaagttttttttacaaataatttagaatttttcaataaaaacagccaaaaaaatgttcagaatattaaaccaattagttcatccttgtaaatattaatcattttcactaaattagttcatatttttgtatttttagactttaaatgggtcatcataattcagcgacgttcctttttggcttacttttaggtaagaaatttaaaattatttataaaattataaattcaaatattatttttcttttaaaggttattttttgcccgaattggcggcacagcttagcaaagatgagcaggattattgcgtcaaattcagcaacaatcttcgcagcaatgtggccactgggaatcagcagaacaaaggcggcggcaaattgccatcggccacgaatatgttggagttggcatataacgagacaattggccaaactgcgcaagtgagcgacaattttttattgaggccttgtggagatattcgtgctttgtcgtttcttanattcagccaagggccacgaatgattaaaaaaatgcaacacataaatcacaagtttaagcaaaatttttttaaaaaatttgaaaatcaataatctactagtgaattcctagagctatatatatgtataatgatactantaaatattnattangtagntgaatttgatcaaaatgaattgaaatgtgtacattttttagtttttat

SEQ ID NO: 37104 - DNA, 665 bp, Heterodera glycines
tttttttcaataaaaaaaaaaaaatatataggggaaagaagtttgtggggcgaacccgggaaggtcaaactaaggggttccggatatgccccatccttttcaacaaaaataacaatccaattgtgcggaacatccatccttattggtacgaagtcccattataggaactgctatggcgccaaaaaagggcaaaataaaaatacgcgtaaagataattaaaataaatttttgaatgcattcgttccatagaccatttaagcgaacccaagcaggatcagttgaccataacaacaatcagacaaaattccaaaagacgagtcgaccgctccaatgagatgccaaaatgtactccaagtaatgttccttaattttctacattatatcgctcacctatcatataaaacaaagataaaaagcagtcaaaatctcaaacgttcgcctttatatggactaaatttggttcacaccaatcatatatcagccacataaaattttggtcgaatggctcaatatagtcaccgccggaccccctgtaccccaaaaatttttttgcaaaaaccgcgccacataaaaaacgggtgtgaaaagcaaaaaaaaaaaaaaaaaggtcgtcgcccggggggaggtgccccccccccaagccaaaatcctgggaccgtccctga

SEQ ID NO: 37105 - DNA, 1080 bp, Heterodera glycines
aaacatcatctgggacatttcaccaacgaatttgttgaccaaatacttggctgtcgaccaaatgtccggcatggcgaacaaaaaattaacttcaatttttggtaatttttccaagattgggtcatgtagaccttatgtcaattctgtgacaatttgtcccatacacagcagggacattttaccaacgaatgacaatttgccaaaaacattacattttgagtgaaaaattagggccatttggataaaattgtcggaaaataaagccccattttccaataaattctgcttctcttgcaccggatcaaataaatccatcataattttttgaatttgtctcccccccccccttcctcatctttttgaaatggcgcgccaaatgcaataaattcaaaaatttattggactctctctgcccccaaacacctgccacttgctcctgctgctgcggatgctataactttttgcaaaatttgcctatcattgtggggaaatcgcattcatccgcttgctgcttgctctctgatgaatgggattttgccccgaggcgacacggcggtccatcttttccccgcaaaatttccccgaagcaaatgattcacttttgcctatcttacggggtgactcattaatgttgcgcggaagaagattgagaataaatttttttattatatttattttttaaaagcttttgatcgcaccgccatctcattttcccctcctaatttccccgaagcgatattccccgaaaaaatcattcatttttgcctattggacgggctggtgactcattaagttgctcgggggcagggggggggttgaaaaaaaaagttatttttatatctattttttaaaagttttaattgcatttgtcatctcctattccccgcaaagtttccccgaaagtttttcccggaagcaaatcattcacttatagccattttgcccgaggcattccgtccccgcaaatgattgccttaggcgatgtttttaaaccgaaccggaaaaacaaattctcttatcattatttaaaaatttcaattttttttgcttttaaatcggatatattattctggcaattaa

SEQ ID NO: 37106 - DNA, 856 bp, Heterodera glycines
  unsure (1)..(856): unsure at all n locations
acaaaaggaaaagactaaaaggacaaaaggaaaagcctaaaaggacaaaaggaaaagcctaaaaggacaaaaggaaaagactaaaaggacaaaaggaaaagcctaaaaggacaaaaggaaaagactaaaaggacaaaaggaaaagcctaaaaggacaaaaggaaaagcctaaaaggacaaaaggaaaagcctaaaaggacaaaaggaaaagcctaaaaggacaaaaggaaaagactaaaaggacaaaaggaaaagcctaaaaggacaaaaggaaaagcctaaaaggacaaaaggaaaagcctaaaaggacaaaaggaaaagactaaaaggacaaaaggaaaagactaaaaggacaaaaggaaaagcctaaaaggacaaaaggaaaagactaaaaggacaaaaggaaaagcctaaaaggacaaaaggaaaagcctaaaaggacaaaaggaaaagcctaaaaggacaaaaggaaaagcctaaaaggacaaaaggaaaagactaaaaggacaaaaggaaaagcctaaaaggacaaaaggaaaagactaaaaggacaaaaggaaaagcctaaaaggacaaaaggaaaagcctaaaaggacaaaaggaaaagcctaaaaggacaaaaggaaaagactaaaaggacaaaaggaaaagcctaaaaggacaaaaggaaaagcctaaaaggacaaaaggaaaagcctaaaaggacaaaaggaaaagcctaaaaggacaaaaggaaaagcctaaaaggacaaaaggaaaagcctanaaggacaaaaggaaaagactaaaaggacaaaaggaaaagcctaaaaggacaaaaggaaaagcctaaaaggacaaaaggaaaagcctaaaa

SEQ ID NO: 37107 - DNA, 1158 bp, Heterodera glycines
  unsure (1)..(1158): unsure at all n locations
atttcgggattttgaaaaaaatttaaattttttaaattaaaaaatagagtatgattatgattgaatcaattctctcattaacccataatttgtcaaaatctccttttttaaaaacatggcttctgctttaatcctcttnaagctgaatatatgaaaaagtgccaaaatccaaaccgttaaaatttatttaaatgattgggcccctaaattatcgcaattgactccattccaggaccatcttgatcgtgaatattctcgtactgatttttcgctggacgatggtgaacagatgttgcgacagcttgactctgtccgtgaatacatccaacaattgcatgcgcgactcctttcactgaccgacaggtgagcaaaagcctaacattttttggcactttttttgccatggcatgtcattccaatttttttttaattaattttttttcaaggtgtgcccaaatttcaccgctttggcaacgtggcgaacgcatttcaaaaccgctgccggtgatggcactttgcgagtacaagagcaaggacaaaattcacatcagacaaggtgagaaatcattttttaatttattataattaatgaagcaaataaaataaaaaatatgggcaactaaatgcaagtccaatccatttgtttcgtagtccagtggttgttgtttactttgttttgcttaatcacgagcgttggttcggttccgcccggaaaatttgacgttttttaacgatataaaacagcgccatgaagattttcatttaatcaccatctttcggctgagaatttatgatggagtttttcttatctgagcgcttgaaaatccttttttctcaaatgcctatataaatattttttaatgtctattatttataaataggaatgaaatttttaggcacaaaaaaaaacaggcattaaacaggcacaaaaatcctttaataggtataaaaaaatgggtgcacttcattttccccccgcatcgttccccccccccgagaaattttttaaaaaaaaatttctcgggggggggggtggggcgaacgattcgggcgaggaaacgagctgctccctaaaaaatagacattaaattttttaaatttttaattagcaaaaaggcaaaacattttttgtttgtttgaatatatgtatttctattg

SEQ ID NO: 37108 - DNA, 714 bp, Heterodera glycines
taatatctgacggcagagaaggtttacagctgaaaggtatcatcattgatcggttgctcattaactgatcactttcatccccccacaaggcctttccctggagatcaaacgcgacattcttctcgaggcggccgcccgcgactcgcgcttctctctgctcgccgtgttggatgtgtttctcctcctctgcttctattctctcagattggcctttcgcgtatggccgtgactttttcaaatgatcgcgagtgttctctgctctttgggcttttacgcaaaattcatttttctttttcctttttttgcccttttaccggaccatttgtttgtccaccgcatcagcgctttttctccgccgaattgccccttctcaatttgatcgccctcgttttgctaatttccgttggcgccgatggcgcctttctcctcctcgacttattccctgcgacggagaagctttgcttgcgaactttgcactgctgccttaggcacaccgccaaaacgatgttgtctgacccaattttccaccgtaaaacaaaacggcactttctgccaattgcgaattcgttcacactgtccctttctgctcaacatgtttctcgagtgtgttcgcctttcggttgcttttcttgtgtcaatcctttccattctaaactctttcagctccttcggaatatttgctggcctcactctcttcttcaattaccttcttct

SEQ ID NO: 37109 - DNA, 962 bp, Heterodera glycines
aaatcgattttttcaagtgtccgtttggggtactcaaacaattatggggagcaaaaattcaacgcagaattaaagtacaggctatagggaagctactcccgaaggattcggtctccccataaatctgggcgcatcggttcggggggactgccccgaaaacaaaaaaatcgattttttcaagtgtccgtttggggtactcaaacaattatggggagcaaaaatccaacgcagaattaaagtacaggctatagggaagctactcccgaaggattcggtctccccataaatctgggcgcatcggttcggggggactgccccgaaaacaaaaaaatctattttttcaagtgtccgtttggggtactcaaacatttatggggagcaaaaatccaacgcagaattaaagtacagactatagggaagctattcccgaaggattcggtctccccataaatctgggcgcatcggttcagggggactgccccgaaaacaaaaaaatcgattttttcaagtgtccgtttggggtactcaaacaattatggggagcaaaaatccaacgcagaattaaagtacaggctatagggaagctactcccgaaggattcggtctccccataaatctgggcgcatcggttcggggggactgccccgaaaacaaaaaaatcgattttttcaagtgtccgtttggggtactcaaacaattatggggagcaaaaatccaacgcagaattaaagtacaggctatagggaagctattccggaaggattcggtctcccccataaatctgggcgcatcggttcggggggactgccccgaacaaaaaaaaatcgattttttcaagtgtcccgtttggggtactcaaacaattatggggaagaaaaatccaacgcaaaaattaagtacaggctatagggaagctatttccggagagattcgctctcccccataaatctgggcgcatcggt

SEQ ID NO: 37110 - DNA, 857 bp, Heterodera glycines
  unsure (1)..(857): unsure at all n locations
ctctctttttataattgtcttagtgaattttggcggatatttggcggcggttttgttcttttggctcatttattcgctaattgaaaacccaatgtttttgtggtgcgccacacaaatcatttcctttgtgtcaggcataagtaccatgtcaaatgcgccaattctctattttacgaggcattatttttattttaaaatatttttaaaaaactttttaaattaatttagcaccgactatcgaaaggcttaccaaaaacaatttgcatttgtcttcagcggcacatcgtcgacagtgaccccactaaactgatgctgttggcacgagccatttttacaatgttataaaaatgtgtgggttcttaggtttcatttgtatttacctgttttttatttaaattatcacggaaaaaaacatttttagcccggaaaatcattattaaaacggaaccaaaagaagaaatgagtaatagtgatattaaaaagacaattgacatttggattggagaagcagaaaagtcagacctccagcaaagggaaatttgggtttttataggagttgaagaaaaatttgtaattgagggaaattttggtaagaaaagtttgaaatagtagaattatatattgttttttttgaagaaattgttggcggtctggcagaactcagaactatttattgaaaagattggcgaatttaatgttaactttttttanaatgaaaatttgtctagtaatataatatataatgtataaatgaagaatcaatatattcattcaatccagtgatctattccatttgtggntagacgaaacgatattacatgcaaagctgaatagggcatgaatttatatttatgaaa

SEQ ID NO: 37111 - DNA, 108 bp, Heterodera glycines
ctctagagtattttgcttattcgccattacattatcattgttaaaccgtgtccaccatttccgccaaaacattaattagcattcatttcaaagggtgagggtaagggc

SEQ ID NO: 37112 - DNA, 1021 bp, Heterodera glycines
aaaaaatgaaaatttgaaatcatgtttccactccttctcccaggggtatattttgtagtcttttttccccaataaacttttcaaaccccatttttcgcaccgtgaatgttatttttatcgaattctgaaccgttttgagtagattagactagaaaaaattgaaaattttgaaatcatgtttcccactcccttctcccaggggtattattttgtaaagtctttttttccccaataaacttttcaaaccccatttttcgcaccgtgaatgttatttttatcgaattctgaaccgttttgagtagattagactagaaaaaattgaaaattttgaaatcatgtttcccactcccttctcccaggggtattattttgtaaagtctttttttccccaataaacttgtcaaaccccatttttcgcaccgtgaatgttatttttattgaattctgaaccggtttgagtagattagactagaaaaaattgaaaattttgaaatcatgtttcccactcccttctcccaggggtattattttgtaaagtcttttttccccaataaacttgtcaaaccccatttttcgcaccgtgaatgttatttttattgaattctgagccgttttgagtagattagactagaaaaaattgaaaattttgaaatcatgtttcccactcccttctcccaggggtattattttgtaaagtctttttttccccaataaacttttcataccccatttttcgcaccgtgaatgttatttttattgaattctgaaccggtttgagtagattagactagaaaaaattgaaaattttgaaatcatgtttcccactcccttctcccaggggtattattttgtagtctttttttccccaataaacttttcaaaccccatttttcgcaccgtgaatgttatttttatcgaattctgaaccgttttgagtagattagactagaaaaaatgaaaattttgaaatcatgtttcccactcccttctcccagggggtattattttgttaagtcttttt

SEQ ID NO: 37113 - DNA, 881 bp, Heterodera glycines
ccccaaaaacaaaaaaaaaaaattttttcaaagggtcccgttgggggtcctccaacaaattaggggggcaaaaatcccaccccagaattaaattcccaggttatagggaagtttttcccgaaggattcgttcccccctaaatctggggcgcatcggttcggggggactgcccgaaaacaaaaaaatcgattttttcaagtgtccgtttggggtactcaaacaattatggggagcaaaaatccaacccagaattaaagttcaggctatagggaagctattctcgaaggattcggtctccccataaatctgggcgcatcggttcggggggactgccccgaaaacaaaaaaatcgattttttcaagtgtccgtttggggtactcaaacatttatggggagcaaaaatccaacgcagaattaaagtacaggctatagggaagctattcccgagggattcggtctccccataaatctgggcgcatcggttcggggggaatgccccgaaaacaaaaaaatcgattttttcaagtgtccgtttggggtactcaaacaattatggggagcaaaaatccaacgcagaattaaagtacaggctatagggaagctattcccgaaggattcggtctccccataaatctgggcgcatcggttcggggggactgccccgaaaacaaaaaaatcgattttttcaagtgtccgtttggggtactcaaacaattatggggagcaaaaatccaacgcagaattaaagtacaggctatagggaagctattgccgaaggattcggtctcccctaaatctgggcgcatcggttcggggggactgcccgaaaacaaaaaaaccgatttttttaagggcccgtttggggaactcaaccaattat

SEQ ID NO: 37114 - DNA, 1157 bp, Heterodera glycines
  unsure (1)..(1157): unsure at all n locations
ggcggaattggaagaatggacctgacaatgggccaaggggagggggacgaagaagaagcattggatcaaaaacaaacgagaaaagctcaggagaatttgtgccaaaaatgaatgagtcgggagtcacactttttgctttgtttctgttatttcgcttcaaattttacgaatacataaataaagtaatttgcaatctttggtcttccccttttggtgggttggcactttgccatgccaaatggcgttggcagaatcgatgcccccgctgctgctgcacttttgggccattcccaagggattgcccccgggggcatcactcattgccttccctttgcttttccctttcttctctttgctttgctttttcgttgcatttttgtgcttccttttcttccccattcatttggttaacttttgtttgtctcttgtttatttgcatatttcgcgttttgaaaattgttttcctttttcgcattttgccacttaaacacaccgagtcaaaaaacgagacatgtgtcaatagagagagatcaattccatttgaattgaattgaattgtaaataaacttcactggttgcgatttctcacaaaagaattttcttttggcagttttttgtccaaataatcgcccacttcaaaaatatttaaatatatattaaaattaatttgaattcacacaaaaataaatatttaaaattggacaaaatgaaattagagtcaattaagcaaaacaaaaaacatttgccacctcatttagcaaattatgtgctcaatcattgatgagtcacccgtcgcaattggcaatggcaaagtcggcacagaaacacagctggtcagtgagtatggtggttcaacagaagaggcaatcaaaagcataagcacattcaatatacaaatacagcaaaagtgccaaataaataattanattacccataattanattaccgtatttttctaattatccctccggggggattattaagcaaattcagctgaatacctggcaacattttatttgacaatggntcttttnagttagctctagaggtttanaagaatttttttcgaaaaattaaaaattccatttatcccccccaggagataaatggagacagtgcataatagagtaaataccgtacccaaaataaattcattt

SEQ ID NO: 37115 - DNA, 197 bp, Heterodera glycines
ccccccccccccctccgggtggggggggggttttttttttttatattaaaaaaaaaaaaaaaaaaaaaaaaaaattattttttttttttttttttttttttttttttttggtggtgggggggggggggggggggggggcggcccaaaaaaaaaaaaaaaaaaaaaaaaaaaaaaaaaaacccccccccccccccccc

SEQ ID NO: 37116 - DNA, 768 bp, Heterodera glycines
gtataatttacaaattccctaatgatatttatacttccgattttgcttttgagaagttctcaactttcttccgttatgagtttttggatgatgtccctggacacttgactagatttcccacagatgatacacggtcatgcaacagcgaaagtacattgatgactggctgaacccatcactcaattctttgactttatcatttgttgccttctgccctttcagtcatttttctgatgcataccaatacatacttccctacttcccaattaacaacacatgtccacagaaatgctctcccgatagcgcgccaatgaatatctaacagtccaatgactgaattttacgaacctccatgtgtgtgtgtggttgcttggcaaatggaaaatggattatcggctattctagtacgcaaaatttcatctggatattattatataacgagagattaccgcgccgctctggacgcccacacaatttgattgtaccactctgaactcttccacaaaactcatagcaccagatgatctcaaactatgtatacattaattgctaaatgtgtagaactgtaggaagaagacgaatccccagatatgaatcatcacatatggcatacttattgagaaatgtgaacaatttggccctattagcccatcacaaaaaattgcattgaaattggtcaaaatgcggcaaattgggagagcaatgaactgtagcagtactccaacggaaatgtgtgagggatcgcaatcaatgcatgcaaatggcttg

SEQ ID NO: 37117 - DNA, 1276 bp, Heterodera glycines
tctgctaattcactacgattaagaacgtcttattattagtaggacaaaatttaaaatagttcatggacaaaaaatagcgaattaatgtcagaaacatcaaaaataaacagatatgagaagaaaaaccaaaaaattttttccagaatcctttgaaggccctcaattgacatttaaaaaacacgcaaacatgaattaaaattaaggattaaaataaatgtaattaacttacaaaaaataaaaataatttcataaggataaattaaaattaataacaaaaatgtaacgggaaaatatcctgatttattccatgttgatctgttttaaaaatgtaaacaaaaaataataatactccttatgaataccgtaaattgatttgcattgaaaaagaaaattcaactttgtgtaatatataatttaaataatttatattaatcgaattacttatttctattttattgaaagattattaataaaaatgataatttaaatgcatattcatataatctttattggctctataaaaataatttatttataaatatttttacaaattaaaaacgcaacatttcaatatttaaaaataaataataaataataaattttacatttatgaaataaattttaattaaaatttttgaaaagaaattaattaataaaattaatatattaaaatatccgtccaattcaaaaccgaatcaacaatgggtttttgtgtcgcagagcaagcaacgtcatgaaggacagctggcaaatttgaataaatataaaaccccctatattcatatgaaaaaaagataaataatttttgttaatgaaacaacagagattaaatatattcagagattttaagcaattttaggtaacttttgcgctttgaaatcatcctttcaaaaagaaaatcatccttaccactcgaaatcatcaaaataatgataaatcatcactagggctgccaatttgatgtaaatacatatttttttttcctggcttctccttgctctaaaaagcaggaaaacactttccttttttggtgtttgcgaacaaaaccccgggactttttatttaaatattttttacaaatttcggggttttttaaacttattaaaattttttcgggctttttaataatattttgggaaaatattttggaattttttccttaaaaaatttttccttttttttttttaaaatttcgggaaaaatttttttccaaaaaagatttgggaaaaaatttcaaaaaaaaacccaaaaattttccggcaaaattttttttttt

SEQ ID NO: 37118 - DNA, 896 bp, Heterodera glycines
  unsure (1)..(896): unsure at all n locations
tttttgaattcccnnttttttggaaaaagacattttcctatcgaaaaatctgttttgaaaaccttcgaagaaatttagaaataaagtcgaataatcgaatcccgaattcaggtgccactttctcctcgtcctgcggcaaccttaacccaaggtgccgataggtaaacttgaacaatttggtgaaacttgttttgcccacgaaataaataattttgaagctgatttgtgagttaaattattagtgtcaagaggaaaagctaaaaaaaaaactcaatatattaataacaaaaataattctttttaatcactcgaaatattttttcaaaatgcaaaagataataattatttttaagaagtcagatttgctgaacatttaattcaatatttaatggattggaacactttttaagttttcacgattttttccctttctattgtcattgtgtgtacgatgtcggataaacgacgatcattaatttactgaaacaaaacgtaggacaatgtccaatttccatggttattcgacgaattcgtcgggacgatgaattgaaataggaatgtctaataccgaaagtttaattgaaacatgaaaaatgacatgtaatgagagtacctaaatcatattggagatacgacgcaaattgaaattggacccgccggaaaaacggagacgaaaattagcgtaaatgggcaaaaagcgaaattggcacgggcagcatttgttgcttcatctccattgcagctgtaacccttctttcgtgatgattaagatgaagcgggcacatgcgcgtttgattggttggccgattcttttggctccaacgaaacgtgaaaaatccaagtgaaaatttgcgcgtcggtcgcaaaatgacaaattgtcacatgcgagactatga

SEQ ID NO: 37119 - DNA, 959 bp, Heterodera glycines
ttcgtttttatttattttttgcaaaattaattcttaaatattttttcagaaagggttctgaaacgcaccaaattttatttacatgttagtttaggcactctgatgctttttctatcaaaaagggagatgaataaaatttttaaaaatttttaattcctttttaaacaggccaaaaagtttaggcttaacttttttttcagaaactgatcagaagcgcaccaaactttgcagggatactgaaaggaagagaaataacctattttaaatattatctagtcagttcatttaaataatttttatccaaaaaatttttttttgggttttcggggcagtccccctgaaccgatgcgcccagatttatggggagaccgaatccttccggaatagcttcactatagcctgtactttaattctgcgttggatttttgctccccataattgtttgagtaccccaaacggacacttgaaaaaatcgatttatttttgttttcggggcagtccccccgaaccgatgcgcccagatttatggggagaccgaatccttccggaatagcttccctatagcctgtactttaattctgcgttggatttttgctccccataattgtttgagtaccccaaacggacacttgaaaaaatcgatttttttgttttcggggcagtccccccgaaccgatgcgcccatatttatggggagaccgaatccttcgggagtagcttccctatagcctgtactttaattctgcgttggatttttgctccccataattgtttgagtaccccaaacggacacttgaaaaaatcgatttttttgttttcggggcagtccccccgaaccgatgcgcccagatttatggggagaccgaatccttcgggaatagcttccctatagcctgtactttaattctgcgttggatttcttaggtgggtaattgtttgagtacccccaaacggacact

SEQ ID NO: 37120 - DNA, 980 bp, Heterodera glycines
tttaattattaatgtatgaattaatttaatttattttttatgcatttattcaatagtttagctatttgatcatgaattttattatacgagaaacttccgttatataacttgctgccgcaattttaaaggatctttcttaaagtttttttaggtcaattattattgttttatttatgattagatatccttttaaatgtatatctgttattttattttatttaaatattttgaaatttattcaatcatacctttttcattatttttttatttatttttttaatttaaaatcttttctctttttatacttttatttttaataaccaattttagtgtagaatcattaatctttctttgaagaattttttatttgttagcatatttattttttatttcatataaatttctattttgttagattttgatttttcgagacacaatattattaatttataaattcttcattttgttgttttattgattgttcatttttctgataaaaaaaataaatatcattttcttttttttcttattccattcaaagtttgagtatttgttatatattaattccacgaatagtttatttgacagtttatatttaatttattctcatattattgaatattttgaataataattgaactctttgttttttaattatgctctttatttttatattatacctccataagaattttaattaaataattccattaattattttagtttttttagtaataatttttatttttagtttacttggggtaaggagtgtatttccgagtatatactgcttgaaaattgctaataatttaatttatatattttaaaaaattatattttttcgtcttaagatagggaattttcttaattttaaataaaattttttaataatgattcttattggtttattttttaaatgagtttttaaaaagattgctctcttgactttttgcacatgtcaaaaccaatcccttattctg

SEQ ID NO: 37121 - DNA, 998 bp, Heterodera glycines
ctagtctaatctactcaaaacggctcagaattcaataaaaataacattcacggtgcgaaaaacggggttcgacaagtttatcggggaaaaaagacttttcacaaaataatacccccgggagaagggagtgggaaacacgatttcaaaattttcaattttttctagtctaatctactcaaaacggttcagaattcaataaaaataacattcacggtgcgaaaaatcggggtttgacaagtttattcggggaaaaaagactttacaaaataatacccctgggagaagggagtgggaaacatgatttcaaaattttcaattttttctagtctaatctactcaaaccggttcagaattcaataaaaataacattcacggtgcgaaaaatggggtttgacaagtttattggggaaaaaagactttacaaaataatacccctgggagaagggagtgggaaacatgatttcaaaattttcaattttttatagtttaatttactctaaacggttcagaattcaataaaaataacattcacggtgcgaaaaatggggtttgacaagtttattggggaaaaaaagactttacaaaataatacccctgggaaaagggagtgggaaacattatttcaaaattttcaattttttctagtctaatctactcaaaccggttcaaaattcgataaaaatcacattcccggtaagaaatatagtttattaaatttttttcgtggaaaatattttttcattaaataatccctttgggataagttagtgtaatccattttttaaaattttttttgaaattttttttgttcttttaagggcctgggaagggggggggcgaaggcccaccacgaggccgcgaagaggccgagtgagtaccttcggtgcaggaaaattattaaattttaaaaattttttaattgctttttaaatatgccaaaaaatgtaggcttaacttttttagtgaaaattcgatcactcatattttttgctaatgag

SEQ ID NO: 37122 - DNA, 829 bp, Heterodera glycines
cccgaaaaaaaaaaatcgattttttcaagtgtccgttttggggtactcaaacatttatgggggagcaaaaatccaacgcagaattaaagtacaggctatagggaagctattccggaaggattcggtctccccataaatctgggcgcatcggttcggggggactgccccgaaaacaaaaaaatcgattttttcaagtgtccgtttggggtactcaaacaattatggggagcaaaaatccaacgcagaattaaagtacaggctatagggaagctattccggaaggattcggtctccccataaatctgggcgcatcggttcggggggactgccccgaaaacaaaaaaatcgattttttcaagtgtccgtttggggtactcaaacaattatggggagcaaaaatccaacgcagaattaaagtacaggctatagggaagctattccggaaggattcggtctccccataaatctgggcgcatcggctcggggggactgccccgaaaacaaaaaaatcgattttttcaagtgtccgtttggggtactcaaacaattatggggagcaaaaatccaacgcagaattaaagtacaggctatagggaagctattcccgaaggattcggtctccccataaatctgggcgcatcggttcggggggactgccccgaaaacaaaaaaattgattttttcaagtgtccgtttggggtactcaaacaattatggggagcaaaaatccaacgcagaattaaagtacaggctatagggaagctattcccgaaggattcggtctccccataaatctgggcgcatcgggtcggggggactgccccgaaaa

SEQ ID NO: 37123 - DNA, 1016 bp, Heterodera glycines
aaaattgggctgaaatttgagaatccggccggacatggagaggaaggaggccgagaaaaaggatgagaccagcaaaaattcattaaattttattgactttcatccaaatggacaaaacaaaattatcacatctatgtagatatttaaaattgattcttatatataaaatgcgaaattttaaaatttatttccttttttcgggacccaaaaattttcaaaaatattttgtgcaatttttgggattacacttcctaaattttctccttcgccctttgttttcttccgtcctccacccccattcattcaaaatcctaacatttgcattatttccacctcggcaaattcatcggcagatagagaccgcaaaattactcattaagaaagcatttttacagtgaatttggaccccaccccaaaatgctcgtccatttaccccccacatcctccgcaactttttgctacgcttaaaaggtcacaaaacaaaaggggcccaccccaaaaagtttttagtaaaaattaaaaatgccctcgggcatttgatggggatttgcctgaggcgcttcttaagtgccgctccccaccccaggttgccgctggagggtcagaaaaaagttcaattagccccgatgaccaccaccaccaccaccacagacagcggagcggagaaggcacaggtcgagaatttctcgagcggaaattgtaaaggaagcataaaagaaaaattcgagaaaattttgaaaaactaattaaaaacgggacaaaaatatttattttcttttgaatgtaaaacttttgaaaattaattaatttttgtgcaaaaaaatgctatggaaacatatacaacgcatttaaaatatttttaataataataacgaaaacaataattgcatttatcagaaatattttctaattaattttttttttctcatcagagtacaataaacgagccgttttctcacttattttcccatcatttctcaacaacaaaaaagtttgacgggcctgaaaaatgaaaa

SEQ ID NO: 37124 - DNA, 649 bp, Heterodera glycines
catattcaattttgtaattcagccttttctacttttctatttataatttatttattttggctaattttattaatttaataaataaaacaaaacttactgaaatataatttagattcaaaaaaatgtaaaaattttattaaaaatttctaatttcttaaaaatatttaaaaaataaaaaataaagtatctttagtgcaaaatatgttactaaatcgggtcattttcagattttgtcgatccataaagaattttggattcatagaacgaattgagcactttaaatttcaatttctgaataaattataaaggaagtctatacttttgctaataattctcttttttaaaaaccaaaaaaagatgaataaataaaatttgaaacattaaatagaaaattaaaattgcaaatagctaattaaaaatgcgattgaagaataaaatacctaaatcaatacatcttaatttagaatatttaattttttaaaagacacgaataaaataatatttttaatgcaaagaatttcaaaactgatatattagggtgcctgaaaggttattaaaaagacaatattttatttaaatttgttgcaaacagataatatttaacaaaaggatatttcacgcgtattttcttttttatttttattttcat

SEQ ID NO: 37125 - DNA, 1526 bp, Heterodera glycines
  unsure (1)..(1526): unsure at all n locations
agtcacacaatttttttatctacaatttcataaaatgcattgcgcctttgatgtttttgntatcagaatttttctgagaaaaactgactnntagaattgattaaaaaaaatcaatcaatttatataattaattttattaaatttcttattaaatttaaatatttgtaatctttgacttatgtattgggtgtataataaaatttagtattttatcattttgatcattgcctttttgcagagatattggtgattttctacatgcattttattaattaagtttcataaatttttttaataatttaatcttaaataaataagaaataaactgttcttttcattaaataatacattaacaagcatacataaataattattgtgcgaatgagaatagtttaattatataattagaatatcttattgtagtcttttgcttttatggactgtaaagatttatgatttcaacttttaatttattttatattcattaaataaaaattgacactaaattaatgcatcaccgccgctgatttctgcattatatgatgtgaattttaaaggaatttatttttacatatattttttatatttatttacataaattttcattttattttattgaaataaaattataaaagttaataataaatctctctcactcacattacataaatcaaaatcctcgctatactaaaaacattacgaatttctccattattatgattaggcaccttttcatttagataaatttgtatttaataaattttaattatttcatgaaacacatttaataatgcattatttaactctaattctaaattagcttgaaaacgtggcgattatttaaagtgcataaaccttttcatgtgcattcccaatttttgttgtattatttatttttctatttttagtttttgcataatttttcataagaatctcgtattgcttaattttttttttcgtttttatctcgcaccagttcaaataacaaaattttgaattttacattatgagtcttttcaactatttgtagatccttccttttattttaatttattaacaaaaacacagaaaatatagttaaatttttttattatatttttcttttttttgtattatttttatttaaaaaaaattttcaaaaaaattttttatttatctataattcaaagttgctaagtgaactaacgcttctcagcaaattttttactcatttctttttcttttcattttttcttttcgtctctcattttaattatgtttatactcaattattaattatttatatcttaaaattttttatttttttcttattttcatcgtctattgaatattcatcaatttcaaatttcttataactatctatttcaattatttaaaattgttattatacagtagatactcgtaaaaaatatatatctatctataggctaccttctttatcaatttttacttcaagttttgtctgtattcttacaaattttgctgtatccatgcatcgaacgtggtgtagttctgcttcaaagcga

SEQ ID NO: 37126 - DNA, 1136 bp, Heterodera glycines
aaagagcaaatcctggcattaaaaaataaattcaactttttcgaggataattttttgtatattgcatttagcaaaaaataaaattatacaaaatggtgattcatgggacgcataaaaccgaccagaacctttgcggcacagacatttacgcctatgtacaaatccggcttcaaattacattttttcattccatgattgccttgaaaaaatttaagtttgaatccgatttttgacataggcgcaaatgtactggacgaaaatgtctggacacgacaaattgcattaaaattctaaaaaaaatccctacgacgcctatcggcacaagtggaccacaatttccctttatatttaataaaatttagctaagaaaacctcataaaatattcctcaataaatgatgctttttgacagttaaatgatgcttttgggccctattctttttccgattttgctttaaatttgaatgatcacaaaattagttttctgtttcttcctttttattataatctgctccgtggtcgccttctgtttccgcatcggttgcaacttcgcgggcattgccaattcatcaggtcaatgtagggctgaaaattaacgaaacggtcaattcccttgcttcggcacgtccctgccgtagatgaacaaaacatgcacattcataattattattttaaaattcttttcttaattagtttcaatagtgttttttctgcccacctctctcccacaataaaacaatcggtcgggacattcggtgcccaaatcttcacaaactcccgggcaaacattgcacgttttcggacagtcgcgaaccatttggtcataggcgatctgttgtttgatattcaaattatagtctaattaagattttattatacggtaatatcccattaatgagtgaaagctgaggatagagagaaaaagaaatggcaagagagtttgagaaaagcggagaaaacagaaagttagtgaaccgacgagagatcggatgcgatgccacccgttaataggacaagaaaatgcgcacttcatagatgcaaagcttagctcgttgttgacagtcagctgccacatcttcgcaaacctcaattttgaagataaaaatggcaatgctttctcaaaaataacaattgcat

SEQ ID NO: 37127 - DNA, 827 bp, Heterodera glycines
cagaaaataacaattcgtcagcctccaaaagatgctttatctccctcccgataatttgctcttttgtccccgcttcattctcactcttcccacgttctctcaaattcgtctccgattgaaatgggctaataagaataaagcttatctgctttcgcttcagcgttcgtctcatcagtcagtcccaaaatccgaccattccctcccttcctcccccaaattgccgttgttttttgtttttttcctcaacatgttcactccctcagcagttttataatcaatccgctttttctctcctgctgctgttggtcggaatgcgcagcattcattcacttcgttgtcgttcgtttttttaatttcatcaccaaaaatgctataaaagggaaaagctaagaacaacagaaaatgaagagagagagagagagagagagaaagagagagagagagaaagagagagagagacagagacagagagagacagagacagagacagagagagacagagacagatagagacagagagagagacagagagagagagagagacagagagagagacagagagagagagagacagatagagacagagagagagacagagagagagagacagagagagagagagagagagagagagagagagagagagacaaagagagagagagacggagagagagagagacagagagagagagacaaaggctgagagagagacaaagggactgagagagagacagagagagagacaaagggactgagagagagagagagagagacaaagggtctgagagagagacggagagagagagacacagagagagagagagaga

SEQ ID NO: 37128 - DNA, 893 bp, Heterodera glycines
  unsure (1)..(893): unsure at all n locations
ctccccataatntggtttgagtaccccaaacggacacttgaaaaaatcgatttatttttgttttcggggcagtccccccgaaccgatgcgcccagatttatggggagaccgaatccttcgggaatagcttccctatagtctgtactttaattctgcgttggatttttgctccccataaatgtttgagtaccccaaacggacacttgaaaaaatagatttttttgttttcggggcagtccccccgaaccgatgcgcccatatttatggggagaccgaatccttcgggagtagcttccctatagcctgtactttaattctgcgttggatttttgctccccataattgtttgagtaccccaaacggacacttgaaaaaatcgatttttttgttttcggggcagtccccccgaatcgatgcgcccagatttatggggagaccgaatccttcgggagtagcttccctatagcctgtactttaattctgcgttggatttttgctccccataaatgtttgagtaccccaaacggacacttgaaaaaatcgattttttttgttttcggggcagtcccccccgaaccgatgcgcccagatttatggggagaccgaatccttcgggaatagcttccctatagtctgtactttaattctgcgttggatttttgctccccataaatgtttgagtaccccaaacggacacttgaaaaaatagatttttttgttttcggggcaagtccccccccgaaccgatgcgccccagatttatggggagaccgaacccttcgggaggagctttccctatagcctgaacttttaattctgcgctggattttttgctccccataattggtttgagtacccccaaacggaaaactttgaaaaaatacgattttttt

SEQ ID NO: 37129 - DNA, 1233 bp, Heterodera glycines
ttgtggatttgctttggcaatcgaaggtatagagaagatcatcatcataatgatggtcatcatcattccgctggttcatgcggtcttttgctgtttggatttccctcaaccaaaaatggggtagagtttcgctgctgaaggtcagcaacgccctttctttctctatctaagccaaagcccacctttggtggtgggcggttgcccttcatcggaaagcgtttaccaatgaatgccattgccattcaattgtcgacactgaccattcattcccacacagaaaatgctcaaaatcgacggaatgccgcgcagcgtttgagaattgggctgagattgaggggagagcggtgagagggaaattagtgggaaacggaaggaagagaagggaaagggcgggggaggggaaaaacgcatggaagtgacggggagagacaacgaacgatggatggcctcgacattcgatttttgaccactgatgcgaggtaaaggaagatgaatgaaagaagaatgaggtgaaaaagttgggaaggaaaatgaggcggaataaatgcaaaaaataaaataaaaaaggagagggaggggggggggaggtgccaattaggaccacaatttgtgataatgtaatctaaaaaagcattgaccaattaagtggtaatgcctttccatttgtggctttaactttctttgctttggaaaagtgccgtccttttcaatttcgttttggaattacccaaaattaattagtaaagggagaaaataatataagaccaattcaaataagctctgaatttgtgatgcaaatgaataagtgaagaagtgattcgccaacccacccattttcattctccggaagttattcattgaaaggattcgcttttttggataacactttcggagattggcatcaacacagagaatgtgggaggtaaaagtgacccgaattcggcaagtgacggagtgtcaaataaatgaacgaaagtgccggaatttgcattcctccaactcattgtgccgttgttcaaattcgctttcaaagattggatattgagattcaaaaaataaaaggctgaaagcattgctcaatcaacgaattaattaatgaatatttcgggttccgagtcccggcactcccgaaaacgtattttaatatccaaattctttttcctgcttctttctgctgattacatctctatcggcttttccttctgtccaatcattttcataatttcataatta

SEQ ID NO: 37130 - DNA, 1032 bp, Heterodera glycines
tttttctccctccctaggacaaaagtgcaacgtcgctcacgattatgacaatgtgctgtttttgttccgccgaattgagcgtttgcgtggcgatacgccactgttcctccattagctgctcgacccggaaagttcgccaatgtgagaggcagccggtcggcacaatgtgctcgtcattttgacaatggcaccaccgggcgacgaaaacgatggcaaaagcaatgcccaaaatgataatgctgctttcgatgacaatgatgatgccatgctgcgacgggattgtgagggacaaattgcgaggtatatatgttacaatagggagcagttcgccccctgccccccttcaaaattaggaaaaattcaacgaaattagagatttatcaaaaaacatttttttttaaatttttcatttggaaaatttttttttaaaaaaacttcatataatttgaaaaaaatgctgaaaatttttttaattataagattttgttcttgaaaaatttctaattctgggatggtgatgatccgagagggtggcaaacgaatatgactttttttcagagtgtggcataactgaaaagtaccctgatttttgccgtttccctccgccccaatgtgtgataagaatatgccaccctgaaagaaagaaaaaaacaagcactttttcaaacccatccaattttttatgtctttaaaaatgtgcatttttcagttcactgctgtccaattggcactccgatgcggtgacagaggaccaaatccgaccaattgtggccagaataagtgcaattccgttgtgtgtcttttgaaaatgacttttgaaaccatcacaaaatcgatgcccaccattttttttgtcatttgactttacaccatttttatcgaacatatatatttagctcatttaaaatattctctaaaaaaataacctcataccattgtaaagacaaagaatcctaagggcgtaaccatccaaaatctatcccgaaatttaaaaaaatgcactaaaatttgacaacttttagtgccaagatg

SEQ ID NO: 37131 - DNA, 795 bp, Heterodera glycines
aatctcagtgaataattaaataattaattttaattatatagaacgtgtcactgaattaattataattaaatttattttataccattatatttcaagataaatttaaaaagaacaaataaaaatttgtcatttttgttctaattttttgcataaatatcttttgtcatttgtggcaaaaaatgcaaaaaaagggtaaacgcacaccaaattctgctgaaaacattactgaaaatgccaaatctcgaaatgaacgagacctgatcagtgttgggctcataattggggcagtgactgccgtgttgacaccaataatcatcggcagcgtggttgcaggatatgattttacaaatgagtttctttttgagcaaattgaacgcataaccaaaaatccaagcatacagagcatttgcctgcacggtgttgttttactatttgcgtataattaattaaaaatgatcagaattcgatcggttttccgtttgcaaaaaaaagaacattccttggaattccgattaaatttcattgatatattaccagaattagtagtaaccgaatactcaaatagagataagaaaaaaataaaaattttatacatttttctaggttagaataatattataaatatatattttttaaataaaattcatatgtatattaattttgcagttacaggcagcgaaaattatttaatattgagtgttattgatttgacacatgaattttgtgaagcgcataatataatacaaaattattattattcactgagttttttgtggatcgactcagcacggaaaa

SEQ ID NO: 37132 - DNA, 1463 bp, Heterodera glycines
agagaaagaattgtttgaccttttgggaagggaaattgactgacaaatggaaatgtttcgaaaaacaaaacaataccccaacttttggctcgtgactcttcttcacttttctcctccaacgatttcttttccgtctcgtcacctgccaacttttcttggcgctcagttccaatttcttgtctggggagttttcgcatcgatggaacatcggtctcctcatcttcttgagtttgttggacttaaattaaaaatgaaattaccaggttttgccaatacaaatccgcccatttagttcgggctgttcagacccaccacctttcccttccgctgaagtggatggttcttcctgttcttctctcatccgttccatctcattgtcctcatgtttctgtttgcgtttgctcagtgctgtctttgcaatttcacgcgcttttttgcacggtccgacagcagcgatcattcgcaactcttcgtctttgatgttttccgcctgttccaccgaatccaatgtgccaaccaaattcaagtccttgccaagcgccgtgtgcaataactaaatttggataaaatccaattaacaattgggtaaagaataaatgtttacctgagcagggtcgagtttgtcaaagtcaccggcaccaggcgtaacttacaattaaaattaagtaaaaaaaataattaggattgtttaccttcgggaacaaatgactcaattggtacgactaattcatctttgtccggctcgtagtcaaacatgtaatagtcgccagaacgtttggctataagaaaaaaaatatcacaaaataaaaaagttaaaagcaaatccaagggaaaagtcgcattaataaagcagaaaggcaaaagaatagcagaaaagtaattactgtataaggaagggttacaaaataaaacacattagggcaattgccaatgttcacaaaccaacactaataacaaatattattatgctacttaacgagaattttaatagtcccctaaataacaaaattaaatattattccaaagaaacaaaaacacagcaaacgaaaaacaaaagcgaagtgcgggaaagagagcgaaagtcgagcacacggaagaaggcaatgcaaatacaacaaaccagggacggaagacgggacagaaagtcggaggtcgtaactcggtaaggggtcgtcttcgtcaaaagtcggaagacgctcgacgagtgaagaaggactgtgccgaaacactgaggacagacaaaacatacacaatcagtggaacaccaacgaaaccacccatttgggagtaatgactaatcacccaatttgaaagcaaaagagagagattggacgaatgattagtgatggcattagagaggaacgaaagaaagtgtcagaaaaagactgcagaccatcggaacgggtcgaataatacgaaacagaaatagaccattgatcaaaacaaattaaaacgaaattaaa

SEQ ID NO: 37133 - DNA, 856 bp, Heterodera glycines
aaaatccggagcccatcccatcattttcaaccaaatagcagaaagattactaatgaatatgggaatgtgtgctttaagtttttatgatttaaatattttgagattgaacttggcgatttattaggggcatatgcatttgttgtgctgtgcaatgtcattttgttgagcctccatcgatgatgattggttatcatcacttttgctctgttaattccatcaaatattcaacaccaaattatttacatattcatcagaatcacaaatttgacggtcaatgaaaagaaaagagaaaaagatttttcatcgttagtccacaattttcgagccataagcaatgagagcattaaaacccaacaaaaaagcaagccgagactgcgtaaatatggacgaaagtcttggcaattttgttttatttaatttaaggcacaaacatttacaggcgattagaattaaatagaaagtcatatgaaaattaatggtcgatgggcaaaataaacaaataaaattagtgtgcatatacgaagctattcagagaagtgcgaatgaaacggtcaaaatgggataatgctaggcacatttaaggggaaggcggggggaggagggaaacaccgtcacgacagcgagcagtccatcaatttttagtctaacgaaggtagtcgccaaagtcccggagaagggccaattgctcgttggtgatgataaagtggagccggtacttctcgcgcagggcacacagcttctcggtggggtcgagaaattggatgaccttgaaaatgggcggggaataaaaaaaacacgggagtgagttaattggagcatattcaaagccgtgggattttatgaacaacaaactgga

SEQ ID NO: 37134 - DNA, 545 bp, Heterodera glycines
actaaattctacaatgattttttatgctttaataaaccaaaaaaaaatgttggaaatttggaaatattttaacaaaaagtctatatgtattattgcacgtgtaatatctgtgccaaaaaaaattgttcgaaatgatggttcgatgatggacatgtggaagcagtctgaagggctcccggacaatcggacagtgaggacaatcggacagaggtggacaatcggacaatggacaatcggacaatggacaatccgacagtggacaatccgacagtgaggacaatcggacagaagtggacaatcggacagtcaaatataaaatagataagaaaataccggtcgccgcaatggaccgattgtgccatatcaagaaaaaacaaaataggcaaataaactaatgttctgggaatgacctagaaaatgtaaaatgatgtgaatatgagctgataaaaatgtgtgccaaattacttacaagtataaatgaccaattaatttcccgtgcactgcccaaattgaccacttccttttccttcccaaatcttcacttg

SEQ ID NO: 37135 - DNA, 839 bp, Heterodera glycines
cgtccgtctctcttctcaccatcgtcgcaattttctgtttgctgtgcaaatgttgcatttcggcaccgcgtaattaatccttccttaactgtaattaaatattaattaattgcttttcaatagatccgtgctgtcccggcagccaaaaagtcgtttcgctgatggccaattacgttggcactttcgcccattccttttccaagtcatcgctttgttcggatgccaaaagtgttgcgggcgcattgaaaggccaactgatcggctgctcgaagggcggcgacgcaactcttttggccgacatcgaagcatctcttgccaaccattcttctggtattgatggactaatggatcaaatccattgccaaattagccaattaactttatttttaattattttaatgtttttcccctttttgatgagtgtgcccacagcctcggcttcgtccgtgccatgttcaccattgccgcctccgcttcttcccatgccagcaacaacagtgaatggcaggcattgagtgccaagtttggtcagcaaatcagtgaaattgactcgaaatgtgccgagtttggcattagcattgccaaagtgtcttttgagggccccaagggtaaaaccaattatggagaatatctcattatttatttgcttacaattcaaggagaccactcccaacgtaatgtgcctggtacgaacaatgtgattgccatgcccggattgaccggctcacacaaacaatgaactgaatgatgagtgactgaatggaatgaaatgatcgtggagttcgtttttgattgttgtccagcaattagctgttgtatttttaaattagcaataaaat

SEQ ID NO: 37136 - DNA, 1107 bp, Heterodera glycines
  unsure (1)..(1107): unsure at all n locations
catnnttttgaaaaatgggaggccaaaatcgcaaaaaatattaattttttggcgaaaaattttgtaaaatacaccctagggatttcaaaaaaccaaaaatacagccctaaaaatcgacttaaaaaggaaaaatacacccctaaaaatcgaatttttgacttcagccccccccccaaagccaagagtctggctactcccttggtgtggattaccgttccggttggtgaatgcgcaacgaactgtactgcgacacacggccaatgggcaccagcggttcgggccaggcatccttaaagattgaattaaataaaaaattgttcttgatttttcattggaaaaatcaggttcataggtatacttatatatccagcagttttcactatatttgagaagggttcgaaattttggaattttttttttattattattatagggcttgaaatttcatattctaatacgttttgactcaaaattaattcttgtccaggtttaggttagctcaagtattgagctcagctattttccaaaaaaaaaaaaacgggaccgggagctctggcaaatctcagcttgaggtcttgtctagtccaggctcttctaactctctcatttctaagcaactacttaccatggcgcaattcacagaaactttttaaaattttttttcaaatttgcgtcagcaactgtttgtatgagatttcaatgaaattggcgcttacatagcgtcgccggacacgatcccgcactgctcggaattgttcgggcgcaatttgcttggacattcgccgttcggcggaagtgcgacggggttggtcctgcagccatggatggtccaatgcttggtgtacgctcatgcgctcttttgggtccaaaattagcagtcgacggatgaagtccttggcctcgtccgagatgccttcaaatgttggttcctgtggaatgggagacaaattttaaaggaagaaaccctatgagatggaaaatttaaaaaaaaattaaaataatggaaacatacatgaaaaagggggggggggggggtcgaccaaaatttttgcgaaatggtccctatacgtgtaaatcgacgaccttttttttttttttgcttttaaa

SEQ ID NO: 37137 - DNA, 1483 bp, Heterodera glycines
cgctgactaattagctaacatttataaagaaagtagaaatttgattaaatgcatatacaaaatattcttttttaaatttgtataaagttcctagtcgtatgtgctttgcgttggttaattggcgtgggtgagtgtggtggttgggccgtttttgcgatattgtggctggaaaaaagaagcgatttcgctgtggggagcgcggccgtctgggtttaagtgcttgcttgcgcttgtgctcggcattgaacggtgatggctgctgctggggtgccacctttgtcgtggcctcagtttctccagcgattggcagctgtcgaaatgaataaaacatgcagctcgtctgtgtgttaaagaaatttggcgagttaattgatttgtgtaaatgttgcctaaggcacaaatgctgtggggaactcagcactggggatgctgaacctaaagttggtggtggtgttggtatacgagtgagtggcgtattgccatggttgacaagccctatgagttcgtggatcggaactccttgcctggggaccagtgtgcttgcattcgaaaaaacacgagacataagcgcccgaaggcctttggcctgaggaagtgtcctaaccgggaaatccggagtgctcgtgtgagtgcctgtgcactgccctcggagctgtgtccagcggcgagatggttcttcccaagtccgggaagctcggatgcctggccagcgctgtgtcattaccacttgctcggtcgccttcgccgcccatgcgcacgcttgcgctgaacggagttgtttctgctgaaactatccgtctttacaagacggctgtaatagcggcgcttggcaacgctcgctagcagctatctggttgatcctgcctgaactgatgtgttcatttcaaagattaagccatgcatgtgtaagtttaacctgccagacagggaaactgcgtacggctcattacaccagctataatttacttgaccttgacttcttacttggataactgtggtaattctagagctaatacatgcaccaaagctccaatctccccagagcggagcgcatttgttcgccacaaaaccaagcgccctccgggcgtccagtgttgactcagaacaactaagctgatcgcacggtcttgtaccggcgacgtgtctttcaagtgtctgccttatcaactttcgatggtagtgtatctgactaccatggtgatgacgggtaacggaggataagggttcgactccggagaaggggcctgagaaatggccactacgtctaaggatggcagcaggcgcgcaaattacccactctcaacgcgaggaggtagtgacgagaaataacgagaccgatctcttatgaggccggtcatcggaatgggtacaatttaaaccctttaacgagtatctatgagagggcaagtctggtgccagcagccgcggtaattccagctctcaaaatgcatagaattattgctgcggttaaaaagctcgtagt

SEQ ID NO: 37138 - DNA, 1225 bp, Heterodera glycines
cccacccccacaacaaaaacgggtttccttcggtccatcacaatccgttaacccaaacccaaacaattatactaatcaattccggccccctagtccccctcgatttcaaaatagaaactggcatcaaactcccaaccagaccccctcatgttattattgtaaaaagcctggtcatgtaatcagtgaatgtcggatcctcgcctataaaaatcaaaacagaaattcgcaaaattggacgtctcagcctcctatgttcacccatagcaaccccaacagtattccaatctcccgaccccctccctataacagtggtagaggaaatcaacctaatcaaagaggcacatggcggaaccaacagtcttttcatcatgatcaaaggggtgcatggagaaatcagcaacccttccatcatgacaatcggaattggaatcgctacccaaatcccaaccagccttatggccgaggacgacaaattaattcccttaacacctatgattcccttctcccagactcattccaaaatctttcaatgtctgataatggtccccacccttcatttaacactcttacattctctgaccaagtccaacaacccgttactgcctcaccatctcaaatcaaagaacagctcgtgtgctctggctctgctgataagcaaccaaatctcacggatgctttaaaatccgaaccaaagcctgtttcccccactcctattgtcacaaattgggaatcacacccgcgcagctcaaatttttcaatagctccatttctaactcgttttaattttatcttgtgtatcattaatctttctctaagtgcttctttggtctcatcctctcacagtcaatcatccttaaaaatcctccctatggtttgtcagacacacgttgagggcacaatttggtctcttcccatttggctaccatgtccaaaattaaagcatactccttctgacacccctatcaaacaacctattcgccttttccgaccgaacccattcgaacaaaaatccaaggcatgggtgtgcaggaaggtaaagaaatccctgattgagtacaccaatccatggaatgatttaatcattaagcaactcccgtccgaaaatctcccagtattattggatgaatgtaagcaaatggttcaggaaaagtcatgttccgaagggattctaatccaaagtggggagctccttttctcccaataatcccaatcgagctatgaaaaa

SEQ ID NO: 37139 - DNA, 961 bp, Heterodera glycines
  unsure (1)..(961): unsure at all n locations
cttttaaaatgcaactaaattttttcctaattttacataaaaagatttttttcgaaagttggttcttatgagcaacagattgtgaaaccaaattaaacaaaactttttataaaataaatcttaattgtaaacaaattaaaaaagcatttataaaatttaagtaaatttctcattcgaaggattcaaataaatttaattgttattttgttaatttgaaagatcaaaagggtcaatttagcagagggagccgttgtaatagaggttttttgggaaaaatgccagaatacagacataatgccaaaatagtgacaaatctaaatttttaattatgtaattagtaattacagggtgcacaaaattttgactattgtaattcattctaatgctttaatcaaatattatacaacgaattaattaagtgttattctcaattaacaattataattgacatccaactcattgaatattaatatactcaactcaaattgatcaaagggtcaatttagcagatggagccgttctaatagaggtcttttggggaaaatgtcagactatattcataatgccaaattagcggcaaatttaaaatggttaattatgtaaataaagggcgcataaatgaaaatggaaagagttttgacaaaataggtaaattattaaattaattatgattactctgattgggtaattaattaacggaatgacgaaagaaatggtgaaaaaataactcataaaaaaaaatatgacagtactcagatgtcactcatcatttgttcaattattgaaaatgaaagctgataaaagggtaaaattaaataatatttaaagggtcacataaattaaataggttttgaaataaatttataaattaaatagaaaaatgcctataattgattaggttcaaattagactagtccgggtccggatatatgggcaaaagccggncgccgggtatgggtta

SEQ ID NO: 37140 - DNA, 1138 bp, Heterodera glycines
ttcaaaatgtcggacgttgacaaattgtcggatcggatgaagcgtttgctgtgcacgggtgttgatgcggatgtgcactttttggttgggcaggacgacaaaaaagaggcgagttcggatactgaaaatgttataaatacataagaatgggatgaatttaggcaaaatgcctattttctcatcagctaactttgtataagagttgccgcgagtcggtaaaaaagtcggatcagattcctgtcgatagtcccgcaatttcaccaaacaattcggaattgcctttttgggtcccgcaaaatccggcccatgacctgcccccgcaccgatttaatctgaaaaactgagtcgggaagtcatgtcaggaatatcttgcctaaaaattcttgtctaaaaaatccacatttagttcaattttttttttgaaaaatcaatttttaaataattttccaattaaacaattttaacccaataaaatatctaatttttgaatttgattaatttaattaaagcttctaccagcgcataaaccgattttgagagtttcgtccgatgttttcgacgcaatgtttcgatttgacgagcaaaaaagtggaaaaaataattttaattatttttcattttttaatataattttttttaacattgtcagaagggaatgaagaccctattgaaatcccggacgtcgacattgaagcgtttaaaactatgttgagctttatttatacggacgatttgaacggagtgaacggagacaatgccatcgaagtactttatgccggtaacaagaaaaaaaatgattagaattttttttaaatttagctaagaaatacaatttgccatcattgatcaaagcatgtgttggcgttcctattgcgaagctggacaatgtgtttattgcttttgccaaagctcgtcttctggccgaaaaagtacaaaataaagaaataagcttaaaactcatttatttttccctcatttcatgattttgctggccgttgtttggcttacattgatcggaatgcggaaactttgatcaaatcagaggcatttttggaaattgatcagaaattattgtgcgaaattctgggccgtgatcagttggctgtcagcaaagaaattgccatttgggatgccgtaa

SEQ ID NO: 37141 - DNA, 1485 bp, Heterodera glycines
gtataccattgctgtttatataccgtataccatttcttcataggttttgtgttctttttttgtatttagtgcctacggccggtgacaaagcaacatgtctgctcaaattcgcggaccttccgtccatgttgtactcccagaacacgggcacaaatcaatgcttggaattgtggcaaaaatggcgtttatcggccggctcaaatctcacacaaagttacgccgaactgattgagttcagcaacaaaggtatgaactccgttttggccgttgtatcattcattaattgcgtgttttgaggtgccaaattaaacggttactccgacgccggtgccatgtggcgttccgtctatgagcttccggcacaattcggcttttactcggccagccaaatcgacatcagccgccagatggaccttttgtacagccaattggctccgctgtaccaacaactccactcttatttccgcgcgcgattggcggcagtttacgcgcaaaaagcaaacgaagacagtgaaaagggagggcagcaattgagcaggttaaacgggtgttaattagggtaattagggatcgtaaacaaaaaagcatttttagagatggtccattgccaattcatttgctgaagagtttgagcggcgacagttggacagtgcattacgaacagacaaagccattccccgaagaaatgccggcggaggaacagaaaattgccaatgaaatggtcgactcattccgagcacaaaattacactgttcggacaatgttttccaaggtattctaaggatgttcaaacatcattaatttttcatttttttaggtgtaccgtttcatgaaattcgttggctttgaacggcttccccgcactttttggacaagttcaatttttacgcgtaattggagtaaggacatgatttgtaacccggcaactgcgtataacatggtcaaaaaccacggcatatgttcgaattcccctgacactgttttagatgaacggacagcaggacgattaccgggtgaaagtgtgtgcccaattgagtgagcaggtgcaacaaaacaccaattaattaattaaacgttttttgtccaacaggactttgtcaatgcgcaccgtcttttggccaaactttactatcagtacggttcacgaacacagcccattttgttgcgggacgcacccaacccaaggtaattaatcaaaaaatgcttatttaattatttgaaaattaagcctaagcgcggcactcgccggtgcctttggcatcgttgcgcttcatccggattatctgagagcacagaaattggtgtcggtgaaaaccgagcgcaatgccgaggcagaagtgaatcgattgtacagagaagcgctggaagacattgtgaagctgccatttgccattgtagcaggtgaaaatgaggaaaaaattaattaatatggtaaaacaaaaaatggcattcatttttagacaaatggaggtacgcggcatttga

SEQ ID NO: 37142 - DNA, 925 bp, Heterodera glycines
tacttattaatcttgttgaaattgagtcaaaaaatgtaaaatctggtcaatttttgaccaagaatggttttgaaaagcaaaaaatagttaaatttatggtccattaacagatttgattctagatcctctttttaccgtctgatacattcggaaaatcttagtcgccaatgcatcccgctatcccctaaaaatttctttttcaaaatatcattattttctcttttttggaaattttttgaaatttaattgaaattttttcaaaatcccgcaatcccgcgcgggatcccgcaaattttaaatgcgggatttgcgggattaatcccgcgggatcccgtcccccaaaaaattttggattccaatcccgcagcgggatccgcaaatttgaaatttccggtctctagtatcgacccaacctaccgtttaatttttcaaaacgcgccattatgcgatattaaaaatacaaaaaatttatgaccagtatgcaggcaattacaatataatacataaataattagtgctttgagggaatgcaaataaaaagattgcattcctggccgtggtgcgacttttggggatttgcaacttggggacccgacatttggggacccgacacttagagaacccgacatttggggatcgaacgtcttttggggatctgacatttgaggaactcgacatttggggatcgaacgtcttttggggatctgacatttgaggaactcgacatttggggatcgaacgtcttttggggaactcgacatttggggattttattaaaacaaaaaaaaaattaaaaaatttatcccaaattagacaaatttacgattgctttagccagagttaattccattgcaagaacaaacgaaataatttattataatgaactttcattacggactctaaaaagcagagaagatgacctcgg

SEQ ID NO: 37143 - DNA, 830 bp, Heterodera glycines
gggtacgataagttggaaatggacggcacattcaaatcgttctgacattacagggcaaaggcacgtcaaaggaaaagggaatagggacggagggccaaaaagggaaagatttacccaaaatggcattttaacataatttggcaactgcagattgttttacgaacatgacggggaccagtcacgattcgaccgcgtctttctgctggcagaaagcgaactgcgcgaccccggcgggggcaaagggcacccgcccattaccttttggctgcacatttcggtggtgcccaacaacagtcatgcgccgcaactgctgcagaatttgttcggcgtagcagtgactcaccaacaagtttgaacagttcatcctttgcccgtgccaattggccaccgtcccacagattgacgtgcttctgaacgacgagcgcactctttggccttcgcttttgccgtggatcgatttggacaattcgcagtggccttccctggagcagtcgctgttgttccccgtggcccagcagcacactccgctcgccttccatctgatcgattctacggtttcacgtgactttgtgatttatgccaaaagtgcgccagaaatgccgctgagagacttcacggagaagcagctaatggacggccaattggttttgcggcatttgggcagcccccgggaggaggccatcgttcggtcagtgcttttttaggagggggaagtgatttgttggcacaatccattcactcatttaatgttgactgatcaggtactccgtcagtgatgggttgcacagttcgccctccctcttcgctctggcctccttcctcccgcgtgc

SEQ ID NO: 37144 - DNA, 228 bp, Heterodera glycines
cccccccccccccccctccgcgcgggggggggggggggggggggggagggaggagaaaaaaaaaaaatatttttttttttttttttttttttctttttttttttttttttttttttaaaaaaaaaaaaaaaaaaaaaaaaaaaaaaaaaaaaaaataaaaaaaaaaaaaaaaaaaagtgccgcccccccccccccccccccccccccgcccccccccccccccgcccc

SEQ ID NO: 37145 - DNA, 848 bp, Heterodera glycines
atcccagaaaaatgtctatctctttttttgagaaattttatacctcacaaaagcgcttgcgtatgagtcggagggctgtgcacaatcgccattttatttcacagaggatttttatatttagaggttatcccagaaaaatggctatctctttttttgataaattttatacacatacaaatgctctcgagcatgatagggagggcggtgcgcaatagacattttatttttgagggaatttttatatttatactctatcccagaaaaatggctatctctttttttgagaaattttatacctcacaaaagcgtttgggtatgagtcggagggctgtgcacaatcaccattttatttcacagaggatttttatatttagaggttatcccagaaaaatggatatttttttttttgataaattttatacacatacaaatgctctcgagcatgatagggagggcggtgcgcaatagacattttattttagagggaatttttaaatttatagtatatcccagaaaaacggctatctctttttttgataaattttatacacatacaaatgctctcgagcatgatagggagggcggtgcgcaatagaccttttatttttgagggaatttttaaatttatactctatcccagaaaaatggctatctctttttttgagaaattttatacctcacaaaagcgcttgcgtatgagacggagggctgtgcacaatcgccattttatttcacagaggatttttatatttagaggttatcccagaaaaatggctatctctttttttgataaattttatacacatacaaatgctcaaagagcatgatagggagggcggtgcgcaata

SEQ ID NO: 37146 - DNA, 640 bp, Heterodera glycines
attttccccggcggcgcctatcctcggcaccgccggaccccctttcttccccaaaagttttttggaaaaagcgcgccgaaaaaaagtgatgtgaaaagcaaatctgcatttctaataatattcgatcatttagtccaaaaatgattaattgtttgaaacaattgaaataaatttggtttttttttataaaataaaaaaccaaaaaattatttcagtttttattgtatcccggtcccgtacaactctaatttattggcataattagaaatttcattgccagtgccgggctcgaaaattttcgtgtaatttttaaagtaagattcacatttttgtgcactactaaaaaaggtgccaataaatagcttggtattacacttaaaaccttttaaacttaggtgagtaaccaaataattctgcaatttttccaaaataaatttttttttttttttagtttagaggaatgtaaaataatctcgatctcgaaaatcgagatccaaaacccgagacttatctcgattcgagactgagacccttgagcatcgctagtgtttatgagcaaaaaaatcaaataacaaagtccaacaaaaggtgacataatgatcgcatcaatcaatcaaccaaacaattcacttctgatgtt

SEQ ID NO: 37147 - DNA, 807 bp, Heterodera glycines
gatggaataagggggccacttcaaaatcgaaaagctaaatatgttcgacaggataacaatctaagagcaattgtcgaacagtttgacgatcgcgagccgcttgcgtatcttcgagccattgcataccatttacatttttaaagggaattagaaagaaacaaacatttaaaggcaataataagcgtcatttcaaattttggcattaattttttaaaaataactttagtgtcgaaattactgtgtcgaaaatgaagtaaaacagtgaaagttttgaaaatagttcagtgtcgaaattactcagtgtcgaaaatacacagtgtcgaaattacccagtgtcgggattaccggacacggtccccctctttcgttcccgctctccttaattatcaaaagaaattattagaagggtaatgcattaaattaccgtaaatccgctatttgaaggcccctctctgatagaaggccccctccaattaaaagcccccctaaaacacggtttttaatggaaaaacgatcaattttattaaaaaaaaaaataaatttgatcaaagtcgtacagtcgtaataaaatttgattttattttgctaaaaagtgcttggtaatcccattatgcaacaagtgagagaaaataaatgaatgaatgcggataatcggatgggtgggacgacttccaataatgggcttatctgctccatctccgcttaactccgcctaacgagcgcaattgataattctcaggcgccgcgaatttcttcgtctcacttttctctctcttttggcctctttctctttttttggctctaatt

SEQ ID NO: 37148 - DNA, 907 bp, Heterodera glycines
  unsure (1)..(907): unsure at all n locations
cgaaaaagcggaaaattttaaaactccttaagtttctgaatgttaaattgcattaggtttgtggttcactttatattcctgctaaattcagaagaaaaaaataagtaaatttcctaggggattgtgcttatttttaagaacggaattccacgttttgtcggccttaaacttgacaaaatgggaattgaataatttttattttttggcgtattgtttatttttagaaatttaattctgaaatgctaaccaagcgcatattggtcacattttctggccaaaaatcacctgtgccaaaatgtcccgtcattagcggcagaaaatttttttcctccgatgcattcaatgtgagttgcattatggatagcttattaactattaataatgttttaataattaataaatttaattcaacgacttttaaaggttgaccgaaattgcacgcgccacggcggcgaattggtggccaatgtgctgaaggtaattgaatgcataaagctcggtcttgtcacaacatttgtgatgaaaataaattcatttatttccgttaaaaaatacttttttaatatttttaaatattttaactttatcctacgaattcatttgtgcccggacgggactaagatcctttgcatgattttctcaggatggctcttgttttcctagtcatgttataacaagatttattcctgttcattctgtcctgctggtccaactcggaaatcatttgtccggatttattcaaaaccgcgctcttcaattcccgaaagttccagttctcttttttttaatctttgtcaagctttttgaaaatttataagtattttgttgaaaattaaatttttgtctctattttttttattattanaaattgcataattttgtccatttttggcccacgacgtgcgcg

SEQ ID NO: 37149 - DNA, 1015 bp, Heterodera glycines
tacatccctttgtcaatgggaatgccggcacgcgtcagcagctcttctgcgtcacgcccatgttgctcctgatgacgcgcgtactccgtaaatgctgcacggccaccgccaccagccattctcgtttcgtggtcccgcagacccagaaggacggcacgcgccaggcagagacggtcgtttgggttaacgacacgcaccaatgattgcacggtgtgcgaagcatggtgttccgcctccaaatcacagccacctgtttttttcaatgtaattgtccttgaaaaaagaagaacaaacctcctctttgtgggtccgcacgaatttgctcgagtggccacaccgccagaactttggcgaccgttgtcccagcaagcaggtcaatgccggctgccgattgctcattgagccgctcaatggctgccgccagtgccgctgcgttgttctgctcgggcgggcgaagtcggatcacgtacggccgatcaaagcctggtgggtgcagctgcagaccaaccagggatggcggcgggtgaccgtccagcacacggtctagcagatgttggatgagcacctccatcaacaagtcgggccgctgtgtgtcctccagcggcaggaagcgcagttcacagatctcgccacgagtgttccgtggcacattcctcatttgcgtggtgcgctcaatgacgaaactgtcctcaatcgccttaacagagaacaacaaaaaatttattcacggcaataaaaatttacaaacaggacatgagcgctgaatcctaagccatggtacaatacatggggcatgaaaaatatggaaacaatggagtgaggtggcaccctccccactcacaaaaggacacatgcatatgggacaggaaaggcatttttcaacatgaataggtgaaatgtcaaaggtgggcagtgaacgaattttacgggcaggatatggcctttgggtttccgcgcccgaaatttcctcaatatcgggggacaaattgaagcggaccctcaaacgaaccggttc

SEQ ID NO: 37150 - DNA, 1183 bp, Heterodera glycines
  unsure (1)..(1183): unsure at all n locations
ctcctgaagaaaaaaacatccaaggttaataatgccaactgtaaaatatatcgaaaaaaggagactcacttttggcaacaatgccaagtgattgttgcttatatcgaggctaaaaaaaacaaacattgacaagataaaagaaaaaagagcacactccctccccctttctgttgatccaaataaactacctgatcagattgacgaattacctgatcagattgatgaactgtgccaccaacggggggacagtgacaaaatggttgtgagccaaattaagcagtgaaatggcggcatggtctttgtaagttgcatgttcacccagaaaaaaagaagagggaagtgagtcgatgaacctacgcaaacagaacatggatttctgccctttcagcgccaatatgtattaggttttctaagttaccgttgagacaggtcaacggtatgcatttgtctctcatcctgctgctgttgaaaagacgcgcttaatcacaagggttttgttcggtccaggggcgggcacgacgctgtacgagctatttggacaaactaccgaactttaagagtgaccccccttctgtgtcccaacaaaaatgggcttagaaaaacgccctaaccgtgctgcatatataattaggatagactgacccttccgtcagaagcggcggtgaaagccgtttggaaggcgcaagggtccaaaaaaggaaattgtccatttttacccggtccaaacaaattgaatatgcctggaattgtgctatttatttcaaatgggtgggttggaatgcccttggtggcgtctctccatctcttccctcttcctcatcacaaacgtcgtgcacacccctggatcaatgaaagtgatatcagcggaacggtgccgcaactcaccgattctgaccattaccaagtgcattagcactgtcttctccggtccctatttgggggttttctccaaatgccgtttcttgttctctttcgctactcgtcattttcagtaaaatatttcgaggtgatagtctgttttgctgagagatggggtggggaggaattggtcaattcaaagttcaatgagagactaatagcccaattaataataatgggctgagaattgtattttgnggacactttcatttcttaagaacaaatttttgttgatatcagcgccgaaagtataaaaagtgatcat

SEQ ID NO: 37151 - DNA, 1116 bp, Heterodera glycines
cggagaagcgcgcatcgccggagtcagtctcccgccagccgtgagcatccacaggaggagacgggagtcgaaacccgtgctcatcaaatcgagagcgaacgtcacgaagttcgagcagttcagattcccgcagccggagtctcgcggttcggtctcagtctcccgccagccggagcatccgtcgcaggaaacgggagttaaaacccgtttcatcgagtcaagagcgaagagcaactcccgcccgttcggagcagctcaaagggtcggacaagcccccttcacaaccaatcttgtcgagcaactcccgcccgttcggagctgctcaaaggggtccgacaagcccttcaccaaaatcttgtcggtggtgccgttaagcaagcagcaaatcgctgtataacatccaacagtaccagttcaattttgtcacccctcccccctcccattctcgtccccctttggcgctgatcggatcggtcagcagcatcagacccatcaggacgaacggcaaaagaggggaccattccctttacggcacagcgagcggagtgagcagagaaaaaagggacgagagcggtgaagaggagcgggaaccaatcccgcctcagctgggccaagccacacacttggcccgcacgagtaaaagattggcgacaaatttatttattgtttttttcatttttaatacaattttatcaaaagctgtcgttgattaattttgcgtgcaattgtacactagaaaacgtggaattacaataatatttcccttttgcgtgcaattgtacacaagaaaacgtggaattaaaaattcatattttctggaattacaataatattttccttttgcgtgcagttgtaaacgtgaaattacaattcatatttcccttttacgtgcaattgtacactagaaaatgtggaattacaataatatttcccttttgcgtgcaattgtacacaaaaaacgtggaattaaaaattcatacttcctggaattacaataatattttccttttgcgtgcagttgtaaacgtgaaattacaattcatatttcccttttacgtgcaattgtacactagaaaatgtggaattacaataatatttcccttttgcgtgcaattg

SEQ ID NO: 37152 - DNA, 777 bp, Heterodera glycines
ccgccctgataacacacgtcaattgctgtcgctgagtacggacaccgccggcagtggggcggcggagagacccctcttttttcaccctttgccccctcccccctccgggcgatgtgataatgatatatttgctgatgacgacaccacattaaattgcaagaattttttgttcctttcctccaaagatcgctcttccccacccacattgacattggtgtccatgggctaagtaaggagctaaaatttgccatttttagggattttttaaaaaaaaaagttcggaggtattttttgaggtccccttttaagcaggtttaatgaatatttttagtgattgccttaacttgttaagggaaaacgctgctcaaaacgtggaaaatattaatgtagcctaatttttgttatttatataaaaatttcgaagcatttatttgcgaaaaatttgaaaattttaaaaaatttcaattataaaggttgtcaggaaaattcagccctcacctgtccagggttggttggacctaagaaaagcgccttgcctctgatttttgagcaaatcccaaatttcatggactagcctagcaaaatgagtgacactcgtcgggtcgggtcgggtcgggtcggcgccggctgttgttttttgtctggccctcccccgcccccgagggcacatgaaaaagccatagagtgaaagactaatgatggtgaaagtgcaaaagctgcacgctatgtataggggtagcacaaaattcattacctgaacaaacactgatttatggg

SEQ ID NO: 37153 - DNA, 145 bp, Heterodera glycines
cggccaccgccttcagctggtgcaggtcttccatcgtggccttgccggcgacgatgcgctccagcacgcggtgcatccagccggtgccttcacggcacggggtgcactggccgcaggattccttgtggaagaactggctgatgcg

SEQ ID NO: 37154 - DNA, 114 bp, Heterodera glycines
cttcggtatcggcttcggcgcctacgccgcagtgatggtgccagtgaatctggtcagcgtcgccgccaccctgctggtgctgtggctgttcttccgccgcgacattccggcgcg

SEQ ID NO: 37155 - DNA, 515 bp, Heterodera glycines
caccttggtctgtggagtgcacctacattcattcaattcacgcaaatatggaatgagttataccgcgaaaaccgggctggcgcccagtcgtaccggcccgtagtttttaacaaatttcaagtataacatttggtaaatcgcaatttttttttgtaaatttcgtttggaaaaaatgaattctctctctcttttcgctgccataaaaattcggcacattttttgaatgccctccgaaaatggattcgttttgcgatgatttctgaatgccccggttcaaaatgtctcaatttgcgatgatttctgagtgccccaattcgaaattagacaaaattcggcacattttttgaatgccctccaaaaatggattcgttttgcgatgatttctgaatgccccggttcaaaatgtctcaatttgcaatgatttctgagtgccccaattcgaaattagacaaaatccggcacaatttttgaatgccctccgaaaatgggttcgttttgcgatgatttttgttcat

SEQ ID NO: 37156 - DNA, 219 bp, Heterodera glycines
cattctccccccaccctttcttcttccgccaccctttctcctccttcattttaaattcctttccttctccaaccccctcctccctctcttgatagtttaaactgaaggcgggaaacgacaatctgatacgcgatcaagctagctgctgcaggtcctgctcgagcgcccaaaagggggatcgatccccgatctagtaacatagatgacaccggacctgca

SEQ ID NO: 37157 - DNA, 513 bp, Heterodera glycines
tataataacgctgcggacatctacatttttgaattgaacaatattggtaattactctttctttttctccatattgaccatcatactcatactccccccaccctttccttctcccgccctctccttcctttcctggttagttaaactggaggggggaaaccaccatctggttccccttcaggtaacttctggagggcctggtccagcgggcggccggggatccattccccatctaataaccttaatggccccggactccaaaagattccccgggaaccaactccaatttctaatcctgggccttactggttcctggggggaattggtattcccttcccatttccccccacattccaacccgaaacattaaggggaaaggctgggggggctaatggatggacttacttcccttaattggggtgggcttcctggccccttttccagccggaaacctggcctggccacttgattaatggattcggccacccccggggaaaagggggttggggattgg

SEQ ID NO: 37158 - DNA, 87 bp, Heterodera glycines
  unsure (1)..(87): unsure at all n locations
ccgttctctggaacacgcttacagcaaggacggcggcctggcggtgctgtacggcaatttcgcagaaaacggacncnagacttcccc

SEQ ID NO: 37159 - DNA, 299 bp, Heterodera glycines
  unsure (1)..(299): unsure at all n locations
cggtgtcatctatgttactagatcggggatcgatcccccgtttaggggcncgagcaggaccggcagaagctagcttgatgcttttcaganngncgnnccccgcctncagnnnaaactatcaagagagggaggagagggnnggagaaggaaaggaaaaaaaaaaaggaaggaggagaaaggggggcggaagaagaaaaggggggggggagnatgagtatgatggtcaatatggagaaaaagaaagagtaattaccaatttttttcaattcaaaaatgtagatgtccgcagcgttattata

SEQ ID NO: 37160 - DNA, 213 bp, Heterodera glycines
cgcagcgcgcgcaactgggcctggcggcgcagcgaggacgtgccgacacgcgcaccgatcggcaacgcctccagcgaggcatacaggttggagacgaaaccatcggccggatcgtggcgggtcagcatcgccggcaacgcaaacggcgcgtccagctccatcggtacgtccttcagcgaatgcacggcacaatcggcctcaccgcgcagcatg

SEQ ID NO: 37161 - DNA, 934 bp, Heterodera glycines
  unsure (1)..(934): unsure at all n locations
attgtaaataataattttaaaaagcatgaaataattatttatgtaaccttttagaatgtttttttaaattttatcattatggtgtatgcagctttgtaactacattgaccaacgaaatttaattttcgtttaatgatttcttttagtgaaaaaaatcttatctataaaaatgatgtaagatttattataacttttaatattttttcgtaatatatttgtcattttaaactgtttaaagcaaattttagctcgtttcccgcttagcttcaactaacttttctcaagtttaaatgaacaaaattttttgaaaaaactactaattggaaagcattactcagagcaaattacataattggttaaaacaaatcaatataacaggataaaaaaaacccattagtaaagttataattcacaatttttacgtaacatattatttttaattttttataaacatttatctattaataaatttttattattttatttttaatgattaatttatgtttggaaaattaaaacaagtgtgaaaacttgcagcggcgatgtgactctgacacaaattataaaattacgaaaacattgaaacgaattaaaagaatatcaaattaattataactaatttctttaaagtattttataaaaataaaatataattcattaagagctaaatataaattactttaaatttacataatctaaattgaagagggctgagtctgtctcactgaataataaattcaaaaattattcaaaaaatttacataacaaattaataatttctgttgctgttcgggttgttccgccttcgtggacacaaaatttttgtgctgcgtgataaaatactaaactaaaaaattgaatgtaaaaatgttatcttanacgacaaaataaactaaaaattgttatattccanataatannatatatttactta

SEQ ID NO: 37162 - DNA, 1751 bp, Heterodera glycines
  unsure (1)..(1751): unsure at all n locations
cccccccccccccccccccccccccccccccccccccccccccccccacccccccacccgccggcggagagagggagaggggggggggggggagggagggagggggaggcgggggggggggggggtggttttttttttataataaaaaaaaaaaaaataaaaaaataaaaaaataaaaaaagccccccccgccccccccctcccacacaaaaaaaaacaaaaacaaaaaaaaaaaaataaaataaaaaaaaaaaaaaacaccaccccacccctccccccccctcccctctccttctnttcttttttttcttcttttttcttttctcttctctccctccttaaataaaaaaaaaaaaaaaaaaaaatataaaggggaggtggggggaggggaggtgggttgtgtctccccccccccccaaacacaaacaagaaaaaaaaaagaaaaagaaaaaaaaaaaaaacaaccccccctccctccccaaacaaaaaaaaaatatttttttttttttaaaaaaaaaaaaaaaaaaaaaaaaaaaaaaaaatttttttttttttttttttttggggggggggggggggggttttttttttttttttatttttttttttggtaaaaaaaaaaataaatttttttttggggggggggccccttttttttttttttatttttatgttttaacaaaaaaaattttttatttaaaaaaggttttttttttttttttttatttggggggggggtggaaaccccaaaaaagtttttttaaatatttttttttcacccaaattttttttttcaaaaattttttttaaaaaatttttccccggggccatttttttttttttggcgttttccccggggccattttcccttaacccttttcctgcccgcaattttttaaaggtgctttaactgacctgaatatttttgcagagttaaaaccgtagggttatttttcatgttaatagggtcttggaattaatggaataagattaattccttaacctcggacttcttggacgagtcctcatcagtggtttcagtcaaatcaattcnttcaaggagtctataatcaaaaattttaaatgtaaagcttaaaccattttgtcatcnaaatttnacttacgatcttagttcacnttcatataaattacgtcgccaccttcttgcgttttcttttttccaataatctttttttcacntctaaagagataaaaaaattaattaatatttagaaagcgtttagcgaatcatatattattgcatntaaacaagattttgaaccgaatcgaaaatatggaaaatggacctttacagaagctttaaaaggccaatacatttttctgaaaatttgttggatttcgaataaaataattaaaattcactgaatattgaataaaatcattaaccggaatagtttgaatttttttttaattttgaagttcaatagcgcctataattttcaaaataaagcctaagcacagacctagcccaaaaaatttagctagagttgaacggatacatttacattttagattcattatttttgtgatacaagaaaaattttagaacaaatgtgaattgtttctaaatggcgcctcgtggcgatcacaattttagagaagcctcattttaccaaataaaatttttgtttttaaccacacgcaaaataaacaaattattacctgctcggttttgtctttgatttctgaatgttgaagtcgagcaaccactgcacattttctttctgtaa

SEQ ID NO: 37163 - DNA, 624 bp, Heterodera glycines
aattttaatttttgcaaagttttggcgttctgattcctaaataaataatttacttatttgcactgggagcccaaaattgaatcgccgtgttgagtattgagaaaaaaaataggcgctattattaaattaataaagttatggatttttaattttattaaaaaccaaagggagctaaaattatttgtgatatacctataggtataccgtatttcctgtaatataacctccggaggttctatttttcaacccccctcaaaagggggggttgtaattcaggggggggggtactaattcagggggggggggttatattacaggatatacggtacctatctcattagttttgatgtcttataaaatgagaaactgatttttgattttttgttacttaattacaatttttaattttatggagcaaaaagatgaaataatcttttaagactcttagtggtaaacgagaatttgtatattagttcttttagactgtctgattcatagttaatttcaaaaaattccaacattgatcaagtcttgatgacgatgaaaataattctgaaaaataccctttttctatttttgagccaaagtattttcttttgcaaaatgtcaggtcacttacacaat

SEQ ID NO: 37164 - DNA, 1170 bp, Heterodera glycines
  unsure (1)..(1170): unsure at all n locations
tgtgcaacaaccgcatcatgtcttctcgactgagcaacctgaccaaccatgtgcgccgtcacgcctcgttgaagcagtaccggtgctgccattgccaatattcgcacaatgaaatggccaaagtccgctgaccgattaatttacccacaaatccttctccatctcctcattcattaaggtgcgtctgcacatgtcccacaaccatcaggacttcaccagtcagccgatggacatgctcagttttgagatgcaactccaatggggtcttttgatggagcagtgttttcccgagcattccaaagtgaacactgtccattaaatgctaccaaattgaatatctcacttttctttcattagcgtttcggcccctccgccgcaaattcgcagtttcgcaatttggaagagttacagaaatatgtggacatggaggtcgaattgacaagacaatccgtcacaccactcgcacttgtccatttagcactcctacacatgcattgaatgtggcgaagtgttgacgggctatcagctggtcacccacttggaggatgtccaccgtcaagagtgtgtgccatttgcgtgtggccaatgcggttaccaggcgagcaagcacaaatgccagcagcagacagcccacccacattcaccttttcattcacagagctcgtcccaatggaaagttcgactgcacatcagcgtaaaacacccggagagagcggcagagataacggtggccactctacccgcgggaagcaatttcatgctctttttgcagaagttttttgccgaggtgttttttctaatccgaaatgccaacggatcaatcaaatccatttgatttcaggtgcatatccctgtggaagaggatgaagccaaattggttgctgaactccaagaaaagaattcgaatcgtttgttggccgcaatgaattcactcaatgaggaaacggatggcattggaaacgaagaagaatgtgaggagagtgacgaagagaaagagggaaaatacgaaggaagcgagcgaagagaagcaacggcatcacaatcaccagcagagaatccaaaaggagaggagaaagaacgggtggagggcaatgaagaagagaacgaggaagaagtggagggagagggaatggagtgccaaaaaggaagggngaaaggacacgacggact

SEQ ID NO: 37165 - DNA, 1044 bp, Heterodera glycines
  unsure (1)..(1044): unsure at all n locations
atatgtgaactgcaggaggagcacacgcaagaagtccaacgcattccgggaaacctntaaaagcaaaaagaatggaattataagtcaaaaattacaaataccacgtgtcttcaacgtaagatttgccggcaaatttcagatcggctccatttactgtgatcagattaaatttctcggctataaatttttttttaaacatttaaatttattttaaataaaacttacgaacactattcttgaacacttgaacaacggtctcaaccccaagcacagtcatgttccaatgttcaaatgcctttgggctgaccacattttttaaggccgatgccgttgtgaccgaatgcccacaatttctgcataataaatcagcactgacgaaacgaaatgctgaaaaaaagcaattaaaaacaggattttatgtttttaataggtactaaccttgtacaacaaacaaaacaagcaaaaacaaaaatagtgacgcatttgttttactttttattaacaaagacatttcgaaagtcagaaaacacttaataataaattaatttaaaattttgttttatttttattgtgtgtttttaaaagtgttttatcttaattttttagccaaaacctaaaacaacaaaaaaatggcactaaatgaatcggaaggaaccgttgtaaatggaaaactaagcgcaaaggaattattcacgcgatgcgtaaatgaaataatcgcccaattaattgttgcacaaaaagagggaagagatgtcaatctgaacaagctaaaatgcgaaattgcatccaaatacggaataaaaacgcagccgaaattagtcgacataattggggcggtgcctcctcagttcaaggcaattatcgaggaattaagagatgccaattaatcaaacattcattaggagttgctgctgcccaaactcaaagcaaagccggtccgaacagcttcaggaattgtaataattacttttaattggatgttcatttanatgcaattcatttttttctttttcaggtgattgttggcggttatgtgcaaacctc

SEQ ID NO: 37166 - DNA, 1452 bp, Heterodera glycines
  unsure (1)..(1452): unsure at all n locations
ccaaggccaagaaagtggaatgggggggtttgttttctccgggtttgtttgtcgtttttttttaaacgaagagaagccttttgttaaggggaggaagttttactttttcgaatcaattaggttttttttgcttctggaacatcatttaaattttgctgtgcttttcgttttctgttaactggagggtgtatggggatagccggtggggggctggttgaaatggttttcctgtgaacttctgctggaatttttcttctcttcgccatgagactggcggcagttttctcctttgtcttttagctattttagaggaagaagccggctcatattgctgtatgagttgccgcttagctccctcttcccatgaggaatagtactcatttgctttccttttatgacccctatttacagcttggaagggtggagagtctggtagtaatggcatttcctcatcgtcgtggtaatggtgatgagaccggcgctgtctgcgaatttgtgaagcagggggttgtgatctttctggtcccaaattaaaaatttgttcgtcttcatcactctcatctccctttttgattagtgccttcaaccctttggtaatttctacttttgatggttgattttggtgttcatctctcaggtggagataacgagacaattcttggttataatgaatattttttgctgtcacattctccctctttctttttgttctttccaacccatgtttagcaaaatccaagtttatgtttcccgaatcactgctttttaagccatgataaatttcttcgggtacgagaacaaactttgaagccatgataaaatgatcaattgtcgctctttgagcttgaatttatagcagagcgtgccaaatcaataagaattggagtgagcagagctgcaaaaactcctccgagcccacttccggtttgaactaggaccttccgtgcccctctttcggtcctacgacgagcaagacttcgaacaaaatttgcgtaaggtagcaaacgctttctttggcgagttgttaatttaaagtgtgaacaaagaatatttaaagctatttcaattagtgttaacaattgatcggcatttgcacgttttaaaatttgcctcctttttttcatcgatttggttttggcgagtacacgaataaaatcaaaatttttatgtacaatttctccaattttacaaaaggccattttttggaatgaaaatgatcttttttccttcttcttcgtcgtctttaaatatgccgctccttaatcgcagcagggnggtttgaagcagcgtgcatatcaacaaggagatagccatacagtttattagtcgcaatccgataggcagaaagaaataatccagttttcccggaaaaagtgcactccaatgttccgaatcgccagcgcggaattcggagctcgcattaataccaaatattgcgcattctgtctcgca

SEQ ID NO: 37167 - DNA, 924 bp, Heterodera glycines
  unsure (1)..(924): unsure at all n locations
attcatcctttttacgaggcaatggaaggacctcacgcctgctgatgaacttcatcatgctgcgccgtggacatcatgcccgagaaaaaacgtgatgaatattacaagtggctggaggagcttcaaacaacaacaacattgagccattcataaagttcatcagcttccaccagcaatatgctcaagacctggagcccgcgccctccctccgctcctcttcctccgcttcaatcactaacacatattgtattattcttatgtatatattgtacaaaaaattcattaacggttgttaatttgaatgtgtatttatgtatgtaaggttagaaatttgtgaaaattagtattcagtagtctcaataaaattaacttgttaacgataatggtatcacttttccgattttaaaaaacctaagcacaaattttgaataacccatgaaatttgcattatttccttcacaaccttcgatccaaccttccttaactcttacaatcagcatcattaaattggtgcacaccagggatggaattccgaggcccaaaaaattttcggaagtcggaattccgtgccatccctggtgcacaccatttgaagaaacatgtaaattgaaaaggaatttaaaaaaatgaaaaaaacaccgatttgcttgtaaaaaataataaaaaagtaaaaacagaattgtgttagaaatgtttacattactttaattgaaatttaattaataaataaaattccaacttttattttactttcatttttaaacagtctaaaaacccattaacaaaaaattaagagattgtcaatttattaaaacaataaaaattctcaaaaaaatttttggcattgaatcttttggaattttanaataataggcagtttaacgaaaatattttttgcccattaaataaaaaatactcaatcat

SEQ ID NO: 37168 - DNA, 799 bp, Heterodera glycines
ttatgggggagcaaaaatccaacgcagaattaaagcacaggctatagggaagctattccggaaggattcggtctccccataaatctgggcgcatcggttcggggggactgccccgaaaacaaaaaaaatcgattttttcaagtgtccctttggggtactcaaacaattatggggagcaaaaatccaacgcagaattaaagtacaggctatagggaagctattccggaaggattcggtctccccataaatctgggcgcatcggttcggggggactgccccgaaaacaaaaaaatcgattttttcaagtgtccgtttggggtactcaaacaattatggggagcaaaaatccaacgcagaattaaagtacaggctatagggaagctattcccgaaggattcggtctccccataaatctgggcgcatcggttcggggggactgccccgaaaacaaaaaaaatctattttttcaagtggccgtttgggggactcaaacaattatggggagcaaaaatccaacgcaaaattaaaggacaggctatagggaagctattcccgaaggattcggtctccccataaatctgggcgcatcggttcggggggactgccccgaaaaaaaaaaaaaacaaattttttcaaggggccgtttggggaactcaaacaattatggggaggaaaaatccaacgcaaaattaaagtacaggctatagggaagctattcccgaaggatttggcctcccccctaaaactggggggaatcggttcggggggactgccccgaaaaaaaaaaaaacaatttttt

SEQ ID NO: 37169 - DNA, 694 bp, Heterodera glycines
ctttgtgcgttcgaatgatccctaaagatagggtttgttcgaacatgaacaaacttaggttttatcaattgattggactcaaaaaatgcgattggacttgtatattttaaggcatacctattttatgtttcttcagctacattgaccattccgtgatcgcatttctgcgttccaacatggaaatttttgaaagaagcggcaccaaattggatttgaatctgttttcatgcacaactaaggatgaccaacagctttgggaacaattctcactgaacttgaccaattgaattcaatcgattctgacaatatgttccccgctgtgatcgctgatgattatgggccggatgcaactgctggccaggcgttgtccaagtggttacacactccgacgagaaaagatggccaaccgaaacggctgttttgcaaagattttgacgatgaagtaaacttagattgggtcaacagtttcaagaaggcatgtgtggtcatattctcataaagttgggttaatctatctatggtacccctttttgggtaatccttcggaattggtgtcccgacgcaaaaaaatatatataaaaattttcttacaaaatcactttttctaggctaaaaaaatgcactagctcggattttgcacaatcattgattctgtccatgattttttcatcaagtactttgtgaaaattttttt

SEQ ID NO: 37170 - DNA, 1031 bp, Heterodera glycines
catttatattatatattttttgtaatctgatcaattgtcttggcattttttcgaaagaattataaacaaaataaaatttgtttgaaaatcagaaaaacaactaggtttctccattataccatatgatgctctacttatggtggtgtgatgaaaaaaacaaaatttggccaatttattcactgtttttcatgacaaattctgctgatggacttccgcccgactatattcaattaaaaatgatcttttaagggtaaattatttgtttatttgtttttattttttgattttccacgtcaaaaagacgaaatatccatccattccctgaacaaattcattcaattcatttgcccatcccatcagctttatgtcacttccacctaattattaagtattattaactattcccatttctcccgcccccacaaaaatattgggtccctttttaagagtgggagggtgaaaatcggcaaattggcggcaaaaacagaaacaaaattttgttttggcaaattttcccctcaattttggtcgtcggaattggcaaagcagggggggggcatctcatctcatctcaatcacaactttccccggctccctcttcaatttatctccgaattttgcccacgttttgcgtttgtcgcttttcccgtaggcattttttgctttgttttagttttttgttcccaatctccggcatttttttaccgcaggggacaaatgccgacaaagcaatgtaaaataggggggggggggggggaagagattcgccttaagcgttgggacaaaattactgaacccaaattccgctgccctccgagtgcccggaggggaaacaaaaaagggtaattttaattgaggaataaatatatcgtaatttgggcaaattactataccaatgattccaatcctaaatttttctataatggacaaaatcttattttgtttattactacgcatatcaacggatatccgaccagcagataaatatttaccgaaaaaagtagcatttttttgctggataatgatcgcta

SEQ ID NO: 37171 - DNA, 1093 bp, Heterodera glycines
tgctcttgctctccactttctgttgctgttgtgttcctctctttcgccgtctcgtcaccccgccgtcctctcgtttcgccacagtctctccccgctgctctgcttgtctgatcacaacaatttgctgcttcaccaccggtggcaccccattattattattcttcttcccgccattagcagcaggcacttttttctgctgttgtccattattacgagcagtgttcgcacgaagtgccggcacatttcgttcgtccgccttggcacgctcatagagagaaatcaactgaaaattaattaattaagtgattaaaactaattattttcaatcaaattatgagatagaaaaagttaatgaaagggtttttttaaaaactgttacccgcccactcacttgaaaaaatccttgaatatttaaagaaattgagggaagattttaaaaattttgtaaaaatttaaagagaaaaaaaatttctattaaaaattatttgtcgatatttttaaaaattaaaccttttaaaaaaaagaaatttttctttatcaaattctaattttttctatgaaattcttattggtcaaaattttttttatgaagtttcaaaaaaatttatttttcatttttatagtattttcttaattctttaaagatttttcaaatttttaagaatttttcaagtgagaggagtgggatggaagttttaagaaactcggaaagcacgaaaactatgaaaaatgcaaataatgtgatcaatttaattgaagccagcccttaaacaaagccaaaaacgcacataatcaagccgaagttcgagctgattcagcgaataaaagttggcaacgtcatccgctgaccatttacccccgagcgatgcggcgatcgcttcgaaattttttccttccgccacaaacgcttaattttggaaaaaatatgaaaatttcacaattaaatgctggtcttggtaagatcaaaatcttggattatggcaagaccaaacaatctgaattttgcccaagtttttaggccttttgaataggttcggtcggattgttttttgaacgcttttgagttgggagcaggacaaaacggcgccacaat

SEQ ID NO: 37172 - DNA, 1498 bp, Heterodera glycines
tcatagacattgagtttattaaagccccttccaataaaaaacaaatagtaaaatcggaacaaaacccgttctaatcccttttaaatattcttaatagccccaaaggaatattaagacccgagaaatatatagaataaattcgaaaataactaaagaaaatatgagtaattattattgatacataagtacacacaaaaatgctagtgaattttttattttagtaattggaaataattaaataaaaacattgcttaaacagaaatgacaaaataaaatttatttttatgaaaataactgtaaaaaacgaaagttcactcatccttatttttatcctaaaaccagaggaacttgaatttttttcaacttattatcattaaacagaatgtgctaattatgatataatacaaattcagcaaaaatataaatataaaaataaaattacattacatttataataataactgtatctttgtagaaacaaatatttgaccagaaaaaaataaaataccaattaataaaaataaagtgcagagagttatatggtttcttgaacaattcaacagaaatattttcattatatcatttgaaattaaatgctccaaatattaatggccttaaaatagaaaaaattaagaatattttgtaaataatgaaaaaaatcatttttttgaaaaattaacagcataaaatgttataaaacaaaaaagaaaataataaaaccacagcatgtttgagattctgatgatcattggctgaccaagatgaactgaaagaatatgttaattagttagaaaagatttttttattaaatcatgttaatgacattttttaagtaattggtgatatatccaaataaaataaaatttattttaaattttatgactcgaatactaaatttactaaaaataaaaaataatctaagagagggggtccgcgccgacggacggcggaatggtggggaggggtccgtcgaagagagggggtccggacatttgctgaattggaaggaagagagaaactagaaggaagaaccaaaaatagaattttttagtaattttttaagataaaggctttttacaatcccagagagaaattccaaagattttcatttttatacttgagatggaagcgaaccctagaccttttttgttcaacagcaatcggcttatcacccaaaccattcccttttgttctctatgcctcggctttaacgcagataatccgtccactggcccaatccttacaatattttagttttcttttaattttcgtgggattcaattactgccgacaatgcgagagaattttaaccagtccgaaatttgcaacaccaattaataaaagatcctagaaattgcctgcgatatctccacccatccattgccccggtccgccatttgaactgttttcaggcatagctataaatgaaaaaaaaatccgaatttctccaaatttctattataaatttaataaaaattggctcaaattccaattaaaa

SEQ ID NO: 37173 - DNA, 1324 bp, Heterodera glycines
cctacacaaatttctttcatcttttctgtctcctttttagcttcgaagagttggcccatctgagcggccttcccattgaccaagtgttgcaaatcgtccgccactatttgctgtgggcccgtgccatgctcatctacccaatttgcaccacaaatgtgtacgccaacgcaccgcaacagccgcacaatttcagaacgtacttcggaaccaattaattagccactattattatttataatcgaggataatttttgtcgaaatttgacccaataatctcggacatttttgttctcgaccatttcgagaatttctcgagacgtttttaggtttttggtaaatttattacaaacatcaccaacatagaatattctattgatgtcatttagtacagttttgacgccatttttagtttggaggcacagtttggtgaccgtttcggctccgattgctgtcccatggccgatgtgttggaggcgttctcgcccccgtgctcgcttggcacctttcttcaggacatgaccatctacgcgggatgtccctctctgcacatgtgtaattaaaacccgataattcgacatgtcgcaaaattattgcttttaaaactcattgcactcaaaaaattgtcaaatttcactgggttttcccactaattttcaaatttccagctttaatggtgtttctgctgcgcaatcagttgctggtccaactgcacaccttcttcttcctgctgccccttccatccaatgacgccaacgacaattgcaaagccaaccagcaacagcagcaacacaaccacagtcaaagggaacgggggaggagggacagcggagcctcaaatgatgatgccaaagaaggcgaggaggggggagaggaggacggtacagaaacagcagcagaacaaccacaacagcaatgggttgggccgccaccgccccccgcggcggagttgggactgtcgccagaggtgggagtaggcaaatttatactattttggtcaatcaatttccctcaagacatgctcgttggtccacgattcgcgtgagttcattcccgtggcgctgaagtcgcacattctgaccatttgcgcgcgcgccgtacatttggtcggtgtgccggagtcggaggtgttcgacatgctcgccgcatttatgaccattgtgccattcatggacggacgccatcacttagagggtcagtcagtcgaaattggtgtctctctgcttttattccatttttgtttgtcgttgttttttaattgtaatgtggacacattccaaattgtgtcactcatccaataacttcagacattatgtaccgcactcag

SEQ ID NO: 37174 - DNA, 704 bp, Heterodera glycines
ggcataatgccacagcattggttgagcatttttcgcgctggctttttaggcaacaaaatgattcacaccggtgtccatctcgggacaattgaaatatttcggtcaatcaattcaagaatttatgaagtacaacaaatgatcgttgactgtgtgagtaaccaatgcgctgatcagcctgacaattgccaagagatggtcaaggtggcaaaagcacagctgagtgtccgtctgctgatcacaatggccaaatacattgtcgaaaatagagttttgtaccaaatttacaacaatccgttacaaaaagcccggctttgccaatggtggtaccgattcaggtaaaaatgtcatcaaaaaacaaataattcttgtcctagctttgctttaaagtcgcagtttacggtagttgacaatatttgttttgattagttcaatttctgatcaaaacataaatatcacagatactccgttgctgagtcggccattaaatttgttgacattggcacttcaagtcaaattcgtcttggcattttgcaatattatttgtacacacagtcaaaattgaaggcattaattgcccaatttgacagtaaaaatgcatatttggctactgtactgtcaacattggacagtaattcggcatttttgaactttcgaatgaacacaaccgatgcagagcaagccgagtttattccatcatatgaatt

SEQ ID NO: 37175 - DNA, 986 bp, Heterodera glycines
agtcaatctggaaattgaaagaagcagttactaaaaacaaccttttgattgaaactgtaaacagaataagagctgatccctcaacagtgacgaatgaagtacaaaaagattaatttaaatgtttaaattaattatttaaacattcctatttttactcttcttttttacaacattttctatatattttttgtttttcttatgtagttctttcccgagagtgtgttatatatgcattcggatgtgatcatggaatggaaagtgcgcaaagaatttgtagaagtggtggccaatgcgatgcgaaattacgcggccataagccaagcgatggactcggaagagatttccacgtattttaaagtgagtgctcttaacactcaaagcaattagcaaccgttcgtttatcacccggcaattaaactcaatttgagcatttcttgagaaaattgcacagttttgaataatttttggcattttcgcacaattttagcgtttgttttacacattttttaaatttttaagtatttataaacccgttctgtgtttatttatcacttaatcttttcgcttggtgaattttaagcgcattgaaaattaaaaggaaccttaaaattcaaatcaattaaaaaaacaaatattttttacaattgctttaaattaaaagcagcaaattttgtgtttcagatttggatttttccgtggaagtaaacaattgaacccggaaatttcaaatttgcgttcctatccccctgcgggagtggaactcaacattttttgcgggacgggatcccgcgggattaaccctacaaattcccgctttttccagatggaattgtgtgattttgaaattcgaattttgactttaaataataaaaaaaattctctaaaaaaataaatataaccaattttcaacctttttttgccaaaagaagtgcacaaaaggtaaaatcaagaatagaatcctgaaaagatttaaataaaattcttat

SEQ ID NO: 37176 - DNA, 829 bp, Heterodera glycines
ggggagcaaaaatccaacgcagaattaatgcactggctatagggaagctattcccgaaggattcggtctccccataaatctgggcgcatcggttcggggggactgccccgaaaacaaaaaaaatcgattttttcaagtgtccgtttggggtactcaaacaattatggggagcaaaaatccaacgcagaattaaagtacaggctatagggaagctattccggaaggattcggtctccccataaatctgggcgcatcggttcggggggactgccccgaaaacaaaaaaatcgattttttcaagtgtccgtttggggtactcaaacaattatggggagcaaaaatccaacgcagaattaaagtacaggctatagggaagctactcccgaaggattcggtctccccataaatatgggcgcatcggttcggggggactgccccgaaaacaaaaaaatcgattttttcaagtgtccgtttggggtactcaaacaattatggggagcaaaaatccaacgcagaattaaagtacaggctatagggaagctactcccgaaggattcggtctccccataaatatgggcgcatcggttcggggggactgccccgaaaacaaaaaaatcgattttttcaagtgtccgtttggggtactcaaacaattatggggagcaaaaatccaacgcagaattaaagtacaggctatagggaagctattccggaaggattcggtctccccataaatctgggcgcatcggttccggggggactgccccgaaaacaaaaaaaatcaattttttcaaggggccgtttgggggactcaaaaaaattatgggga

SEQ ID NO: 37177 - DNA, 1041 bp, Heterodera glycines
  unsure (1)..(1041): unsure at all n locations
ggggaaaagtaagatgatactgatgattagcgttcttgttcgattttgcagctagtgcgatatttatactcatgtttctaggaaagtactcaggaagtatttcgatgttagtaaaccatcagctgatataaaganaagcattgttgtctgtccttttccaattatattgccatttcggcatcggtctaacaaagctgcgcatggctttgggaaattcctcaggaattaattttcgttgtctaaagaaatgcgctagtgtcgggcattttgacattaaaaagccattaaggcaccgttgtagcaatgatgcacgtggtccttggaaattcctcaggaattaatccctgaatttcttctattttcttatcactcacaaatcactgggggaaaattaagatgatactgatgattagcgttcttgttcgattttggcgctagtgcgatatttattctcatggttcttggaaagtactcaggaagtatttcgatttttgtaaaccatcagctgatataaagaaaagcattgttgtctgtccttttccaattatattgccatttcggcatcggtctaacaaagctgcgcatggctttgggaaattcctcaggaattaattttcgttgtctaaagaaatgcgctagtgtcgggcattttgacattaaaatgccattaaggcaccgttgtagcaatgatgcacgtggtccttggaaattcctctggaattaatccctgaatttcttctattttcttatcactcacaaatcactgggggaaaattaagatgatactgatgattagcgttcttgttcgattttggcgctagtgcgatatttattctcatggttcttggaaagtactcaggaagtatttcgatttttgtaaataaaccatcagctgatataaagaaaagcattcttgtctgtccttttccaattatattgccatttcggcatcggtctaacaaaactgcgcatggctttgggaaattcctcaggaattaattttcgttgtcttaaaaaaatgcgctaagtgtcgggcatttt

SEQ ID NO: 37178 - DNA, 1123 bp, Heterodera glycines
  unsure (1)..(1123): unsure at all n locations
gccgtgnacatttggggatttactattatttggacctacagccacactcaaaagtatntggagcaaaaataattttttttaaatccgactttctcaaagcctttgcttacactttcactgttgcaaacttttttcttttagtgaaatggttgtcgaaattggagacaaataacttttttaaattaaaatcctaaaaagttaggtattttagcgaatattcttcaaaaaattgccatttttgttgggttttttaaaaagtagagcccccctgaaataaaatcaatttcctgtgcgttttttatatacattacaaaataatgataaaacaaagtttttatgaatttgtgagcaaaaatttaaattgtaaaatccaacatttagttcataatctaaacgaatcaatcaacaaattcattctgctggttctgatcactgatcaccactcgtcccgggggaacggtcgagaagactgaaaaccaaaacaaaaaataaacatcggatttaaaaagggggaggggtgcattttacaggaatttgttgccagaaaatttgtcattggcgcctccgggaaaatttgggtgtgatttgttaagagaattgctgaattttaaaattttaaaaaaatttacccatttttgcttgaatttttttcgcatttcaggcggaggggctttagccccctcagtccccccccccctcccctggctacgcccttgctacaaatccaatttttacgtgattttaatgcttctaaatccgatgattttgttggcaatggattttgtgggattggcaaagcttttccatcagaattggtaattttcatttcctttgtgccattctctctaattcgtcctttaatttgaatttgattctccaacgcccatcgtcgcgttttgaagtgttcgtccacgcggcggtcaaatcggcggctgatcagtgcaatatcaaggccaagctgagagggcggcaacaaatcgaacactttgagccaacagtcggcagagatgaagctgaaagcagataatgatgatgatcatggcaattcagaatttaaatagttaattgtttacatcgctttttccatttgtttctccgattccttcggattgtccgacatttt

SEQ ID NO: 37179 - DNA, 1263 bp, Heterodera glycines
ccctcgcggcgacgacgaaaatggcattaaaaatgccacatatgaaaatggtgtcaccaccacctccacggcttccacgactgccggagagttgcgccaactttggcatcaattctatgccgaaactgccatgttgccgaacttcaccagccccggggcgcccattggtgacgcgacagccgcgcgttgtgtcgcggaatttcgcccaaccgaggcggtggggccggcggacggcacggtgtacccggccgaagaagtggtgtccaaatggcactcattgcgcttcccgagggtgggcagcggtggacgaagctacgcatttattggtgtgtgtttgttttggcccattccgaatcccggactcgaattcgaacaaaaagtcgaaaattcgttttttaaaagaattttcgtctaaaatcaaattaaaaccagcaaaaaatagtcaaaatggggtcgtatctgggaaaaagcactcggagagcttcttttgttaaattttaatgaaatacggtaaaaaatgtgcaaaaatttcgaaaaatttgtcccttatggccattcaaattttttaggctctttgtctaacattgaacgcgctttgttggactattccttggactttttgtatgaacggcttcaacatgatgagcaaggggttgccagtgtggaattggtcgatgttgacgacattcttccggcatgttttattttgtttttattttgcctctcattttttgtccattccaagcccatacccccaggggtcccgaaatgaaaaatgaaatttttttcctgaaaaactggtaatttaaaaaaaacatattggtaaattgaccctaagttttctaaattttttcccacggcgcctaactccatctccggatccctattttcccataatttttccaaaattaagtcttaaaatggcctagattgtcccgtttttttctactgcgccgaaatttaggtcaaacaaacacaatgagtaaaaaaattttttcccggagagcaaaaacaaaaaaaatttctttggttgtccctccaaatttttgttttctggttacaggcctggtcattcctcaattttatactcattttttccgtagttgtccaccacgcgggcttgcggagtccaacagggcggctacgccattcccccgtcctccatgcagtaccgggtgtttcgagcggatcagctcccgaattgacgacccgccctcatacacccccacaaatttgcaagttttattttatttatttttaatt

SEQ ID NO: 37180 - DNA, 745 bp, Heterodera glycines
ttcttgggattttcccttgtaaaaatggaagagccgatctcgagttaaaaacttaagtttcacaaaataaacttggaatcgttagagggggtcaaaatatgggcctatgcaaaatttcaagaaaattggtcaataggaaaaattttttttcaaggacaacaaaatcaaatttatttgcaacatttttagcattaaaaatggtatctacacgtaataaaactggaaaatttatgaagctaagcaattctgggactgaagcaaatcgaaagcgaaaggaatggcgccaggagcgtgctcgaaaaggcggctcgacgccaaaaagtgacgaaaattgaccaaaattaattttatttgaaaacactgcatttttcagcgctaaagcagaccgaagccgaggcaacagcagacggagagggtacatcgacccaagccgcagaaagtggaccatcaacgtcagctttggaccttcgtaagtcaaaaaagtcactattttagaagcaaaaattaaattaaggccctcgttcaagccctaggccattgtcagcaactccgatcaggcgccatgtgggtgtccgtccaaaaactaccgacaaagcaacgaacatggaccttacaactaccgacaatgcaacaaacacggatttgacaacgatggacaaagcaacggacgtgaatttggctgatgatgacgccgcgacacttaccgagcaattggacagacaggtgacggaggaggaacaaacga

SEQ ID NO: 37181 - DNA, 247 bp, Heterodera glycines
taataacgctgcggacatctacatttttgaattgaaaccatttggtaattactctttctttttctccatattgaccatcatactcatactccccccacccttttcttcttccgccacccacctctcttgatagtttaaactgaaggcgggaaacgacaatctgatccccatcaagctagcttctgcaggtcctgctcgagcggccgcccggggatcgatccccgatctagtaacatagatgacaccg

SEQ ID NO: 37182 - DNA, 982 bp, Heterodera glycines
agcttttattttcttttattttggaaaaaatcaagtacctgataaaaagtcccctacaaaatcaatgctaaacaattctacacaattgcctataaaacaaccttttcaaaatgttcaatttcatccatcgttttcatgccaacccaaccaatttgtgctgtttccgtatctatttacggaacattgataaataaaagatataaatttaaaatctccaaataaacaagaaaatatttcaacatatatcatcaattcatgggctgttttttccctcctccaccggtgccttttccgtctttttctcttctcccatcgtttccattttgagctgattgttgtccaattcctttaagctttcctccatcgcaatgagttcggcctaaacaaaatatttgtttgatttgatggtcgaaaatggaagattaagcggagagggaaacccaaaattgggtgcaaattgacagtacttcttgatactaacctctaaattttcggtcttttcattgtcagttccctccaacaattttggcgaatcgataatgttgatcagcggacaggcggtggccaatgccgggtccaacagcagcagggaagaatcatccgtaacggggtatggaacaacgccggcaagggcagagatgtctgaaaaagggggggggtgaaacttgggaaaaagaaaagatgttatagaacaaatgccataaattttatggcgtacggccttttatagtcggacaaattgtttaatgtaaggtcggataaactgcagtttagccgcctttcaattggaaaagcacgttgcaaaagcggtttaaaacccaaaaaaaagtcgtcgatttaaaaagacgaacccttatttgttagcaaatttccggttgaaccccccccctcccctcccctcccgcaccctttttcatgtactaaattcgattgacctctctgctcctcgtcagtgtgttcttgcgactgtttgtgctgctgc

SEQ ID NO: 37183 - DNA, 679 bp, Heterodera glycines
  unsure (1)..(679): unsure at all n locations
atgaagatgcatttcgatggggggggggcagcggacttttaatatttggggaggagataaaaagaggggggctggggccatgctggacaagacaaaatctcgacaaatcccgactctctcagatataaaatgggacaaaatattgatcagcagaccaaatccctaaagttgaatggaatgtcgagttaataatggacaggtggaggaagagataatgaagcttagacgaacattgatccgagatccgaggtgaggggatgcgaaaaggaagagaaaaattccgtttaatatgagagcgacgggaggggagagagagagagagaaaaggggtgagggatggacatcacaaaacgaatgacggagtgggggggggggcgaaggaggattggaaaatggggacaaaagtgggaatgattagcagctagcagcagcaagaaaggtgattgggagggcggaggggagggctataggaaccgaatggatgctaggggagacgggtaggggtcagagcgggcagcaggggcaggaaatgcagattcatataggggatgggggtgggggacattgggaatcggaaaaacgaatcgaatgaatgctggggttggaaaatggggnggggggaggcatgggtagggagatggggggaggaatagggggatggaaaaatgtagattttcaa

SEQ ID NO: 37184 - DNA, 1220 bp, Heterodera glycines
  unsure (1)..(1220): unsure at all n locations
ttctcctgtcgtttatcagcaaaccaaaatcgggccgctttgtttccgatggaattgtggaacatgtgagatcggtaaaataaccaaataataagtaaatgaattttgtaaatgatagggtggaaggcgacctctacagaaccaataacagtgttgaagcttggcacagaaatctgaacgcgttattccgttcaccatcgccacgtctaagcatttttcttcggaaagttcggcaagaagaaagccattggcgtcagcaagttaaagactttgcaaacaacccagcaaatggaatacgtggcaagggaatgaaacgcaagcaaacttatgtggaccaagacatgaatcttaatgagttatacgtcacgcgaaacaatcgccatcctctgcaatattagcgcaatttcccaccgaatggcagaacctctttaggacaaaaatcaatgatttttcatgtttatagtttttaaaacgtaactaagaacctctttaggaataataattgatttatttttcatttttaaaattaaaaataatttttaaaaatttaattttggtgtcgtattttccgggtgtcgcattttctgtttttttataaaaaaatttacggtgtcgcattttccgccggtgtcggattttccggtgtcgcattttcagggagccattcgtgtgggggtagagcgaacgaacgtcgtaatatttcatccaccacccctccggcaccttttatttattgcatttattttgtttacttaaaaaatttattctacctaataaaattgctgggtttttctctaattctattgatcataacggttgactttgtgcttttagattttagatatattgagaatgctattttatttattttatttttggtatatattatgaaaattttttggaaaaataaatatgaatgaagattataattgtgaaaataaattcaactatattattatttaagaattaaaattaatttaaaaaatttaaatgttaaaaactttttaacttctctcataagcatcaattagatggtgttgagtccgttatcaaatggaaatttcaacaaaaaactgtccataacttttgtcaatatcaaccaaattagacatttttggtatcattgtatagcaataagtgttctctacaagttcatcaaaatttcaaaaaatttggtcaagttttacaaagttatagccanaaagtacgaaagttaccaa

SEQ ID NO: 37185 - DNA, 691 bp, Heterodera glycines
atagaaaattgtcctaaaaagagatagccctttttttgagaattaattcccaattttcgccactcttgcggtaatggaaaaaattttgaagaggctttgcggaacggattagcatcggggttacgagatagaaaattgtcctaaaaagagatagtcatttttctgagaaataattcacaatttccgcagctcttagggtaatggaaaaaattttgaagaggctctgcggaacggattagcatcggggttacgagatagaaaattgtcctaaaaagagatagccatttttttgagaattaattcacaatttccgcagctcttgcggtaatggaaaaaattttgaagaggctctgcggaacggattagcatcggggttacgagatagaaaattgtcctaaaaagagatagccatttttttgagaattaattcacaatttccgcaactcttgcggtaatggaaaaaattttgaagaggctctgcggaacggattagcatcggggttacgagatagaaaattgtcctaaaaagagatagccatttttaagagaattaattcccaatttccgcatctcttgcggtaatggaaaaaattttgaagaggctctgcggaacggattagcatcggggttgcgagatagaaaattgtcctaaaaagaaaaggagccattcttctgagaattaatccgcaat

SEQ ID NO: 37186 - DNA, 216 bp, Heterodera glycines
ccgatgatgcattacatccccggcggcgcagcggccaagccgttcaccacccaccacaacgcgctggacctggacctgtacctgcgcgtggcgcccgagctgtacctcaagcgcctgaccgtcggtggcctggagcgcgtgtacgagatcaaccgcaacttccgcaacgaaggtgtcagtacccggcacaacccggagttcaccatgatggaactg

SEQ ID NO: 37187 - DNA, 189 bp, Heterodera glycines
cgacctgcgcttacgatactgtcgccttctccttcggagcgtgcgcttctctactcacgctgagtatctcagtcggtgaagtcgtcgctcagctggctggtgacgacccccgtcagccgacgctggctattcgtactatcgctgagtcaccgtaaacacactatcgcactgcacagcactgtacagata

SEQ ID NO: 37188 - DNA, 166 bp, Heterodera glycines
catcgccataggcatcgcgcggttgggcgcgcacgcccggccgattactcgtgtacatgagccggcgcgacgcatcaggtggcaattgccgcggttctgccgcatccgccagccggagcagattgagcaccttgctcatccggtgcaaccgatgattgggatgcag

SEQ ID NO: 37189 - DNA, 324 bp, Heterodera glycines
atcgcgctcgatctgcgggtattcggcgctgcgcaggatctgcccgcgcaggcgcgcgaagctgtccagcgccggatcagccagggcgtccaccgcctcgtccagcgcggcatcggccgggatggcggcttccttcagcgcacgcgcgcgcaggaacgcatacggtgccgcccacgccgcgtccatgggcgcctcgcgcagtgctgcgcggccggtacgggcaatgcggctgcacagccccatcacctggtccagcgcctgtgccggccggagaacgcgcgcgttgcgggcggcctgcaggtgcaggtatgcttggacctgcat

SEQ ID NO: 37190 - DNA, 520 bp, Heterodera glycines
ttcctttttgcagaattttctcttttatctttaatctccttttaatttctttcaattttcgtttttttctacacgtttcttccaaggatttcgtcaaatgatttcagttggagttttttcttttctgattaaattagactaattagaattatttttaaacagaataagaggaataaattctttttttaagatattctcttttaatgttgataattttcttataaaaaagacaaattatttgtttttgattatccatggcagggatgacattcctaggccccaattattttcggaaatcggattccaaggcccaagattttttctgaaacataaattccgatcctatgtcggaaatcggaattccgtgccatcccaggccatttatttatttatattcgaaataaaactgcacaaaaacaaattttctaaattcaaacaaacggcaaaacattaaaacaattttctgagttattcgaaaaattttttttattgaaaacaaaaaagtacgaagcggttgggc

SEQ ID NO: 37191 - DNA, 714 bp, Heterodera glycines
ttagagctcggcctggacctggttccaggcctggatttttcctggctccaggtccatgccatttttctgcaacctgattttttcctggacctggatttttgtccaggaaattgacctgcgcttcaagaaaacgcgtgccatgcgcagagagttgaacaagcatgagctttcattgaagacacacaaacaggtgggccgccaaaaatcatagtttttgatttttgggaaataattggaccgatttatttgggtttagagtcctgtaatttttgaaaaaaacctaacaatgagccagggtcaagttttccgagatggacccggatataggactcttggtccactggcatttttcgtccgaataaagtgcccgatcttttgaaaaaatggaaatcccggtcccggttttgccagtcccggtcccggcgggactaaataagcactggtaagaatgggggtctgggtgagaaaagagaagggaattggtgagaaggggaaatctttgagaaaaaattaattatttattttatttattgccttgtttttcacatcgttatgtggtctagtggctaagccttctgattttcattatttttcgcttgggttcaattccccacttgaacagaatattttttatattttctttaccatttttgtaattgaaattttaattaataaataaaatattccaagtttatttttatttaatttttaaac

SEQ ID NO: 37192 - DNA, 142 bp, Heterodera glycines
gcttgatgcctgaggtccaccatctggcacagctgctttccggtaagctttactcttcattgcgcgaaggcgggaaaaaagttttctctggcgtgccgccaattaaagagccgctcaaacgcaccgaagaacatattaaagg

SEQ ID NO: 37193 - DNA, 421 bp, Heterodera glycines
gcttaacttcaactcaacgagctcctgccccgcacccccctttacccgtacccgatactgtgcgtctttgcgcagtgggagtatccagtgtttctccgctcctgaggcgctccagtgatggaggagtcccagcgcataaaaacctttatccagtatcgtcaacgagtgctccggtgtctgttcagccaactgtgcagcaaggtcaacctcactggtttccgagacgctgccgaagctcacgcctgtcagcaagtgactggtgacctccatctggcagaccatgcgaagctgcggccagtcggaacgcgcgtgctcattggcggtgcgtccgaaggctgcgtcattttcgggcgtatcgggcgttctccacaacgtgccatctacagccaggagtgtcaggccattccagtgcgataacggg

SEQ ID NO: 37194 - DNA, 964 bp, Heterodera glycines
atttctcagagaatttttaaatttatctatactgcaagaaattgactatctcttattttgagaaattttatacgttacaaatgctctcgagcttgataggaagggcggtgcgcaatcaccatttaatttctcagagaatttttaaatttatcttatatacaagaaaaatgtctatctcttattttgagaaattttatacgttacaaaagcgctcgagcgtgagagggagggcggtgcgcaatcgccatttaatttctcagagaatttttaaatttatcttatatccaagaaattgactatctcttattttgagaaattttatacgttacaaatgctctcgagcttgataggaagggcggtgcgcaatcgccatttaatttctcagagaatttttaaatttatcttatatccaagaaaaatgactatctcttattttgagaaattttatacgttacaaaagcgctcgagcgtgagagggagggcggtgcgcaatcgccatttaatttctcagagaatttttaaatttatcttatatccaagaaaaatgactatctcttattttgagaaattttatacgttacaaatgctctcgagcatgataggaagggcggtgcgcaatcgccatttaatttctcagagaatttttaaatttatcttatatccaagaaaaatgacctatctcttattttgagaaattttatacgttacaaatgctctcgagcatgataggaagggcggtgcgcaatcgccatttaatttctcagagaatttttaaatttatcttatatccaagacaaatgactatctcttattttgagaaattttatacgttacaaatgctctcgagcttgataaggaaggcggtgcgcaatcgccatttaatttctcgcgagatttttaaatttatcttatattccaaaaaaagggctatcccttatttttagaaaattttatacgttccaaa

SEQ ID NO: 37195 - DNA, 108 bp, Heterodera glycines
aaaggcacaaccgcatggtccagaggaaagcgttctacagctgcagaacatgcgatcaggtcgttgtgtttctccgagaggctgataaagccgaagcccaggtcatac

SEQ ID NO: 37196 - DNA, 204 bp, Heterodera glycines
cggtgtcatctatgctactagatcggggatcgatccccgcttggccgctcgagcaggacctgcagaagctagcttgatggggatcagattgtcgtttcccgccttcagtttaaactatcaagagtatgagtatgatggtcaatatggagaaaaagaaagagtaattaccaattttttttcaattcaaaaatgtagatgtccgca

SEQ ID NO: 37197 - DNA, 104 bp, Heterodera glycines
taaaattcgaagctgcgatcgagatcgctgacggcgagcgtcaggtgattgaggccggtcaacatgcatgcatttcctgggcgctgaacagagggaaaagtgta

SEQ ID NO: 37198 - DNA, 155 bp, Heterodera glycines
cgcttcactgttcaaatgatttatgatgataaattgttggcatttgctgctgcttctgcgctgatgcgcactttcccaaaattattgcacaacaaatggccgcccagagaacaaaaatccctaagggataatttcgccccgtcgttaatcccccg

SEQ ID NO: 37199 - DNA, 56 bp, Heterodera glycines
ccgacgatcatccgggactgtccgagctcggcctctgacccgcggcgctacggcac

SEQ ID NO: 37200 - DNA, 50 bp, Heterodera glycines
aggcattggaattttgcctatgccgcccgccacacattgcgcataatggg

SEQ ID NO: 37201 - DNA, 73 bp, Heterodera glycines
caacggtgcgaagcgccggcagcagcggcggatgccgctgccaggcgcgggcggggcatgcgccgcccgcgcg

SEQ ID NO: 37202 - DNA, 1292 bp, Heterodera glycines
ttagtcgaaatcgacatgaaaatgtcaaaatccaaaaatccggatttcggatttcggatatttccgtaattcgaaaaatcataaaccattttttttattttgtttaccttttttcccattaatggtttctaaaattttcagcataattgtgttattgggcggctgatcattcagcattttgtcagttaacaatcggagcgaaatcacttggtttgcctcagaaatgttgtcgagcgacatggtcaatgtctgtgtccccattgtcacagctaaaccgtaaccacttttacagtatacgatgactcagacaaaaagcgaacttttttacaaaaagaaaaaaaaaaatccaatttcggttatcaaataaatatacaatcatttttaaacaatgatttaaactagtatcttttcggttgtcaagtaaacgatgaaattttgtgaaaaaaaatttagtcaaagttttggtgcatcttagcaataaagttttttcccccattggccgcgagatttattttaatgccataattagccaaagttttgatgcatctttgctataaagtcccaccccccgtcggcgaagaatttatttttaatgccaaaataatttaaaattatgctgcgagtgtgggatttcctccaaaagtgtagcttttatattttgaaactttgtgccacagtttctcgatgtataatttatgcatcaaatttcatctgaatgccgaagaatatggatgtaattaatttatttatttttaagctatgtttttattttttattttggcacaattggatttggcctgagaatcaaaaaatttaaataccgtaccgatcctcaaagcgtcccgtgcccatcgatgcctctttgggatcagttggctccgaatcggatggtcgcaaaaactttatttaaaaaaagtgattttggcatttcaatttttgattttggcattttttcttacccatgcttccaatgagcagttgcagtgccggatgacgaaaagtctcatccgttgcgcatcccatgggatcatgtccaagccgagcacccaaaagcccacaaaatctctcaatttggcaccacttaatgacttattcttatactgctcaacctttgcatcttcaacttcaatcacttcttctaaaatattattaaatatttttaataaaaaatttaaatgtaaaactaattttaaatatttttaccatcgaccgtaatgtatgaagaaaaattgtttttgtttcccaaatgaactgttgaatggacgaaacacttcgggcacaatgtaactaaa

SEQ ID NO: 37203 - DNA, 909 bp, Heterodera glycines
  unsure (1)..(909): unsure at all n locations
tgttgctatatattttcatcgggataattttcgacttgtcgaacacccgatcaaaagcctcaatcatgtcctcactcttctttgacttggccggtgcactgaagatcattcgactcagcacgtcgatgcataccaacagatatttgtaaccgtcgttatcgctttttcgactggtcaaatatgcacaaatcacactgccaatcggtatggaagccactcggtatcgcctttagtctcgggaatcttttccttatgggcttgtgaatcgtgtaagttctctgtttttcgagaaaattattaacgtctccggtcgtgatttccgggtcaatctttttggcctcaattaaaattttttgaatcccagcgaaacttgccggagattttaaattaaaataaatttttgataaaattttctctacagtctggcccatattagtggtttgaagggtttcttctctcgcactatgccgggtgtttttatagattttattgcctttttccttccacgtccccacatgacctttgatttatcaaccatgtcttttactgttggatccttcagtaaccgatctttgagaaattttgcaccccggggtgtttcatctttcttccctgcgagatacaacaaaacatctctataattactgttttcaatcggcaaattcatgttcgactgtacctttccagccgccgtaattttaaataaatctttattttcctttacgtacctaaaaagaccgtttaaaagggtcgggtgtataatagttttgatcggaatgggtgtttttaatgtggatgttgtttggggctccggagttaactcatttattgtatcattatctgattcaggatcaggagtttgctcttcaagtcttttcctaggaataattatttccgcggggntcatcg

SEQ ID NO: 37204 - DNA, 799 bp, Heterodera glycines
atctaaagaattttttttcggcagaagggacaagatgctctcgaaaaaacaaattgaatttgccggtgtttcaagtctaaaaactcgagaacttaatgaatttctaatttttggggaccattccccatttaaaatattgtaaattgaacttgtggtggacgaattttgtggcgagcatccaccggcaaagctgctgctgctgcccccgtcaaaatcgttgatggcctcgtcaatttcgaacaaatttttgctcgttgtgccattttggtgggcacgacgtcgttgtggttgtggtgttgctgctgcttttgccgctcctcctccaccaccggcactttttcgtgtgttggtggcactcttcggaatggtcgccgacaaatcgctcatcgccgcttccatcattttctggggtaggtggaaaaactggcggtttggaatgtgtatgtgtgtgaatttttttttgttgttgttgttaaaatagtgctgaattgatcatcgccatttcaataatttcattcgcagttataaaaaataattttttttttggaaattttgtatgattttttgaaaattttaaaagtaggttttcaaatttttccaaaaaacgctcaaaaaatttcattggttatccttgacatataaccattttggcatataaaccccatccccaggtagggagggcatatatcatctccaacatagaagtcatggcaatgagtgtagtccccaccaccaggggatatgtgccgacacccctcaaaatttcggtaatcataaattggcattctgacggcccaag

SEQ ID NO: 37205 - DNA, 264 bp, Heterodera glycines
caacatgacgccgccgccggtggtcggcgttggcggtgctatcagtgtgcacgaccgttcaccagggcctataatgtataacaaacagatcatgatggcaaggaatttgttggcatttttttttgaggaaagacgaagaattggcacatggcctcatgaaaattcccccccccccccccaaaaactttccaggccggtgcctattggcaccagcgtgtgcggaacaggacaaaacacagccgagacataacacagccaggaata

SEQ ID NO: 37206 - DNA, 992 bp, Heterodera glycines
  unsure (1)..(992): unsure at all n locations
ttttcccataaattctaaaggaatttgtaaaattattattanttttttggtaaatacaatattaaattatttaatattaattatataattaattataatattttttagattattataatattaagaaaagttttttttttgcttatttcacctatttgcagctttttcggttccggatccaccgcaatgatattctttgctccccgttctttgcatcccaacatcacgccaagtccaattgcgccaatgccccaaatgcccaccgtactgcccggcactaccggtgccacgttgaacggattaccgtacccagtggtgaagccacagcccaacgccaccacaatatccaatggcgcttttggattgatctgaaaagcatttttatgttttttgattaaataatttaattttaataaaaaatatttattttaaaaaagtgccttgcaaatgcaactctccaacaccacagtgtactcgctgaatgtgcttgttccaatgaaatgatacacatcttggcctcggcatttaaagcgtgtggtcccatctagcattgtttgtgccgagattttacaactggtggaaaactattttttaatttttttaaaaaaataaattccgatccttttttccttaatatgtttgtgataagaattttgtttttaaatataataaaagatataaataaaataatatttatttatgctttattggaaaaccaaattttaacaatttaaaaatgcgaaaaaatttaacccgttaattaatcaaaataaataatcattattaataatccgctaattaatgataataaataattattactctggtccaaattgaaaaagtttgcacaaatttgactccggcgcgtagcaatgttcacagctacggcattgcgggatcggtgccgggatcacatggacgccggggcaaaacgccatgcactcctgggccaaccgactcaacaatgtcagttgcctcgtgaccagcaatca

SEQ ID NO: 37207 - DNA, 1186 bp, Heterodera glycines
  unsure (1)..(1186): unsure at all n locations
gtgatggtgatgaagtgatgaagaaaaaaacatttaaaaaattgtctgacgcgtgcatctctcccttcccacnccgcatcgttttccttgttaaatttttataaaacgaaattttttaaatttttttcagaattcattaggagatttttcaaacattcaatttntggagagtgttgtggcgggaaaaaagatcagtgatgtgatgcgatgcgattgccaaaacacaaaaacgcgtcaaaattttacaaaaaaaaaacgcagcccgcacgatggcccaaaacacggtcaatcctcccgagtttccgaaggccaaattgatttcaaccttggaaaggggggcggggtgattagctgctccggtgcccgggaacagcggcttctgccagcatttacaataatgccaaagttgttggttttcctaaacgactcccctccccctctctctggcacagctgtacccggacatgacgccggacggactgcacaactttgagaagcggcgcaaggagttcgaagtgctggccgaaattcgtctgtttcagtccgccgcccgctcctacaccatccaattggaccaggcattttgcgtgtggttccactttttgccggcactcaacgagaaggaatggtcagttttgctgagaggcattccacaaattatatcattttttgcctgttcgcatatatgaacaaaaagtggatggggtcaactgaaattattgcaaaaaaagggcgcaggcaaagggattcgaacccttgaattgaaaagatccgatcatgcaaatcgacgaacctttttttgtttttaaaaatgctttttgcggcgcgctttttttttgattttgattttttaagaactaaaaattgtgcaaaaaaacagaagagttccaagagcaaaggaggagtgccaatgatgagagtgaagttttatgtgtgggtcaattaaaatttattttcgtaattgaaaaaaaattctaaatacttttttgattgatcgttttcgttcaaatttaaaacccaaatcattttttcccattcatcttgtcatcttaaaaattgaaggaaaatttaacaaacaaaaaaattatttatgtagtagtaattaagaggtaattagtagggattctttttttatgtaagaaaaatcacggaatatgtacataaaatatgtatgaaaaatgctaaa

SEQ ID NO: 37208 - DNA, 1436 bp, Heterodera glycines
  unsure (1)..(1436): unsure at all n locations
aaaaatgggtgttgaaaagtttattttgaaaaaaactctttacaaaataatacccttgggagaagtgagtggaaaacatgatttcaaaattttcaatgttttctagtctaatctactcaaaacgtttcagaattcaataaaaataacattcacggtgcgaaaaatggggtttgacaagtttattgggggaaaaaagactttacaaaataatacccctgggagaagggagtgggaaacatgatttcaaaattttcaattttttatagtctaatctactcaaaacggttcagaattcaataaaaataacattcacggtgcgaaaaatggggtttgacaagtttattgggggaaaaaagactttacaaaataatacccctgggagaagggagtgggaaacatgatttcaaaattttcaattttttctagtctaatctactcaaaccggttcagaattcaataaaaataacattcacggtgcgaaaaatggggtttgaaaagtttattttgaaaaaaagactttacaaaataatacccctgggagaagggagtgggaaacatgatttcaaaattttcaattttttctagtctaatctactcaaaacggttcagaattcgataaaaataacattcacggtgcgaaaaatggggtttgaaaagtttattggggaaaaaaagactacaaaataatacccctgggagaagggagtgggaaacatgatttcaaaattttcaattttttctagtctaatctactcaaaccggttcagaattcaataaaaataacattcacggtgcgaaaaatggggtatgaaaagtttattggggaaaaaaagactttacaaaataatacccctgngagaagggagtgggaaacatgatttcaaaattttcaattttttctagtctaatctactcaaaacggctcagaatcaataaaaataacattcacggtgcgaaaaatggggattgacaagtttattggggaaaaagactttacaaaatatacccctgggagaagggagtgggaaactgatttcaaattttcaattttttctaatctaatctactcaaaacgggttccaaattcaataaaaaataactttcacggtggggaaaaaagggggtttggaaaggtttattgggggaaaaaaaaattttaaaaaaataaaaccccctgggggaagagggggggggggaaaaattgaattttaaaattttttaatttttttttattttaaatttaccccaaaaagggtctcaaaaaatcaaaaaaaaataaaaatttttcgggggggggaaaaaagggggggttgggaaaaaggtttttttggggagaaaaaaaaaaatttttaaaaaaaaaaaaccccccccgggggagaaagaggggaggggggaaaaaaagaatttttattaaaaaatttttttttttttttttt

SEQ ID NO: 37209 - DNA, 1331 bp, Heterodera glycines
tttttctcactttcgagctcctcctttacctgaattattttttttgcctgagcaattgcctccattaacgtatttggtttatccaaaaagaaaagttttctttttaaccctgtgggtaaaccatttacaaaataatgaactgtttcagactcttgcctctttggtataatgcgtacttggcgaggcttgttcaacaagttctatgaccttattggcaaattccgtgacactttcgtgtcccatcttaattctggcaagcactttttttgcatacattggaccatcaatttttttgtttgatcagctagtgcttcagtcatttctcgccacgttttctttttatctgatggaatattcatgaaaagttcccggggttccccttctaaaaagagtgggagcattcggacacagtccgtcggatgccatcccgacgctgtcgcgattagattaaattcttttaagaattggtgaaaatctcccgtagcatcaaatttgggcatacgcaccccgtgcggtaggttagttgagattttgttagtcattttgtcctccaactcagttaatttaacctttaaggcgtcgtattttttcctaatctttattaggatccatatttattacgtattcttgaggttcttgagtctctcttttcgtttctcttttccttcctttttaatctttctgtattactttgtgccttatttttgaaccgtttcttcaaatattcaggtgtctcaactgaattggatgacagtttgggtacgattattcagaattagttattttttaacagtcaaactattgtaaatacattcatgcggtattttcgtctccttttacaatacagtatttaataccgtaccttcaaatttcaaacgttttctcttttttgtcgttgtttgattttcttctgtatttacagtattgactgcttggttatttcacagttgccactttaattttcagattcaccaaacaataaatggcaatatttgaaccaatgtgttaattctgttccttttgccaggaatttagtaaccttttttcacttttgtcagccaattcgatattaaatctgacgatttaaacaaatctcagacacttgctttttaagcaatggcacttttcaaaagtacccaattttaataccgtactcgcaccaaatgaatggaaaatgaggaaaattctaccaccttagccttttcaaaaatgtttcccaagataacaaaaatccaccttctcttcttgttcagtctattcctcgtttgtgtccaataagtttttgtccttgatcgcaatgtgtctgcgcgtccgaaatgtcgtgccaatct

SEQ ID NO: 37210 - DNA, 711 bp, Heterodera glycines
  unsure (1)..(711): unsure at all n locations
gtccaggtcaaatantgaaaaaaaatccaggtccaggcaaaacacgtaaaacctggattttcctggacaaaattttagaatttattatttcaagtgaccgatgtttttttcacgttttcaaaaacagattaaataaatttaaaaacatattattattatttattagatatttttagatgcttctaagcaaataattaattttttcaaacatttttttgatttttaaaataaatttcaaaaaatccaggtccaggcctggatccaggtctcgaggagcctggatttttcctggacctggattttactggatttttgtccaggaaatccaggtccaggtccaacatggaatccaggtccaggtccaggcatttttcaaaatgtcgagctctacttatgtctatcaatccaaaaacgcacaaaacaaaaaattcgttagttttttcgcggtttgtgagtcaatttaatgcagggttcggatctgttctgatttatcagaaaggttctgatttggagggtccaaatctgataaaataaaaatgttctgatttgtcagaaatgttctgattttggggtagcgaccaaaatttgttctaatttcttaaacaaactcataattttaaaattttatggcctaatgtcactattttacaaacaaatataaaatttatggcaaaatttggtcattttttggtgaaaatctgttaactaatc

SEQ ID NO: 37211 - DNA, 912 bp, Heterodera glycines
  unsure (1)..(912): unsure at all n locations
ttctgtccctcttcctgttcccctttctgttcctcttccactttctcttcctcttccaatttctgttcccctttctgttcctcttccgctttctctttctgatcctcttccactttctgttcctgttctatttctttttctgttcctcttcctctttctgttcctcttccactttctcttccactttctgttcctcttccactttctcttcctctttctgttcctcttctgtccctcttcctgttcccctttctgttcctcttccactttctcttcctcttccaatttctgttcccctttctgttcctcttccactttctcttcctctttctgttcctcttctgtccctcttcctgttcccctttctgttcctcttccactttctcttcctcttccaatttctgtttctctttctgatcctcttccactttctgttcctgttctatttctttttctgttcctcttcctctttctgttcctcttccactttctcttccactttctgttcctcttccactttctcttcctctttctgttcctcttctgtccctcttcctgttcccctttctgttcctcttccactttctcttcctcttccaatttctgttcccctttctgttcctcttacgctttctctttctgatcctcttccactttctgttcctgttctatttctttttctgttcctcttcctctttctgttcctcttccactttctctttctctttctgttcctcttccactttctcttcctcttcctgttcctcttctgtccctcttcctgttcccctttctgttcctcttccactttctcttcctcttccnatttctcgtcccctttctgttcctcttccgctttctcttactgatccttttccactttctgttcctcttctatttctttatctgttc

SEQ ID NO: 37212 - DNA, 759 bp, Heterodera glycines
tgcaggtcgacaaacattctgtacaccataaatcgatttgcaaatttagtcgaactatataaatttttcaaaaaatgattcatcttttttatggttagcgcatatgtctctagctttatagaaacggtccccgaatctgcgaggaactacttttttgagaatttctatagattattattttgcatgaatccttcgcttaaattcccatttatcttataaattcagattaaattaattaccccgatttgttttagaattggtccaaacacgcttgctaatagcttttcttttcgaaaagagaggcgaggaaaaataaaggttgcatccaaatgtaatttttttttacattgaagcatttggatggcttgctgtttacagttggctaagtcttctttgcaagaagcagcacaacttttgtttgggccaacgaccccaaaccattcgaatagcaatcgattgggctgactagactccatatttgcaggaatagcaatggcaggtctatcttaaaggcctgacgagttatgtttcgacaaacatcctgtacaccataaatcgattagcaaatttagtcgaactatataaatttttcaaaaaatgattcatcttttttatggttagcgcatatgtctctagctttatagaaacggtccccgaatctgcgaggaactacttttttgagaatttctatagattattattttgcatgaatccttcgcttaattcccatttatcttataaattcagattaaattaatt

SEQ ID NO: 37213 - DNA, 1138 bp, Heterodera glycines
tcccccccccctccttatcgtttaccccccggaaattttttttaattttaaaattagaaatttacaaagaaaaatcttagtaaattatttattaagaaaattccaaataaaaaattttcagagattttttcaaaatttaatgttcttatattaaaaatttactgatttttttggaaaaatttcaaattttgaaaattaaaaaaaaaattccggagggcagggggacggcggcgggtgggaaactagtgcaccctgctggtatcctttggtgagaaacaaagttggggatcgggaaggacatgccccgaaaaaattagtcgggaatggctggagaaattaaaatttatgtggatcaccactctcgccggggagtaaattttcattaaaaattccgcaattgtccccgaggggcattttcgggattttattgattatcgccaattattgatcgcttttttgatacagtaagcactggaggcaccactgatcactgccgatccaccatcaccgatgccgatcaccatcaccagccagtgaagaaaatacggcgccgacggcccaaagaggacaagctgttgatgccgcgccgggcatcgttgccccagggcatcacggtgaaaagtgacggcacaacaaccaccaccaccaccaccactgatgccttgggcgggccgtgttctgtcggctcgattactgtaatggacgagatgaacggtggcatggtcaaaatggtgagtcatcagcgccataatttttttttttttttgtatgtaatttgtgggttgcgggaaattgattctgttaacggatctcgacagtgtcgagagttggccgtccatatgaaaaaaaaagttcaaacgttttttcttcctctcaaaaacatactttaaaaagcgaaatttttctttcaaaaaatttaaaaaaacattttaatttttttttgagaattggtcttttaactttttaaaacaatagaaaattttatgtttttgaaaaaataaaaaataaaatttattctcttttttgtccatcaagtttcaagccaaagcccaagctaaagaaaacatgtttttcgtgtgttttaggcctccacagtctagaaaaatatatggattctatatattggcagccatactga

SEQ ID NO: 37214 - DNA, 1021 bp, Heterodera glycines
ttcgaatttgtcttcacttgcgttagcccatcaaatggtgggaaaacccaattaaaagcaacaagatttgaatttataatttcatagcactcacagacaaaactgttctcaactgtaattggcgtacacagagcatatgaaacctccaaaatggtcaaaaaaataaacaaaaaaactctgtctaaattatttaacaaaaaaaagtatcgggaaatgcgaatgcgaacggcattagtgaacgaagaagaaaagttgaagctgctgcccctcgaaagccaaacaaatcgcatcgacggagtttggaatttgagcagcgatcaggtggagggaagtgaagcggaaaagagaagaaagaatgaatgatcacaagcacttaagggaaatttgggagtgatggtaattacgaacattcgggtcgtatggtatgccgcactgaacctgcaggtaaacgggaaacaaagcgatggaacaaaaaccgggagaaataaatcgagaaaaatgattggaaacatggcatttggactgagttaatatgaaaggtgagtggtgcctctttcagtacaacgtgtccattccgttcctgcagctgcgaagttgccgcattcgcgactcgcgctttggccatgcgttggttttggagacgtcgctgagggtaatttggagagattgacaagcaaaaggaaaagcatttgaagagcggcgagtacattcttggctttcaaatcaaaccagaagagcgcctggaattcacttgcaaagccgtccaagcccttctcagtgcttttcaatcgtcgcccattttcggagttcagtacagtcgccaggaagcggccttttcacaacagcaggaacagcgacaagcgatggtgccgaacatcacggaggagaaggagccggaggaaaaggcattgcgagtggacgcatttgcggtgcgactgacagagagtgccaatgagaggggggggggggggtgccgccgaaaagaattttccaaaaattcaaaaactttttccaaaaatat

SEQ ID NO: 37215 - DNA, 937 bp, Heterodera glycines
tattgccaatctaatttcttgcagatttaaagccatccattgcctgctcggttctcggcacagcaaagcactaatagggtgtttgattcacttcaaaaaataattccttacacaaaagttttttacaaccacttattgccaatctaatttcttgcagattgaaagccatccattgcctgccggttctcggcacagcaaagcactaatagggtgtttgactcacttcaaaaaataattccttacccaaaagttttttacaaccacttattgcaaatctaatttcttgcagatttaaagctatccattgcctgccggttctcggcacagcaaagcactaatagggtgtttaattcacttcaaaaaataattccatacccaaaagttttttacaaccacatattgccaatctaatttcttgcagatttaaagccatccattgcctgccggttctcggcacagcaaagcactaatagggtgtttgattcacttcaaaaaataattccttacacaaaagttttttacaaccacttattgccaatctaatttcttgcagattgaaagccatccattgcctgccggttctcggcacagcaaagcactaatagggtgtttgactcacttcaaaaaataattccttacccaaaagttttttacaaccacttattgccaatctaatttcttgcagatttaaagccatccattgcctgccggttctcggcacagcaaagcactaatagggtgtttgattcacttcaaaaaataattccttacacaaaagttttttacaaccacttattgccaatctaatttcttgcagatttaaagctatccattgcctgccggttctcggcacagcaaagcactaatagggtgtttgattcacttcaaaaaataattcattacccaaaagttttttacaacaatttattgccaatct

SEQ ID NO: 37216 - DNA, 504 bp, Heterodera glycines
gtcgggcaatggaaatggcacagatttgcccatgacaaagagttgtggcattccattgtccttttgaattgtgattgttctccaaattgtcaattcggctttgccattgaaatgtttgttcaccagcccatgtgacgaaagaagtgccaatttgaggccgagttgggcgcggtcaaaatgagggaaaatgtccatcaaaatgtcgttgcaaatccatctgaaatgtggggaataattatagtgacaaatatatacaagaggtgggtacaccccaaaacgtcgccgccgaaacgtcgccgggacataacgtcgccgcaaaaaaaattaaaaatttttcaaaattttaagaaaatttaaaattattttagcttttctaaaaatctaagtgttaataaaaactaaatttgttgatttctaagaaaaaaatcgaattaaacttgaaaaaaaattttttcccctgaatttcttaagaaaaatttattttttgaatttttccaaaatttt

SEQ ID NO: 37217 - DNA, 1242 bp, Heterodera glycines
  unsure (1)..(1242): unsure at all n locations
tttncatatttcacattttcgtccatatttcgccatttttactaaaaaaatgaaaaaatttatctaactaaacctgaatttttagaaacgtctctattttgtgtcgagaccggacagttggacagtagacacctggacagtgggggcgtttggacagtaaagcatatttggacagaagtggacaattttgtgcagtgcacactacgtaagtaaatgcaaataaaaaaatagaatacaaaggggttgctgatacaatataatttgaatatgagcatttttttagcttactttgcgcttccaagttacattttttgtccatattttttatatttaggtatccatttttcacattttgtccatttattttccatatttcgctattttttacgaaaaattaaaaaaataacatgtttaaatctgcccttataatttttcacgatattatgacagatctcaaaaaaatagatttttccaaataaatgtttataagaatttgcgaaaagtgaattttttgtccatttttaggtaattttgttcatatttttcctagctctaaaaacgattaaatacttcaaatctgatcagcattctgtaagtgtttgtgcgcaattaggttaaaaatggtgattttgctattatattcaaccttttgtcctgtgttaaccactccagttgagctatgtgtggaaaaactttaaagacgaaaagcaacacttaaattgaatagtctataattttacaagcatcttcatcatggcattatgggagagtaatgctaagaaaaacggtaataccgtgctttgtcccccctcctttttcgatgaaaaattcttttgacctaaaatttcatgaaaaaacatgtctaaggggtttttcgggtcgctgatcacgaatatgacatccatttcgaaccccggagccgaattcgaacaaaaaaaacgaaaaatgattttcaaaaaaaggactgaatggggccatattagtgatcagcgagctcgaaaacccccttggacatggttttcatgaattttaaaggacaaaaaatttttcatccaaaaatgggggacaaagcgcagtattaccagaaaaactccatacngtacgcaccaaagcttgactggtaatcgcctctttttggtctatgcgcgcatttgttnnaagaaatgcccatcaganttgaaataatttttactataatgaatcagaattcagcatagctttgtactcccttccttaattaat

SEQ ID NO: 37218 - DNA, 1030 bp, Heterodera glycines
aaaataaagaatttttttaggtttggcttggcttttagatttttttgaagttttttaatgaagtaattaacgcttaagtggagaatacgagaagaagcagcacaaaacttatttgttatttcataataaaaattcaaagatatttgcttaaaaaatagaaaaataaaattcgtaaataatataacaataaatgaatatatttattgaatgaaaaacaaatattttataaattcaaaccaaaaagaattttaaaaatgtatataaaaaatattttagcattataatttgttattctttatcaaataatttttattttattattaattattagggataaaatttaacaataataaatttattaataaaaaatttcttacggcttgaagaacgatgaagccaagtcggagtcgtaagtcgtatgcaatcagtcgaaaagtcaaagttgaaaaccgatgatttataaaagacaatccgaagaaaaatgaagaaagtttttatttattggagagaagacaaaaaaaccaaaaaaaaagcgagagagaagagagatgaaataaaaaaaaacaataaaacataatcaaatttgaacacaataattaaccgcgaaatgtaatcgttttaaaattagtcaaattaatgcaattcccagcacgttccacaactaatcaatcatctaataattgaatatattattaatgggtgcaccccaaaatctcgccgccgaaatctcgccgagacaaaatatcgccgccgaaatctcgccaccaaattttttttttaatttttttcaaatttcaaaaggcaaaaactccggcagaaattaaaactcgggaaaaataaccggattaaatgcttcaattttgtcatttggcgaggtgtctgtgaaaatctgatgatgcgaggccttcgaaaaaaattccaacagaacgagccgctcaaagaaatgcttataaaaaccggttcaaatgttttggttgagagctccccacacgatttgttttggggatgcggaaaggcaatggacgaccct

SEQ ID NO: 37219 - DNA, 780 bp, Heterodera glycines
catttcctaggttttcaaaaactttaaacctagttttttataaaagttttttgtgaatttttttgcggcgatggagtgcacactcctcttttcaatatatttctctttatgtgaaaaattaattaattgattgttagaaaattaatttttcatcatcaatcaaagaaaatgtcgtcatactcataaaaaagcaataaaattagtatatggtcaatgagcatacgtaccaactaaactaattaggcatcaattaccattgtcattaacacataaattattttaccccgctgttgctcattggttgctgctgttgcgtcgtgccctgttgaattggccaccgacaacgaactttgtgtgactttctgctgcagaaaaaaaagaacaaaatatatttgacagtcaatttttggttcgagaaaaattgatttggttttataggcaaaaaaaaatagtaaataaatttttaaaatttttaaatttaggtttttgaaaaaaacgaattgaatgttttgactaaaataaattaaagaaaatctttcaatttctgaaaattgattcatgtgtaaaaaacattttgaaaattttaaaaataaaatttttttcaaaaacaattaaattaccccattgtaaaattggaaaagaaaaaaaataagatttctttcctcaattaaaaaagcaattaaattcccaagaatcgattcctacaaaaaaatcattggtcctttcttcctcctttcaaattgcaaggccattatacaatagtatcatcatcatcatcat

SEQ ID NO: 37220 - DNA, 1230 bp, Heterodera glycines
  unsure (1)..(1230): unsure at all n locations
ccaagaaaagacataagcagacaaactgtgaaattaaacattntcgaaaaactaaaatgttgaacaaaaccgttttctgattggtttctcgtcgcagcagaaaaaattccgaagttttataataaagcaagtgccagcgacagacaaaaagacgaggacgagcggtctcacgccgctcagtttatcatttattttcacaatatacggaaaatgaatagagggaaattgagcgttgcttatcatctaaagtttggcacttaaaaagagtataaaaagaaaagtaaggcaaaatgtaataaatttaactttttcattgatcgtaatgattgatttaccaaaacaatgatagcgaaatataatcagaagagtataatatagcgactgttaagtcatgctaactcgtacaaaagtaaattcattggccaacttggacactttttttattttcgagaattaaaacagtaagcattaattactgtacatttccattgactcggttgttacgcctcccaacccaaaagtttcctgacgacagggtcatccaaattacgcaacgtttctttaaaatcttccaattgtgggtcaggaatatatctaaacatgaaaattcaaaaaaataaaaataaattaaatgcctgcagcgttcgtcgcgcggggaatgtttcttcacaacaattttcatcccaacgggtgcgtgcgcttgcaaaagggcaatgaagagggggagttggatgccggggacgggtccaacccgcacaactctgctgtacgttttcaaaacagattgcgaaacgggaatggtcgagccagccttgtactccttgacaagctcagaagtgtgtgcaagagcataactaacacaaaatttgcaaaaagcacagcaaactcgggcacctttctacgatttgtatcccaaaatgtttggcggcccaatgtacgtacgcttgaaatttctcgacgggttgaaaatcatacgcctgtagcaacacattgagaaggggaacgtcaggatatttgcggtcactctcgaatctgcgtgaaaattgcagcaaattccacaccggacttggttagcacccacctcggttcatacaaatcatctggttttggcgcattagcagaggaacggagagttgggtagtgccgacaagacgggagattttcataaccgacaaagaaccgattgaataaatttttgcttagaattcgattcatactaaagaaataatg

SEQ ID NO: 37221 - DNA, 955 bp, Heterodera glycines
tcaaaatgtacgattttgcgcccggacaggcccgcgatgtatttccggccttcaccaactgatggtggtgcccaattagaggtaaacggcctaatatacgacaactcacatgtcgtgccgtataatccttatattctgctacgttaccgagtacaccataatgtactgtttgcatatggtaacaaagcaaatattaaatacgcactcaagtaccctttcaaagggccagggcattgttatgtcgagtgcaaacaagagtccggcaataaaatcggaattgatgagccggctcaatatgccaagatgaacttccgtggtgcaacggaagcatatgccattgtccattcactgccatttgccaaactttcacatcaggttgtcaaacttagcatccatatgcctaatcaacaaccgattgtgtacagggcttttcagctggtgagcaaagctcaacaaatccagcaaggcgaactgccagagacgcaatgttctgcctattggaaacaatggcaaaatgaatggaagcatgatccgaagctcaagggcatgctttttgaaaaagtccctgagcattttatatgggcaaaggacaaatggaacaaaaggaaatataacctaacaaagagaccaccaatcggtcgaattgttcctgtacccccatcggacccggaaaggttcgcgctctattcacttatgcgtcactttcctggagacccagaccatcttaagatggttaatgggttgctttgtacctcattcactgaggctgcaataatgcatggtcttcttgaagacgacaaaatttgggacaaaactctggcggaggcagctctgtcgcgctggccagatcagatgagatggctctttgtgagcatcctggtctatggccagccgagtaatgccatagaattgtggaacagtacaaagacaaaatgtactttcctcaaggcattac

SEQ ID NO: 37222 - DNA, 1100 bp, Heterodera glycines
  unsure (1)..(1100): unsure at all n locations
accgaagatgaaaccttggctgagctacgtaaagcggttttacgacaaggataattgggttctctcttggaaaagccgacgtattctggacgaacttcatgacttgaagaacgaaggacgttggttcttataccacgcaacaaatggcgctcaactcactatctcaagaacgttcgatggaacacgaccatttgccgaatttcgatatgtggaagaaggacacctcgtggatctgactccaaaccaagtcatcttccgccaaacggttccagatgagcccgaagagagtccagtgagcaataataaaaagttggaagagaaggcagaaaaaccggcacgcaacgacaaacgaacaactctggccactcggaaggtggaggagtattgcacggcagagatgaagcagaacagctactgctatgacatatttaaaccgtgcgacgcaacgcacgaaacgtgtgccaagtcggcaacgtacagcgctcttgccgaaaacagacacaagctcgaagagttcaacaactgccatgccagctgcctctttgaggccctcatcttcagctggctgtcaaggaacacaaatctgcccggcaacgaagtatcaagaatgcatgaagaactgatcaagcccaccacggaattggaagaagtggctaaacttttccacgacgaacaaatcgtgaaaaacaaacgcggactcgggaaggatcaacaagtgatgaaagtcatcgaaatctggagaaattcatgcgatcgcttcggagagcttttcaccaagccagcgatgcagcagatcaaattccggccaatcctgattgaacacaatggccagtataaccaatggatcaaccgccaaaacacgcgaatggcggaattattttccaaaatgcgaacgaaggctcagcatccgacctacttgagctacaactgcacaacggtgatcgtcggcgataacgtagcggaactttttccaccccactatttgatgatgccaaatggttcacgcatttcccagcggacacatgccgattgatacctgnggccaacgtcaaacatatcatcatgggatatcaagccacggacgagaacatggcggggca

SEQ ID NO: 37223 - DNA, 1142 bp, Heterodera glycines
attttgcatttcattcatcattctgctccgccgtcagccagccggcaattcatcgctcatcattccctcacgaaattcattccccccccaaattttgatcatctcccttccacttatcatttctatcattgatcaaattgtccctcattttattttgatctgccccatcccctgggccaattcatccatcttttcacctcgaattgacctcatttatccccaatgtttcctttggggcaagtctcccccatgttattctggtctcttctatttctggtgaacattttccctcattttctggtttttttaattctggtcaacccctttcccattttatctggtcaaacatttccctttaattactggtcagtcccacttttcacttgatcaattgccgcatttttttctcctggtcaaaattgcgcacctttctaatcagtgccattccctcatttttgatcagccctattctttttgcttctcaagttgcgcgaatttcttctaatcagtcccatttttcctcatttgacaaaattgcgcaaatttttaatcagtgccacccctccccattttcattgacagtcacatttcgtctgatcaatgcttttcccccatcatttttctcaaattgcgcgcaattatgctgattagtcgcatcccttccccatttccgttgatcagttccattcccctcagtgccatccctccccaattttcttttgattaatgccacttattttgatcggttcccctcattttcattgatcaaatggtgcgcatttcggttgatcagtcccccaccccctccattttctttggtcatggcctcattcattttgatcaatcttctttactgccatttcttttgatcagtgacatccctcacccattttcactgatcaatttggccattttatctgatcagtcccatctttccccatttcctttgatcaaattggccaagtcttccccagttcgcctctgaacggctccattttccccaattttttccccttggccaattctccctcgtttcactttgacctcatctactctggtcaacacttttcttcactttctggtcaatttgccccctctttaattctggtcacttatctctcccaattctgatcaaacccctt

SEQ ID NO: 37224 - DNA, 567 bp, Heterodera glycines
aaacgcggtgggggtcggtttagtctggccggtttagtctggccgttttagtctggccgttttagtctggccggtttagtcagagggtcggtttagtctggcaagctgtttttgtccaaaatagattctactcagattttttttcgaaaaatgtttaaaattaacaccataacatatttatcagtgtgttttcaacgaaaaaataacaaaacattgaagaatgactacgggcgtattacataatttttgagaaattcaacgagaaaattgaagatattatcaggattaacattgtatggtaattttgatcattttggtaagcagggttgatgttgttgatggtattgtaaccctgtaagagtcgagaattctcgcatcgacggcacgatatttgcgcgtttttgaggagggacttcaccagcgacgcatcgtgcaatgtctgcatcaattgacttttctcatatcaaattgtgttgatgaagcggaagatagttggatatgaacaagcataagccggttgaagctttatatgggaaaaaaacgtgaaaaaataaggtttttactttg

SEQ ID NO: 37225 - DNA, 1503 bp, Heterodera glycines
  unsure (1)..(1503): unsure at all n locations
agttttntggaggcacttttgacattgactgaaaattgtcccattcaaatggcctttgtgacgcgaaacggacgttcattggccgaaattttccgttacagcggtactcacaatggacaatacgtaaatcaaaccgggattttgactgacgcgggaatcaaggccgtccttatctggttgtataatgtggcaaatttcccgggagagcgagatatgggacgaaggcgttcagtgattgggaatgtgccttcggggtctcataaccgtctaggcgacggtagtgggcgagaaaatgccgaaaatgaggtgcctgggcgttctgagtcgcgccctgggagttcaaccggccgccgttctttcatggccaatcatcaccgccgtaatgatgctgggtgcaaccgccacgaccggattccgatccgcgatcgagtttcggcgtctaggcgacgcccggaattcggaaattcgcgttcgaatatcgccgttagcactcaccgccaccgatacctgacgggtcagccgaatcgcagctttatgtgacttttaagcgtcggggcgccgctttctttgaggggcgggatgtgataattaatgttttattattaaattttgacttgattctggcattctgtttatttttgtctttccccaaattttgtttcccatcttcaaaaattttatgaattttggaatctcgctcttctgataatttttaattgtaattgtgcttttatttaaattggtcgtctcataaattgttggatttgatcaaaagtgtgaattggacgtgtttcccaaatttgaagcggttttgaatccaagcaatttcccaaaattgcctttccctccaattacacaccgcaaatttattttgacatggcgctttctgaagctggtgagtgctagcggtttctttggttttacttcgggtaaaagcaagttttgcgtgcaattgggctgcttatatttgggtttggaaaaattttaaaacaggtacagttcaatatctaggcgatattgttctgatttggtggcaaataaatatctaggcgatattattttgcattttgaactcacctcgacgcacatgcaacaaaacctactgccacatcggaattatttgactcgtagaagagcacaaacactgagagacgagggaaacatgctgaatttgtcagagatgagaaatctgctcgagccaatgccgccaaacgaccaaatcggcattcaacaaaacgcagaaccggccgaaaattctcagtcgagacccccaaataccggggatagagctgcacgcggggaacaacaaaaccgtggaaggaaccgagaacagcccaattttacagaaagaatggagtacgacgaaagcattgtcgacgacggagcggtgtcactcgtcggtgaagctgacgaaaacgaatttgttgggcgtcagcgacgcacaccatgaagcagaatgagcgggatttgggaagtttttaccatttttccacggaacacaaa

SEQ ID NO: 37226 - DNA, 811 bp, Heterodera glycines
  unsure (1)..(811): unsure at all n locations
taaaaaatcgtcacactttttcatcaacaaaagttctcaagggatcatttgtactgctcgattagtcccacatcccctgttcctcgttcaaactgacaagaatgatctgatgccgtggcaccgaatccaactttcattggtagttccccgggagatctcctcgcattttgaccgttcgtcgatgaattgggcgctcggcgacagtcggatgatctgatggttctgtgggtccaacacgcgttctttttggcggcaattctaaagcaaatcgtaaagcatttggcaaatgttcgccggctcaacaagcgattcgttgccataaacagctttccattgggaattggcatcgtagtaaaggtaaagcgactgcaactcgaaactcttcaaggaaagggacacgcaattcacttcaacgggaaaaaaagtcgaaactgcctttggatattggacggtgtattgaagagtgccatcattggagacgaagcaaaatctgtccaaatagtgccaattcttagggacgggggagggaaaaagttggggattgggagagaaaatgattaatttctcactttcgaagtggaaagaatgccttgggatattttggcacaaatttcgaccaaaaagaaagcgcaaataaaaaaggaaacaaagaagagggagggggaagaagaagaaaaaggcatggctaacaaatggcaattcaatttgattattaattagtgcgattaaaagtgtatttaatttaatggaaatattttaatcaaaattatcagctaaaatttacctcataaattangctgaaaaaatgata

SEQ ID NO: 37227 - DNA, 919 bp, Heterodera glycines
aaatataaaatgtcctgaattattacgatttgtcctgaattggagaaaggcaatatgaaaaatataaaatgtcctgaattattacgatttgtcctgaattggagaaaggcaatatgaaaaatataaaatgtcctgaattattacgatttgtcctgaattagagaaaggcaatatgaaaaatataaaatgtcctgaattattacgatttgtcctgaattagagaaaggcaatatgaaaaatataaaatgtcctgaattattacgatttgtcctgaattggagaaaggcaatatgaaaaatataaaatgtcctgaattattacgatttgtcctgaattggagaaaggcaatatgaaaaatataaaatgtcctgaattattacgatttgtcctgaattggagaaaggcaatatgaaaaatataaaatgtcctgaattattacgatttgtcctgaattggagaaaggcaatatgaaaaatagaaaatgtcctgaattattacgatttgtcctgaattggagaaaggcaatatgaaaaatataaaatatcctgaattattacgatttgtcctgaattggagaaaggcaatatgaaaaatataaaatgtcctgaattattacgatttgtcctgaattggagaaaggcaatatgaaaaatataaaatgtcctgaattattacgatttgtcctgaattggagaaaggcaatatgaaaaatataaaatgtcctgaattattacgatttgtcctgaattggagaaaggcaatatgaaaaatataaaatgtcctgaattattacgatttgtcctgaattagagaaaggcaatatgaaaaatataaaatgtcctgaattattacgatttgtcctgaatggagaaaggcaatatgaaaaatataaaatgtcctgaattattacgaattgtcc

SEQ ID NO: 37228 - DNA, 1143 bp, Heterodera glycines
ttttgatgggaggaggtcggtgtaagcggctttttgtagagctcgacgagctctatccaaccatgttttcggatttcggaaattttcagaaattttcgagctaggccccctcgaaaattttccgttttttaattttattattttttgcagatttttccgggcaaaacgaagaccactttcaagcaaccgtttttcatgctctatcgattggtgtcattttcagaaaaatttttaaaaatttttttggaaatagaaaatttttggttagtaggcctcaatttcagttctggcgcaataacttgtcaggagttgattttatcaaaaaatcgtctaagagcttttttgtagagaattttaagcccaatctaatgtgctttgtctcatgtatttatcttgaatttaaaaaaagttatgaaattaaatttaattttgcaattcaaaaccataggggggaccccatggttttgcatttcatgaaaaatttttttgctcctaaattagccaaaatgcatttttatggcataatttgaggtgctgaatacgtatatacgctttattttgcgtttcagattttttggaaagtgttaaaattttttgaaaaatcgtcacaatttgggccccggaaaatccagtgaaatttcgaaaatttataaatctcttcgcttttggtcaaatttagtggaataaagtttgaaaaatagcaaaaaattaggagaattttatgggatttatttagaattcctatcttccaaaataaataagttattccagaatttctggaaaaattcgatttttcagaaaaaaattcctaactccattctgaaaaagtattttataaaaataatatactcaaaaaatccgcaattttttgctctattttataaattttatttggcatttttatcacttttttgaaaaaagttatagaaataaaagtcattttggaatttgtgaccacaggggggtgaccaggatttttgagtggaaaatttttttcaccaaaaatcttccaaaaatatgattttacgggttatttgggccgctgatcaagaatatgcaatcagattttacttcagacatcgttaagacctcagaatccctgtgtgattggggattctgaggggtgggagcgcccgttctgag

SEQ ID NO: 37229 - DNA, 754 bp, Heterodera glycines
ttacgaaggacatgggccgaccaacgtgaagagctgttgaagttaacaaacgtatgtgtttaaacatgacaacataaaaaagcgaccggatttctcaaactaaaatttttttttttgacctttagaaagtcatccaactgcaaaacattaatgacgagaataaaagttacattgaagcgttgagagagaacgatgaattaatgaagcaaacaatagaacaacagcaggaggaattgctgaagaacagacaggaaattgtttcgttgcgcttgcaaatctcccaaataacaaaggcagcgatggtaaaaagaagggttctagtcggttttacgcgtcccataacaaaaaataaaggggaaaaattgaaatagaaaacttaaaaaaacaagctagaatcttctttttataatttttcttaatgatgtcaacagaaagttacaatataaaaaaattttacaaaaaaagcctaagcctaggtttaaaccaaaagcttaggcctagtctaagccattgttcgagttgcctgtgtatgagttgttattatactttatgtttaacaacgaaattttagttaaaaaattactgaataccggacaaaaaaaaggtttcatcatagttattaggacggctaaaataccatagaccagggatagcacttaattccggtttccaaaaatttttgagcctcggaatgacatccctgccatggacacaaatgtcatgggacgcataaaatgccatgggacgcgtaaaa

SEQ ID NO: 37230 - DNA, 888 bp, Heterodera glycines
atttggctgctttaggcatttaaatatataaagaaattttctaagtgcttaagaaacgtaaagtagtcaatttttagggtgcattttcagatttttttgtatttttcttacgatttttctcaaaaatgccaaaatatgtgctaaaaaatccaaaatagcccaaatatgtgcgatatgtttttataagtcgctctaaatcaaaaattgttcggagaaaatgctatttttgggcttctctcgccataactaagccgcaaaaaaaaaaaatgttaaaacataaaaatcccagcccttgttatgatctgagaagctcaaaaaaccaatgtttttcaacattagtattttttttttggtttttcaattaagaaatgaatattatagtgcccaaacttcatgtccttccccatttatttagctttgccctgcactcatcttcatttttgcgcgaattttatcttttcaaacgttgaattcatttgtgtattcgttgccgatctcaagacaaattttggtggttggcatttcatattgtcaaagatacggtttgctgtgtatgcgtctacattttgtcgcggtggcagtcaacagagcacacgctgtgtgctttccgctaaactatgcacaagaaatgaataaaaagtatcttctcgatttcgaataaatttttgtagacactgactgtatgaatgaagctgactgtggcggtaaatggagaattgatgagactagagttgtacgggaccgggaattttcgggttgaaaaaccgggactttttggctgtgaaaaacgggaaaaaaccaggactagtcccggtcccggtcaaaactgggactgcgtactcaggtgtacgtttttttcagtaccagtcctggtcccgtgcaactcta

SEQ ID NO: 37231 - DNA, 879 bp, Heterodera glycines
ctttttctatcaataatgggaggtgaataaaattttaattgctttttaactttagggaaaaagtttaggcttaactttttagtgaaagtttgatcactcatatttttttagtctaatctactcaaaacggttcagaattcaataaaaataacattcacggtgcgaaaaatggggtttgacaagtttattggggaaaaaaagactttacaaaataatacccctgggagaagggagtgggaaacatgatttcaaaattttcaattttttctagtctaatctactcaaaccggttcagaattcaataaaaataacattcacggtgcgaaaaatggggtttgaaaagtttattttgaaaaaaagactttacaaaataatacccctgggagaagggagtgggaaacatgatttcaaaattttcaattttttctagtctaatctactcaaaacggttcagaattcaataaaaataacattcacggtgcgaaaaatggggtttgaaaagtttattggggaaaaaaagactttacaaaataatacccctgggagaagggagtgggaaacatgatttcaaaattttcaattttttctagtctaatctactcaaaacggttcagaattcaataaaaataacattcacggtgcgaaaaatggggtatgaaaagtttattggggaaaaaaagactttacaaaataatacccctgggagaagggagtgggaaacatgatttcaaaattttcaattttttctagtctaatctactcaaaacggctcagaattcaataaaaataacattcacggtgcgaaaaatggggtttgacaagtttattgtggaaaaaaaacttttacaaaaaatacccctgggggaaaggagtgggaaa

SEQ ID NO: 37232 - DNA, 1657 bp, Heterodera glycines
  unsure (1)..(1657): unsure at all n locations
attgaatacttacataaaccatttaataggcaattatttaatggaagaaagttaaaaaaatttcaaaatcatttaattaatcataactaaatttttgttattaataattaaatggtactaccaaagaaagacacaaaaaatcaaataataaaattgtaaagttcaaaaattaattatatagacaaaatcaaaatgataattttcaattaacaacaaatttatataaccgctagcgttcaagctcagaggagagcatcgtctaggcatcgctagaattaataaaaatgaaataaaataaatattttttaaaattttgtaaaagattaaaaaataattattccttaacattataatttgacaactgatagtgcaaaactcactttatgaatatgaacaaatatgttacaaaatggaattcaaatatatttgctaaaaatcgaaagaaaaaaagttctaaattaatacaacaaatatatttgcaaaatgaaagcatcttttttaatttgattaattaacggcgttttttgttgatcaaatctgtagcaaaaagggccgatatatgaaaatggcaatttacatttatttaaatggcaatgaaacttaaattttagaattatattagagctgaaaatgaaaataattttcaattgaaaaaagcaataaaaagatactatttaatgttcaagttcaaaatgccgaagattgagaattttctcttgaaatttacaccgagtttgtgatcattccaatttatttgcaatttttttaccaagtttactgtatttgaaaagaatgtaaattttttatagagaanaaataagaaaaatacattgttataacttttgttttgatcaaaaagtcaattgcagctctgttatcagaccatttctccttcatggtgattgaaatcgatgaaatttttagaaaaaaatttctagggggtggaaaaaatttttcattgaagtcgaacatgacggaaagaaagtaaaaaatttgctacaaaatgttaaagatcacacttcgaacttaaggaattaaaaggcttccaatccgaaaaacgtgagaaaatgaaccgctgttgtctatagaacatattgcttagaaatgccgcttttatttttttattatatttataattttcattttcttatgctttattatgcttttgattagttaattttaaattttcacaaaaaatgttgcttctagtgaagaatattcgtaccgtggaatagttcacaccaattgccactaggatcaatgttctgatcaattacagaaattaaataaatgcaaaaaatatgaatttagtcaattatttggataattttgtattttcctcaacatattatatcatcaaatttctcattaatcaaattcatcaacacaaaatattatcactaattgaaaatataataataatttacccaaataccaaataaatttattttctcttttttgttaattgaaaaaaactcattacaaattcatcatttctggtcatcgctaatcacaaactgacaccgacaaaacattgatggtcttgtacatcaaaaaaattcattcaaggggtgttatcgctatcagcgatcagtttacccatccttggctaattgtatattagtattttttgctcggttttgtcgggggggggggg

SEQ ID NO: 37233 - DNA, 1275 bp, Heterodera glycines
ggttaattcaaatttgtcttcaatcaaaaatccaacacttgttctttgtcttatctttttttcccacctttgttcccatatccggttgtcgaattctttcactcctttccatcgtcttttggcactttcttcttgctgattgtgctggcggcacatttcggaaagatatcccccctttgatgatcggtctataacctatttctaagttagacaaattagaaattgtataaataggtctcgctacgttcgaatctcatttcttttccctatatcggcatcacattttataattagtctcttatgccatgaataagctcaataaccctagtttttgtagtcaactcgttttgactagatttctgttttcttaaccgtgacagaacacttttcttttgtgtcgtatataaaaagagagatatcgcgtggagagcatgatgagctagaactggaggagagagagaggagagacaacgcgaggagagagagaggagcgataacgggaggagagagagcgggcgatatagagagagaaagagacctgttgagagagagagagagagaaagagagagaaagggaggagagagagaggagagagaacgggaggagagagagatgagagagaacgggaggagagagagaggagagagaacgggaggagagagagggggcgataaagagagagaaagagaacggaggggagagagagagagagaaagagagagaaagggaggagagagagaggagagagaacgggaggagagagagaggagagagaacgggaggagagagagggggcgataaagagagagaaagcgagagagaatgggaggagagagaaaggagagagaatgggaggagagagagaggagagagaacgggaggagagagagggggcgataaagagagagaaagagaacggaggggagagagagagagagaaagagagagaaagggaggagagagagaggagagagaacgggaggagagagagaggagagagaacgggaggccccccccctttttttgtgctcgctgtcacagcgctgtcgttatcgacagattgtgcggtcaaaggagtggtagcgggggcgtttgttagacagctcgcagccatcgttatgatagataactggatgcgtgagagaggatagagaacgggaggagagagagaggagagagattcgggaggagtgagagggggcgatagagagagagaaagagagcggaggggagaaagggagagagaaagagagagaaagggaggagagagagag

SEQ ID NO: 37234 - DNA, 1368 bp, Heterodera glycines
gtgcgagcaattaagcacgcacatcgggccagatgctggggcatttgtgctgcaccgcaagcggcgcataagtagtgcctcccgacaccggggagcaagaatattgctatcttgcctaggcgggattctgacttagaggcgttcagtcataatccctcagatggtagcttcgcaccattggtctatcgaccaagcacatgaaccaaatgtctgaacctgcggttcctctcgtactaagcaggattactatcatagcaacaggtctttagtagggtaaaactaacctgtctcacgacggtctaaacccagctcacgttccctattggtgggtgaacaatccaacgcttggcgaattctgcttcgcaatgataggaagagccgacatcgaaggatcaaaaagcgacgtcgctatggacgcttggccgccacaagccagttatccctgtggtaacttttctgacacctcttgctggaaactttacacattcaaaaggatcgataagccacgctttcgcggtccgtattcgtactgaaaatcaggatcaagtaagcatttgcctttttgctctacgagaggtttccgtcctctctgagctcgccttaggacacctgcgttacgctttgacagatgtaccgccccagtcaaactccccgcctgacactgtcatcggccgcgggtcgccgggccaaccgggtggcccgacttaacaccaaaatggacaccctttcgggcgcactcccgttttaccgattaagtaaggaatcgatgaaagtagtggtatttcactggcgccttgcggctcccacttatgctacacctctcatgattcttcacaaagtcagactagagtcaagctcaacagggtcttctttccccgctaaatttgccaagcccgttcccttggctgtggtttcgctagatagtagatagggacagtgggaatctcgttgatccattcgtgcgcgtcggtagttagccgacgaggcatttggctaccttaagagagtcatagttactcccgccgtttacccgcgcttaatcaagtttccttggcttaacattcagagcactgggcagaaatcagacacggtcaacgtccacaaggaccatccgtctcctctgttttaattagacagtcggattccccgagttcgtgccagttctaaactggtcgttcagcgccaaccgaagtgcataccctgacgagcatacacgcagctgaagcgctccacaagcagctctcaccactagtccacgcaccatccccgaaagaacagcacgcagccacgggcaaaagccgcctgtttcacgcaacagcccggctgacccgacctttagagccaattcttttcccgaaagttacgaat

SEQ ID NO: 37235 - DNA, 886 bp, Heterodera glycines
ccattttgtctctacagttgttacaggggatagtcctataaggggacatgattattcagctccctggcgggcttcctttgccacattgcctggcagagattgtctgcattttatgaatgagatagccgcccattttgtctctacagttgttacaggggatagtccaataaggggacatgattattcagctccctgtcggccttcctttgccacattgcctggcagagattgtctgcactttatgaatgtgatagccaaccattttgtctctacagttgttacaggggatgatagtccaataaggggacatgattattcacctccctgtcgggcttcctttgccacattgcgtgacagagattgtctgcactttatgaatgagatagccgcccattttgtctctacagttgttacaggggatcatagtccaataaggggacatgattattcagctccctgtcgggcttcctttgccacattgcctggcagagattgtctgcactttatgaatgagatagccaaccattttgtctctacagttgttacaggggatagtccaataaggggacatgattattcagatccctgtcgggcttcctttgccacattgcgtgacagagattgtctgcactttatgaatgtgatagccaatcattttgtctctacagttgttacaggggatagtccaataagaggacatgattattcagctccctgtcgggcttcctttgccacattgcctggcagagtttgtctgcactttatgaatgagatagccaaccattttgtctctacagttgttataggggatagtccaataaggggaaatgattattcatctccctgtcgggcttcctttgccacattgcgtgacagagattgtctg

SEQ ID NO: 37236 - DNA, 651 bp, Heterodera glycines
ttttcgcgtggccattttcgcgtggccgttttcgcgtgagggccgttttcgcgtgagggccgttttcgcgtggccgttttcgcgtgagggccgttttcgcgtggtgacgttttcgcgtggttgcatataaaagagaattcataactcacattatattttaccaaaatttgtttcactcttttttctaacgagtttttattttattatataatatggaccagcagcaaaaaattaaaacaaaacgaaacaaagttaagttagaacatgacggcgcactctatacgacattaataacattcacctcccccaaaatgatcacaattatgccaatgccaatgtgaatcccgaaaacattatcaattttctcactggtgtttcccgaaactatgaaatgcgaccttagtttgttctgaaatttgttattttttgttatatttttataaaattttaattatttttttccgtttgacgcacatccgaccaaactgacaaattattgtagaagatatgagccgcaagcaaataaaaaaattaaactagtaagaaatttgtccatatgcggcgtcggattcgaaacatggatgatttgcacaaacccgaccaagttcattcctcaactgttactgactcgaaaacggcgccacgcgaaaa

SEQ ID NO: 37237 - DNA, 1284 bp, Heterodera glycines
  unsure (1)..(1284): unsure at all n locations
ccacccactgaaattaccgctacttcgactaactaatattggattaccaccgtccttgacggagtgtatcttcggcatacgattcccaccgctggccatctaaacaacttttaaatgaaactttttaactaaataaaatattcttagctcatataataaatatcctttacacaaataacttttaataagtgatcacttattctcatggctttttcttttttctgactttccatttcactgatttttccacaagatccttctgatgcttttgaaacaaccagccacctttcagccgtcaggttctggngggntgggtaagttgtctttttcagaggttataaacacccccaggttttctaaggttttttattttttttatggccaaaggggccctgtgggaaaatttttttatgggtttttttaaacaaaaatatttttttttttttgcccccctctataaatattttttttgggggagaaaagaaaaaaccccccccaaaaaaataaaacacattttttttttcccccacaaaaaaaatttttttttgtgtttttttgaggggccgtcttttttttaaaaaaaaaaaacaaaataaaaaaacacccacccttttttttttgttgtgggggggtgtgtttgtggggccccgcaaaaaaaaaaaaaaaaaaatattccccccccccccccaaaatttttgggggggggggttttttttgtgttgtgtttttttttttcacaccccccaaatcttttttgtgggggggtttttttttttttttgggaaaaaaaaaaaaccccccccccaaaaaaaaaaaaaaaaaaaaaaaaaaaaaaaaaaaaaaaaaaaatgtgtggtggggggggggggggcgccccccccccccccccccccaacaaaaaaaaaaaaaagaacccccctctctccctcttctttttttttttttttttttttttataaaaaaaaaaaaaaaaaaaaaaaaaaaaaaaaaatttattttttattttttttttttttttttttttttttttttttttattttttttcaaagggaggggggagggggggggggggggggcccgggggccggcccccccccccccccccccccccccccccccccccccccccccccccccgcgggggcggggggggggggggtgggggagtgaaagagagaaataaaaaccccccccccccccccgcccgcgctctgtgttgttttgttttttttttttttttttttttccccccccccccccccccccccccccccccccccccc

SEQ ID NO: 37238 - DNA, 389 bp, Heterodera glycines
cccccccccccccgggtccaaaaatttttaaggaaaaataatattttggctgaaaattttaggttttccttgctgggctggtacccccaccccacagacctggcctcacccaaattttccaagaaatgtcgctaaatttttcaaaaaatccacaaatttttaatgaaaatctgctaaaaatggctcaaaatcacaaaatttggtcattttttggacaaaatctgttaacaaaccgcaaaaattttcccggcggcgcctatcggcaccgccggaccccctgtaccccaaaattttttttgcaaaaaccgcgccacataaaaaacgggtgtgaaaagcaaaaaaaaaaaaaaaaaaaggtcgtcgcccggggggaggtgtccccccccaag

SEQ ID NO: 37239 - DNA, 516 bp, Heterodera glycines
tttttttttttttttttttttgtgggtggggggggggggggtggaagaacccccccccccccccaacacaaacacacaaaaaaaaaagaaaaaaaaaaaagattttttttttttttttttttttttttttttttgtgggggggggggggggggggggggggggggggggggggtgggtaaaaaaaaaaaaaaaaaacaaataaaaaaaaaaaaaaaaaaaaaaacaaaaaaatctctcttttcttttttttttttttttttgtcttctccccttggcctgctgcaaagaaaaaaaaaaaacaaaaaaaaaaaaaaaaaagaaaaaggaggggggggggggggggagggtagagttggcacaaacacaaaaaaaaaaaaagaaaaaataaaaaataaaaaaaaaataaaaaaaaaaaaacaaaacaccccccccccccccccccccccccctttttctttttttgttttttgggtggctttcctccccccccccaaaaaaaaaaaaaaaaaaaaaaa

SEQ ID NO: 37240 - DNA, 999 bp, Heterodera glycines
tatagccctgggagctgtcttgatacctgtcctgagtgttttagcccaacatttattagaaaaaataacatcatgaaatttgcaaagaaaatgttaatgattcccgaggcggaatatttggctctacggagtgcgatgaatagtggtgattatctccaaaatgaaaaagcgagtttagacgcaaaaatttctcagaatttacaagaccccgacataagcgaggacctcaaggcgaagagacatgattggctctataaagaaaggcgtacggtaaaggggatacttgaaaatagaccacagaaggtagtgattgagaatcatgtaccaggtccaaatgttgcaccatatctgggcctcaataaccaatccaaaccacaggagaccgaagaaccacggaaaataattattcctaggaaaagacttaaagagcaaactcctgatcctgaatcagataatgatacacttgaggagttaagtccggaaccccaaacaacatccacactcaaaacacccgttccgatcaaaactattatacacccgacccttttaaacggtctttttaggtacgtgaaggaaaacaaagatttatttaaaattacggcggccggaaaggtacagtcgaacatgaatttgccgattgaaaacagtaattatagagatgttttgttgtatctcgcagggaagaaagatgaaacgccgcgcggtgcaaaatttctcaaagatcggttactgaaggatccaacagtaaaagacatggttgataaatcaaaggtcatgtggggacgtggaaggaaaaaggcaataaaatctataaaaacacccggcatagtgcgagtgaagaaacccttcaaaccactaatatgggcaagactgtagagaaaattttatcgaaaattattttaatttaaaatctccgggcagttttgctggaattcaaaaaatttttaaatgcggccaaaagatttgaccgaaatacgaccgatgacgttaataaattcc

SEQ ID NO: 37241 - DNA, 898 bp, Heterodera glycines
cgttccctataataatacgtcgccgtgttcagcattaatctgttgatggaattcttcttcattcggaatgtccatgtccatttttgaaaattttacacggttttgttccttttccgtctgtcgatgcgtttggtcttccgtcggcgtaagcaaaaatcgcattttctattaaattttatcaccgaattaatgaatgatgttcattaggactgctcgagtcggtctcgggccgataaaattccccatttatggccaagagtcacggaaaatttcagtttaaagcagtcctaaatttaatgtcccaaaagtgtgaaattcgcacctcgccaaaagttcgaccctttgcttttcccatttgccaaagtgcgaccaatggaatggccgaaactgacgaaagggcaaaaacaatgcccaaagaattggccaacggaggataaacgtagtcttggtactgaaggggctgcaggttgatgaaactgctcagaatcattgcctaattgggggggggggggtgggcaaatgggcaattaatgggagccattaaaatgcgttgaatcattgacgtactatcagaaagaaaggagcccccactgtccaacagattctaaagacaaaatgccaaagtgcgaagggaaagaaaaagcaaagccaaccgccaataaaagccgggctcaaagccgagcattgcgcgaatgtcagcacaaaagcgacgaatgcctcaaaaagtcattgagcaactaatgggatttaaaagcaaataccgtaacagaatgagatgaccatagtctaaatgaattatatagtatgtttaggataggagaataggaacatacatacggtaggaaaattggttaaatattgggttacggaaggagaatgggtaaatgcttaagtatac

SEQ ID NO: 37242 - DNA, 1030 bp, Heterodera glycines
  unsure (1)..(1030): unsure at all n locations
taaaattaaatttccttatnttttccattgtttcagttggatttgcaacgacgtgtggatggacattcttccatcttttgaccgtccccaactcggcctaaaaatggcattgctttctgatcgtttcgatgtgctggtggacaaacattttgatggaaaaagcgaattgacaatttggaataccatttcaattgaaaccagaagcgaactgtctgtgctgagactgactgatttcaaatcaatgaatttttcgttgccggaccgtccgctgcccaacaaaattcgttttcgtttccttcggattgagtaattaaagcaaatcttatacagagaggccaactgatattaattaaaaaaatttcaaatatagtaattttttgtgtgtattatttttgtgccccccttttcaggtacattgatcattccgtcatcgaattgctccgctccaatcagcaaatcttcgacaaaggcacaaatttgtatttgaatttatgttcatccaaagccgaaagcaatgtccagccaatttgggatgtttttgtccatcaaatttggcccattcttacgacgacaaatgtccatcatttgggctttagcaatgctgatcatttgaacactttgcttcgtctcacatcgccgacaattctctccgatatgaacattaattcaatcgaatctggtcgtctgttccccgatgcaattggtgacgatgatgggccaaatgcaacttctgctggccaagttttgtcaaaatggttacacattccgagaacagatggtcaaccgaggaaattgcgctgcgcttcctctctgttaccgccaccaaacaccgagtggatcaacagtttcaaagaggtgtgaccaaactttcgttaaacgactgactaattgatttgcgtttcccattgtttagacatttctccgtgccaccgcttcagtcagttaccaagtgaatttcctattgagaagtccaacgcaaattgagccatttgaattggtgaatgaagggaccaaagaaaatttgttattg

SEQ ID NO: 37243 - DNA, 1069 bp, Heterodera glycines
taatttcaatgactaaattaacgactttaaattctaagaatttaatttttatttaaggagttgcgacctagatatatagaaagagatggagcatgtagtaaaatttctaaaccgcagaggatataatattcctagagttacatttcttttttttaatttgttaattggatttatttttttcatattttgatttttttaaatatttttattcctccgtttcccctttttccatcgctcttttcttctgtttgtctcattttttgtgtgcctcgccattcaaatttgtaattttccattttatttattttttatttttttgttttcccctctcacacgtattgaaattgttttctcctgtccttccgccatccgtccgtccgttcagctgactggcattttattgctgttcatcactctttgaaacgtaccgcttccggccacggcattggcgcatcgccaacgatggcacaaatcgcctccggcgagcggatagaagagggagaaaggggagaagaaaaagaggcattttatcagtttagtaaccgccgctgctccccgcgccgcctccgtaaaatggcaaaatggcaccattttacacaatcctatccccgagcgaaattcaaagcttccctttaattaagaaaaaaatatttaaaaattaagagattagctttaaaatttaaataaatttgctaaactcagtaaagcttttttaatttatttttttgttccttccattttatttgttctgttttgggttggtgggcttttcggcaactcaattcggaaaacatcataacatattccaatcaaatctcttcacctgtgccccaatttttcttttccgggaagtgtaaaaacgaaaattagtggcacattcagaaaagaatggcaaatgccaaaaacaataatcaaaagtaataagaaattaagcggcaggtgacaaaatttgcgtctgtgaccccccggggggacggaaagggaaatggccaatcatccgccgcttattccccggcccaattccccaaaaagctctcctctcttttcgctgtgccgtcgtttttttttg

SEQ ID NO: 37244 - DNA, 1513 bp, Heterodera glycines
  unsure (1)..(1513): unsure at all n locations
aggatgggggcgagccaaggccaatttaaaaaccatagctcctccctcagttgacttcattttacaaatttgccattgtttcaatacttttatcaagctctatattagatcaaaaaagcacaattaaatatttgctaacatttaaaaaattttacttaataaatatcgcaaaaattctgagttttttaagcagttaggttgtaaaatacgtatagttttctaatttcaaacttataaaatagagccaagattgagaaaaaaaaaatatggcttcttaaaataaaattattttttgtataaaatcattgggacataaagaaatgtatggcatgaatatttgtttaaagtgcattaattgttcagtcagctgaagaaaaattggagaaaaataaagaagctgattgaaataataataataaaaagaaattcccattgattgtttgataaataactcattaaaaataagtcctaatttaacagaaataaattagctttacatttttcattgataaataactcattaaaaataagtcctaatttaacagaaataaattagctttacatttttcattgataaataactcattaaaaataagtcctaatttaacagaaataaattagctttacatttttcaaactccataaaggtgtacataaaaatttatgactgattttattaaataaaaaaagtaaattatgtatttttaaaacaaattattattttttctttgcgattattcacgaaaacaaaagcaatgcaaatacacaacaataattaaaagtgcattttgtgagcttttgagaaaataaaaagaaaacaaattagggcgttaatatatctcgattatggcaaatcttaaaataaaggattttatttatccgacctatacaaataagggcaaatggcagtccttatttaagaccatcagattattgcctttttacgccataattattacatttttgttggtaggggagaaggccgcaaaatttacgcaacaattcttttcatatccatttatttgaacagtggcaatcaatcctttcgcattataaaaatgaattaccacaaatttttcagtttcccaaaaatatttacggcaaaccgacaaaaatttagaaattaatacaaaaatagaccaaatattaatattttttttcataacaaaggattggaatcatgaaaatataatattaaaattagttaggtcaatgaaaaattatttatcgaaattaatgctataggttttatgtgaattacctttcaaagctttttatcaattaaccataattggtctccatagcacccaccatttgaactttggctcccagacgaaaaaatacaaaatttcattatatagacaaaatttataattgattttctaattccaaaaaaataaatgatcaagaccataatgacgaaattattatgcccaaaaattgngtgggaggnggaagggcggcggtgccgaaaaaggtgtcgancgaagagagaaaatgaactnntgaccta

SEQ ID NO: 37245 - DNA, 364 bp, Heterodera glycines
tcccagaaaaaaaaggtcgaaaaaaggaattccgagctttttttgttgtgcactcaggggttttcgcaggcgctgatcacgaatatgacatccatttcgacagaattcgagccccggacccgatttcgaacaaaaatcggaaattaatttttcaccaaaattcaccggtactagtggactttgtatccgcttttttttttttttcgcatttttcagttttttttacttttttattgtcacaattgctttaaataacaaataaaggagctttatgtgcttattggatacaattccgcgatttgggtccacaaattaaaaaaaatgtccggtcctccaaattgcctacgccacaaaaaatcggaaa

SEQ ID NO: 37246 - DNA, 1306 bp, Heterodera glycines
cttcagaatggcttctctctgccgcgtctcttctcccccccacccggaggtttctcgtgccttcgtcttccgcgtgatgtcctccactttcttcggcttttccctttgtttcgcttctttccttcggtttcgctgcgtttcgttcgctgttccgtcgtcctccgttcgctgctccattcgttcgtaacaactcttccgatattggcacttcagttttttgtgccgttcatccatgccgtgccatccttcgatggcttcttcttctttcacttcattttttattgccattgtcacccataaattgtgccattcctcccaaccgtgcccccgcttttcatcttcgtccccctcttcctgagtcgcccatcttcgaattggtggcttcgttcctgtcgcataacaactcttccgatatcggcattccaaccgttcttccttggacagtccttgccatttcctttcccaaattttcgtcttttcctctttcacttgcgctgcttcaactttgtacttcttctttttctttgaaattctttttggtttttcttcatcttcggtttgtttttcgtgccctttcctttcttccttttcctcctctctcttatttccttcttcttccctttcttccttttcctcctcttccgtttcttccttttcctcctcttccctttcttccttttcctcctctctcttcttttcctcctcttccatttcttccttttcctcctctctcttctttttttccccttccattttctcttttctttctttctttttcccattaacttccttttcctcttccttctcttcttctttgtccttctcctccccgtccatttcataaaaatgcttcttcaattgagcttccccattcctattccttttcctcctttttgatttcttcctcattttttccttttcctcttcttccgctttcttattcgtgtctttttctccctccttttcatcatcatcattttcgcgctttttctcgtcttccttaacggaagatgcttcttctccctcatcctttttttctctgcatccctccaacttttcttttttctctttcaccaatttttcgggtgaacaactctttttttgtttcttttgccttttcttcctctccatctttcccacttccgttttctcttccttatcctcttccccctcctccttctcttttccctctttgtcttcctctgtcccctcactttctacgtctagcttttcctcctttcttctatctttccctctgttcctctttctcctcctccttcgcttcctcttcttcctcatcattttc

SEQ ID NO: 37247 - DNA, 1165 bp, Heterodera glycines
ggccgagtaaagcaacgaattttctaaattttttaaaattttctccttttttaggtgccccacggatttaactctcggcaagacccaattagaatttaatcgagtttaattttcaatatttttttcattctctttacagtttccattcgattcgcagacccgcaagctccggcatcgaaagctcgtaaaattttttcgcctcgatttttttaatgggggtatacaattttacaaaattaattgttttaatgaaggcttttttcatcggtgttaggggttgctcaccgaaattttttaaatttctctaaccttctccgacaaattttttcacagaatttcctccccgatccacgacttttctctccccgaatgtcggggaaaaccctaattttgtcggaatctcgaaaactattttaaaaaattgcattattttgccagatgggtacacctcggaccaggtgtcctacggctggtccaagggccaacgcgaggcactgaaactgcacaaaattcggctgcccgacttccgaatcaaagaagcatttgtcacttcccagttggaatcatatgcgaccggtaaaaattgtttaaataatttttttaaattttttttacattaaaaaataatttaaattatttatttaagttttgatttatttgtctatggttcccatttaaaaacattcgagaatttcaaactcttggaataattccacaaattctaagtctcgtaaaatttcagaaatttttagaccttggaaagtctaaatttaatattttagaatttgttgtttcaaatggtcaatgtcttatttaatgagttaaaaataaattaatattattattttcaattagtttaatttttctctaagcaattaatcgatttaaaattttcgaaattttctgcattaggaaagtttttttttcgccccaggcaattacagccgtttgtacgtgtgctttgttttttcccgatcagccggcttctgttttctgcaattgatcattccgtcaaccgtaattaattaattatttttttttttaatttccgaaaatttaatatttttcaatttttttcttgcaaaaaaggccgttgtgatcacttcatgggtgtcactttgggtgggaaatgagacatcttttcagggtaaggaggaaatggaaa

SEQ ID NO: 37248 - DNA, 933 bp, Heterodera glycines
  unsure (1)..(933): unsure at all n locations
aatatttgccaattttcattgaaaatatgtttaaaactcccccccatttctatttttacccaaagcaccgttgagcccaacataaagtacttttttcgtttaaaaattggcccaaaatctcaaaaagttttttttgtgaagatttattaacaattttcaaaaaattttattgctaaaatattgattttgaaaaattccagttagcagcctctgggaaagcttaccatatcttctttccctaagctttatcctttttacaggcaataacaacgcctcctatcggtatgagtcttctacccccctgcgagcctcagcttcaactatcaccacctccttttcgattgccttacgcaccattgttgccggcttcacatccggcaacaatttcacaacctcccccaatcctttcgccccaaatatatgcgcctcgtcaaccgccacctcccgcacaatctcgttttgtacatattgcaccgcttgcaactgtaaatggtggtccggttgttcccactccattcccgcgggtgccaaccgcctcaattgttcgtccaatgccgacagctccggctaagccagcgaacagcagcaagtgcaacgaatgtggtcggcgatggcgcaaacaaatcatctgtaaacggacgcgtggctcttcatttggcccatctgctgcaccggtgaaggaggaacagatggaggaagaataatatttagtgctgatcagcaacgggtgatggttaagtcctggatttttaggacccaaaaagttgcaaatgatagggtttatgattctanaaaaaaagtaaaacagaaaaaatacagaanatttanatttttggagcatgaaaatgattgactanaaattatttttttcataaattttattgaaaattttttactttaattataaagtatcttaatataatgggagcaaaa

SEQ ID NO: 37249 - DNA, 154 bp, Heterodera glycines
gcttcgaagcgagaaattgcttaaggggaaggggtggcccacgcggaggaaagggactgagactcactcgtctgcgagaaatcagtcccgtaacgtttgcccaacgcaacgccaacgtcgccctgagtgaagccttaagggggggggggggggg

SEQ ID NO: 37250 - DNA, 825 bp, Heterodera glycines
tggtgaaattcagcagtttgcatcttttgcaatgttttcctctggtttgatgagcttcatggatgcttccgacctcttcactcttttaaccaattgagaattccttggctctccgcccatttggccactgtactttttttgtgttgttgtgtttcatttggatcgccccccccccatttagtcttctttgaatgccgtccatcttccgttgtctggtaaacagattttagatgtcggatgtggtgcaggcattttatcgacttctctttgtcgacgaggcgctttagtcactggcttagatgcggataaatctgtgctagaaattgctaatggttataaggaaacaatggcgccgagtcttcgcaaaaaaatagaatttattcctggcacgattgagagacttgcgcaagaaaaggatcgaatcggaagttgtcatccatttatgtccatcaattaatcagataagaattaagcattcgatgcggtcgtttcttcggaagtggttgagcacgtttccgacttgcccttgttcattcggagttgttgcaaattggctcgtccgaattctccaatttttttcacaacaatcaaccgtacaatttggagccaactcttggctaaaacaatagctgaggttttttccttcatcttctttttactgttcatgcttaggatttgctccggatactgcctcaagggttgcatcaattcgaacaatttgttgctccgcgcgacttgcgcaaattgctactggacgagcagtgcagcgttgggccggtgcttggaaatggcctacacccattttttaacatttggaattggact

SEQ ID NO: 37251 - DNA, 565 bp, Heterodera glycines
tttttgtattaattgccatgacaccgtgggaagggtgggggaggaaaggacaaatgtgctctttttctttcgtttgttttaattattcgttgtttttaacactcaaaatgagactaaacatatgcgtagatgacgaatgcgtttgaattgttttgtcctttcatcctccaatcgacctccccccctttttttattccgtcgcatttcccccccccccccctcccatcaaattcattcattcggtgcgacattcacccgagtgacacatcgattgacaaaaagtgagtcaccgttaatcaactttcccaccattcatcgtccattactctacgacggaaattaagcagcaaaaaaattgtgggaaggaaaagcgaatcgtaaattggcaattattagtaaaatgtgcggttaagtgaagcgtagtgctgcaggtgacagcgcaagtaaataacaataaaaaagacacttggcactttccaattttagattcgctatgcatttttaagcgcagctgaattgagagcgcaaagggaattattttattaaaggaacggagggggggggg

SEQ ID NO: 37252 - DNA, 1210 bp, Heterodera glycines
  unsure (1)..(1210): unsure at all n locations
ttgaagctataatcaatcctcaagaaattaattaaaaattgagcaaattttcaaaaaattattgatcaaatgctttctctttaaattgttcgtttaatgggtttcgctgataaactgaacaaattttgcaaaatttgctgcagcaagattttttagggtttctttgataatgtgaattctttaaattgttcttaatgggttttggcgataaagtgatcaatttttctaattttgtgctttcatgtgattgtgcattggcttgacaattataaaagggttaatttttcttaaaaattatatttttataaaatggctaaattaaaaatatttttctttgcatttttgattttgtcacaaaatttgacaatttcaaaaccaattcgtcgcaaagaaagagaactggggactcttgcggctattgcaattatttcggcaattgttctaactccaataatacttggttcggttgcaaccggcattgtaattggttatactttaaaagatggaagtggtcgtgaatgtatgaatataaatttaaatttaaaaataataaataaaatgataattaaaatattaattaataatttaaaaaatcaaaaaatttgttcagataaggagtacctcaaactttttttccccatcaaattttcgtttggcgaccgcgaaatttcaattgatttggaaaactttaacaattaatttttgtttcgaaaaattggtgaaatgtggtccatgccaaatttggatgagatttgtttttttggtatgaaagaactgataaaaaaccacataaatcagccttcctttcagatttaaaaggaacaaaaagacgccacactcgatcgggacaaattgaaatatttttattttatctgtcaaaaatggaattgcctgtttcactgaattcttgttgattgctattttttctcgttagcccttgagaaaggcgaataaatttaaataaaaatttcattgaaaataggttaaataatatttgtatatgaaaattggttgaataaaatagaatttaataaattaaaaaaaataataattgttattgataataataaataatttataaaattgttagtgtgtatacagaaagtatttctatgtgtgaattttcaataaaaaggtttctttttaaaaaatgatttattattttatataggatgtattttattggcacgattgnttttttctaaattaa

SEQ ID NO: 37253 - DNA, 1312 bp, Heterodera glycines
ctatataatgggacatgataaacatagattcgtttatgccattaaaaaaactttatgcattttaaaaaatctgaaattttccgatttaaatttatttttttaattttcgaaaaacaataaattatttctacactcgacagtattatacaagcttgagtgtgaaaataattattaacaaatattttgattttcgaaagccgataagtaggtaatattgaaaaaatccattttttgttcataacttattaaatttaatgaaaaaatataataacatttaaaatgaacagacaacatagttaatattaaaatcgcattcttgttgatattaatccatatttaaatcatctttaaaaaagctgaacaaaatataatataaataaccaatagaagcgcattgtattatctaaaagcaaaaatgaaaaattttaaataaatttatgattaagacatcatataactggaggaaatgacaacattatagcgaattaatctattacagtatataaaataataatgaacattctgataaaaaaaacttatgttgaggttataaatggaaaatattcatctctactaatattttagatctctgcgaatatatcctccaccttttactattgaattaattaaataaaagaaatatcgtaaaaactaaacaaaaaaagctttccaatcattaacataaggcctaaaactaagttcgataaattgaccaaaacttattatatatgttaactaaaaataaaaaaattgcctgtatgcaaccacgaagattagcagcaatgcaagtggcatgatttcaaaaaagtcgaaaatttgttggagccatacaaaataaataaatcaaataattttaaataaaataaggtaaaatcgttaatttattaagcattagcaagtcttaataaaataataatatatatgtttcaaaatagcgaaaatgtaaaattatttgttttaatagataaaaacgaaatatacaccctaagaatcaacctaaaaattaaataagaattaaatacaaataataagaaaaaatttttatgtattgaaattataaaaagtcgatttaaataatatttaagaaaaatactaataaattcagcacatctgtcacccctggttatttgtcagcaaattttgctcaatatgtagtgacgaaaagtccaaaaaagtgttcctaagttgcagggttacgttatattgtaagtatgtgcaaaaactatagaaggaaatttaaattttaaaaataaatttccaacacattataccctttgatttatttaaaattgtgattaaatgataaataaat

SEQ ID NO: 37254 - DNA, 919 bp, Heterodera glycines
  unsure (1)..(919): unsure at all n locations
gttttgcctcggtttttcaaaatctgtcccacggtgattatccgaaatgcccaaccatcgaaactttattattttgttaatatccttttttcttttattatatttttcgttcttttggttgcccagttgagaatttgttttttacttttgtcctttttcattttgtgctatttctttttttcttaaatttgacttttcaatgaattaattacaatttgcgtcttccttttttccatttttatttttatttaattttttcttccatttaaaaatgcggatttttgtaaaaaaaaaagtcagaatgcatgtaattttgtagacgagtatccgtactgtaaggtatttgtgtgttaggaaatcagctttttcaaaacttcatgaagtcgtcgtcactaaagttaccagctctatttattaccatttcccaaaaaatagtatggcaaataatcataaaaaatcattcttttattccgtattattatattaatttgattttcccaatgaataatcaatcattcacaaaatatgaatggtcattcattttcatcacaattcacacataaaaaaggaattttttcattgtagcaaatctgtgcaaatcgatgatttatttttttattattatatccctaaaaatgactaaattagtgaaaattgtgcaatgattttttaaatttaaaatttaaaaattttaaattatattaagagagcaaaatgcatcttttctatgtgttaattgcttctgctctcttctatttgcacagcttcgcaaatggacaatcatcgcctgaaatgtaaaaataataatttaatttaatttaatttaaattattgttttaatttaattntttttttttgaggttncatttcgacgatggcagaagcggggaaaagccaatccaataccggacatctgctg

SEQ ID NO: 37255 - DNA, 714 bp, Heterodera glycines
  unsure (1)..(714): unsure at all n locations
taaaaaaattgtaattttgaaaaaagaaccaataaaataaacataagataaaaaaaagaataaattatattaaattttacttttaatttcgtgacaccatctctgacacatcttatttatttaaatataaatttagcataaaaaattattttgatttaaaaatcattaaatatatttttattcaaaaataattatttttagtagcccctgggaaatgcagcttctttaataaattgtatatttaaaccattgggggaatttagaattcaatgtgtaaatcaattttttaaattgcatttgattaaaatattaattgttgcagattatcactaaaacaaaaccatttttaaactttaaatacaattcttatattattgattattaaacaatttaaagtaaaaggtagttataatacaaccaaaataaaaatgaataaaattcaattacaaaagcagtaattttcaaaataaaaaaacaaacaaaatgataaataagggacaaaaatttggattcaaaaaatgtcaaaaaatagttttcccaagaaagggtatatccacttaagcttcagccaaaactgataaaaactataaaaaggaagtaatgtttaatcttacttaattttagaattaatttttttacaatttatattaatataagtaaattttggaaaatataatctangataatatcaggccctgaaaatttctttcaaaa

SEQ ID NO: 37256 - DNA, 970 bp, Heterodera glycines
ttctgtcctcttccatgttggggagtgataaaagatgaccaatcgaccgactcgggatcgaaaaacacatgtgtcattttttaaaatatacttttcttaaaatgtaatgtaagaatacaacttcccccagtgaaatttaacgaattcaccaaacggtgtgtgaatttcaattgtaatttctgaaattcgtttcgactgtagacgatgaaaatactcggtgctatatataacttcactaattgatcctgggtcatcgacgacgttaactattcttaagagtggggccatctggttgccgataattgtgttttcgattaaatttggtgcataaatgtatagctgccttacacctcccgtcaaatccggcatataagtcgcctcttccgcgtgaaatagccttgtattcttaaaccccagaacatatgcgaggtgttttgacaaatctatatgggtgacggcaaaggaaagatagacaataaatttttgatcaatactgtcgtagttaaattgaacatcctcattggctaatctctctcttttttgcggccctttttcagcttctgaaacttgtctattttcaatttccttacgtttaaaatgcccaccgagcgcctcgttaagcctaaccaccatcccgctaaaacccttttccgatttatcattatattcctcgagagttgatgtatatttggtctttgcctgtctggcgattccctttgcgacgtcggctgatttctttgcttctttcatgtcattcttttccacatgctccaatgttatgtttttggctttatctacttcttcttgaaaagatttaagttcatttcgggatgtttgaatttcggttcccatctcaaccattttgtcaaaccaaatttttatatcaggctcttctaaaatttgaggatttgtttctcgtagtgtgtttagttggggttggatggaattggatatattgttgatatgatta

SEQ ID NO: 37257 - DNA, 989 bp, Heterodera glycines
  unsure (1)..(989): unsure at all n locations
gttagggttaaatctttatttgactaaaaaaatcantcggaaaaattcaacggaaatatttattaatttttgcgaaaatttgtttaaaattgagttaagaaactaaaataatttccaggggggtccaaaaccggcctaatcgaaaatcagtacgcccgcttaacaatcaatctgatttaccttttaccactgtttgctttttctatttcactattttatagcccctaaaatccagcattcggtgaatcaaacctaaaatattaaattagcattctcgtgcagcaacttttcgggttctgtagtctaaacattcaaattcgtcattaagaagtccgttttattttaaacactttttgaaagacggcaatgattaaaattttaacttttttaatgcaaaaacaaaaaagacacccttaaaatcgacattaaaaattctaaaaaaaaactcctatgaaaaaacttgccctttttctgtatttttgttatattaaaattgttaataaaaaatgttttcccgtttttttttaaatttatttttttgtgtttctaatttaatgtttaaattaattttcttcccaatataattcctcttctcattatctcctctctctacttttctcttgtttcactttcctctctctgtctctcccacatcctttcggtgctgggacgttagtcaaaaccatcaaaatgggcgttaatcaaaaaaccatcaaatggaaatttgttgacagaaaattattcataatttcgcataaaatggatcaaattttataatcttgatatttttcgatagccctaagtgttttctactatcttgcaaaatttaagtttaaaaaaagttatgacctgagaagctcaaaaaattttcagtcataactttcttgatacttaacgaactttttgaaattttgtaggctaatagaaaacacttaggcctatctaatgatatcaagaattaaaaattgagttgcttttgagcaaagtta

SEQ ID NO: 37258 - DNA, 1358 bp, Heterodera glycines
  unsure (1)..(1358): unsure at all n locations
cgatttgcccgctgaagaattgtgccaatgcgaaagcagtggaaacgcacaattttgagcggacaaattagagccaatgcgaacagaatatttggcgaattgatacattttgaggtgcaaatgccgatttaaaaaagaaagaaaagtaaaagcattcggcacaaaatgaaattaaaacattacaatttttaatatattccacttattaaattcaccaacaaaaataatgaaagaaacccattattaaactttaatgcatacttattgggtttgttcgaaacttagtctttcaggaaatttgtttcgattgaaatggccaatgccaaagtggtctcattcggctgtttaaattctgcttcgcgctgtccgcgcgtggcatccaattgacatatctacgtgcgaacactcgcggcaacggaagcccaatttatttggcatttattgttggcattgtgcaaacatttggccaaaacggcacaataaaggcaattttgaatgaattcggaatgtttttgacaattatttaggaaagaaattataaagtttagtaaattccattttgacaatttcagtccgccaaattattgcgaaatttatgaatttccgagaagtttattttattttgtctaaaatattttgaaatatataaattttaatgaaatcatacaaaaaaaaaacaatgaattctcaaataaaaatgaaaaaaaaaattaaaattacgtaaaatctttttgtatttattaaggttttcttcaaagtattaaattcaaatttcgaaaaaaatccaagtataggtatatcaaaaattcagatcaaacccattttttaaatatttcaaaaaatccaaggtatattacaaaatgaaaaaaaaattacacatttagtcttggctgatgtttttttttcctgaaattctttatcttttatgttcttcatttgatatatttttcgcctttttaaattgtaaacattgaaagattcgaatttttgttgaaattagcatatttttttcatttatctcattcaattatttatttttatttataaagtcatatttctgacacttaatttgactttactcattctatttgatatatttcccattctttcattggaattaagtacaaattttcttgaggcaaatgagaaaaattttcattttgagaaaaatggcgaggattagtgattgaggtgtaattctgaggaaaggagacgcgacattcccatgcatatttcaatgccgtgattgagatagcttttaaaaaaattttttggcgtcgcatttcgtaaactgtatccnaatgttgttngttttttattagaaaaactttaattacatctcatatttttccatgttt

SEQ ID NO: 37259 - DNA, 561 bp, Heterodera glycines
ctgaaagttttttcttctcagcggtctttcatgactgcgtaccagctcgtgcgcagttacgccgaagccaaatttgggccggcaggagcaaaattcatgcgaattcaccgctttcgcctctcgatgccacccatcgatgaaaaaatgggggaccagccttgcatctgccgcctacatcggcatggttgcgttgttgacaggccgagcagtgcgcgccgattggtgtgtcaccggcgcactggatttctccctctttttcggcattttttgttatcttctctttttggcacttttttccattccgcgcattcattcattttcacccacagaacccgcaaaatcggcaaattcagccgctgtgcgaaaacgtgtggtccaactgttgaagttcgacggcgccgccggcgagtcgaagcggcgacggcgcagcctcagcgacggcgcaaattcgacggcccaattgttgggctcgtacggcgtgctgctgggcgagatggtcgactgtgaaagcactgaatgtgccggatcgtgccattctgaaacgcactgcgatgaacatgg

SEQ ID NO: 37260 - DNA, 859 bp, Heterodera glycines
attgtcaattattatcacatcgaaattcacttctgctggagataagaaaggcccaaaatatcaatcaaatggcaaaaaagggcaccgccaccaaaggaaaagccaaaggaaaagccaaagcaaaataaaaaacaaatgccttttccgtcggccatttgcgaaggcaattcgctcttttggtccaaaagaaatgaatcggtcagcatttttccgcctccgtccgccgtcgaattttgggaggcgttgtgatcaccgccaaccgcggaagaatcggaagagttgggactgaacaacggaggttggccggacgaagacggtggtgaggcggcatcgaaagggagggggaggacggacacctgcgaaagtgcagaaaaagtgatgagtcattgggtggcgcaaatgcgaaaggacaaaatgatatcgggggaagaagagcatttttgaaacttccaaacagagagagagagacatacccatcaataaatttgaaattgcaaataattttatgatcggttaattaattaattaattaattgtccatttcccccgtccttcaccaccgaatggtccctttgctgatgatgattgttgtgcaaaagctgttgcatttgtgcggtggtcgtctgcatttcacaaattgggagacccaaaaagaaaagggaggggaggaaaagcgaagtgatcagcaacaggagagaatggagcaaaattaggacattggcaaatgactgaaagggacgaacgacggacactaattgttggacagaattgctgatcgatcagaaatatggacggaaatgccatccataaagggaggatgcggtaaaagcaaatcctttgaaggtgaagtgaaaaggaa

SEQ ID NO: 37261 - DNA, 1230 bp, Heterodera glycines
  unsure (1)..(1230): unsure at all n locations
tgcttttctaggaatttataacgtcatcggtcgtaattttcgggtcaatctttttggcctcatttaaaattttttgaattccagcaaaacttgccggagattttaaattaaaataaattttcgataaaatttctctacagtcttgcccatattagtggttgnaagggtntcttctctcgcactatgccgggtgtttttatagattttattgcctttttccttccacgtccccacatgacctttgatttatcaaccatgtcttttactgttggatccttcagtaaccgatctttgagaaattttgcaccgcgcggcgtttcatctttcttccctgcgagatacaacaaaacatctctataattactgttttcaatcggcaaattcatgttcgactgtacctttccggccgccgtaattttaaataaatctttgttttccttcacgtacctaaaaagaccgtttaaaagggtcgggtgtataatagttttgatcggaatgggttttaatgtggatgttgtttggggctccggagttaactcatttattgtatcattatctgattcaggatcaggagtttgctcttcaagtcttttcctaggaataattattttccggtgttcatcggtctcctgtggtttggattgagtgttgaggcctagatatggtgcaacattcggaccgggtacatgattctcaatcactaccttctgtggtctattttcaagtatcccctttaccgtacgcctttctttatagagccaatcgtgtctcttcgccttgaggtcctcgcttatgccggggtcttgtaaattctgagaaatttttgcgtctaaactcgctttttcattttggagataatcaccactattcatcgcactccgtagagccaaatattccgcctcgggaatcattaacattttctttgcaaatttcatgatgttattttttctaataaatgttgggctaaaacactcaggacaggtatcaagacagctcctagggctataccactcccctgttgtatcctttttcttgccgttttctctgaacgagatttggcaatttctctataaaaatcggcgtattgtgccaaccttcttttttgtttgttcgttagtttaaaactaaaactcaatatatttgcacaaatttcaacgattgccaaaatttggtcagctgtagcgttttcaattaattcgttcttcttttgttctgatctggtggaggcaa

SEQ ID NO: 37262 - DNA, 889 bp, Heterodera glycines
aaaaatgaaaaagaattgggatttgttggcactttttattgaacatttttatttttctactaaaacatggacaaagatcccattaatgttatgtttacattttccgttagggttaatttctttttcattgtgtcattggtaaatttttcgatttgactaaaaaaaatctccaaaaaatcgcagttttaacaaattaaataattaattctggccatccaacaggttcataggaagcttcgtttctcgtcagcaaatccccaatcactgttgtttttctatcatttgtgcacatttcgtcttcaatcactcggaaagcgtcggaaataatatttggaatatttttttggtgtaatgctgcgcttattgtcgtcaatttgtccatttcgattttattctcagagacattactaaataaataaataatgattggtttattttaaattattttattaatgctattttctttttattcggaccaaaatttacgcgcaccataaattttttttattagcattgtcagttagtggtgctttttaaactgcctctagcggtccaggctcataattttttaaactttctaatttttttaaattttataaccaggataactcttatacatttaattaaaaatatgtaccctatttaaaaataattttgtctcacctctcattaagtttcagtgcgatggcaagtgctaaagtaagctgttgctgtaccgtgcccttgtaatgtagacggtcaacaaccaggccgatctgctgacgtgccagtgattcggcgttgtaaaattgatcaccaaagaatggcacacaaatcatcggcacgccattgtaaatgccctccaacacactgttcatcccacaatgggacacaaaagccaccgtttttg

SEQ ID NO: 37263 - DNA, 580 bp, Heterodera glycines
ccctccctcccccccccctcaccctcatctctttttcttattctctctccttttcccctttctctttttttcgtttctctctctttctctcattccctctttcttactcacttctttttcggcctttcccgctgaattcgatttgtcgcccctttcctaatagcatcatttggatcagcgcaccatcttggacttttgtcgccacttgcatttgactctatggcagggtcaactacggcttcctgtggaaaaattaaattgataaagacaactctttgattttttaatttcccactgtcactacccttcccttttaattttaatttccccatattctcccccccccctccctcttaccctaattccaaacctttttaaccccactggcttccctttctccctcattttccccttcctcccctctcaattccccccatttccttctcaatttccttccctcattttcatcctcccttaaatgacctttgcccagatgcgaaatgtgaaattcacttcgtccactttcgatcggtctattggagaaatattttctgaagaccttctcacctgatgggaattt

SEQ ID NO: 37264 - DNA, 1050 bp, Heterodera glycines
  unsure (1)..(1050): unsure at all n locations
atagaatttctaaaaattcaacaaaaggactaactattatttcttcccgtgtatccaacaagagaacttagaatgtcatttacggttactgatttactcattaaaattccaaaagccgatttgacggatagaatttctaaaaattcaacaaaaggactaactattatttcttcccgtgtatccaacaagagaagcatagaatgtcatttacggttactgatttactcattaaaattccaaaagccgatatgacggatagaatttctaaaaattcaacaaaaggactaacaattatttcttcccgtgtatccaacaagagaagcagagaatgtcatttacggttcctgatttactcattaaaattccaaaagccgattggacggatagaatttctaaaaattcaacaaaaggactaactattatttcttcccgtgtatccaacaagagaagcatagaatgtcatttacggttactgatttactcattaaaattccaaaagccgatttgacggatagaatttctaaaaattcaacaaaaggactaactattatttcttcccgtgtatccaacaaaagaagcatagaatgtcatttacggttactgatttactcattaaaattccaaaagccgatatgacggatagaatttctaaaaattcaacaaaaggactaacaattatttcttcccgtgtatccaacaagagaagcatagaatgtcatttacggttcctgatttactcattaaaattccaaaagccgattggacggatagaatttctaaaaattcaacaaaaggactaactattatttctttccgtgtatccaacaagagaagcagagaatttcatttacggttactgatttactcattaaaattccaaaagccgatttgacggataaaatttctaaaaattcaacaaaaggactaactattatttcttcccgtgtatccaacaagagaagcagagaatgtcatttacggntactgatttactcattaaaattccaaaagccgatatgacgggatagaaatttctaaaaaattcacaaa

SEQ ID NO: 37265 - DNA, 1023 bp, Heterodera glycines
cgagactcaagaaactgagactgagaattggtcccagaaccaatcttttttttttgttggagacggatagccaaacataaatcaaattctttacaaatgataattagggaaggttagtgcctgaataaatttatgcaatatattctttcttttaaagtcaaaaatgaacaataaatggcaaataaatcatttgctcatcaacggtttcatttcgcactgatcgacggacaaaaatcactcaaaaagtgatcaattgtcagacggcggtcggttggcggggcggttaaatggcaatggcattcgtccaaaaaagggcaaaaaggcaaaggacggcggcggcggtgccgaaccattggacgaagaggggccaaaaggcactttaaatggcggcattcgtccaaaaggaggcctaaagccgaagggcggcggtgccgaactgttggacgacgagggaccaaaaaagccgtggccaaaaaatggccgaaatttgaatgggttgaactgctgctcctcactgcccgactcttccgaattgctctcctccgatgccatttccgacgaattgttcggcgcctcactttgtccattgacaaaaatggcaattgtcaaaataaaagcagcaattaaaaatttgttggccatttttgcgataaattaattaatgattttgacaattcggaagcacagtcaaattaaagttgaataatttcactgattcattcgctccttttatgtgctttcatttcccattcaaatcacagaatcacagctaagcaaattaaattttcattttttttcgttaatccctcaatttgttcagtttgacaaatgcgtcattttgtgaaattttgaaacggaaatatgttttagcttatatctgtccttgaaaaggggaataaaatactaaggctgcacgcaattacggattacggaaattacggcgttttggacgaagtaattacggatttggtaaagtgaagaatatgcatcttattgtatagaaattttataccattcggctcc

SEQ ID NO: 37266 - DNA, 1367 bp, Heterodera glycines
ttgtttcacaagtgatttgatggtaatttagggttctctctaagatttaattatttaaattggaaatgtccgcactgcttgggttgtttagcaactgttaataattcgggttaaacttgtccccatcggatatcgtgaatacaccaaatttggcgatttcgccgtgctttccttcccaactcacccaatctgtccaaataatcgtaagccatccgataaatttcactgcgagtgatcagtgcccaaagtgtgtcgaatttcgcccgtctctgctcattcatcggcgcttctccctgacaaacgggcgggtggaacaattgctcgttgtaaatgtcgacgagggcggcgaaaatgggccgttggaggaaagactcatcagagacggcgagaaaactgagaaagggacgatggccaagtgaaacaatccgaaatgattgggaaaagagaaacaaaacgaacaaaaggaaacggaccaaaaaaggagagaaatgggagagaatgccaaacgaatgccaaaacgactcacggactatcggacacgtcgatgacccttctgctggggatgtgctgctgccagtcgactctcaccatcgactcgttcactcgttctgtgtccttctcccacattttgtccaccaactgctgaatgttcgtcggccctctcagcgacggcattgactttgaccgtcccatggttttgttggtgcccatcgattgccaccgcttcgccgcgactgtgccgattcttccgcttcttctaccgccgtctcttttttcggaaacagcggaagaaaagtcatcgacggaagtgggagcggaggaggtgccatcccttttcagagggacgaaagcgaacgcgcgaaaaatgtgccgctgaagggaagggacggcacagtcactcagcaacaggggagagcaatcagcacattttgggattattttaaattcaaatttaaatttaaatgctctaaataatatacgtctaaccttgttacctaaataatattttataaaaatgaattaaatttgggattaaaccacgacggagtgaacaaacgacggttaattcatttttgttgagacttgaataggtaaagtgaaagataagaagtttcaaatattcggcggatggggagggggtatttgaaactttcaaaatttcgctttttgagtcgtgcggtagcgaacgccatgtttttaccatatgcctactgtacacttaccgtatgttcgtcccctgtctctcgcgatgtttgcacttcgatgctcagctccgtttggtcattctcttcatccgttttaaatgaacatcgcttctgtaagcatttcgattttggcactttcctcttggtccatttggacctgca

SEQ ID NO: 37267 - DNA, 999 bp, Heterodera glycines
attatatatcagggaccccattctttcttggaattttccagtacgggttgttccgtgaaaatttgaaaatatttccaaaaatcccattttcttttttctatccttgtggactgagtcggcccttgaaattatatagcagtgaacccaatacttccttggaatttccagaacgggtttgtccgggaaaatttgaacaatatttccaaaaatccctatttcttttttctatccttgtggactgagtcggcccttgaaattatatagcagtgaacccaatacttccttggagttttccagaacgggtttgtccgggaaaatttgaacaatatttccaaaaatcccaatcatttttttcgatccttgtggactgagtcggcccttgaaattatatatcaggaaacccaatacttccttggaatttttcagaccgggtttgtccgggaaaatttgaacaatatttccaaaaatcccaatcattttttttgatccttgtggacgaatcggcccttgaaattatatatcagtgaacccaatacttccttggaattttcccgtacgggtttgtccgtgaaaatttgaacaatatttccaaaaatcccaatcatttttttcgatccttgtggattgagtcggcccttgaaattatatagcagtgaacccaatacttccttggagttttccagaacgggtttgtccgggaaaatttgaacaatatttccaaaaatcccaatcatttttttcgatccttgtggactgagtcggcccttgaaattatatatcagtgaacccaatacttccttggaattttccagtacgggtttgtccataaaaatttgaaaaatatttccaaaaatccctatttcttttttctatccttgtggactgagtcggccattgaaattatatatcaggaaacccaatactttcttggaattttccagtacgggtttgtccgtgaaaagttgaaaaatatttccaaaaatccaaatctcttttttc

SEQ ID NO: 37268 - DNA, 1343 bp, Heterodera glycines
  unsure (1)..(1343): unsure at all n locations
gaattacctccaccaatggaagatctttaaatgcgacatgaaacacttcgtgcagtcgataatcattgcgttttcggtccttctcgaaatcggtataattaacttttcgcaccaatttacgctcattagcatgattatattcaaacattttgaagggatgcaaaagtcgtagctcattgttttgaccgccgtacacataaacagccactttgactgtatttgagtcctgcaactcctgattgacgaatgggtttttgaacactcgatcgtcaaatgaaaatttgatctctccttgagcatttgtttgaaactcggctttgaagtcggaaatgaaaaaccatttgaaattgtttatttttattttttacttaccaggagcatagaaaacgactataattttgtatttctcaggaggatgaatttggtattggttgccgatggaacctattttgggaccaacaacaaatattggcattattatggccaataaaaaagccataattaatgtacgaggaggcgaagaaatgaattggccgagcatttttattattaaaatgctaaaaaaagatttttaccgattagaggtaataggagaataatttgaacatgttttgggcggtttttttttatcagcccacctctaaaataaatccaaattttgtatcattcctcaatttgtaaaaaatatgaattgaaggcttcacattactaaaataaaaatttcagaagccattgaataaatattaataatatttgtcaaatatttttaattgacttcccatgatgataatgatgatgatgaagattaagatgcctagttactatattatgccaattcatatgctattctgcgaaaatttctgcaataatccatcgttataatttggattgaattgattatggatatgtttaacgatgaaaaaaattatagaataaacatttttatattgaaatcncaggttagtaacaatggttcgaatatgattaaaaacggaagtatttcaaaaatccctcaaaatcaatttgtccttgttctgaaaacccatttttaaaaactcaaaaaactcatttttttagtgggtgagaaaatgttttttatatttttaaagattttatacttacttcatttaagaaaaaaaattttattttattttaaaatgagaatatcaaaattgccaaaattaatatggcaatttggatgaagtaaaaaatatttttagcttcaaactaaggttaaaccagggctcccaactctgctgatttatcagaattttgctgatttcagggggtcaaagctgatttttttgtcgagaatgatgattttttgacaattttctgttgga

SEQ ID NO: 37269 - DNA, 1145 bp, Heterodera glycines
tataaaaaatccccaaatatgaactaaaatatgtaaataaaaattttttagatggtcattttttggaaaaaaaattcctcgtaaagggtgaaataggcaaaaattaacataaaaatgatctaaataagcttagaatcacattatagcatttcaagaattaatttttgatattcattttttgagagaaaaatttcgatttttagggatacattgtaaaaatttttttaaatttttcacaaaaaatttctataaattctcaaaaatcctcaaaatatggaaaaaaaatgacaatatataggagaaattgcgaaatatgtactaagaagtctcaaatatgtacatatgtaatatgtagaaaaatcccaaaatatgtaaataaaaatcccaacatttgttcatgtttttcctactaattaggctatggagaatccaggaaaaaaatatgtatttacataaaaaaactatccctaatgatcaaacaattaaggaaaaactttttaaaaagcctgtactattttgtcgtttctctttttctttgttatttctctcactctggaatactatctcttcatttttttaatagaaaaaacaacatttacttcgctctatagaccttttttttcgccttacagattatcttcaaattttccaaagcaatagagaaaaaaatcctacataacgtaatacagccattttatgttttatatattattccatgagtttaaacctaaaaaggtatttctttttctctcatttttacgtactatttaaatctctaacattgaaattgcaaacaaatgctaacaattttgatttttcttttcaaaagctttttttaaatacaaatttgttctgtttaattgggaatgaagcgagttcatacactttttaaaaaaaattcattttttatttaaattttcctcaatttctgtttaatgacttttatttgtctcgttcgaatgcatcatttcatttgccacttaatttgctaaaaatcattaattcttcactctttttttcaaataaatatttttccgactttctatgaaaatatgtgcctcggcatttatgaaatttttaaaacccgcaaatttgattgggaattttttgccacgatacgaaaatttattttcttccctaaatgg

SEQ ID NO: 37270 - DNA, 737 bp, Heterodera glycines
aaacaaaattaatgagtacatttaagagcttacttttttccaagtgcgaaattgaaaagtcttataattgaggcgcgcaccccattagagacgacatcgatttgttctcctcgataaaggtacctttaacaaaaacattattttccactgttttgcttttgctgcttaccgaattttttcatcgaccgggcactgctccacgagaatgttcccggcgtgcagatcccggtgctcgaattcgagaacgtcttctgcgatcgctagggacaaggcgacttgatggaaaatggagtaacattcgcggccattttttatctatgaaaaaacttcattttagtttttttcttttcttttcttgaaacctaaccgtatacttctccagatcttttcccccataggaaaggccgatgattgcgaaatggagatcttcatgggcgtaaatgtctggccggtcgttctccaccaattcaggctttgccttcttaaagtcatcccatgctttcagcaatttggacggaagacatccttaacggaaaaatgagcttagcacggtttgacaaactttcttttaaaaacatttgcttttagatgtatctccattaagaaaataaaacacccataagcccaaattagttgttaactgcactccattaaacatacctttgacgaccttgctcatgcgcaattgggtgaaagatggcgtgacaaagtcattgccggcctcggataactttgaa

SEQ ID NO: 37271 - DNA, 1308 bp, Heterodera glycines
accttaaaatttcgaattttggtacatttttgttcagcttgttattgttgagcgaattaaatttttaattggttctccttatggtaatttggcgaattaccaatcattttgttcttgcaaatttgtaaaacaaaattgtatatattaaaggacaaaacaaatccgtgttttgataatgagtatcagaagcgattcagttgaattaacattaaattatagtaaagatgcaaaaaatgaatttaattgtctatttaaaatttttaatttttctgaattaaattattaccatttttgtccaacaagtgttcaattaaagtgcagaattctttcttgaacacgcggcgatattcagtgcttaaataaagccactttccatgaaatggcgacctttgaatgtgatgaataacagttatatttaaacctcattaacaaaaaaaaaccgaatttttaattgctaaaaatcctaaaaataattgccataaaatgacattagtgaattgatttttaccgattaaattcttgaaactgatacaattatgaaattctaaaataataatttttagcaacaaaagttataaagattattaaaatggaaaatcagcgaaaaacaattaccccaaacgggagctaaagcatatacagcaattgatacatggccaaattgatcaaatagctagctgtcagtgctaattggtaaaataatgataattgaccgtaaccggcgtgtgttcgtctgttgggtactgtaattaaatgtttgaaatccaaattatatggtaaaatgccaaaattaccgtaatttttgcatcggatgagcataaaaatttcatataacagcaagtgctgatttaaaaatgcgattttgaaataatttttgggcgtttctgacaaccaaatttgttaccattcaaaaagcttctggagtttctaacttattaattatttaattttagaaatatattagaaaagaaaaaaattaactgaaaagatcgcttaaaattaatggttcatgccggtctcgatttatttatttttattaaataatcattctgttcatcattattgtcttgtctgatatgatgagttcttgcaatattgttcttcttcaaatccatcagttccaattttaaataatttttcgtcaataaaattttcttaatttgaaattttaattgtttccagtttttttagaaattttttttgtcctcaatactttttattttcttttaattttggcttaatttcgtataaatttattttcttcactctgtccatttgcaattttaaataaatgtccgattgggttaa

SEQ ID NO: 37272 - DNA, 926 bp, Heterodera glycines
tgacccctcatcctaatccttatcgccttctcttcctctattgttcaccatataatccatcaacatctcgcatataatcatcaaccaattttttgaacatttttatcatcatcatcaccaataaacattttgtcggaaaagtgttgaaagggtcagagggcaaaaaaaaaagggggggggggaaattcgctcgggaacgaagtgaccaaaggggagccaaagccccgagaatcgaagcgggggacaagcccccgcagagcagcacacggacccaacggcagccgcagcagtttcagaaattgagtgaattgggcccgagggacgggagagaaactcctgtgcacagaccccactagccgtcagcgctggccaagtttctttgccacaaagataataattccaaacatctatcattaaattatataaaatatagaataattgaattggaaggaatccataagagtatgagagtgaaaaatcaaataattaaaatttaatctcttgccattcttattagaaaaattatgacaaataaaaatttttttttttatctcaatatctcattgcttcatttttatattagttaaaagatcaggaaaggtcattaatctgtcgctaaataaaaaaggtcaaaagaaacaaaaaattaaactttaaaaaagtattgtatttaaatgtgtcaaagttgtggaatcattattctgtattttgattttttacaattgttctttattattttacttaattgatactttaaattcactttttaatttttccaagcaaattgtaatggagaacgaaatgatttataaacataaaactctattatttagaacttattgtataatttaaagaatctcggtatttttaaattaaaaaatatactttaattatatgaaaaaatttcattttcattcgcatgaaaa

SEQ ID NO: 37273 - DNA, 651 bp, Heterodera glycines
  unsure (1)..(651): unsure at all n locations
agctattcccgaagggattcggtctccccataaatctcgggcgcatcggttcagggggactgccccgaaaacccaaaaaaaaattttttggataaaaattatttaaatgaactgactagataatatttaaaataggttatttctcttcctttcagtatccctgcaaagtttggtgcgcttctgatcagtttctgaaaaaaaagttaagcctaaactttttggcctgtttaaaaaggaattaaaaatttttaaaaattttattcatctccctttttgatagaaaaagcatcagagtgcctaaactaacatgtaaataaaatttggtgcgtttcagaaccctttctgaaaaaatatttaagaattaattttgcaaaaaataaataaaaacgaaagactcagattttcgaaaatttttttgagccagctagctcggcgctcatttcagtgtaagttagtcctttaccggggagtatccctgcaaagtttgttacgcttctgctcaattagcaaaaaatatgagtgatcgaattttcactaaaaaagttaagcctacattttttggcatatttaaaaagcaattaaaaaatttttaaaatttaataattttcctgcaccgaaggtactcactcggcctcttcgcggcnctcgtgg

SEQ ID NO: 37274 - DNA, 1475 bp, Heterodera glycines
aaataataaaatatgtaagaatttgctatttgacatttgatttggttatgttttttgtcaaattgcaacgagtgggaattgaataatctaaatcctttatctatttattattttatagcttggatttcgaaattctcatatttaataaggtaaatattatacatttctatttatttctccaaaaaaaaaattgcattgctttcgaattttattatttttagaattatatctttagggattaactggctttttcaagaatttttgaataactatacaatcgataaacagtcattatagttatatgttctaattgcaatattttctatacactgacggaataaaattcacaatttaattttcaattaacttttatattgaataacaaatattcagaaaatgagacaaaaaataaaattataaaaaattaattaaaaataatttaatattttacatacttttttcgtcaaaatattaaaatatggtaatataagataattatcattgaaaatatatccacgaaaataaatcctgttcaataataaataaaaaatgtaattaaaaagacctaataaaaaataatattctaattttttcaatcaattataccaaataaaactatttacaaaattaattagttcaaaagaaactcattatttaataaatttattttttttataacttatattcacaaataattttttgtttttcaaaagctattttagaatgaataataatagacaatttaaataaaatttaaagatgaattaataatgaaaatacgcactgtcataataaattatttgtttaatttattttctagaaaggtcattttttctctattcatagccattttcgatgatctaattaaccgacgattttatcattcgaatcaaattaaattgcttctgagatgataaggattatcatataatttcagtttatgaataaaccctcaattattggtatgaacgatactttcctaacatgcacgcgttttgcgctcgagctattcatcatcgggcttgtcaatctaaagcgaaacaacaaagatggtgttttgaacgaataaagggcataggttattttgaagaagtgtcaaagaacatgcagcaataagcctgcaaaatctaataagtggaaaatacctgagtatagaatttattttcagaaagtgtcaacagacttttggaaaaatatatttgcaatttatcaacaattttgagaagtgagttagaaatgataaacttcacgattcaaaccagttttcggtgctctaattaaccgcgataaaaacatccgaatcaattaaatagcttctgagataataaggtttatcataaaatttcatttaaaaataaaccctcaattattggtatgaacgatactttccaaacatgcacgcgttttgcgctcgagctatttatcatcgggcttgtcaatccaaagcgaaacaacaaagatgctgttttgaacga

SEQ ID NO: 37275 - DNA, 985 bp, Heterodera glycines
tcacttcccctcaccaccgaatagcatcaatcagcagcacacgcccccccccccccccatcccattcttccgtgtgtgtgtggtgttccgtatgcttaatcggatcataaacggcttttcaccgccgcttttacttttccttcccggttgccttcaaaaaattactctgatcacttcttattcggtgaattatctactcgtattcgtgcagagttatacaaaagaccaatcagcagtaattttttactctctattcataaagaccggaataggaccagcgggagattcagtcaggattttcctgtcttctggtcctgtgatccgtgtatttgtttttaaatccatccggatttttggaggagtccggaaactagaaggattttactccctcctcctttattgctataaaaaactgaaacaccaattaatggtccttttgccaatcaattagcatttaaacttttccttggccacacttttcttaattggtccagtcttcattttgagtaactttttttaacacatatatccgggagttattgctttaattttgtcgcaggacctttagcttattataatttatgagcatttaagaaaaaatccatggtccactaactcatggatggttttagttttatataaagtgctgaagaatcccacaaatttcagtggaactgatcaaaatgccatttgattaggcattatgccaatcagtcgaactaatttcactcactaaaaagaaattgaatgttgatcagttggtctgctgatcatctgctgatcagttcctgggtgtgtgttctttcttcactggaccgatagaatccggagcccacccctcactctccccccccccccttttttgggccgaggcgtgccatatgcttaaaaacaaaaacaaacaataacaacaataaattgcttgttgtttttatgcttttccttacactgttttttacgattttgtcaccccttccccctctct

SEQ ID NO: 37276 - DNA, 692 bp, Heterodera glycines
ataaaaatgcatattaataaaattggcacttttgatgtctttgcacaccgaaaaattccaatatggccttcccttttgttatgaattttttttttttgcacgtcgtgaaatcttgctcagtttcgaggtcgctaatatacgaatctcacatccatttcactaatccaaatcccaacaaaagggtccctccttggatttttcggggtgcctaaagaacaaaattgcccaaaactttatcatgccacaatcacaatttatttcaaatttggacaagtacgttagtttccattaggcgttagcgtaaaataaagattaggtttgtgttcagtgacgaaaattaaaaatataaagaacataaaagttgacaagaagggtgggtgagaggcgaggacgtacctcgcagacacacacttctggttgggttccccgcccatcacaggcaagcaatcaattgttagtcgatgattattgtactacataactcaggggtcatccacgggtcaacactgcccaacaaatgtcatcactttttgttaatgtttgtacatttactaatgtttcagaatactaattatgaaaattaaaattgcactgcccccagaaaatcttttagaagtggtaaattcacttcactttgacatttgttggaccaaaattcgggtttcctttgcctttgattattttgtattgga

SEQ ID NO: 37277 - DNA, 746 bp, Heterodera glycines
agtgttccatgcgcattggaaatggatctcgggaatttggcgtcgaatattgaagacttcaaagcggtgattttcaataatttatttggctttttacattcttttgggtttcgtttaaaaattttatgcccaaattggtccatctcaaccgtaaaagttctctcatctttttgttttttttgtcctcctcacaactgtaaaattgtcattcatttcgtttttttcccacattttaggcttttgccaatgcttcttcctccgtcaatttcattgtcatcattcggtttattccttcatccgttgctttcttcgttcttgtgccttttgatctgaccaacgaattgactcgggagcaattgacactgaaaagaattgacaatagcgacgacgactgtctgctgctgttggtccgttgtccaattgcgcgagatgaaagcaaatgggcaaaatgggaagaagaagcgattggatgggaaattcatgatcagtggaacagaattgacattcacattttttatgaggaacaaatcggtgacgggtcagtgaatgcttaagcaaacagttaaaagtcattgcgtttgtgtttttaggcttctcggcgtaaatcccggcccaagtgatcagcagaagaagtgaatgaatcaattgctgagaagtgatcgaccaatttgaattatggaattattgacgtgctcatagaaattgttattttttagcatggaattgatcaatgatcatcgtatatt

SEQ ID NO: 37278 - DNA, 768 bp, Heterodera glycines
taattgccgaaaaaattcgagaccaatttccgaatgttgaccgactaattgcaaaacgaaagccgtctttgtcaaagcgccttaccgagtcaaaaaatttggaaatgtatctcatatgcaatttcaaccaataaatttgaagaaattttgcactcaattttgaaaaatttatgtccatattttgacatttttgccatttatgtccatatttcgcgatttttgccattttatgtccatattttgcgatttttggtccatattttatggccatatttcgcgattttatatccatatttttggactccctactaattatatttgaggcatggccaaatctcactaccgtatttgctctaattatccccaaatctccattaatcccccaatatccaattatcccccagtctaggaggggtttgaaaaataatcccaattggaaatgaacttatcgcaccaattgaaaatggatttgatgctctcttttttctaagaaatgctttttgttgattcttacatttatttaattttcttttttgtgagagttttttggtgccaatgtcaatccgcaaaacattctcagttttcccgaatattaattaatttttttgcaatggaattaactctggctaaagcagacgtaattttgtctaattttgtggcttaaaattaaattttttaatttttttttgttttattgaaatccccaaatgtcggggttgcaaaatgtccgtgggttttcttaagtgtcttttgctcaaatgtcgttcg

SEQ ID NO: 37279 - DNA, 176 bp, Heterodera glycines
ccagtggaaggtctgcagcggtgtcggccccggcacgaagacgctgacctgcagggcctgctgattgccggtgggcagggccagcggatcgctcagccgttcctggcccgggccgatcagcacggcgggctggccgtcgaagtggagcggctgtggtgtcgcgcccggtcgtgcgg

SEQ ID NO: 37280 - DNA, 1014 bp, Heterodera glycines
ctatagtctgtactttaattctgcgttggatttttgctcctcataattgtttgagtaccccaaacggacacttgaataaatcgatttttttatttcataaatattttttcagaaagtgctctaaagcgcaccaaattttatttacaagtcaattttagcactctgatgctttagtatcaaaaaggaagatggagaaaaaattttttaaaaatttttccttatattttggttatatcgttttgcttttggtggggtgcttggaacagtggaatcatgcgcacccgtccgatctggcaagttaagcaacgattgctgactagccaaaaggttcggtgccgtgatgaaacgaaccagcactgcttaccccgcggcacccggcacggtcccccgaaggaatggatttaattaaattctctccttcggggatttttttccattaggtcgtctgttagcgtttgattgttctagtcaatttttcgtgaaatatttgtcgtgctctgaagggcgggagggcggggccgaagggcctcgcggggggggccgaaggttgaatgagagagttgagtgaaatagaacatggaaaagaatggaagatattctttcttactattaatgtatgcatagattaatatgaccatgaataatgggactaataagggtatgggtatactttctttgaatatatcaaaataatgtattaccttataaataatagagagaaaaatatagaaaatatgaaagttataggtaccgaaatgtaatataatttgacaagtagaatgtattagaaaatatatagcaattgaaaagactattaaaagagagaaagaaataaaatgtcaaatataaggcaggaaaataaaatgtatatgaaaggattttttgtgtatgcaatgcataattttttgtcagtatagagtaaataaatatgcaatttgcatattttttgcaggcctgtttatgaatttttaacaaaaaaaaaatataataaaaaaattttgtggggtcagggtc

SEQ ID NO: 37281 - DNA, 1247 bp, Heterodera glycines
  unsure (1)..(1247): unsure at all n locations
attgtgaccaagcatatctttcctcgtatttctgggatttttttcagaatgtggtcatagaataggtgggttgaattatttgtattttttatgagtattatgtaaggatattttcgactaaacataaccaattccgagtttcatgaggcatcaacttcattcttttcttgtcctgcccaattgtctcaaatgtatacctaaaaatgcgctaaaaatgatcaaacccgtttttagccgaatatcctgtcaatatttccctattagaaacgatactgtgaattctttcgcctctttaattcattcgtgctttgcttcggattagtctaaaaatttctggacgccaattttacatattagccattttttattttatttgtgaccgcaaatttttacatactagccattttttattttattgtgaccaagcatatctttcctcgtatttctgggatttttttcagaatgtggtcatagaataggtgggttgaattatttgtattttttatgagtattatgtaaggatattttcgactaaacataaccaattccgagtttcatgaggcatcaacttcattcttttcttgtcctgcccaattgtctcaaatgtatacctaaaaatgcgctaaaaatgatcaaacccgtttttagtcgtatatcctgtcaatatttccctattagaaacgatactgtgaattctttcgcctctttaattcattcgtgctttgcttcggattagtctaaaaatttcaagacgccaattttacatattagccatttttttttatttatgaccgcaaatttttacatactagccattttttattttattgtgaccaagcatatctttcctcgtatttgtcgcgaccacgcgaaatagaaaattttatttaaaaaataaaatcattaaaaacaaaaaacatttaaattaattttaaattaaacagataaaaattaattaattaaatgtgaatggaatgaaggaataaatgaaggaaaattattagtcatttttagtcacaatttttccattagaaaaattgtcaaatgttaaactttaattatgaataattggaacgttaaaagaaataacagattttaaacaaatgttaaaatgggacaaattgtgaatgatattaaagaaattgtaaaatgttagaaaattggtaaagggctaagtggcacaaactggaaaatgagaaaggntagaaaaattggcaatggtagggacagaaatttggacatgccaa

SEQ ID NO: 37282 - DNA, 1144 bp, Heterodera glycines
  unsure (1)..(1144): unsure at all n locations
tttatttaaacttaattttagcactctgatgctttccccactaggaggaagatggagaaaaaattttttaaaaaatttttctttatattttggttatatcgttttgcttttggtggggtgcttggaacagtggaatcatgcgcacccgtccgatctggcaagttaagcaacgattgctgactagccaaaaggttcggtgccgtgatgaaacgaaccagcactgcttaccccgcggcacccggcacggtcccccgaaggaatggatttaattaaattctctccttcggggatttttttccattaggtcgtccgttagcgttcgattgctctagtcaatttttaaaaatttttgttgaaatatttgtcgtgctctgaagggcggggggggccgcctactcaaaccgcaacttttgcctgttgttcttcaacgtcttacgtttccgctgtccaaatggtaccaattcgcgtttcgtttagcgcttcgactcaaaaaaccgcacaaattgaggacagcactcaaataagaactgtagatcgctctcaggtcataaacccaatcaccacatctaatttggacattctgaagtacgtttgtttttcgttgtttcagttaagctttggcagtcgttccgctccacgacacttcgaccttcaatcattggtttttctccgacgcaaaatttgtctcagtgcggatgccgaacttggcaaactttttcgagagcattatttgatcggtttttacgatgtccatcacgcgctcgtccagtcagggtccaatgtgtttctgatacgtactgagccaattctccacgaattcttttatcaagtaaaaaataatctctatcgaattataattcggtgttcttcttcacagttggtcatcttttccttcggtaacatcggttcctacgcgttaaaattaagttcgtctgactgttgcgacgacactgctgggggttcccttcccatccgcgaactgctcgccctttacttgaccgagcagcgcgacgaaaccagtgaaattgacgaaaccgaagagcaaataaaggcgtcgtcaaaagtactgatcgagcacaaggatttgctgtgggacttcttagggagtcanaattgttgcatatccttcagaagaagacaaagg

SEQ ID NO: 37283 - DNA, 122 bp, Heterodera glycines
tgctgcgattgttgctggtgctgcgactgcggcgacttgtcgcgcagcgactgtcgcgcgagtggcgaagtgccgtgccgctgcgatgacgatgcgttgttgttcactgacaacaatcgccg

SEQ ID NO: 37284 - DNA, 736 bp, Heterodera glycines
atttggcggcggatgggcaaattgcggtacggcgtattcacgttgaatttgtcgaagatgaattccctgaagaaacacccagaaactgagaaaaagcaaccacaatttgatccaaattgatgtcacatttcgcggtggatggtgaatttgcggcatgtctctcagcggcaacggttgaggcatcggttggacacgaattacctgaaaaaatacattcggaatcttgaaaaaaaagtaacaaaagcgagccaaaattaccggcacatttggtggtgggttgacaaatagcggcacgtctctcagtggtatcggttgttgaactggttggacacgaacggcctgaaaaaaggactcgggaaattgagaaaaaacaaccaaaagcgagcccaaattaccggaaaatttagtggccgatgtacaatttgcggcaaaactctcagcggcattggttgttgcccatcatgaattggtcccacacgaatttcctaaaaaatacactcgggattttgaaaaaaactgacaaaaagcaagaccaaaattaccagcacatttggtggagggtggtcaatttgcggcgggatcggcggaggcggcaagtgaatttcgtcatcttccgattcgtacccatcgtcgccggggaacatctgccgccctaaaatggaaaaaatcagacaagatatttgtggaaaaccaaaaaattttcatcctgtggacgatttcctgcaaacaaaatatt

SEQ ID NO: 37285 - DNA, 1073 bp, Heterodera glycines
cacgaggccgcgaagaggccgagtgagtaccttcggtgcaggaaaattattaaattttaaaaattttttaattgctttttaaatatgccaaaaaatgtaggcttaacttttttagtgaaaattcgatcactcatattttttgctaattgagcagaagcgtaccaaactttgcagggatactccccggtaaaggactaacttacactgaaatgagcgccgagctagctggctcaaaaaaattttcgaaaatctgagtctttcgtttttatttattttttgcaaaattaattcttaaatattttttcagaaagggttctgaaacgcaccaaattttatttacatgttagtttaggcactctgatgctttttctatcaaaaagggagatgaataaaatttttaaaaatttttaattcctttttaaacaggccaaaaagtttaggcttaactttttagtgaaaattcgatcactcatattttttgctaattgagcagaagcgtaccaaactttgcagggatactccccggtaaaggactaacttacactgaaatgagcgccgagctagctggctcaaaaaaattttcgaaaatctgagtctttcgtttttatttattttttgcaaaattaattcttaaatattttttcagaaagggttctgaaacgcaccaaattttatttacatgttagtttaggcactctgatgctttttctatcaaaaagggagatgaataaaatttttaaaaatttttaattcctttttaaacaggccaaaaagtttaggcttaacttttttttcagaaactgatcagaagcgcaccaaactttgcagggatactgaaaggaagagaaataacctattttaaatattatctagtcagttcatttaaataatttttatccaaaaaatttttttttgggttttcggggcagtccccctgaaccgatgcgcccagatttatggggagaccgaatccttcgggaatagcttccctatagtctgtactttaattctgcgttggatttttgctccccataattgtttgagtaccccaaacggacacttgaaaaaatcga

SEQ ID NO: 37286 - DNA, 1098 bp, Heterodera glycines
tttttttcagaaacttatcagaagcgccccaaactttgcagggatactgaaaggaacagaattaacctgttttatcacattagcttgtcatcagtttttataaaaaattttcaaaattctgagtctcctattattttatttttttttcaaaattttgaaggggcggagggggggcggaaacctcccccccaggcccgcgaagcggccgagtgagtacctcggtgcatgaaaattattaaggaagagagttcattatttgtttattttttgcataattaattcataaatattttttccagaaaatgctctgaaacgcaccaaattttatttacatgttagtttaggcactctgatgctttttctatcaaaaagggagatgaataaaatttttaaaaatttttaattcctttttaaacaggccaaaaagtttaggcttaacttttttttcagaaactgatcagaagcgcaccaaactttgcagggatactgaaaggaagagaaataacctattttaaatattatctagtcagttcatttaaataatttttatccaaaaaatttttttttgggttttcggggcagtccccctgaaccgatgcgcccagatttatggggagaccgaatccttcgggaatagcttccctatagtctgtactttaattctgcgttggatttttgctccccataattgtttgagtaccccaaacggacacttgaaaaaatcgatttttttgttttcggggcagtccccccgaaccgatgcgcccagatttatggggagaccgaatccttcgggaatagcttccctatagcctgtactttaattctgcgttggatttttgctccccataattgtttgagtaccccaaacggacacttgaaaaaatcgatttttttgttttcggggcagtccccccgaaccgatgcgcccagatttatggggagaccgaatccttcgggaatagcttccctatagcctgtactttaattctgcgttggatttttgctccccataattgtttgagtaccccaaacggacacttgaaaaaatcgatttttttgatatgggggcagtccccccgaaccgatgcgcccaga

SEQ ID NO: 37287 - DNA, 1025 bp, Heterodera glycines
  unsure (1)..(1025): unsure at all n locations
cagtttttcggtcgtttttcgataaaagaacagaaaagtcggaaatgaaaaaagaccaataaattttcatgggattttatttatgtatgtatannntaagttaataagaaaggaccgggagcacagcaatcctcaccaatgactgagaatttttaataaaaaaatganttaataatattttttcaaatgaaaatgcgcggctggtaatttcgacactgagtattttcggcacagataaattttcgacactgaactatttcgaaaattttcattgtgcctggcaaattgatgccgacggcacccgctacaaaatgggccgagtgacagcgccccacaatcacccatctattctttgccaatacgatggaattgaatgttaatttgcatcgaaatttatcttatgattagtcgggatgggatttctagggctaaatccacgaaatggatgtttaaaggcgaaactagataagatcattgcaaaatcatgttaactgtacattaaagacacagaaaacgcaaaattaattttttttttttttggcattttagagtttggatatttttggttctttttcaaatggtttttttaaataattttttcggtacaaaagcgaaaaaagatcgattgtgccgatctctaatttggtgactcgtttagcatttttcgtgtccttgtcctgataatttgcaattctttcttgtctaaatattctttccacttcaataagggtggtaataatagtacggttgtgccatcatcagcttcactttcgccttccgattgaagtcgcacagattgcatgttttgcggcacatttcgaaggcgtacgtctcgcggtaataacggcacacataaaggaactcatcgcacttccagaattccaaccggtcaatgcacgtgtcgtcgtcgttggaaatcgctgcgggggacgaaggggcggagaaagtgaaatgcgggaaaaccccagcggaaagggcactgctttctttaagcagttaaatgagtaatttgagctaattgttgc

SEQ ID NO: 37288 - DNA, 1365 bp, Heterodera glycines
tcccatcacattttacgcgacccatcacattttacgcgtcccatcacattttacgcgtcccatcacattttacgcgtcccatcacattttacgcgccacatcagattttacgcgtcccatcacattttacgcgtcccatcacattttacgcgtcccatcacattttacgcgtcccatcacattttacgcgtcccatcacattttacgcgccacatcagattttacgcgtcccatcacattttacgcgtcccatcacattttacgcgccacatcagattttacgcgtcccatcacattttacgcgtcccatcacattttacgcgtcccatcacattttacgcgccacatcagattttacgcgtcccatcacattttacgcgtcccataacattttacgcgtcccatcacattttacgcgtcccatcacattttacgcgtcccatcacattttacgcgtcccatcacattttacgcgtcccatcacattttacgtatcccaataacagtttacgcgttccatgacgttttatgtgaaccctttgaagaaattttgcttcagattttcctgttgaaatcaactactgtcgaaaccaatcaaaaaaaaatggttgaacttgatgagattgattttaatgtttctttggcatttgaagagaggaacagagaaagtgaagagtttgcggagcaaatgcaaagtaatatttttaaaaataatatttattcgatcacaatctttataaatttaggcggaagcgacggtattgccgagggggatgtgcgcgttgtcagcgatgacactgtaagtcacctgaaatattaggggggggggggggggggggggtatatttagaggataaggagttgaaatggtggaattccaaaaaggtgaccaagaaaattgtaatcgaagattattggcgattatcagctcggtcattccgcaaacactgattcagtttatatttcgcgaagaatgagctgtaattttgcgaattagacaaaaatgatcataaagtaacaaatgagagaatttcacattctgctaattaggctttaaatataaactgtttaagtgttgcagacggatcaggttgataagcgccaataacctcagatttactattttcgcgaccccactttttgaattctgacattttcagctcattacgctctaaatataaacagcatcagtgttccggaaggatcgatttgaaatcgccaataacccccaaattacaatttcctactgtaaacttatacagattacatttggatataagaaaatcagctcggtcattccgcaaacactgattcagcttatatttcgcgaagagtgagctgtaattttgcgaattagacaaaaat

SEQ ID NO: 37289 - DNA, 734 bp, Heterodera glycines
tttcgctgatcaaataactcttcaatggcatttccctctgatcagacctccccgaagagattccctctgatcagatcactttccactaacattcccccctgatcaggtctcttaagattgtcgcaaaaaatgatagaaattcccaaaaagtgcataaaaaggtagcacggacctccccaaatatggcgaattttccttgtaaaatgggaacgctgaccgaaaaactttaacggcactttcctccgccccccccttggaattttttcgttggcccaaaacagtaaaagtgccagaaattctccagcgaaatgatcattctgataccgggcaaatttaggagactattacttttgtaaattgaccaaatcccagtaaattgtatacatttctatacaacactgacagcaaaatacaacaacaaataggtacaaatatttgtacatatgtacagtatatacaatggaataccgaaatgtgcatacgatcaaatattaaagcccatcggcacatttacaatgaatatttatttcatccacaatattttcatcttccgcttggattgcgcacacttccttctcatccctcctcattcgttggccatcagttcggcgagcagtgcgggcctaaaaattgttgaaaattaaaatttcaataaaaaaattcctcaaaaactctacccaatgtcactgtccttgatggtgaagcacagcaaattgtccaacatttggtttgcc

SEQ ID NO: 37290 - DNA, 470 bp, Heterodera glycines
  unsure (1)..(470): unsure at all n locations
gacgcataaaagtcgattgggacgcataaaaatnttgattcggacgcataaaagtcgattggacgcataaaagtcgattggacgcataaaaatttgattggacgcataaaagtcgattggacgcataaaagtcgattggacgcataaaagtcgattggacgcataaaaatttgattggacgcataaaagtcgattggacgcataaaagtcgattggacgcataaaagtcgattggacgcataaaagtcgattggacgcataaaagtcgattggacgcataaaaatttgattggacgcataaaagtcgattggacgcataaaagtcgattggacgcataaaagtcgattggacgcataaaagtcgattggacgcataaaaatttgattggacgcataaaaatttgattggacgcataaaagtcgattggacgcataaaaatttgattggacgcataaaagtcgattggacg

SEQ ID NO: 37291 - DNA, 1403 bp, Heterodera glycines
  unsure (1)..(1403): unsure at all n locations
tttttgtcttctttttaggcatttttccatcgcttcttcgcctgttgctttcatcatttgcgttgtatttccgccgtcctctccgtttcctgtcgttgtgccatttgaactgaccaacgaattgactggggagcaattgacattggcataaaaagactggacatgtttttaagcttatccgttgtccaattgcaccagcaggcgatgaggaaaaatggaaaaaggagatgaaggaatttattgacaaaagaacatcaaatttaacatctccatcggagacaacggagtcgacgatgggtgaacaaatttaaaaattttaatattaattttttttctttgtttttgaagtctcctggatgctgcttccgccaatccgagtggtgatcactgatcagaaacagtaaaaaacgaattgattgattgtcagatacgattatgagaccgaaattgttggactttgtcatttaaatatagttgtacaatatttgctttttttgcacatgaatttataaaacgatataggattcggctaaactttgtatagtcaacccccagaaaaaatcgattagcacttgcaaatttaatgtttttcattttgttgcgaagtgaataggttttttaaatcattaaaatgaagagatagtacgtcaaactgagagaaataacagaaaaaaggaatcgacgagataatagtactaggcttttttctgcccagtgggtggacccatatttattgttcttgcttagaccttgtttgtttgtacatttgtagctttgcttttaattgactacaataaaaatgtgtgttgccatggcttattaatatggaacggatttttaaggggcgaaaaattccaaaataagggcgaaaaaatcgcaaagtaagggcgaaaataaggtcgaaacgccaaaataagggcaaaaacttattttaagggcgaacatctaaaataaggatttctaaggtcgaataagggcgttaaaccgcaaaattttcgaacaaaaaatatgtttttcgtgcttttctcgtcgagttaaagccgcagaaaaaataaggaaaaacttaaaaatccgttccccacttattaattgattaaaattttgtttttcattcaatagtttttccatttttatccacttaaaatatttatttgtaattaaaattggtttaagccattttcacccaaaatatggcttctcaaccgccaaatttggttgaagagacagaaaaacccattattgatgtaaccaaggcaaaggaatggaggagtgctgaagacggtgttgaaacagggcgaagacccgaaaattcatccggncaagggcgattgttgctacgtccattacgtgngcaccatcaaagaaagcgaaaaagtcagtgggcggcacaaagaggagcaatc

SEQ ID NO: 37292 - DNA, 1320 bp, Heterodera glycines
  unsure (1)..(1320): unsure at all n locations
gggggactccccgaaacaaaaaatcgattttcaagtgtcgtttgggtactcaacanntatgggagcaaaatccaaagcagattaaagtacaggctatagggaagctattccgaaaggattcggcctccccatnaatctgggcgcatcggttcggggggactgcccgaaanccaaaaaaantcgattttttcaagtgtcgttnnngggtactcaaacaattatggggagcaaaaatccacngcagaattaaagtacaggctatagggaagctattccgaaaggattcggtctccncataatctggggcgcatcggttcggggggactgccccgaaaacaaaaaaatcgatttttcaagtgtcggttggggtactcaaacaattattaaaaatttttagatttttattcatctccctttttgatagtgaaagcatctgagtgcctaaaataacttgtaaataaaatttggtgcgtttcagagcagtttgtgaaaaaatatttatgaattaattttgctaaaaaaataaaatagtgaagctttaaaaattaataaaaaattttaaattcagaattactggagttagcatcatagcagtgcttttccttgtctttttgatgccctcgcaaaatctggttcgcttctgatcagtttataaaaaaaaagttaagcctaaaatttttcgcaaatttaaaaagcaattaaaaatttttagattttttattcatctccctttttgatagtgaaagcatcagagagccttatttaacttttaattaacatttggtgcgtttcagagcacgttctaaaaaatatttatgaattaattttgcaaaataataaataattaatgaaaaagtcagaatttcgaaaaattttaaaaacaacaagcgttggcattttttcaggttaagttagtcctttacaatggagaaggcctgcaaaatttggagagattatatcgattttagtgcgctaggttcgatgaaactttttaaaatataagcctaaaatctttcgcaaatttaaaaagcaattaaaaatttttagattttttattcatctccctttttgatagtgaaagcatcagagagccttatttaacttttaattaacatttggtgcgtttcagagcacgttctaaaaaatatttatgaattaattttgcaaaataataaataattaatgaaaaagtcagaatttcgaaaaattttaaaaacaacaagcgttggcattttttcaggttaagttagtcctttacaatggagaaggcctgcaaaatttggagagattatatcgattttagtgcgctaggttcgatga

SEQ ID NO: 37293 - DNA, 966 bp, Heterodera glycines
tcttcttttcactgttgtgcctcttctaatcactgtgcacctcttctaatcactgttgcacctcttctaatcactgttgcacctcttctaatcactcttgtacctcttctaatcactgttgtacctcttctaatcactgttgtatctcttctaatcactgttttacctttcttaatctctgttgtacctcttttaatcactgttgcacctcttctaatcactgttgcacctcttctaatcactgttgtacctcttctaattaccgttgtacctcttttagtcactgttgtacctcttctaatcttgaactcacgaccaacttctgcacaacgttatttaaatccgtgtgcaaacgtcctgaattttaaaagattttcaaaattcaaaataatatattaacatacccttgcacttgtctgacgggccatgaaactcacatcgccaaaatttcttaagtcaatctgcgctcaattggtcgaaaacatagagtgcgccgtcatgttctaacttaactttgtttctttttgttttaattttttgctgctggtccatattatataattgaaagaaccttaatttagtttataaactcacttaattataaaataaatattcgttagaaaaaagagtgaaacaaattttcgttaaataaatgtgagttatgaattctcttttatatgcaaccacgcgaaaacggccacgcgaaaactcccacgcgaaaacggccacgcgaaaacgtaccccacgcgaaaacggccacgcgaaaacggccacgcgaaaatggccacgcgaaaacggccacgcgaaaacgtaccccacgcgaaaacggccacgcgaaaacggccacgcgaaaatggccacgcgaaaatggccacgagaaaacggccacgcgaaaacggccacgcgaaaatctgcacggaaaatggccacgcgaaaatggccacgcgaaaacggcacgcgaaaatg

SEQ ID NO: 37294 - DNA, 1081 bp, Heterodera glycines
  unsure (1)..(1081): unsure at all n locations
ctctagagtnncacgatttnnttttttgaaacanttcgctgggttcaaacgatttttcctgtatttcttctaaaattttgaaacatttttctgaaatttaaaaatattttgcaaggctaatccggcttaataattctattttagttttttattgcttttttctgtttaggaatgtgctcatgtgggtggtgtcggccgaggaggagttcagtccgctgaagaacccggactcggccgggcgcgactgtctgtccacctgcctggacagttttcgtggccctcatgcccagtggattcgccaggcgtgcactgacgcgcgtagtgccaaaaagaattgactgacgcctccgacaaaaattgcaaaaagaatttttattttcaaccattccaactgcttaattaattaattcccatttttgcactttctcaacattccaattgcctttttatagatttaattaaagatgttctataaatgcgttgtgcttacacagatgaaatcacacttccagggtttctgatcatgtcgctgacccacgaaatgtccaagtctcgaatttgagttttttattattcagatgggcctaaggttaggcaaggggtaatataaatggtatattcgtattcagcgaccccgaaaaccctaaaaatcctaaattagactcattttgtttttataaattttgaaaaattttggattaaatttaaaaaaattcttgtgctttttattgcataatttgacgaaaatttgatttctgattcgaacccggtcaggggtccgaaacagctcgaaacgcttctaagaatagctttattaggatctgaaaacacggttcctatttggcagtttcttaaacagtcttagccaattacagtcagaaaatcactaaatttatcctaaatgcatacacaaataaaagttgataccgcagcaaaaagaacaatattatatataattcaaatgggctcaaattcattctcaactccgcaattcaaattgatcggttcggtcacttctcagcaatcattcattcacttctcctgatcacttgngcccatcattgcgtgaaacgtctaaaaa

SEQ ID NO: 37295 - DNA, 936 bp, Heterodera glycines
  unsure (1)..(936): unsure at all n locations
ctaatattttaaaaattatttctcagtgacgaaacgatcgtgccaccaaataagcatggcattcattaaataggtacaaaaacactcgaacattttatgacattactgtagaaataaataaacagtcaaaaaatgttcatcagcagcggccgcatcggactttgtgaagccattcatccttcgtaccattgaaatttttacgacgatcgaatcgaaaaaatccgctgactcccgccgattgcaacggtcggttggcactgcgcggatgtgccgggctcagctggcccacaaatgatgggtctggtttttttgaaaaataatggcataaaaattaattaatttgttttgatcgagtttaaaaaccactccaccctcaatttgttgtcgatattccatgttgtatcgcacagttcccagcacactcatgtcctgcagatggcacgtcacgtttggcccagtgggcttgtaaacgcaaaaaatggtagacccaattggcacaatacagtcgggctcggcggcacaaagcaaagccatgcaaaaattattgttgtttatcaatcaacagattaatgcattttcacaatttaattggtaggggaagaatattaaaaattccgcggtttcccaccccataggaattttttttttggcaattttgtccaaaataattaattaatttaataaattgtatcaaagttttccaacggcaacatttatgtcgtatttcctataatagagcccccgggtgctctatttttcaatcccngctcaaaggaggggggctttattacagggggtctatattataagaatacggtatgtataattcgggattcgaaaaacgaaatatacacccctannaaatcggggtttttgtcagcccccccccccgaaagccaagggtctggctacgccattgngtataccgtatccatt

SEQ ID NO: 37296 - DNA, 821 bp, Heterodera glycines
  unsure (1)..(821): unsure at all n locations
tccaacacttcaagaggaaaatagcacttatgaccgttattctgatacgtagttatacatgggagttgagggaattgtagcttgatccggtgtcgtgagtagaggtgttgttctacagtaaccccgaggaaacctcggtaggcaaatagcctatttgaaccattaaatgcgatgtcatccggtgagataaactgattgtgcctaaggtgtctagttattagaacgtgtcttctcaaaaatttcaaattctttttcttccgctgtcgtagaatttcagatagctcgtgaggttcgcattcgttaaaattgcatagaatttcaacgagagaattcatttttgagcaccgataggcattttcatattcgttgcaattccttatataccattacctcaccactgtaggatgagtttttgccttttctctttaatttaaaaattctgagaactgaaatgcacatgatgaccactaccaaatctaaaattgacaaaaaatacacccaaggatttgaacttgaaactttaattttctcaaattctttgaacactactataaaaaattcactatccgtgtctgacacatatttgggaagtatttcgtttgagtcaaatcgatctttgtatattttcttctccttaatcagataaatttttccctcaattattaagaaatcggtgtatgatgatggcattgatccaatttctgtagtcataaattcagttncatttgtgtttgtccataaattctcgattgatctaatgtcaatctcgtctattcgatcgtctctgattacaaaagtcgacccatcatatgatcaaatct

SEQ ID NO: 37297 - DNA, 798 bp, Heterodera glycines
ttttgtgatccgtgaccaaaggggggtgacaggatttttgagtgaaaaaattttttcaccaaaaatctttcaaaaacatgtcattagggctattttatgacgctgatcacgaatacgtgatcagattttacttttaacatcgataagacctcagaatccctgtgtgattggggattctgaggcatcattttgaggggggagggggcaggttcggatccggacggtgtaacattatttttctgtacatttttacgttattttcaatgattttaattaatttaaaatattttgttgagttaataaataaaaaattatatttaatttttttttgataaataaattttataagtttaaattaattatttttttcctaaaaaacgggcgcgaagcgcccgtctggcccaaacaaatttaaaaaacgatcaaacgggcgcgaagcgcccgtctggccccaactaaatttgaaaaacgggcgtgaagcgcccgtctggccccaactaaatttaaaaaacggtcgcgaagcgcccgcccaagcccaacaaaatttgaaaaacggacctcttctgatcactgttgtacctcttctatttcctgttgtacctcttctaatcacagttgtacctcttctaatcaccgttgtacctcttgtaatcactgttgtacctcttttaataactgttgtacctcttttaatcactgttgtacctcttctatcatcggagcgccctttgaggccgcgaagcgatcgaattaaaccttagaatacaaaagggcgcggagcaccctttgaggccgcga

SEQ ID NO: 37298 - DNA, 191 bp, Heterodera glycines
ttagcatagacagaatttggatggggtggcaccaggccagtatccagaaacaatttcggggagggcatcccgaagagcttttttttttgctcttcaacccaaaaaatttttttttactagtgctattttcaaaatcttcagcgcggaagccaaaaaagacgcattattagcggatttgcgccgaaaaatca

SEQ ID NO: 37299 - DNA, 792 bp, Heterodera glycines
aatcactggggactcaacccaacagcatttcaatcacttgaactcaacccacagcattccaatcactggcactcaattctcctgcatttcaatcactgggactcaacccaacaaaattcaatcactgggactcaacccaccaacatttcaatcactgggactcaacccaacagcatttcaatcactgggactcaacccaccagcatttcaatcactgggactcaacccaacaacatttcaatcactgggactcaacccaccagcattccaatcactgggactcaacccaacagcattccaatcactgggactcaacccaacagcatttcaatcactggaactcaacccacagcattccaatcactggcactcaactctcctgcatttcaatcactgggactcaacccaccaaaattcaatcactgggactcaacccaccaacatttcaatcactgggactcaacccaacagcatttcaatcactgggactcaacccaccagcatttcaatcactgggactcaacccaccaacatttcaatcactgggactcaacccaacagcatttcaatcactggtactcagcccaccagcatttcaatcactgggactcaacccaacagcatttcaatcactgggactcaacccacagcattccaatcactggcactcaattctcctgcatttcaatcactgggactcaacccaccaacatttcaatcactgggactcaacccaacagcatttcaatcactgggactcaacccaccagcattccaatcactgggactcaa

SEQ ID NO: 37300 - DNA, 882 bp, Heterodera glycines
  unsure (1)..(882): unsure at all n locations
taattgcagtagcactacacanttgggatttcantttttgctcaaaagtaactaaattttcattttttcatataatgttgttccaaaaaattatgaccagatggatttgtgtgtaaaatgtttagtttggtggtgttttttgtgtaacgtcatacataacatcaatgagtttgccatttgaatttgctattggaattggaacagtattttcagtgcaaagtgtccaccctgcggcccatcagtgccggctccattctgatcattgttgcgggaagtgcactacttgaaaacagtgatgaccaacaagaacaaccgcaaaagtgccaggttgcgcagggcgccgtgctgttcgtgccgaaggattttggcgctttgctgtgtgacgcgagcgcggactttttggcgtttcgatcattcactccctctcccccgcattctcccaaataacctgtttttattattattgcaagtgtttcgcaacatttccattggtttttacccaattttgcacactttaatttattacattgaacacgtggtggcgccaaaacaattttttcgttgtaattttcgccgtataaattatgtaaaattattggagtaaaaaactattcttagtagtcctttgaattatgtatacacattgaaatattggggttcccctacgggttttttttgacacaaacgaaaacatatttgattatttcctagtcctcagttctgttttgtttgttgccttttaatctttgttgagtgtgtttcgattttgccccccccccccccaacgggtgaaagggcatttcatttctctgtgcgtgtgtgattagtgagttaacaaaaaaaaatatttttgttatcgttcgggtcttgatgcatatgcca

SEQ ID NO: 37301 - DNA, 1420 bp, Heterodera glycines
aatttatttttttatttggtctttctttttgtctgagtgtcgttagagaaattaaaaaaatttcaaattttatcattttaaattaatttttaatattttttacttcatttcttgcattaattttacgtcaaagtctccagcgattcacgtcaaaaagctgctcattcgacggccaacaacaatttggtcagaatttataaaatattcaattagcgtatccaaaattttcgtctatgtaaaaaaacaggtataaaattagttttttataatcctagaggtcataatcagcattaaatagtgattgtaattcataatttgaattttttttttaatgattaattattagagcccggaattttgaaagtaccgggacttttcgcaccataaaataattttttgaaaatttgaattttcgaatttttgttagaatacggatccggggttcgaatttagtcgaaatggatgtcagattcgtgatcagcgaccccgaaaacccccttgaaatttttttataagatttataaatattttattttttatggtctgtaaaatgcgtaagtgccgcgatttgttaacagatttatcaaaaaattaccaaattttgccagaaataacttttttctttaccaataaaatccaacatagttggtatcattcgaaagcttaaagtgtttagaagcttttcctaagctattgcttcgcgattagacaattactaaaaaaactaaacattaaaattgcaaaaagtcgaaatttttaagttttttcataactacagttcctctggttcccaaacccattatcacttgatggggcacttggcttgatgccgtcaacttttactctcacaatttcgaagccattaaagaagtgaatgaattgatttaagtaattaattttaaaaattcgcaggtcgtcgattcatttgaccctgaggaggcccagtgtattgccaaatctcagaaatgcttttcgatggcaacagtgctccttgacattgcctacattgaagcaaattttggatgtctccccggggcaatcactcgtttggagaagaaagggtttacaatacacgaatctgccaacaatctgtgtgaagtccgtgaagatgtcttttcgtttacgggagaaattggagcgaaaatccgtcggaaattcgatagcgttatcgcaaaaaacccgggatttgatacaatttgtgatatttgaaaaattctttctggtcaaaaaatcaatttcaatatgcctcccaatctgatttcactttacaaatacgcccccttgacttcatgtgatgttgaacgatcaaatttacaaatctattttgactgacaatcgttcatgtctatctcccgaacatcttgaaatgctacttatttgcaatgtgaatctcaataacgatttggattaatatttgttg

SEQ ID NO: 37302 - DNA, 1435 bp, Heterodera glycines
  unsure (1)..(1435): unsure at all n locations
tagtaaaaaatattaatatattaaatatagagtatnaactagaaatggccgaagaaataattagctcgaatatttccaaaaaatgagtcaagagactgaaaatggaaacctccgcctaaaaaacgaaattttcaatctaaatatattcttaggtgggtcttttcttaatttattgtaatcacttaaaataattaatttttaaatttccatagagcattaattcattgttcgagagtctaagttgtcgggaatcgaggcaagattgaagtgtctcttttttatttttatgagttttattttcaatttttaaattttcctttcggtttcgtcaccatcgaaatttggttgaaatactgaaaaatttacaccgctaaaagcgatccattttagtataaaaattatttgataccaaaaatgatttgtagtttgagaccgaaactctcgagcagccctaatattaaaagcgactggacatttggaccaatggacatctggacggtggccattactatagtataatgaaatcatttagttggaaccagacgaattggacggtacgaccgtggaagactttttttcttttatcctttctctctatattccttatccttttctctttctcatccatctctctccgctctccatatcactttgttctttctctctctctatctatctcttctctctatccctctttcgctttctctatctatcattttgtctttttctctctattcctctctttcttccctcatttttgtttttttctttccttttttctcttcaacgctcttcctttctctctcgctctctctcgccttctctctccctctctctattttcttttttcctttttctctctccctccttctctttatttctcttttaggaaggaatcaacttataaaaacttgatctgaatttttttttcattgttaaaaacatttttaaaaataaaatttggcattcactgtcgtaatattgataattttttatatcatattttatggatcattttcagatgtttttcctcatccgtgcaacgaaattttcaattcaacaccgaaatttggtcctccttttcatgacaacaatggctcaacagcagaaagcgcatttcacgacttttatggaaagcgtagttttgggaataatatgtgcaaatgacagtgtcaaaacggcggagacacagagatgaaatatttttgtgtttaatttttttttctattttttttgacctaaatttatatatcgtggaatttgccataaatttcactaattttttttttgtgacacaatatgtttaaaaggaagaatacggagtttctgatagttggatttaaaaaacggcattttggacacccgaaggaaaactggacaccatattcctaaaataagccaggaattagggttgaaaaaataaatttgtgtaggg

SEQ ID NO: 37303 - DNA, 785 bp, Heterodera glycines
tagggctgtcaaaaatatggatataaaatcgcgaaatatggacataaaattacaaaaacatggacataaatttttctaaattgaggtgtaaattttcaaaatttcttcaaattaattaaattctggtaaaatacctttaaaatggctaaatatagtattaaaaatcattttagaaaaaaaaaaacatgaaagctaaaatttactaatttttaatgaaattcaatccgaaatgcgaaattttagcttttttgtttatttttgacataaatttatcaatttaaaaaatccaaatttatttatattttcgagaaaattttacgaaaaactttttttcggaaaattttccggttttttggtcaaaaaggcaaatttatctgttggggaccattctaatagttttttttttagaaaaattccaaaatatggacaaatatggaaatatggacataaatcgcgaaatatggtaaaatatggatatccatataaatgacagccctagtaattttaatgagaactgctgaaaaaagattaaaaaatgaaatattagccatagaataaatatatatatttttgatgcaaaatcttatttgaccaaggatgttcttatttttaaaaattctaacccaaccctgatttatgtcctataatagaaaattatctaaaataatattttaaggaaattttctcttgaaaatcataaaataatcgaaattctcaaaataataaaataaaaattttgttagcataatttctgatcacaaaaacaaatgatttccttcggtgca

SEQ ID NO: 37304 - DNA, 917 bp, Heterodera glycines
  unsure (1)..(917): unsure at all n locations
ggtcttatcttctctttctccgtctttatcttctgtcttctctctctctctccccttcctctcttctccgattccccaacattaattaagcttccgcttttcgacaccgtctcaaacggcaccgcactttcgtccgcacgggatttcgtgaccgatttaacttcagcgaaagcatccattaccacgagaattacctctccgtgctttacctgtccatcaaaatgctcttcctttccattgttttccttcagtcatgtttgatgaatcgctttctccaaacggatgattacggtagctgagcaatttgcggccatttaatgctaattacaataattaccgtcttccatttgtccttttggatttctatggttggggcgtcttcatggacttaatcggagggaagggtaaagccgcggagagaagcgcacacaaaagaaacgctgtttgttttcatttagcgtggagtgactcgggcaatttcccccgggtgactttttgtgacatcgacgtacgaattttgggcgcaatgcaacggcacactgtccagtgcattttggtgatcaacattttcacggaaaaggtctctcactgatcgtacggttggacaagggatggaagtgatcagcgaaggctgggccacggacagagtccgatcagtcgatcactgccactgatctgtcagtgaatgatccgatcagtcctttgaggtgtttctgctgttgtggctttggtactccctccttctgctgatcaccgttttcaatttgttcggttggctcttcgctttgctccctttttcggcccgcagagatttcattttgcgccatctccgaatggccaacgtaaaatttgaaaaggaagaggaanatgtggacgaagtaaagggacggaaagagtgaaaagaacgcaatttaaaa

SEQ ID NO: 37305 - DNA, 965 bp, Heterodera glycines
ctctgtccagtaaatgcctttttccccatttccaaggcttgtcacgcgtgtgcaggagcgcgagcgtgaaatccaactcggacttcccgccgggtcgctgcagaatttgccgcgtaatttaccaccaatttagttttaagcgtttccctttttgcagtttcaagctccgctttggcaaattcgggcctcggcggcactgaccaccagcagcaacagcagagttcagcttcgtcggcgttggtcagcgaattgctgggccaaaatttgatcggaaatcagcaaattgatggtggagctataaaaacaaaaccaaacaacggacgattataaatttggaagggctttttgttgtgtccccgggtttaagtgacgggtttggtcgggagaaatagggcaatgtacattatgcacaaaatatgaacatttgaatgctgcggatacaacacttttcccgtttcgaatttgtgggacaaaatgccaatatttcctttgtaatttttttttgttggcatttcagtgaatgcgcttttggcggcggccgctgccgaaaacccgcaacagatcgacctgaacgacgcggcggtgctcaatttgctcggcatggccaccagtgggtcggatttgttcagcaacggcggcggcacgggcaatgcattgggcggcggacaccacgagcagtcgcagcagcaacaacacgcgggcggactcgctcagcagacggcgggcggtggtcagtcgtcgtccgccgcagcggccgcggcggcgcttcagcaacagtacaaccaacgggtgggtgtactgtactcgtcgtaccgtaatggaaggaagcaaaaaaagaaatgaacagacgacacacattactctcgaaattaaaaataaaagacagttttttttgtaattttattcattgtttttaccaatgcttccacagtttaagtccagaaaattgtgagtggggggcaatt

SEQ ID NO: 37306 - DNA, 663 bp, Heterodera glycines
cacacttcataagaacgaccaacttatgaccgagcactttcactcggacgattggcggcgaaagggtcgaaaagaaaggcaaaagaacgaacgaatgaatgggcgaaacggcgccgaaattgggttaaaattgttaaaattgggctgctgtaattgccggggccgtcgtcattcatccggcggcgtaaggtgcgaaaaagcgaaagagcaacattcagcagaagcagcacagaagcagttgaaatgcgcaattcgttcatcgcgtcgttcgcgtcctcgcctcgggcggcgtttgtccccccccccgggtgcttgcattttgtcctttctttcggtttcttttgctcttttgccaccgcctttccctgcggcaccgccaaacccattaaagtcgcagtcaaccgaaacacaaaaacaaacattgccaaaccattttttccctttttttaaagctcagacaaatcaaaaaaggatcagagaatgaataaataaatggtccgtccgcaactgatcactctccgccaatcgttgatgttcattttctggccaattttgacattacaaaaagcgcaatcgatgcataaacgacggagacgagcaaaggatgggcacgcaaattgggggaaagcccggcggagttttcgtcgaaaacttttgagtgat

SEQ ID NO: 37307 - DNA, 984 bp, Heterodera glycines
  unsure (1)..(984): unsure at all n locations
tctattaattntctgcataaaaatcttttaaatgtgtgttttcgcgcttttttcgcaacaaatatagcatgaatttgcattttttacctccttttttgttgattcgttcttttgctttgttgtcgtcctttttctcttccgttgattttttttcaacttttttgccaattttttcattcgtttttcttttaactttttttgtaattttatcgggaaatattttggcactttgttctttgcttctctcctccgggtttttggcattttttcctttcaatctctcctctggttttttggcactttgttctttcattttttccttcgattctttggcactttgtcccttcattctctgctcctggtttttggcacttttttctttgattctctggtccaattctatggcactttgtcctttaattcgttcctccggttttttggcactttttgcttccattttttccttcgattctttcacctcctcctcctcctctttctcctcctcatttattttatagttcaattcctcctcatttagcagctccggtccatttgaatttttgaataaatttttcaatttatatttattttcttcactgaattttgaatcaaaaaagaaaatggatattttgttcagctcataagcggcatcgatcaaagacaaaagttgtttacgaatctgaaatttcggctttctcgtggaaaagggattttgcatccacggagggaagaaaacttaaaagaaaaattattaaaactaaaaaaaaatatgaaaattttatttttattttaattataaaccttcagcgtacaatctgaacgaatattcatacagaatatgtgcatattttcggtatttttggcattctttccgtccgttttcttcattaatttccttcacaattttggcacatttccaattctttctcattaaatgcaaaatgccaaggtacgtttcgtaaaagtaagagcaaaaactaaaat

SEQ ID NO: 37308 - DNA, 775 bp, Heterodera glycines
agagaaaaacggcgaggaaattaaatgacggcattatccccccaaggaatattatcagtagggattattgtgaattgaaacgacagacgaagagacggttagcagatggcatacattttttacagattggttaaaaaatatgtgaaagagaagagaagagaaagggatggaaggggagagagaaggaggggaagtgattcagacggagtgattgaggtgattgagcggagggggcaactgattgatggcgagagaaataaaggcattggatgaagaaaagacgaatacgaaaataaggggagactttgcataagtgccattttgagtgttcgcattggcaatgccttctttgccccccccccctcaatcccacgtcggattaatgttcttttttctcttaaacttttcccttccatcccttcaaatgccgctttttccctctcttttcaatacaattttctcgcctgtttatgtcgtgaggatgaacaatgaaaatgaaaatgatgaatgaatggcgcaattcaattaatccctttccctttcattttgtcttccatcgttggatttcccggccaattttcccgtcttttggttcctacctcgcccaatccaaaaactctttttttccttgtcccccccccacccctcttttccaggaaggggatttagggaattgtccttcacctattttcgtattaaagtaaataacgtaaaaacaaaaaccaatatcctgcagaataatatggaccgaaaaatttacccatttctaaagggg

SEQ ID NO: 37309 - DNA, 585 bp, Heterodera glycines
aagtacacattaagataaagaaaatcccattgtattgatgaacagaaagcgcccggggggtcaaagacagccaaaatcaattaccaaattagtgataaaactgtcagaatatgtgcagaagagcaacagtgataagaagaaaaagaaggagaagaagtacataatataaaacagtaaaaataaagacgaagaaaatttgggggaaagaaatgataaaatgataaaattgagcaatgaacagacagacgcacctaaaacagtgagaaggcattgggcatttgggctgtgcgagagtctcgactatcgacttgggaaatttcacaatgtttaagattcggtaaactttctccatttttaagactctcgaattgggaaactttctcgctttttaagactctcgaactgagaaactttcggtacttgtgggttatctgtgtacagattttcaaaaaaaaattttttgaaaataaacttgttttaggggttttcagggtcgggaaacccgattctgaaatccattttggccaattccgaaccccaaacccggataagaacaaaaaagtcaaaattcatttttcaaaaaat

SEQ ID NO: 37310 - DNA, 1001 bp, Heterodera glycines
cataatttgtgcttttgccgcattttatgccaaattcttcctaggatttttggaatgtttcttggttaacccaaactctttcataaatttttttttccatttttgtacattttaaactcattaacccgttcaacaaattcctacttcttctttttgtaatagtttttataatttcttttagttttcggcttaatccgaattctttttccatttatttttctcatttttaattaactttttctcataatttcaccttatcttcagcctttcttattgcgtgttttcgcttctctgaattaattattagtgtgttttttttgtattatttcgtggtttaattttatttcagcgatttcatttatcctttttaaaatttaattctttgccttatttgatttttgatcaattttctcttttttatttcatttaaattcaatactcagcccgcttcaccgaacattcaaattgttgaggaacagcagcgttcagtggccgaaattctttcaaaattccagcaacgtgattttgtgcatcccaatggcacggaaagaaaggacaaaaaggaggtacggttttctagggggttagatttcctgaaggtttaaaattttaaaaattttctaaggccccaccagtgctgcgcccgaccaatttaaaccgtggctgctccggtgcatccatttgggcaacttcaagtgtgcgaagtgagtttgtgatgcgttttaaaatttacagaattggcataagatcgaaaaaatttcttaaaaatttttactgattgattagagccctcgcagggtttttgcgggaatccttgtcctcatgttcctgcatttttaggtgaaaattgcatttgaattgcaggaggagtccaggctaaaacagtacaggattttcggtctttttctgtccagacccattttcaatctgttcattttccggcatttttttaaaattcagataaattattgtgttaaattggtgaactttccctacgtctg

SEQ ID NO: 37311 - DNA, 1398 bp, Heterodera glycines
cttcttctacttcttctttttctcgtgcttccagttgatccacctgccaacaactgtgacgtaggcagcagaaatggttagaagaaatgtgtgaattattttaatttatgggtctgtaggggcgggaaggtcaaagggaagcgccgccgggcacaccccgggcaatttgcacttttgacactctctccaattgccaatgcttcaattggcactctgccaacacatttcaatgccctactggtacacataggtataataaatggaataccttgcactattacattccattcattaattaataagctttgttcggacggagttgccctccccccctctgcctgccccaatttagcattttgcgtttgccatttcgtttattgccaattttaattggcaacaacactcgcacagagcacatccacacttgtgcatttgcactctctttgctgtgctgctgcgcttttcagttcagctttttttttctggcactttttttgctgcctttgccgatccttccgagaaaaacgaaacggaggaaatggcagcagcaaataatttgaatttgaattgataattaattaattaattggttggttgtcgacgagacaaacggaagggggaaaccaacgagaacgaattgctctctgcttttttggacaaaatgcgacagtgcaaacagaaagttgacgcggagtttgatggaacagccgggaaatgctaaagatggctgctatttcaatgctattcaaaaaaaaactttgaatttgatttgaagagaaaagtgcatgctaattaaaataaaatttaatattttaattatttaaatcttaaaatattgtttgaaaaaaggttttttagcaatttacaaaattttagaaaaagtaattttaaaagtcgtgatcacggttctgacattcgttttgataggctctattgcattttcggcgtccaatcagtagagaccggaaatttcaaatttgcggatcctgctgcgggactggaactcaaaattttttgcgggacgggatcccgcggtattaatcccgcaaatcccgcatttaaaatttgcgggatcccgtgcgggattgcgtgattttgaaaaatcgaaaaaatttcaattaaattcaaagaatttccaaaaatcaaaaaatgctgaaaaataaatttttaggggctggcgggatgcattaaaaggggctgatgggtcgactaagatttttcgattggatccgacggtaaaaagttgatcggaaatcaaattattaacggttcataaatttgactaaattttcggaagtgtcggaaatcggatttccggcgggggaaaacgtcggaaatcagaaaatttcaaggggggccggggagaataaaaaaatttctaaatatataataggctaa

SEQ ID NO: 37312 - DNA, 958 bp, Heterodera glycines
  unsure (1)..(958): unsure at all n locations
aaaacaaatataaatataaaaacattaatttntggtgaattattattagttttatttataatgctattatttattatttttgaattatatttaaaatttgcttcaaatcattctcctgtccatttgttaaattattatttatcttctgtctttcttgcattaatagttttaagtacaaattttagttttttaatcatgtcaagttctgttgatatcgagattattcgccctagcgatgagctgtaaattgttggtttgattgtcgctcaaattaatgttaatgtttcatactttttattttgaatcgcctctctccgcccgctacctcatcaaaaaagaatataaatttaattaaccagaaaaaaagaaatttcaaaattatttttttaaatcatttgataagaaataaaaacatttaaataaaattcaataattttattacatataaaatgattattttttatgtaaaaaacaatgcaaaatgattgaaaaataattagaaaatagtaaaaaaaagattaaattctatcaaaaattgcaaataattgagaatataaattaaataaaaaaataaaagtaaatttagtagctttttacaaaaattgataaattattaattattttctgtcttggaaaatacctaaatgaaaagaagcaattaaaaagagtgacaatataaaaaaaaagaaaaaataacatttctaccaaaaaattgcaaaatacttacaaaaatagctataaaattcataaatatgtaagaactgtggtgttcattagaatatttgaaaacaataatattatttaaaaaattagcattaatttgttaacataaattgctcgactaaaaatattatggcattaattaaacagaaatataattacaaataaattaattaatacaagaatcggcgctaaatatgaaatttaaaaatattttaatatcttttttaatcactca

SEQ ID NO: 37313 - DNA, 892 bp, Heterodera glycines
cgaaaggtttacaatgaattccttatcgttgccggccgacatccggtgcgaagctggtcccgcactttgccaagaccagtggactggtgagaggtaacgtaggatatcggagtcaaccaaaatgtggaccagtcctttgtggactttggtccgattacctgcccctccgggggattgtggttctcaataagctgattgaattcggcaatcaatgcttaatctctatctgcattcttaacgggatgtgtgagcggtcaatttctgcactcaatgtcctttatgcgaaattagacatgtgagcctggcttattgattcgcagaggaatcatgcactgattgattcgcaacggcatcactgtggcaaccaaggaagatacacactattattcacattttcaaatttttgataaatatttgatttaatgtggtttaatggttgtttttcctaaatattttgccacatgtacacatcattgcttcatcgttgttttcagatgccttcaaaacaagaagttaaaagaaagaaggaacaagagcggtactaacggcagatggagaaatctgtcagccgtggtcgctcacccgtcccagacggaagtgcagatgagaatggggtggcatcacacccgggcaccacaacgcctaatattagtgctttacaattaagcaccccggcttcttccattggaagtaaaagaaggggcagacccccaaaagccggagcggagccaattatgacttcgcaacacagtgtgtcatctgttgacacacaaataacattggccacccaaaatactgaaacgtcgccgtgcagcaaaaaagggaaagtcgccgaagctgaccgacccatgtttgctaatgaagcaattgcttctacgcctatttcgacgca

SEQ ID NO: 37314 - DNA, 964 bp, Heterodera glycines
tggctagttctacttagtgacatttaccttaataattatctattgaacctgagaaagaaggaacataatccacgagattaaccactaagccgcagggagcaattatggactcatttttaaaataaatcttattaattaaaaaaaatttccttaatcggggtccttctctgctcttttgccgaattccaaaacggggcgaaggagaagaatcagaaagaagacttttaaaatcacttaaagccacagcaatccaaatcaattaaatttaaacaacacaacaattaaaagcaccattaaaattaccacacaccatccgcatcaccaattttttaagtccgggcgaagagtgaaaaacataaaaatgaaaatcaaagacacaaaaaaaaaataaacaaaatgccaaattaattaaaacttttaaaagtcgaatgaggtcattatttaattatcacatcctcggcctgcaacgagcgatgtcctcagcgatcaaagtgacggcgattggaattcggcaaattcggcgtgcgaaaggggcggaaagggtggcgatcaacggcggtgcgcgagtacgggtgctgaacgaacggtcggctgttcgagcggcgaaagacgggcccgtcgcgtcggaatggaggcggttcggtgcggccgtgttgtcgatctgctgccgtccccgctccttcttttcccttctctccactctccggcttcttcttcgcaattcccaactcttggtcacccgggaattctttgacttgggttagaagccatgccttcaacatgttcagtcccttctctttcatcactccctctggcgagacatggtccgtgttgtaaccattgccgtagcgccaaatctcaagaagcgaacggccattcgtcgttgttgccacgaattggatgttcttcgtcttttggccaaaaaagtcgcgcaattttccgatcagtgtttcgtttcgaattg

SEQ ID NO: 37315 - DNA, 1423 bp, Heterodera glycines
  unsure (1)..(1423): unsure at all n locations
ttaaaaaattttttaattgctttttaaatatgccaaaaaatgtaggcttaacttttntagtgaaaattcgatcactcatattttttgctaattgagcagaagcgtaccaaactttgcagggatactccccggtaaaggactaacttacactgaaatgagcgccgagctagctggctcaaaaaaattttcgaaaatctgagtctttcattatttatttatttttttacaaaattaattcataagtatttttacagaaactgctctgaaacgcaccaaattttatttacatgctagtttaggcactctgatgctttttctatcaaaaagggagatgaataaaatttttaaaaatttttaattcctttttaaacaggccaaaaagtttaggcttaacttttttttcagaaacttatcagaagcgcaccaaactttgcagggatactgaaaggaagagaaataacctattttaaatattatctagtcagttcatttaaataatttattcaataaaaaatttttttttgggttttcggggcagtccccctgaaccgatgttaggcttaactttttttcagaaactgatcagaagcgcagcaaactttgcagggatactgaaagaaagtgaaataacctattttaaatattatctagtcagttcatttaaataatttttattcaaaaaaatttttttttgggttttcggggcagtccccccgaaccgatgcgcccagatttatggggagaccgaatccttcgggaatagcttccctatagtctgtactttaattctgcgttggatttttgctccccataaatgtttgagtaccccaaacggacacttgaaaaaatcgatttttttgttttcggggcagtccccccgaaccgatgcgcccagatttatggggagaccgaatccttcgggaatagcttccctatagcctgtactttaattctgcgttggatttttgctccccataattgtttgagtaccccaaacggacacttgaaaaaatcgatttttttgttttcggggcagtctccccgaaccgatgcgcccagatttatggggagaccgaatccttccggaatagcttccctatagcctgtactttaattctgcgttggatttttgctccccataattgtttgagtaccccaaacggacactcacttgaaaaaatcgatttttttgttttcggggcagtccccccgaaccgatgcgcccagatttatggggagaccgaatccttcgggaatagcttccctatagtctgtactttaattctgcgttggatttttgctccccataaatgtttgagtaccccaaacggacacttgaaaaaatcgatttttttgttttcggggcagtccccccgaaccgatgcgcccagatttatggggagaccgaatccgannctctaga

SEQ ID NO: 37316 - DNA, 951 bp, Heterodera glycines
gcaatacgtagaacgggagtacaatcgcaattggagggaattcggtctgcaattgcgcatcttcaaattgtgggggaagaggtcaaacagatagacaaaaggcaaaaaaatgtaaaaaatcagtcgaaattaaactttacatttttagtatgcatgaaatcttcgcccgtcttcagtccattccatcggcgagaattaaactaaaggaactgagcaaagcgaacagtcagcacagccaatacgcaatagcaatggacaatatcaaacacatttgcaatttggctgacactatcgaaaaaacgcacgagtcggtcatttgttactaaatgaaacaaggatttaaaagtgattttcagctttatactcgacgggaaacttttacttgctcataaaaatgtgatggagttggagaatgccagggatgacttaatgtttgaagtgcacaaattgaactctgaacgcagagaatacgacaaaaatgcactgttttttcatctttttcataacaataactcgttttttatgtttagttgctcaaaacctatttttccgatgtggacaaacttatcgaagacttgggcaaacagatttggtacatttgttctcgagctttggaagcagttcagggcaatgacagcgctctgcaacagttggtctccgcgttgcgaataattgagcgtgaagaacggtagtttaagttagagacttattaaataccaatttttagcattgatgtttattatttggatcaaaagccgatgtccaacaatttcatgccaccaggacgaccaagaaaatggcgtcagcgtttattccaactgctgctgaagaatgtgcacgatcggatggaagggaaccaattgaaggacaaagcaatcaatcgccaatgattggcgaggtaaaacaatgaaaaatgagtcgaaaggcttaaattattgtaccattcctacc

SEQ ID NO: 37317 - DNA, 816 bp, Heterodera glycines
cattccaatcactgggcactcaacccaccaacatccctataaagtggcactcaacccaccaacatttcaatcactggggactcaacccaccaacatttcaatcactggcactcaacccaccaacatttcaatcactggcactcaacccaccaacatttcaatcactgggactcaacccaccaacatttcaatcactggcactcaacccaccaacatttcaatcactggcactcaacccaccaacatttcaatcactggcactcaacccaccaacatttcaatcactggcactcaacccaccaacatttcaatcactggcactcaacccaccaacatttcaatcactggcactcaacccaccaacatttcaatcactgggactcaacccaccaacatttcaatcactggcactcaacccaccaacatttcaatcactgggactcaacccaccaacatttcaatcactggcactcaacccaccaacatttcaatcactggcactcaacccaccaacatttcaatcactgggactcaacccaccaacatttcaatcactggcactcaactctcctgcatttcaatcactgggactcaacccaccaacatttcaatcactgggactcaacccaagagtattccaatcactggactcaacccaccaacatttcaatcactggcactcaacccaccaacatttcaatcactggcactcaacccaccaacatttcaatcactgggactcaacccaccaacatttcaatcactggcactcaacccaccaatatttcaatcactggactcaacccaccaacattt

SEQ ID NO: 37318 - DNA, 1120 bp, Heterodera glycines
  unsure (1)..(1120): unsure at all n locations
ccccataaatctgggcgcatcgtttcggggggactgccccgaaaacaaaaaaatcgattttttcaagtgtccgtttggggtactcaaacaattatggggagcaaaaatccaacgcagaattaaagtacaggctatagggaagctattcccgaaggattcggtctccccataaatctgggcgcatcggttcggggggactgccccgaaaacaaaaaaatcgattttttcaagtgtccgtttggggtactcaaacaattatggggagcaaaaatccaacgcagaattaaagtacaggctatagggaagctattcccgaaggattcggtctccccataaatctgggcgcatcggttcggggggactgccccgaaaacaaaaataaatcgattttttcaagtgtccgtttggggtactcaaacaattatggggagcaaaaatccaacgcagaattaaagtacaggctatagtgaagctattccggaaggattcggtctccccataaatctgggcgcatcggttcagggggactgccccgaaaacccaaaaaaaaattttttggataaaaattatttaaatgaactgactagataatatttaaaataggttatttctcttcctttcagtatccctgcaaagtttggtgcgcttctgatcagtttctgaaaaaaagttaagcctaaactttttggcctgtttaaaaaggaattaaaaatttttaaaaattttattcatctccctttttgatagaaaaagcatcagagtgccgaaactaacatgtaaataaaatttggtgcgtttcagaannntttntgaaaaaatatttaagaattaattttgnaaaaaataaataaaaangaaagaatnagattttngaaaatttttttgagnnagntagntnggngntnatttnagtgtaagttagtnntttannggggagtatnnntgnaaagtttgttangnttntggtnaattagnaaaaaatatgagtgatngaattttnantaaaaaagttaagnntaaattttttggnatatttaaaaagnaattaaaaaatttttaaaatttaataattttnntgganngaaggtantnantcggnctcttcgnggnctcgtggtgg

SEQ ID NO: 37319 - DNA, 1192 bp, Heterodera glycines
cgccaataaattttaaaggcgaattgcacaactttccaattgtaagcaaccaaatccggcaccgagaaatttatgaggattttggcccctaccgggagcacgaaaattttcgctccagccaaattcaaattcgccaacaacctgcgttagcgtggcaacaacaaaatgcaaacttcggctttttgccatgcgaacggcaacacaacgaattcgtcggacgacatctttttgaggatggacgtcaaatgatgcacccaacggagattccgaggcaaatgcatcaacagccaccaagagaagagcgtggatggcagcaacaaaacagtgttttgtaccgtccagtggcgcgacagcagcaaaattttccggtttacgaaaaccaaatgctgccaccccaaagccaaaatttagcggttttaagtagtctggagtacaatatggtccttgaaaggatcccagacctcaacggaaaggaagggacggacgaagttaagcgttttttcaaaaaattcgacgcttacaccgacagttggccggatgaaaaaagaattaagggaatagaaagcaaagtgtatggccgagctgaaagagcttttgaagcggcgaaagcagtcattccaataaggtatgaactgcttcggggtgaaatgatgcgacagttggaggaaacggactcaaaaaacttgaatgcttttgatgagctgatgttaggagtccgacgaaaacccaacgaatcgattgatgatttggcaggtcgaatttcggggttggtgaagagagcctaccctggtctttctttccaattgtcagacgaattctccatcaaatatttgatccgatcaattggtgacccaactttgtcacttaatttggaactcattcgaattatcaacaattttgagaagtgagttagaaatgataaacttcacgattcaaaccagttttcggtgctctatttaaccgcgataaaaacatccgaatcaattaaatagcttctgagataataaggtttatcataaaatttcatttaaaaataaaccctcaattattggtatgaacgatactttccaaacatgcacgcgttttgcgctcgagctatttatcatcgggcttgtcaatccaaagcgaaacaacaaagatgctgttttaaacgaataaagggcataggttatttgaagaagttcaaagaaca

SEQ ID NO: 37320 - DNA, 381 bp, Heterodera glycines
attctccctatattttccggtcattttgttgatgcaaatgtcttcaggaattctgtacgtttattatattccttttttctgacatttcgcacttttttttttgtttttttgctcaaattttggcggaattctgagattagaatttcaaaattaattttgaaagattagctttcggtaatactgtaatttatttaccccccccttttttgaaaaaaaaattttcaaaaattttaatgtcataaaaacaagtttcctgggcttttcgaggtcgctgatcacgaatccggcatccatttcggccacttaaatcccggacccgaattcgaacaaaaagtcaaaaatccaaattttcgaattttgcatatttcgtctacaaatggt

SEQ ID NO: 37321 - DNA, 1523 bp, Heterodera glycines
caaaattaagtctttttttgactcagatgcttgcaattagcaataaatagtattcccgttactatcattcgtcacatttgaggctgtcgtcccgcaacgtttgtttggttggcgtgtttgctttgtgtagccgagagatatttaccgccttcgtctgcagtgaagctgattcgcgacgcacgagcaatccgcaaactccaaatagaccaccaaattgtaaaataatttttaatcatttgcaacattttcctaatcccaacaacaagtttgatgattttgatttagctctttggcttttcaacattccgtgaaaaagaccaatgcgtcgtttatctgaggaaattcattgaagcgccaaatgccaagtccattgtcgaagtgcactcttttggcactttgttatcccttgatatcaccgaaatatgtaaagcaattatcggcgtgcacatcaagaatgcactccccgaggcagcactaagcgtgctcaagtacgacaaatccctttttatgacttttcacggccgatttttttaggtattttacttcggcagtccattcgccggcaaaggcacatttggtcattgcgttgcacacatgcacttttgtgtgttggaaactcgccgagtcggtcagagaggagcccgcaaatgctgacattatcgtgttgtctggaagcattgttgcagccttacaatcagttctcacaaaattgatagattggtcggtcggtattggcgagcctcgatacttatgagtcttattcaagaggtattgtaaggagttcattttgtcttgttccatataatagcgataaatcgtgcagatctttatagactttgttgtaatcattatggaatacagtcgatgattttcgattgatttctaaatgaggaattcgggactcgcaaatgtcgggaaataacacttaagaaatggaccgcaaatgtcggggccgcaaatgtcgggccgcaaaaatcgggccgcaaaagtctggaccgcaaatgtcggggccgcaaatgtcgggccgcaaaagtcgggccgcaaaagtctggaccgcaaatgtctggaccgcaaatgtcggggccgcaaatgtcggggccgcaaatgtcgggccgcaaaagtcgggccgcaaaagtctggaccgcaaatgtcggggccgcaaatgtcgggccgcaaaagtcgggccgcaaaagtctggaccgcaaatgtctggaccgcaaatgtcggggccgcaaaagtctggaccgcaaatgtctggaccgcaaatgtcgggccgcaaaagtctggaccgcaaatgtctggaccgcaaatgtcggggccgcaaatgtcgggccgcaaaagtcgggccgcaaaagtctggaccgcaaatgtcggggccgcaaatgtcggggccgcaaatgtcgggccgcaaaagtcgggccgcaaaagtctggaccgcaaatgtcggggccgcaaatgtcgggccgcaaaagtcgggccgcaaatgtctggaccgcaaatgtcggggccgcaaatgtcggggc

SEQ ID NO: 37322 - DNA, 723 bp, Heterodera glycines
acttacaaagggaggtggccaagtgtccgtgggatttccaaatgaaacttggttggatggatagagcacccatgggttcttaagaaaaatggttttattttctgccaaatgagcacgagtgccgagttatgacgtgccaaagtttttagttttttataattaaagaaaataattaattatttacatgtcttcgatgtgttgtttggtgtagaggtaatgtgttagtcaaaatttttttgggtcacaagttcgaatcccctatgtgtaaatccattttgtaatttttatttttcctttttatgagcacttcaattagcaaattttatttctttatcaaaatctttattttaattttatcccattaaaaattgcattaaacataaagatgtaataaaaaacctgtcgaattaaaaaaatatatttttgtctaatatttttattgagtattttatgcactaaataatttcaaaaaaataaaagtaaagtttttttaaataaaaaatattttgataattgacttggcataatagacaaaaattaaaaaaattaatttacatgtaggggatccgaaccctgggttaaatgatgctgactagtgcactaccgctacaccactggacactgtgccgagacacaaataagtatttcttttatttcatcattaaaaagtttggcattttttatctcggcacaggggtccatttggcagaaattgaaggtact

SEQ ID NO: 37323 - DNA, 1442 bp, Heterodera glycines
ccgagaaaaaattccagaacaattagtatcggcgtaattattctgagaatgcggttggaattcctattaccgttgagcagaaaaagagatagccaattttccaaatttttccaaaacaaacgcgccgagaaacaaattccagaacaattagtatcggcgtaattattctgagaatgcggttggaattcctattactgttgagcagaaaaagagatagccaattttccaaatttttccaaaacaaacgcgccgagaaacaaattccagaacaattagtatcggcgtaattattctgagaatgcggttggaattcctattgtcgttctgatgacggcaaaaaagtttgaatgggctgggcggacgtattcagagcgagttgacaaaaattaaagaccaaaggcgccaaaaattcactttattttgtaccctcaaacttgggtaattaaaccataattaattaatgaacaaatataatccgacatgataaaatgggcacaaaggggaatggtaaggggaaggcgcagggcacggcacagggaaggcgcagagcacggcacggggaaggaatggaaacttcggagggaaccaatgagcgatctgaaatcactgaaaacccagccccttttatacggcttttttgaaaccatagtacgctccaatttataatttttaattaaaatctgtttttgttatatccgtttgggttttgccattttcccattaattgtttgttttccactttttcctttacaattccaattcctttaatatattcaattaattttaataatttgtttacgaacgcaatccttaacagaattcgccatttaatattaattaattttcgttcctttcattcctgaggaaatgcacttttcattttcaaacaattttccgttattcatttcaaaaggttttcccattttttataattatatttttgatagttttttctaatatgtttttccaaattaaatgaaaaattatttttgtttatgtaggttttgtttttccccattttgttttctagtgttttttattttttcctttctttattttgggatttcgcgctgtcgcgacaataagtggttgtaaacaacttttgggtatggaattattttttgaagtgagtcaaacaccgtattagtgctttgctgtgccgagaaccggcaggcaatggatagctttaaatctgcaagaaattagattggcaataagtggttgtaaacaacttttgggtaatgaattattttttgaagtgtgtcaaacaccgtattagtgctttgctgtgccgagaaccggcaggcaatggatggctttaaatctgcaagaaattagattggcaataagtggttgtaaaaaaattgtgtaaggaattattttttgaagtgagtcaaacaccaaagaagtgctttgctgtgccgagaaccggcaggcaatgg

SEQ ID NO: 37324 - DNA, 992 bp, Heterodera glycines
tgagtcccagtgattggaatgctggtgggatgagtcccagtgattgaaatgttggtggattgagtcccattgattggaatgttggtggattgagtcccagtgattgaaatgttggtggattgagtcccagtgattgaaatgctgatggattgagtcccagtgattgaatgctggtggattgagttcccatgattgaaatggtggtgggatgagttccagtgattggaatgttggtgggttgagtcccagtgattgaaatgttggtggattgagtcccagtgattgaaatgctggtggattgagtcccgttgattggaatgttggtgggttgagtcccagtgattgaaatgttggtgggttgagtcccagtgattgaaatgttggtgggttgagtcccagtgattgaaatgttggtggattgagtcccagtgattgaaatgctggtggattgagtcccgttgattggaatgttggtgggttgagtcccagtaattgaaatgcagaagaattgagtcccagtgattgaatgctggtggattgagtcccgttgattgaaatgctggtgggttgagtcccagtgattgaaatgttggtgggttgagtcccagtgattgaaatgttggtggattgagtcccagtgattgaaatgctggtggattgagtcccgttgattggaatgtcggagaattgagtcccagtaattgaaatgcagaagaattgagtcccagtgattgaatgctggtggattgagtcccgttgattgaaatgctggtgggttgagtcccagtgattggaatgttggtgggttgagtcccagtgattgaaatgttggagaattgagtcccagtgattgaaatgcggatgaactgagtcccagtgattgaatgctggaggattgagacccgctgattgatatgctggaggattgagacccactgattgaaatgctggtgggttgagttccagtgattgaaatgttggtggattgagtc

SEQ ID NO: 37325 - DNA, 1040 bp, Heterodera glycines
catcagcaacagcagcagaatggcacgtcccggacctcctttgattggtaagagatacggatggcgcgcggcatgacactctctctgatcagatggacggactgcgctgcgatcacttttttttgccggggagggagaccaattgcttgctgatcagtcgtcgtcattcattaaccaatcaatcaatgaacggatcaatcaatcaaccagtcagtcaacaaacaacaacaacaaatcgatttgaaatacgaatgatccatttacaacagtttacgggcccttttcacgcatttctctcatcatcatcattgtcataaattgtcattttatcgttaattattatcatccatcagccagttgacctctgatccctcctcctcccgtccgtgttgtttcaaaacgtttttttatttaacagatgcgagattatttatgtgttctattattttgttttaatttttttgtgtgtttccccactttttcacgtcgctttctctctcttaattttctggaaattttcaattgtttccttttttttttaattgtgtctctcttgtttattttggcgcgggtaatctccatcatcattatcaccatattagcggcacgatgccgacaaagcagggactaaatttttgatttttgaatttaaaaatttgtatcattccctaattcgggtgtattttttcgagaaaacaaaaaccgcggatcggagagtcttggaaaacccctcagggtccggtttctcttaattattgttaagccgtccgtcttttcccctataattttctgctctgtcggtttcatcgtgtcggaaaattgcttctggattttattttaaaaaatgtgttatttttgtgttcattttctcctcttgtgctccttctgttttgctgattgatcaatcagtaatcgacaccaaatcacaacatccccccacaaaatgtaattcttttttctttcatcgtccccatccattttcacacaaaaataataattatttttgttttgtcacccatttatttcatcacgactctaga

SEQ ID NO: 37326 - DNA, 829 bp, Heterodera glycines
aaatagaatggtgattgtgagagccctccgtctcatacacaagcgcttttctggaggtataaaatttatcaaaaaaagagatagccatttttctgggatagagtataaatttaaaaattccctcaaaaataaaaggtctattgcgcaccgccctccctatcatgctcgagagcatttgtatgtgtataaaatttatcaaaaaaagagatagccatttttctgggataacctctaaatataaaaatcctctgtgaaataaaatggcgattgtgcacagccctccgtctcatacgcaagcgcttttgtgaggtataaaatttctcaaaaaaaagagatagacatttttctgggatagagtataaatttaaaaattccctcaaaaataaaaggtatattgcgcaccgccctccctatcatgctcgagagcatttgtatgtgtataaaatttatcaaaaaaagagatagccatttttctgggataacctctaaatataaaaatcctctgtgaaataaaatggcgattgtgcacagccctccgtctcatacgcaagcgcttttgtgaggtataaaatttctcaaaaaaaagagatagacatttttctgggatagagtataaatttaaaaattccctcaaaaataaaaggtctattgcgcaccgccctccctatcatgctcgagagcatttgtatgtgtataaaatttatcaaaaaaagagatagccatttttctgggataacctctaaatataaaaatcctctgtgaaataaaatggcgattgcgcaccgccctccctatcatggtcgagagcatttgtatgtgaataaaattt

SEQ ID NO: 37327 - DNA, 906 bp, Heterodera glycines
tttgatcaggggatggcatgaaaccgcagggtgatctgtttcctttcacaggatacattcgcatggcacgcaatcgcaacaacaattgcggcatcgcttcccacgcctctttcccattggtctgatcggagtgaatttgttgcccttgcgctgattcagagacatttcatttgattaatcgtgcaaaatgataagataattgataatccatcagtcaatcggtcgatttccattttttatgttcgcaattttattcacatataaataaattacttattttatttacactcaattttctgttttttttctgttaaagtcaaagtcatttgccaattgtacgactattaaatttaatgtctatcattttggctcaccttttgtttttgcgagggattggtcgaaggaatttggcgttaattaccccaaatattttcgatgaatttgtgcaattaatcaatcatctgacaatgagagaatgaatattcgatgagtttaaagatgaaaaacaaatcttgcgcatttatttcccaaccaaaaaaaaaagttttttacgagaaatggccgtacaaaaagacgcggcaattaaagggaacccattttaatatttattagcaaatatttaaaataatttaatatatatttttttaaaagatggaaaagtcagtgatttcattgtgttttttggttgggttggcatttcttttgccgtccgaagcagcattcagcaggtggcagaataatgaagcaaaaacaattaaaattcacaatttttgttagcatgcgaacgaagcgaggcggcggaatgggcggagggatgggcagcggaatgggaatgagtggcatgccaggcggtggcatgggaggaatgagtggtggcagtacggaagcagtgggtacggtggaaac

SEQ ID NO: 37328 - DNA, 488 bp, Heterodera glycines
ggcgaacggcgtggggagggtcgacgcaccagcagcaataaataggtaaggaaggaggcacacaccgtaacggtgcgtacagaagaaccggtggatacagtagccgaatgagcagtttgaattataaaagactaatccatgctcggtaattcttgactacgattctatcaacaacttgtttcatgtttgatctattccagtcatttcaatatcaaacgaaaacgcacagtatgaataatgtaataattcgagaaaacaaaagaattttaacatttcaagaaagttacaaaccaaaataatcagtaattacttaattaatcttatcttttttggtaattgcctaaacgttgagattttatatattttagcttcgttagattttgtgctttcgaatgataccaaaaagatagtttgttctaacatgaacaaagttattgtataaaaacccgggattgtcaattgattggactcataaagtgcattagagc

SEQ ID NO: 37329 - DNA, 1271 bp, Heterodera glycines
  unsure (1)..(1271): unsure at all n locations
attgggacttcggatacactaaaggatgcnttcataaggtttttatcgttggggtacgaatgaaaatatcaanaatttagcttgactgctgtnggtgtangctcaaaatttcgcgcaaaaaatttactctagctatcaaaaaattcnatggggcccacacttcggaacgcatctctgaaatcctaaaagctcttctcgaaagttggaatgtaaaagaatgccattgtttgtgaccgatttcggcagcaaatttagttaaggttagtttattgaacattttatttcaaatacattttttggaggcattggatttaatgcacattgaaagaatcagctgtgccgctcatgacctcaatttatgtgtaaaggattgcttttcaaaagaaaaagacgaaatggctcaaattttcgaaaaatgtcgaaaaattgttggaactttaaaacattcggcaaaattgatggatgatttaaaagatgttcaaggcgaacttggtctaccgaaagctaaattgcttcaagttgctaattatcaaatactcatttaattttcatttcaaaggacgtaagcacgaggtggaattcgacattacgtatgatcgaacgtatgctggaacaatcggctgctattgatgaatttttggttagaaacaggaaattcgatctgcttctaagtcaagaagaatggtccattctcaagctaattaaggcaatttagtgttcaatattttcttatgttttaaaattttaaggaacttctaaagcccaccgaagaagtctctttacattattgtaaagaaatcctctccgcccgaattccgctcgctcgaactttggtctccactttggaacgagttgatctttcagtgacaattgatggcgaaatcaaaataattaacgaagttgagcaaatgcgtacaaggctgattgaggcggttaaaaagcgttttttacaaaaagaaaataggtatatacttaaaatactattatattataaattgtatgttgagtacttttctcgaccctcgcttcaaggatcgtttttccgacgaaagtgacatattttttgcgcgcgttgcacgttttttgaaggacgaaggaacagaagaaaatgacattttggaaaatttggaggatgaagtgaattcgactcgcattttgccaccagccaagcgcgcttgttccattgtggagataatgcagaacatagccagttgtaccaaaaaaggtggtaccaaaattgcaattttgatttaaaaaaattttagctacat

SEQ ID NO: 37330 - DNA, 622 bp, Heterodera glycines
taaataattccgacgcataaattttcgggcgggcgatgcctttagaaatttcctcacccctcctgccatcttaataattgaaatttcaatctctttttttgtattaattaaattcccccccccccccccattttcccccaaattttgtccaaattatttttccctgccgcccactcttttgatcgttgggttcatcttcaataatcattaatataataattattgttgttgctttttgaacagcgctcaagtgatcgtgcgtgaatgggcttgagagattcttatattttcccataatttcctttcttctttttcctcctcctcttccttttttcccttccattttcctcttttctctccctcccctttttctttttcctcctcctcctcctcctcttccttttttcccttccattttccttttttctcgccctcccttttttctttttcctcgtcctgctcctcctcttccgtttttgccttcgattttcgtctggtctctcgctccccgttttctttttgctcctcctcctcttgcttttttcccttccgttgtccgcttgtctgtgcctcccctttttctttttcggcgtcttcctgttttcccttccattttgggctt

SEQ ID NO: 37331 - DNA, 1154 bp, Heterodera glycines
ttggtggctttgtcaactccaatatacactaatagaggactttggagctatagatttataccaattttttaatttgaagcttctataaaagttatgatgcattaaatttagcgacgcgtgaagcttctcactccgccattgcgcgagcgagcggtgcctatgttccgccatatctgagaatgaacggtgattgcaccggagcggtaagtttgtctccttttaatcactaatcattgacactacctcaggcgtggcgaagaccaatccctcgctgtaaaactgttaaagagttgaatatggacgtggtcattgagtacagtgggcgagccgctgaattgaagcttattggagaagcaacaagtggatcgggcaaggacataacgaaagcaacggatgtaaaaaaaaataaaaaattgtttttatttatatttttttatagataattatgagcataacaagaagtcttgccatggctggtggacctgaacggccttggttgaactatgaagtctgtttcactttatttttagacttttttcatttttaagattgctaccccgtctgcttctgacttggaatggttcagagctaaagaacgcgaaattcgaatgaatgccgaacgaaggcagagaagcaagtgaccaaacactgggtttgaattttgtttggtatcagtgaatagaaatggaattttcaggaatgcatttgtgctttggcaacagcgttggatgagagcccaatgtgggaaatgaacgaagacgagttgaaaaagtttttcgacgattgggacgcaaaaagcgcacttcttctaccagcagccctcccgggacagaactgacgcctgggacatcgaacgcgccgccaattgttgaacaggaaacgccgattggacaaaacgagccccctccaaagaaggccaagaatgatgatacgggagttgatgaagatggggagaaacactgttaagagtgtatgcaattctttttaattgcattttgttgacaaatttttactgcttaaaaacatcaatttacaagcctttttgataaatggtcaaaacttgttaaacgttcatttcattatgtaaatacaatacaaacaaaagcgtagtaaaattgacgaaatgtttttagcaaaaaattttttttctcatt

SEQ ID NO: 37332 - DNA, 1502 bp, Heterodera glycines
cggggggactgccccgaaaacaaaaaaatcgattttttcaagtgtccgtttggggtactcaaacatttatggggagcaaaaatccaacgcagaattaaagtacagactatagggaagctattcccgaaggattcggtctccccataaatctgggcgcatcggttcggggggactgccccgaaaacaaaaaaatcgattttttcaagtgtccgtttggggtactcaaacatttatggggagcaaaaatccaacgcagaattaaagtacagactatagggaagctattcccgaaggattcggtctccccataaatctgggcgcatcggttcagggggactgccccgaaaacccaaaaaaaaattttttggataaaaattatttaaatgaactgactagataatatttaaaataggttatttctcttcctttcagtatccctgcaaagtttggtgcgcttctgatcagtttctgaaaaaaaagttaagcctaaactttttggcctgtttaaaaaggaattaaaaatttttaaaaattttattcatctccctttttgatagaaaaagcatcagagtgcctaaactaacatgtaaataaaatttggtgcgttcagaaccctttctgaaaaatatttaagaattaattttgcaaaaaataaataaaaacgaaagactcagattttcgaaaatttttttgagccagctagctcggcgctcatttcagtgtaagttagtcctttaccggggagtatccctgcaaagtttggtacgcttctgctcaattagcaaaaaatatgagtgatcgaattttcactaaaaaagttaagcctacattttttggcatatttaaaaagcaattaaaaaatttttaaaatgagaattcatgcgagattttctggaaataagcttaatagggcctagttaagctgtaaaaaaaatttggggcgatttgaatgagaatagaaatagccaggttcgatgaagttttggtaagccaaaaaaaaatccaaacatttaaaaatctataaaaaatttaaaaattagaattcatgcgagattttttggaaataagcttaatagggcctagttaagctgtaaaaaaaatttggggcgatttaaaagagaatagaaagaaccaggttcgatgaagttttggtaagccaaaaaaaatccaaacatttaaaaatctataaaaaatttaaaaatgagaattcatgcgagattttctggaaataagcttaatatcgcctagttaagctgtaaaaaaaatttggggcgatttgaaagagaatagaaagaaccaggttcgatgaagttttggtaagccaaaaaaaatccaaacatttaaaaatctataaaaaatttaaaaatgagaattcatgcgagattttctggaaataagcttaatagggcctagttaagctgtaaaaaaaatttggggcgatttgaaagagaatagaaagaaccaggttcgatgaagttttggtaagcctaaaaaaatccaaa

SEQ ID NO: 37333 - DNA, 1167 bp, Heterodera glycines
  unsure (1)..(1167): unsure at all n locations
tgcttgggacccgatcccgcaaattgctgacatttgcacgcgccataagctttggctgcatgttgacgtattattaataaatagcaaataatttttaattaattttctacaattttttcccatttatttgtcattttattctcttctgtttatcattttgtaattaccgtattggtggaaatactttgttaccgtatcctttgatttaaaatgcataattttaaggccgcttggggaggtggactgctgttgagccctgaacatcgtcataaattggctggaattgagaaggctgattcagtagaagaaaagaaaaattatttttatactttaataattttttattaattttaattaaaaataaaataaattatgaatttattttcataaaatataatttcaatttccaggtcacatggaatccacacaaactgatgggtgcgccgttgcagtgcagtgcctgttttgtccgaagagaagtcaaaatacggaaaaaatattattttttctttaattaaattatttttttttcatttaaaataaaaaatagaatacgaagtttaactctttctacaggggcttctcttccaaaccaatcaaatgtcagctgattatctgttccaacaggacaaaccatatgatgtcagctacgataccggggacaaggcgatgcaatgtggtacggtacttgatactgtaatataaattatttacctactgaaaacaagcaaatttattaagtcgaaaaattgaaaaattaaaattattaaattaattagttttcaataactttatatttagggcgacacaacgacattttcaaggtggattagcgctaaatttcaactaatttcactaatattatttaaataatatttcagttgtggcttatgtggcgttccaaagtctcttttttgatttccttatctttaaaaacaaaaaataacatttattaaggggatggaaggttatcgacgtcaaattaaccaacttatggtaacaacaaattaaaaattaaattagttttaattattacaatttttaggaccttgccaaatattttactgataaaatcaaacgcactgaaggctttgaaatggtgctggacgaagtgattatccacaggcgggagaaaaantggcgctactgtaaaaaagttgttggttt

SEQ ID NO: 37334 - DNA, 1009 bp, Heterodera glycines
  unsure (1)..(1009): unsure at all n locations
tgtagcaatgatgcacgtgtcctggnaattctncaggaattatccctgatttcttctatttcttatcactcacaaatcactgggggaaaattaagatgatactgatgattagcgttcttgttcgattttggcgctagtgcgatatttattctcatggttcttggaaagtactcaggaagtatttcgatttttgtaaataccatcagctgatataaagaaaagcattgttgtctgtccttttccaattatattgccatttcggcatcggtctaacaaagctgcgcatggctttgggaaattcctcaagaattaattttcgttgtctaaagaaatgcgctagtgtcgggcattttgacattaaaaagccattaaggcaccgttgtagcaatgatgcacgtggtccttggaaattcctcaggaattaatccctgaatttcttctattttcttatcactcacaaatcactgtgggaaaattaagatgattctgatgattagcgttcttgttcgattttggcgctagtgcgatatttattctcatggttcttggaaagtactcaggaagtatttcgatttttgtaaataaaccatcagctgatataaagaaaagcattgttgtctgtccttttccaattatattgccatttcggcatcggtctaacaaagctgcgcatggctttgggaaattcctcaggaattaattttcgttgtctaaagaaatgcgctagtgtcgggcattttgacattaaaaagccattaaggcaccgttgtagcaatgatgcacgtggtccttggaaattcctcaggaattaatccctgaatttcttctattttcttatcactcacaaatcactggggaaaattaagatgattctgatgattagcgttcttgttcgattttggcgctagtgcgatatttattctcatggttcttggaaagtactcaggaagtatttcgatttttgtaaataaaccatcagctgatataaagaaaagcattcttgtctgtc

SEQ ID NO: 37335 - DNA, 1442 bp, Heterodera glycines
tttttattaatttttaaaacttcactattttatttttttaatagatttttaaatgtttggatttttttttggcttaccaaaacttcatcgaacctggttctttctattctctttcaaatcgccccaaattttttttacagcttaactaggccctattaagcttatttccagaaaatctcgcatgaattctcatttttaaattttttatagatttttaaatgtttgcattttttttggcttaccaaaacttcatcgaacctggttctttctattctctttcaaatcgccccaaattttttttacagcttaactaggccctattaagcttatttccagaaaatctcgcatgaattctcatttttaaattttttatagatttttaaatgtttggattttttttggcttaccaaaacttcatcgaacctggttctttctattctctttcaaatcgccccaaattttttttacagcttaactaggccctattaagcttcagaaaatctcgcatgaattctcatttttaaattttttatagatttttaaatgtttggattttttttggcttaccaaaacttcatcgaacctggttctttctattctctttcaaatcgccccaaattttttttacagcttaacaagccctattaagcttatttccagaaaatctcgcatgaattctcatttttaaattttttatagatttttaaatgtttggattttttttggcttaccaaaacttcatcgaacctggttctttctattctctttcaaatcgccccaaatttttttttacagcttaactaggccctattaagcttatttccagaaaatctcgcatgaattctcatttaaaaaattttttaattgctttttaaatatgccaaaaaatgtaggcttaacttttttagtgaaaattcgatcactcatattttttgctaattgagcagaagcgtaccaaactttgcagggatactccccggtaaaggactaacttacactgaaatgagcgccgagctagctggctcaaaaaaattttcgaaaatctgagtctttcgtttttatttattttttgcaaaattaattcttaaatattttttcagaaagggttctgaaacgcaccaaattttatttacatgttagtttaggcactctgatgctttttctatcaaaaagggagatgaataaaatttttaaaaatttttaattcctttttaaacaggccaaaaagtttaggcttaacttttttttcagaaactgatcagaagcgcaccaaactttgcagggatactgaaaggaagagaaataacctattttaaatattatctagtcagttcatttaaataatttttatccaaaaaatttttttttgggttttcggggcagtccccctgaaccgatgcgcccagatttatggggagaccgaatccttcgggaatagcttc

SEQ ID NO: 37336 - DNA, 976 bp, Heterodera glycines
  unsure (1)..(976): unsure at all n locations
ctttaatttttatattntggttattatatagataatcgtatccaaaagtgagcttgatttctctttccatcttggaagacaagaaaggcattcaccgatcggaacctttcttcggtttcgaagttcattgtatttaccatttaattcacaattacttatgataataaaaacaaattatgttttaaaataaattttatatgattgtaaatggcttggtattttaagattttgggaaataatagaaggtcaattaattaataaaagtttgcctttttctggtattttatatgaattaaaaaaatttgcgattcgggtactacaaattttgtgttgtgtaaacattaaatgtgattttaaaatttaaattgtctttatgcatcatgagatagatagtaatttccatgtgtgtgcagcaattttgtttcgataatattagatttcttagatctccggtgctggcaaagctttactcttgaacggtagattgaataaaaagctccagtctttcgacaagtttatataaattgaatttttattgttttcgtattaattgtagttctgcatttgcaaataggttaaaactaacattttatgtatgtaattttgatgattttaatttttagaataaatatattttattttctcagcaggtataataattgagacttttagcaaaaaattacggttgaagaacttctgtattcatgccatagaatttattatgtataaactaaaccacgtaaaatagaaagtttaattagtactaataaaagatgggaatatgctctcggggtctgtgggattcaataattatggaaaggggaattggggatgggccaaaggtgttttgtccaaatattgtccaaagttgggacaatatttatatgaagtaaattgagccgcgaaaatacataaataaaaatggagagatgatattaattnagagagctgcagcagaagataaaatataaaactg

SEQ ID NO: 37337 - DNA, 834 bp, Heterodera glycines
cttatccatgccatctatcatctatgattctttcatgcatgcattattcatgcaaacattcattcatgctagccttattcaatcattctttcattcattcatgccatgtgctttcatagaatcatgcgtttataaattttcatgcattacttataaatgtaataaatattataaatggtgcggaattagcttatcacattcagatgagaaccaaaaatctgccttctaagctttccaattccgaagttttaacaagtgatgctagttcatcgagtgttgagagccctgcggggaccatttatgaatcattcgatgcgttgagcattgatagctcaaaagcagctgcaagccctgaggggtccgctaatgttggggctgaaattgttattgaagggactgaatccaatgaaaaccctgcggggtccgggtatgatgaagtgagaaacgagggtagtaacgtcacatttaaagcgatggaagtggcgcttgaccaagtcgatgcagagggttttgcgaataatggctttgatgatgaggagcctgaagcatgtcctccggctaaagatgtgagcaaatcatcgcttctttatttggtttcgcaagccggagatggctacgtaattgcttgcaagaagtcgcctaagtcgaagccaaattggccattcttcatgaacatcgaagacaagctgattgagtcggccccaggctttcagcgtaaacttgaagttggtgactttgtggcggtttcatcatttgagtggaaccagaagctgcgatatttggctgaacatcgccaagatgccacacagtcctgcaaattttggttcaacgaaa

SEQ ID NO: 37338 - DNA, 567 bp, Heterodera glycines
ttatcctatatattaaagttgagtgtttgtatgtatgtgtccgtggtttgaattggtgtggcgttttgtttgaattttgcgttaaaaatgaatttgaaaaaagtagagtgagggaaaggtgggaaaatagtgcactgtctgattgtctgtctatgcgggcagcggcgggtgagaggggcatacagagaacagacgcgtgctgctgtgcagcagcagtctgttggacgcgtgcgtgtgtgtgggagagggaggtagtgggaaaaaaagagagtaaattgcaatggaaaagaaaagagagtaaaaagtcggtcactcattggcgccgttttgccgagaaaatttcgcttttatatttttcaatttcatgttgtggttatcgaacgcatgagaaatgcattgacaaagtgcggcgcgtttgtccgagtttggccctggcgagaacggaattctctctccaattcgatttgtgccccgagaaatcgctgcttgaacaaaattatcagtgcgccgaatgtttttcgcccattgtattcgctaataattattttttggcaggtcccttgagat

SEQ ID NO: 37339 - DNA, 643 bp, Heterodera glycines
ttcattttcaagcgcacagtgtttattatcaaaatatattaataaatatatgaaaaaattaaaataaattataaataaaaataaatttcttttatttcaaaatatttgttacaaatatttaaaagaaatacaaattaccatttataatagcaaccaaagccttgttgcttgaattaaagaattttaaaacaaaaattacttaaaaatttacatactaatctttttgctttttaaaaattctttaaaaaatagatgcttcaaatgatgctatttgccatgggaagtgaaaaaataattttattaataaagagctatgctgatatttatttacgcaaataaaataataataataataagtttaaatgaataacagcaaatgaaacacgcttcaaagcattcttatccaaataaatccaaataaatattaataaaaattctattcattaagaaaagggattaaaaacaaatgccagttcataaacccaaagatttttgtaatgtaaattatttaaaatttattttagcggctatttatacaagtagtatcaggccacttaatccgccccaaatcccccgcccccttccattacccaaatccctggcgcttagcgaccgattggtaattttttgggggtcattcggc

SEQ ID NO: 37340 - DNA, 1015 bp, Heterodera glycines
gcagatgaaagccatccattgcctgccggttctcggcacatcaaagcactaatagggtgtttgactcacttcaaaaaataattcattacccaaaagttttttacaaccacttattgccaatataatttctttcagatttaaagctatccattgcctgccgttctcggcatagcaaagcactaatagggtgtttgactcacttcaaaaaataattcattacccaaaagttttttacaaccacatattgccaatctaatttcttgcagattgaaagccatccattgcctgccggttctcgcacagcaaagcactaatagggtgtttgactcacttcaaaaaataattcattacccaaaagttttttacaaccacttattgccaatataatttctttcagatttaaagctatccattgcctgccggtctcggcacagcaaagcactaatagggtgtttgactcacttcaaaaaataattccatacccaaaagttttttacaaccacatattgccaatctaatttcttgcagattgaaagccatccattgcctgccggttctcggcacatcaaagcactaatagggtgtttgactcacttcaaaaaataattcattacccaaaagttttttacaaccacttattgccaatctaatttcttgcagatttaaagctatccattgcctgccggttctcggcacagcaaagcactaatacggtgtttgactcacttcaaaaaataattccatacccaaaagttttttacaaccacatattgccaatctaatttcttgcagatttaaagccatccattgccgcacagcaaagcactaatagggtgtttgacttacttcaaaaaataattcattacccaaaagttttttacaaccacttattgccaatctaatttcttgcagatttaaagccatccattgcctgccggttctcggcacagcaaagcactaatagaggtgtttgactcacttcaaaaaataattccttaccccaaaagttttttac

SEQ ID NO: 37341 - DNA, 1013 bp, Heterodera glycines
atgtgaatacgggtagcatcggattctccggttctccttcaatcgcttcaattgttgttgctcttttgcttctgtcgctgttgtcggaccattttgtgctgtttacggtgcagcgggtacggtggaggcgacggaaacggtgccagcggtgggcccgcggcggcgaccatggcgccaggcggtggcaccacctcgacgcagaagggcggcaagcagggagacggcgggggcggaagcggaggcgaagcggcgaacggcggcggtggcattgccatcaccaccggagaaggcggcggaagcggaggagaagcggcgaacggtggcggtggcattgccattacaacggtaggaggcggaggcggcggaagcggtggcggtagcgggggagcacagtaagcgggtgcgatacagaacaccttcggcggaaggggtcgtattaagggttagcaacccaaaagccgacattcccgagccaataattaagtccccagaaggactaagtaggagataatctcgagattaagccggatatgtttttcgagaatatattggaggcgaacgatcactcaattgaaccatggatttgggaaaaatgaataatcccatgggttttgaagacttaagtcgagagttcagcagttgtgagattagggaagatacacaagaaaattttggcaagagtctccaaatgactctcgagatttgtgtgtttgggaaagattaagctctcggttgatcgggccattttttgaaatcagtgaaagtcaaatactccttaaaattgttggcaaacctgcggcggagacagaggctggaacatgatcggaggcggcggaggtggcgcagggacgggcaccggaggcggaagagggggcggactgaacagaagcggcccagcggaaagaataggtgtgaccaaactgtgggacagcagcggaagggttaaaagcggaaaagcgggggggggggggttaaacgcgagtgcctcaccggacagtcaatggggggaaatt

SEQ ID NO: 37342 - DNA, 665 bp, Heterodera glycines
ttctaaattggacgtttttaccctttttccggacagaatcggttaaaatcgttttaacgattttgaggacccataacttttgtcagttgttttttaatcaacaaattccttcggattcatgcttaacaaaccgaaagcaatcgattgatatctatttggtcgcaattccatgtgtttgtctcgtaattgggaaatatgcccccaaatttaactcaaactttggacggcaaaatcacgagaatttattgtcactgagcaaaaaaaaacacaaggaatgaaaaagcgatcaccaaacagcatcattccaacgaacggggcgggggatattaatattacacactaagtgatcattgaaagccggggagggcgtgcgaaaatccggccaagctgatggctggcgattgtggcaatagaacaatactaggaaattgtgaaatgttcggttgggaatgggaggggggaatcatgggataagtttcgcaaattgcgacactccgtgcggcggaggacttcgggggagaatcgaatctgatcgaatttaatggcactggatttccttcgatttgtcttgcgattttctttcatccggttcgctgggtgctcatcggaaagtgttacaattggccatgcgatccgactctggcacgagagatgacgcgaggacg

SEQ ID NO: 37343 - DNA, 973 bp, Heterodera glycines
  unsure (1)..(973): unsure at all n locations
ggggacatttaaaacaaccgtttccatttaaaattaattgattgattatttttggcaaaaagcaaataatcaaaatcgtttactttttcaaccaattaataatttaaaaaaaccgtaatctattcgaaaattgtacggtaaagggtaggagttacgggctgcgaagaatggagtacggacttataggcttataatccgaagtccgtaaacccattcggtcgaaaaaatatggattacgggctatgggtccgtaaaaacccgttccaggaagtgggaacgggattcccataaaatcccattcccgtaaaaaaaaatcatactgggatagaaagtactagattgggaccgggactcncaaaaaaatcccccgggagtcacgagtagggatgatatttttaggtttttcactatttttttcctgagctccccgtagcctgaaatgcacgaaaaacatgtttttttttggctgttgttaagctacttttcgagttattagcacctattttctaggtttttattagcacttaaaaaacctaaaaaaattttaaaactattttcacctattttggcgttttgcccaaaatttgttaacaaaaatgcaataaaatagaaaaataaacccgtaagaatcggtgacccacgcgtttcggcgctcccgtttcggcgctcccgtttcggcgctcgtgtttcggcgctcccgtttcggcgccagctcgtttttccacttaagcttttttctttggcatccaaatccaacaatcttggtatcattcgaaagctcttaacatgctctattagccttatcaaaaacgaaaagtttttcaagcctgtaaaaattttattaagaaaaaacttcaaaaatttcgacttttcgcaattttcatgcataactgttttgataattgtctaatcgcaaagcaatagcttagaaaaatcttctaaatagattaagctttcgaacgacaccaacaat

SEQ ID NO: 37344 - DNA, 750 bp, Heterodera glycines
acgtggacagcactcgtgtgaagaaagtgggaaagatggtgcgtgcaatttgcattcataatcatccgattccgaacaccaacgatgcgccgagctgtcagattattattcctcaaaaacaagtcggccgcagttttggtgagtcctaaaaacaccgttgcttctttcgaaacatttcccttcttattgttagacatttacgtgtcttgcgtttccaattccaaccaagtgactccaaagccgtggttcatcgccactgtttcgaccactgttgaaacggagaaccccgaggctgagatacaaccggcacttcaattgcttggacccatttttgaaaagttgtatcaagaagagttaaaaatgagaaggttttttaggtttgtgacaatatcggatttatacgagccggtggacatgggctatgagtctcaaatcttcatttcgcgttctttcgacgcgaccactcactttgagaccacttgcttggatgtgctggacattttcaagaggggcactacggaggaattcgacttctccaagatcacccatctcagtttggaggacaacgaatgatcagaggggcgctgtttggaaggggtggggtcgtggcccagaaaagtgagcatttcgagaaaatcagatgatttaatcatcccttgcaaatattttcgttaaatgactcacttttctgtgttcattgcatggttttaatacacagatatttgtagaattcatttcctagtgaccaaa

SEQ ID NO: 37345 - DNA, 753 bp, Heterodera glycines
tgtgcggcggcgatgccaatgccaaaaatgccgtgccgtcgtctgccgcccattccgatccttttgacccgtgccaatacgccttcctgtgcccgcaaagtgcagctgatacttcctccccgttagcatccgttagctcattgcaaaacaacacaaaaatttcctcagctgtcgccgcaaatattgcgacgagttacgcaagtgagtagcgatggtgctgctggtgttcctgctactctttgagcttggcccattcatttctttttcaacattactattggcactttttctttgcccatccattgcttttggcacgtttgcctttgtcaggtcataccggcatcaatcagctgggcggcgtcttcgtcaatggccgtcccctgcccaattacgtgcgcaatcaaatcgtcgagatgaacagccgtggcgtccgtccctgtgacatttcgcgacagttacgcgtctcacacggctgcgtgtccaaaattctcggacgcttctaccagacggggtctgtgaaaccgggagtgatcggcgggtcgaagccgaaggtggcgaccagggaagtgaccgaagcgatcgcccgctacaaagcagtgaacccgacaatgttcgcttgggaaattcgggtaggaattttgggactggcgaagagaagagaaattgagacggacagacgaagccaatgcccgcgggcaattaattttttgcttttaattggcaggacaaattggtggaggagggcatttgcga

SEQ ID NO: 37346 - DNA, 1620 bp, Heterodera glycines
  unsure (1)..(1620): unsure at all n locations
tttcatattaatttaaatattcaatttatngtacatttcaaaatttctctttttaattaataaaagggaataattaatttattttttaaaatttataataaattgcattcaatttttgtacctcttctaatcaatctcagttgtacctcttctaatcacttttgtacctcttntaatcactattgtacctcttttaatcacttttgtacctcttctcatcactgttgtgcctcttctaatcaaacacagttgtacctcttctaatcacagttgtacctcttctaatcactgttcttcctcttttaatcactattgtacctcttttaatcacttttgtacctcttctcatcactgttgtgcctcttctaatcaaacacagttgtacctcttctaatcactgttcttcctcttttaatcactattgtacctcttctaatcactgttgtacctcttctaatcacagttgtacctcttctaatcaatcactgttgtgcctcttctaatcaaacacagttgtacctcttctaatcacagttgtacctcttctaatcacttttgtacttcttctcatcactgttgtgccttttctcatcattttttgtacctcttctaatcactgttcttcctcttttaatcactattgtacctcttctaatcactgttgtacctcttccatttacttttgtacctcttttaatcaccgttttacctcttctaatcaccgttgtacctcttctgaccaatgttgtacctcttaaaatcacttttgtatctgttctaaaatttaaaaaacggccgcgaagcggccgaaaagaacaacaaaaattagaaacgggcgtgaagcgcccgtcttgagccttgatgtggactaaaaacccataataattttttaaaaattcaaaaaaaaatctccaaccaattcgatcaatttgaatcgcttcacagcctaggtagcgaagctcaagaagcgcgaagcgctttttcccagctaaatagccgacggttcacgcacccgctagttactatatatgttatattgacaaggagtttcgtttcaaaaaacaaaatctcccggccgaaggccgggagcgccctgaaagtggtggaagggtcttacaactttttgaggagaattcgggaaaactataggttttttgatccgagcgccaactgagtaccggggactgatttgtcacttttgtttgcatttgaaggcccctaactttttttgtaaaactcgaatcaaaaagtgcccgctgaaagggcactccgcctaagggtcctctacaaggtggtattttttaaaattttttttgagcaaacccctggcctgcaaaaaatggcaactgaagcgtgctcaaaaagtacacttcagtaccaggtgaataccgcgccagggtttgatctgagcggggggtggtcagcgaacttattgtagagctttcaaagctcgattttttgaaattttaaaatttcgaaaattttcaaaatttttcgagttaggcctaaaaaacggttttcggatttttgaattttaggattttttaacgatttttcccagagaaacggagaccacttccaaaacatagtttttcgagctctatcgactggtattttttt

SEQ ID NO: 37347 - DNA, 1250 bp, Heterodera glycines
tcgtaattgataccaacgtcgggagactgaaacaggaagacccctttatcttcgatctcttgacttgtatttcgacgaataaaactgcgacctttccgattcctgtttcccatccaacagagaattaatgtagctccaaaactgttgttgctgaacattgggcgcacaatggaaaatccatgggaaaacgaaaacgccttcatcatacagtttgcacagtttcatgtaggaagaaagtcgaacgaggaaaatctggagaacagggtaaatagaaagtaaataaaagcaataagatatacaacaccttgacgtcggtaattgcgacattctcaggggaacaacaaaggaagacattttcacgagttgaacacttggacaagcccatcaaaagaggatcaagcacaagatgatctggaaaaattaaagaattagtaattaatggtaaagttagagttacagtttagattagaagaataagcgagaataaaggccaatcgtctaagaaagtgaatgtttcgtcgaagaggccaagcattggccagcaaaaggggaaggacatcgaaacgcaattccgaaagagcaattgggtcggtagtatcaatttgaagaaaagaagtgaccgatgtgccaaattgggcacagtctttagaaggcacagatgaagaataacagcggaggaaggagaggagctaaagaacggaaagaaactgaaaattaactggcaacaatattcttatgagtcaatggcaattagtaccaaaactagttcgtacaataataaattcgtataaattttttaaatttaattaaaaccagtattatgtttggagaatggcattgcaaatgtttgtgaaattgacgattattatacaataaagaaaacaacaccaacgaccatgttcctgtcgcattcgtgcatttccgcctccaactgagagtccgcgtgcaaattcgttctgagcagtgtcgtcaactcagcggcacagagtgaaaggagcgcgctatccgctccatcacttcctttgaccgatttatggcatgcccatttcaatgccaaaccgtagcaaaacattgccatcgcaagcagtcggaattcgttgaaggattgctaaatataaaataaggacagaaaaataaaagtgtgctacttggtaaatggaagaacagagtaagaaatcagcgaaacgacaatagaaagagcacttgaccagacaacggagcaacgaaatgttcgcatttttggccaaaag

SEQ ID NO: 37348 - DNA, 1681 bp, Heterodera glycines
  unsure (1)..(1681): unsure at all n locations
tttttttttaatttatttcgggaaacttttttttttgggattttttttaatttgggcttcggctccccgtttccattttnactttcgggttcaataaagttcttcatgagtgtcgtctcgagtctgtcacattttactagggtatgaaggctcattccccggcttgcagagatttctcgaatcccctggctcaattataagctcccgagtctgatcagttctacatctcgatttccggtcaaagggcttagccagcagggagggaccccgaaatccgaaaagttggaaatttttgaaaaagtataccattttccttagaaattatacgcccttgtccggggtcaaattctcggtctcgaatctctggcaccgattcttggctcagctggtcaattaacgcttccgagtctcgattaattaattctccgtctcctcttcctgatcccgaaaaacttcgattctcgagtatctcaattttactaatttgtaaaaaaatgtttagctatgccgatttcggctttgccgtcaaccaatcggatggcgcaattcgaatgcgcaagggcacttacgcatactcaaacagtggcgctttttgcattaacaatgtgttgaaactcagttatgcaaaatatgcatacggtgctggtgatacggtgggatgtggcgtcgatttggccagccgacgcatttttctcacaaaaaatggcacatttttgggttcgtaaaatattcgtgagacgtattttgaaacatttagggccagccagaatttggtaattgcacgcctcgaccgggttttagagtttaaaaccctgccctttttggaccctgtctggttgagattagagatcggaattttacgattgtacggatcatggatggaattccgaggccccaaaaattttcagaaatcggaattccgagtgctcaaaaaatttatcggaattaattaggttttatatcggtcaagagtcgagaatttctctgcctttttagaaggggtcttgaaatttcggagcgccgtttctcagtgataaatttttggtatttttttggcccgagaattgcttcgggtttttcgtgcactgaataaagctcgatttataaaagtaatttatgatttttttaaagaatccttcgatttggttcttccttctaatgatcttccgctgatcccattcgtcactttgtggagctatgatgacaaaattgaggccaattttggaccgaaatttgaattcaatttggccactctctgacgcacatttttttgttctttgtttttttatgtatttttgatttttgactttttcattgatttaaaatgtcgttaaaatgttctcagttttgttttttattttgggaccggacattttttgcttgtaaaatttgttcaaataggcacgaaaaagctgaaaaaaggcataaaaaattggaaaggcagaaaaaatgaaacacttttattcgtgattaagcatgtcttgaaaaaattaaaatattttctctacatcttatatttagaagagatgttgatgaggccaaatcttccatagaaaattttacatgaaatatttttatttattttttcccgaactaataaagcatgtgaagagctttcgaatgataccaagattattggatttggttgacaaaggaaaaaaagttatagtccaaaaacatg

SEQ ID NO: 37349 - DNA, 952 bp, Heterodera glycines
aaaatttgggactcaattaaatttttattttaccatacaaaaataagtaatttaaaaatttcatttcaatatgaggcgacactttaaatctaaaatttcggagcttttttcaattgattatattaaattttaatgatgaaaataagtgattagattgcaaataacaaattatgaaaattctacaattccggcactaacaaaatttggaaaattattctcgtaatgtatgttgcttataattcacatacattacaaacataggcttttatcattagcttgtttgatgtgatgtgctgaatttggctccccgacctttggggatttgcaacttgggtacctgtcatttttggacccgacattaggggatcccgacatttgggcaccgagccgaaggccccccacgaggccgcgaagcggccgagtgagtaccttgggcgcagaaaaattattaaggaggagggttcattatttatttatttttttacaaaattaattcataagtatttttacagaaactgctctgaaacgcaccaaaatttatttacaagttgaataaggcactctgactcttatattatcaaaaagggagatgaataaatattttaaaaatttttaattcctttttaaacatgccaaaaagtttaggcttaactttttttcagaaagagtgctgaaacgcaccatattttatatacatgctaaagagggcgacttaagattatattagcaatagcgcagacgaacaaggaaaaagccaagttgaagcagcatgagacgcgactgttgcaggcaaaggtggaaagccgtcctctttcggtgctcctcgcgcaacgtacgcaacaaaacgcgaacactgcgaaaataacacagaatagtacgacgacaagcgaatcgtaccctttcggttcaaaaatggacagacagagttgggactcgcgaatttggaccgact

SEQ ID NO: 37350 - DNA, 792 bp, Heterodera glycines
cgaaaacaaatttcgttgcatttttccatggacactcgggcaattaattaaaaaatacatttttttaattagttgcccaatattattatattactatataaaaacaaaaaactccggtaatgaaattacaattataaaaataatttacgccatagcaaccttagattataataaaataattatattaaaatgaatttttaaagttattttttgtggcttttgaaacttttacatattttttaaattattgatggattaattaaatggttatgagtaatttgaatatgaaaaaataataataatttataattttatttaaataaaaattctaaataaactaattttacaattaattaaataaaagaaaaaataaataaataaatgattattcaattaaatacaaaagaaaacaaagccgttagggctcctgggactataaaaaagttttctatttatttcacgccatttattatgtaattctctaaaaattatgtttcggctcttatctaaaagaaaattataaaaagataggaaaataaaataatttatatatttacgaaaattgttaatttaacaatataatatataaatatagatatgaaaatttaaaagaaaatgattaaaacaattttaaaatggcggctacgcgaatccaagcggcttcgcaccatcatcccgatcggatcactttgatttagcaagttttttaagagataaatatagataaaactgtaattaaaaaactataaaaaagtaattttaaataataaaaccaaacactatataaaaaaa

SEQ ID NO: 37351 - DNA, 1100 bp, Heterodera glycines
tggtccttggtggtcgtttatattttttgcttttcactctacttttatgcggagcgttcaaaaaaaattcagcaaatttttcaaaaaaaggaaaaggggggaggtagcaaatgaaaatttacacacctccacattgtcgtagatgcacagcggtgccagcattgtcgtggacgatttgccgtcggcggttgcgccgcgtgtggcacggaaaaagtcgagcaaaatgcgaactttgacggggcgtttggtcgccacactttttgccgcgaccgccaaccgatggaccaatcgctgctccaacgcgtcggtgcccaaatagagggcggacagcacaacgcgacgctttgcggactcaacgcgttgctgaaaaagcgggggaaaatgggggagggattggcatttttaaaagcaaatagaaaaatcatgggccaaatctccgaattatggctggttcggcattaaaaccaataaaaaatgaccagaaaaattttcttagatatatgaattaatgtttttttagtgtttctttttaggtttttagtggtagacagaaaatttctttaaaaaaccgggaaatagtggagctacaccccccccccccccccacattcttcgaaaaaattttttcttttgtttcaagtgtcatagaaatgtttccaaagctttaacggggtcgctgattaacatcccgacatccatttgatcaattctgaatccaggacccgaattcgaataaaaagtcgagaattaaaatctttcgagattcacatggggggggggaagaaaacgaaatgagaaaatcacgaaattggatttgatgaaaccaaaattaaaaaacatttgcaaatacatcggaaaaacggaccagtaatgtgttgtaaaaatggtcgggcgaacgcaaaaaatggacggacgacgaatggacggggaaacaaaggttggaatcatcacaattgaacaatgaagaaaacaatggagaggaggaggaggaagacattttgaacttctactgatgggacactacccggcaaaggtgtagaattgacagaaaataaacttaaaaattttatttttgtttttcctgggatggaaaaatgtgc

SEQ ID NO: 37352 - DNA, 1302 bp, Heterodera glycines
ggtgtgatgtgctgcgagtgtgagtgttgcagcagcagcagctcgtttcccctctccccattctctgccagtttcccaccgtatcgatcccctcgaaagattcaaagaaaatttctaacagaaaattttcaagaaaaaatcagaaaaatttttcattgtttttttgtaaaaaacacgattcccttaaattttagatggataaaacgaaatcttaccattttactgttgctaaacaaatggaagcggtgttcaattttgaacaaatggtggtctccgttcaacaggtgtcgtcgatgataaaattgcaattcattcactcattcattttaattttcagatggtccaagtggatgccaaattggacaaaaatgagcgcacattccttgcacgggcttacaaaaaattgatcgatgttcgtcgggaaacctggcgttttttctgtaacatggacgagaatccgcaggatgccgacacggaggagcaaaagcaggtggaaggcgtgatgtcagcggacaatactttttaatgttttttccccttttacaggccaggaccgatctccgtttgaaaacgcatgagggattgctgcaactttaccgcgaatttttggttagttttggatttttgttggtttctatcactttgtttcatttacaatttgaggatgtcattaatgaaaagctcctgccaaacgccaacgacgaagaggcgagtgtgttctaccacaacatgaagggcgatttctaccgagaccaggtcgatttgttggaggaggatgaacgtgccggtaagggtttttgtttcgtttgtttcccgcaaaaattttcattcactttcagaaagtttgatcatttcggaaaagtcctacgaagaaggctttaccattgccaccacaaagttgaaacggtccaatccggttcgcctgggcttggcgctcaagtacgctgtgttccaatttgaagtgttaaagttggaggaggaggcgcgtcagctgatgcagaaagtcaactttttgttttccttttttttgttggaattaatttgtaaattattgtaaatttaggctcttgaggatgccaatgatgaactttgcgaaaaagaagcggcaggggacacggaagctgctcttctgctgatccagaagcaattgaccgcgtggaagccgaagaatttcgctgaagatgccgctcaatgaaaaacggatgatattttgttgctgtattgtcatcgatcattaattaaatgtagaaatgggagtttaaaattgatgttaacttgttgaataaatgaacaatcaccatt

SEQ ID NO: 37353 - DNA, 822 bp, Heterodera glycines
atgaactaaagaatttcattatctatatgatttattgaaactgagtgaattttagaaaaaacaaaattaattgaatgaaattaaatgaaagaaagtttaaaaattttgcgctcaagattttctatggcaaaatcattggcaataaaatttttgctaatcgcttgtaactggcccagcaatggagctttacttttaattaaatgacaataattaatttattttacgtttccatgactatattaataggatgtctcagtttaaggcacaaaatggacaaataggcagcactcaaaaatcccaattaaattaaatattttaaatgaaaatttatatattttttaaaattataatgatttttgactaacataataacactattgtacacgttttctaggaaaattttagctcatttctcagtgcttagcaaaatagtaggcgttttggcgccgacgtttttgcgccaacccaagtttttgggctctaacttgttttttgttgttaaccaaatccgacaaacttgatatcatacgaaagcttaacttgtttagaagctatttctaagctattgcttagcgaatagacaattatcaaaaaagttataacatgaaattgctaaaagtcggtttttgaagttttttcttaatacattttttaccggctaccggctataaagtcttttcgctttttgtaagactaatagagcatgtgaaggtctttcgaatgataccatgatcaattgatttggtcgacaaagaaaaaagagttataatcaaaaaactgaggatgacgccaaaacgtcggcatccaggtcaaaggggaggg

SEQ ID NO: 37354 - DNA, 785 bp, Heterodera glycines
atatatatatatatatatatatatatatatatatatatatatatatatatatatatatatatatatatatatatatatatatatatatatatattcaatttttggattttaacttttagtttgataatattctatcggtttttttcttattgaaaaattttcactttattttaaaagaaatttttctacataatactgaattgcgccccggacattgcgccccagacatttgtgcctatgtccaaaatcgggctcaaacttacattttttcaacttagaagtcttaaacagcattaaagttaagaaaacaaagtcttttggtttattaagaaaaaataataatgttgctagagaaatttattattttttcaaaaatttgttgtcgttaaattatcgcgcatacaatcattttcaatcgcttatttaaagcagtttagtcatctgggattgaaaaaatgtaaatttgaacccgattttggacatatgcgcaaatgcccgaggcgcaaatgtggggtaaccgtctgtcaccaacggggtgggtttagaatggtttgtaccagggatgggccaaattgaaaaataaaaagcgaaaagcgaaatttgcgaaactgaaaaatgcgaaatgaaaaaaaagcgaaatgcgaaaagctaaaatatgcgaaaatgcgaaaggcgaatgcgaaagcaaaattttttctacaactttttaatagttaaaatcataaagcaaaaatcataaaaatcaataaaacgcttttttgaggcgcgctttttccaaaaatttt

SEQ ID NO: 37355 - DNA, 998 bp, Heterodera glycines
cagttgctaaatcttaaaatttaataaatatgctatgtatatggaataaaaactcgttaaatttaattggttgcgaaaaaagatggcaattttttcggaacgaatcagacactgaacgccaaaaaacggtaaaaaaaattttttaggggtaccgtaaaacggaaaaacatcatttatggcaatgatcaacaccagaagaagtgatcagcagcagcactttatcctttcaatgtcggaccctttcaaaaaacaacggcgaccgaaaaaatccgaatccaaaaattgttgccaattttcgctgttttttggggttggcgaatggcggcggagtgccattctttacgtgtccacgctgttgttgtgcctgctgtgcataagccaaaattgtgttgcacaaattatttacgacagtccgcccgttggcgtttcggtgcgtgccaattttgaaaaattcgggttcggacaccgcagggcttttcaccctgtggtttttcgaccgactcaggctaaaacgggactgaaaaatgccgttacatggtcaaacagttcctcctgtatcaatttctcatggattattcacctccccctctccagaatttttttttaaatttaaaacagaatttttcaaaaaatcggaaaattcttccgcgattttttggaataattttaaaaaactttgaaattcatcctaaattttgcagaaataattttataaaattttcttatatacaaattttataagattttttgaaaaatttctaaatttgaaatttttctaaatctttcgggacggggagggacaagctgtttgttctccatttaactgctggccaattttttttttggcattttttggcaaatttttgtgggatgcaaccatccacctaaaactcagttgacacgacctgttctgccgtggcttgcacgttactttgtcggtgccggtgaccgtgagctgcactttttggacgagcctcaacgcggactgaatcggccgc

SEQ ID NO: 37356 - DNA, 1564 bp, Heterodera glycines
cagcagtttccctgcaaaatttggtgagcttctgatcagtctagaacgttgggtgataaaatgaaaaaaataatttaaaaaaaataatgctggtgtggtaagtgtgaagaactgtgttcctccaggcaaaaaattctaagaaaatttataagcatttgtagggttctcagcagtttccctgcaaaatttggtgagcttctgatcagtctagaacgttgggtgataaaatgaaaaaaataattaaaaaaaaataatgctggtgtggtaagtgtgaagaactgtgttcctccaggcaaaaaattctaagaaaatttataagcatttgaagggttctcagcagtttccctgcaaaatttggtgagcttctgatcagtctagaacgttgggtgataaaatgaaaaaaataattaaaaaaaaataatgctggtgtggtaagtgtgaagaactgtgttcctccaggcaaaaaattctaagaaaatttataagcatttgtagggttctcagcagtttccctgcaaaatttggtgagcttctgatcagtctagaacgttgggtgataaatgaaaaaaataattaaaaaaaaataatacttgtgtggtattaattcataaatattttttttcagaaaatgctctgaaacgcaccaaattttatttacatgttagtttaggcactctgatgctttttctatcaaaaagggagatgaataaattttaaaaaatttttaattcctttttaaacaggccaaaaagtttaggcttaacttttttttcagaaactgatcagaagcgcaccaaacttagcagggatactgaaaggaagagaaataacctattttaaatattatctagtcagttcatttaaataatttttatccaaaaaaattttttttttggatttcggggcagtaccctgaaccgatgcgcccagatttatggggagaccgaatccttcgggaatagcttccctatagcctgtactttaattctgcgttggatttttgctccccataattgtttgagtaccccaaacggacacttgaaaaaatcgatttatttttgttttcggggcagtccccccgaaccgatgcgcccagatttatggggagaccgaatccttcgggaatagcttccctatagcctgtactttaattctgcgttggatttttgctgcccataattgtttgagtaccccaaacggacacttgaaaaaatcgatttttttgttttcggggcagtccccccgaaccgatgcgcccagatttatggggagaccgaatccttcgggaatagcttccctatagtctgtactttaattctgcgttggatttttgctccccataattgtttgagtaccccaaacggacacttgaaaaaatcgatttttttatttcataaatattttttcagaaaatgctctgaaacgcaccaaattttatttacatgttagtttaggcactctgatgctttttctatcgaatagggagatgaataaaatttttacaaattttttattcctttttaacaggccaaaagtttaggcttaactttttttcagaaactga

SEQ ID NO: 37357 - DNA, 970 bp, Heterodera glycines
  unsure (1)..(970): unsure at all n locations
tctattttgtaaaagcgaatcaaattcctnttggattccaaagtggaattacagaattgcgacggcaaatcctaaatagacaacgacgctttcatcataaagctttaagggagacaaagtaatacgaatatttcaatttcttacttatccgaatagacaaagataggttacacacgaacatttttatagaaattctggctgaaactaaaatccctcttttggtcttaacctatgatttttggcccattatggatgaattaagtatagaaggcgtcgcagaaatacattcatattttctaaattcgggtttcagaaaattaagatttaaaagaggctaaattacagatgcttttcaaattttgggtgtatccgaatagaaagaagttggaaatcagtacttttcacgcctataaaattcgggccgaaaaatattggtgtttgtgactagaaaaatagcagatgcatatcaaatgactacagaaaattacagcctccaagaaaataattgctttgcacaagcaatattttgtagagcccatcaaacacattgtgcttataggaaaggcagaattaaacaataagggcctttttattatgattacaacaaatcagcatggcgtctcgctgatatggtatgtttcagttaaggtttagccgatctacaaatttcggcactgtctattttgtaaaagcgaatcaaattcctttggattccaaagtggaattacagaattgcgacggcaaatcctaaatagacaacgacgctttcatcataaagctttaagggagacaaagtaatacgaatatttcaatttcttacttatccgaatagacaaagataggttacacacgaacatttttatagaaattccggctgaaactanaatccctcttttggtcttacctatgatttttggcccattatggatgaataaagtatagaaggcgtcgcagaatacatttcatattt

SEQ ID NO: 37358 - DNA, 1173 bp, Heterodera glycines
attctgctgatgaaggattttaagtgatcggagagaatgatcagtgaatgatggggagagaatggcaaatgatcggagtgccgaaggaagaggaggaggaagaggggaattgactgaatgaggggacgggggcatcaattacccattcaaatggaaatgagacaaaaatgtacagggaagtgccttcttgactaatgtcctcataatgagcagggcaaattcagtggcattggcacttaaaagagttggcaaaaacgacgcgtgggatcaaagaacagtgccgagggggcaaattagggaaattagcaaaacgaaaagaaagattgatgcgcgaccaatgaatcatttagtaaataaaaggaaatccatgtaaaagaagcacatcgaaacagattggcccatgtgtccaaatggccaattttggcacttttgttacgatttatagggggaatttattccaattttagcaacacgaaaaggaagaggagaagcactttcacgaggagcacagtccctaattgacaattttctgaatccctttagagaattattaataatcaaatttggcacatcggaaaaaagcgccgaaaatggagaaaatttgtgggattttattgtgaattaccaatgtgtatattaaaataaagcatagaaaccagggctgggcgtaatgacggattacggaaattatgggggtttttggacccctgtcattacggattacggaataccgtaactgagaaaatcgctgtaattacggattacgaatttcgtaattgaagatccagttacgcccagccctgatagaaacccaacacatattaagctagaattgtgcacaatttccctgctgaatgatttgttgccaaatctaagggattttcttaagtgcctatttgtgccttttttttgcgtgccaaattaaagaaaagtcggcaattggttcaatgtctccaccaaatgacattggctgtttttctgtgttgtttgccacttatttattaattcatttttcgtcccccaaggcgacaaattaattttgccaatgattttgtgggaatttctacttttcctttgcattcacttttacattttttctcatcaaatttgcataaaaaagaggtacattaattgtgttaataaagtaaagaaaattggctaatttttgggggg

SEQ ID NO: 37359 - DNA, 350 bp, Heterodera glycines
tttagtttcgactttatcaacgtgttgtgtttaagttcactggcggtggtacatttggctgtggtgcgacttgattttgattaacatttcgtcggaacaccttttgaaactccgtttggaatgcctgtcgatactccgtacttaaatttattaaaaatataatatattttaaaatttaaaaacacctcgtaaagtacaaaatgggcccatttgatgccgcaccaatgagcaaaggaattccagtgatcgcttgtccgaaccaagcagtgatcggagaagagattgagagcctgatcaacatggcataaagtgccgaaataaaatatccaccaatgttaacgatgataatg

SEQ ID NO: 37360 - DNA, 945 bp, Heterodera glycines
ctcagaaaaatggctatctctttttaggacaatattctatctcgtaaccccgatgctaatccgttccggagagcctcttcaaaattttttccattaccgcaagagctgcggaaattgtgaattaattctcagaaaaatggctatctctttttaggacaattttctatctcgtaaccccgatgctaatccgttccggagagcctcttcaaaattttttccattaccgtaagagctgcggaaattgtgaattaattctcagaaaaatggctatctctttttaggacaattttctatctcgtaaccccgatgctaatccgttccggagagcctcttcaaaattttttccattaccgtaagagctgcggaaattgtgaattaattctcagaaaaatggctatctctttttaggacaattttctatctcgtaaccccgatgctaatccgttccggagagcctcttcaaaattttttccattaccctaagagctgcggaaattgtgaattaattctcagaaaaatggctatctctttttaggacaattttctatctcgtaaccccgatgctaatccgttccggagagcctcttcaaaattttttccattaccctaagagctgcggaaattgtgaattaattctcagaaaaatggctatctctttttaggacaattttctatctcgtaaccccgatgctaatccgttccggagagcctcttcaaaattttttccattaccgtaagagctgcggaaattgtgaattaattctcagaaaaatggctatctcttttaggacattttctatctcgtaaccccgatgctaatccgtccggagagctcttcaaatttttttccatacccgtagagctgcggaaattgtgaataattctcagaaaatggctatctctttttaggacattttctatctcgtacccccgatgctaatccgt

SEQ ID NO: 37361 - DNA, 1035 bp, Heterodera glycines
aaatcaacgagtcatcaaaatatgagacaccgagaatatgtggacatgttccggcaatgtcaaagtgccgaaaggcatttgctaaaagattagtcaaaataattcaagagttgtgccacatagttggttttgattggcaaaaaattgggcaatgttttggccaaagaatgggacaaaatcgtcgaattgatggactcggtggacaaattgggctcggcggaagagctgtgggcagcagtgaagcagaagacgccgatgctggccgatctgctggagaacgatttgtggaagggaagcaaagagcgatggacaaagttcgagggcaatttgggcgacgaggcgaagcagtacaaggaaaatgtgagagagagaatgggagacgataaagcaatgagagagataaggaagagagagtagataaagagacagaaaaaagacgtagagaagagaaatttgagaggtagagaagtgaagagaacctgagagagacaagagacgatgtgagagagagagagagagagaggagagagagaagagataggtagagaagagcaaagagagatatcgggtgagggagaagagagagaagggcaacaaatggggagtggaatgccagaattcatcaattaaatctggcgagatataactccaaagaatcaggcccggggtataattaggcaccaattgggacatgattttgggtactcaatcggttggctaactctcaactcgttcgcaaaaagtatttaatctcgcactttttcgatttttagctactagaccaattgtttccttgggtgtactatagtcaaacccccggaaaaatggcacaattatataccaatcgattcgtcttgacgagctatgaacgaaaaaataggtctccagttgcggaaatgccaaaaaaccgtgttttgaaccggtttaaaactcgaaaaattgagtgaaaagggggcccctttttggtactgaagtgtccattttcactggaactcagttttcccagtgcctagatggcatcggttcgaatttata

SEQ ID NO: 37362 - DNA, 1255 bp, Heterodera glycines
  unsure (1)..(1255): unsure at all n locations
atttataancgttggcaaacaactgacataaacattttttaataaataaatatatttgttttgcagtttttaagaaacgcccatagtggcagtttttaagaaacgcccacttggcagtttttaagaaacgcccacttggcagtttttaagaaacgcccacttggcagtttttaagaaacgcccacttggcagtttttaagaaacgcccatagtggcagtttttaagaaacgcccacttggcagtttttaagaaacgcccacttggcagtttttaagaaacgcccatagtggcagtttttaagaaacgacctagcaccacaaatagcattataaagaggggggggggggggcagaataaaccgatacaatttagaaatcggcaaaattaagcctatttggaaaattatccgggtttaaaatctgaataatgacatcaattaatttattaaaatgggagaattggcagtgctaatgaagaaaatgctaattagcgaagcacaaaataagaaaaccgtagaaaatttttgttagaaatgacaaattcttcattctatttttattttttaaagtgaattgtgagagagacttaataatttgccaaaatgttctgttgtatttctcggtggtgcggaagtgtaaaagatcaacccacggtgggactcgaacccacgacacctcccataacgcgggatgctctaaccactgtcttttttttcgtggataccttaagttttgcaaatgcattggtcagtcgaagctttatcatctctctgtcattggcccgaacattaattaaccaaagaaatgggacgatcggtggattgatcactctattaattgttagggttctgtcggtcttcgctctttctctcttcacgtgatgtttgcttcttttctgagtttcgccgctctctcttctgccaaagatctctcgccgttgtccgtctccatggccccgggtcttattcgggagtgtatgaaatgtctgtcgtccttttgtccggtctttggactgtgcgtgtttttcgtcgtcgtcgtctctgctggagctgatcttgttgctcatgtggtgttaatcaaatcgccgttttgttcttctttgtttgttgtaaagaaaatgccaccatcccaagttgttcagttgtgccgtttttggtgccgttctcttcgctttccctcccatttcccctccggcaccgctcagtagcccggcggcgtgcgcggctgcgggcagtggtcgcaagagccgggctcg

SEQ ID NO: 37363 - DNA, 974 bp, Heterodera glycines
ttaattcgtcattggatttcgaagttctctgctggaactttcaatttatagaaatgatttatcaaaaaaagacaattttaccccaaacacttcgaaatgtatttgatttgcgttgtatgggctaaaaatgataaagaatgagatttttgggaatttttatgcaaaaacacacttattttttcaatttttaacacatattttagcacatattttggcatttttgggggtttttagcacatatttcagcattttttagcacatattttattacatatttcaggatttttagcacataaaaatccgggccctatacattacagaggggttcgagattttcgaattcttgcttaagagcctgcagatttgaattttggcactcaaacccggcattagttaacagattttcccacacgattcgaggatattatctaagaaattagttgtatttttgactacattccagcaggagatatttgtatagaaaaagtgaaagcgataaatttttggcaaaaaaatcatacaagtcttatttttattagttacttcaattataaattttgtatatgcaaattgtatattcatataaattcatgtgtacaataaatcatgtagaaaattaattaaaaagtactgtcgaaaccaatcattgtcgaaaacacctggtacggaaaataggccctaataactcaaaaagtagcttaacaaccataaaaaaggagctcaggaaaaaaataaataaaaaccataagccctaacatcaaatacttgattattagggctaggatttttatgtttttacatattttttttgcggcttagttatggcgagagaagcccaaaaatagcattttctccgaacaatttttgatttagagcgacttataaaaacataaaaacacatattttggcgttttgtcacataaaatatgttagcacatatatggggtttggcacatattttgcacatattttgg

SEQ ID NO: 37364 - DNA, 719 bp, Heterodera glycines
  unsure (1)..(719): unsure at all n locations
agaatttanttgccttataaataagaccaaagttgaaatcatttttaaaaattaaaaaaaacaacaaatgattacgattgcaactacagtatggcgcaaaatatttgatcataattttaaatacatttgtccgtttttgcttttgtaacggtaaaatcaatggctaacgtcactttgtcttcttttttgttgtataagcctttggccgggtccatcaattccttaatttgcaacaatttattaactaattaggtgggaaagtttattgttcagttataccacacccactcaattcctgtatttcctaaaaaagagcctccgggggctttcttttcaccccccccccccctcaaaagggggctttattcaggggagagggtgggttctaatttagggggggctgtattttgagaaatacggaagtcacaattttctaaggtgctgaaatgtaagtttgaaaaaattaactttatttaaatttcaaccaaaatttatgaaaaattttcataacgaaaatcgcgtttgacgcctactaggaaaaaaagaagatcaagcataactcaccgaaaaagcaataaaattaggaaatccggagttggttgaaaaattgttaaagacagtgtctcgagcaaattctcttcggaagtcccaaccggcgccaaattgggagacaattcgaagagttgccgaacatttgcagctccaattttctgctcaat

SEQ ID NO: 37365 - DNA, 875 bp, Heterodera glycines
attttagcttttatgttttttttcttttaaaatgattgtacgtacctaattgccgaaaaaattcaagaccaatttccgaatgttgaccgactaattgcaaaacgaaatccgtctttgtcaaagcgccttaccgagtcaaaaaatttggaaatgtatctcatatgcaatttcaaccaataaatttgatgaaattttgcactcaatttttaaaaagttatgtccatattttgacatttttgccttttatttccatattttgagatttttgccatttatgtccatatttcgcgatttttggtccatatttttggcatccctacttataacttggtgaatactagagcaaataaaaccattttatgctcattttgaagggaaaattctggagaatattgtaagttttatttggtttggccttaaatccacacggcgattcaattttgggctccaatgagacgggggtctgggcttcgagtctgcttggctacgttttattttttatgacacttgatgaaaatcatagacaaaatgaaggttcatgcataatcagagcttagattcgtgatcagagtattttttaaccccaaattcatgcttaactttaaaaaaaataattttaaaaatcgaaaaaaatcaagtagttgacaaaaaatcttagataaaatcaatgattttcaaaatctgagtcagattcgtgatcagcgcattttttaagctcgaacaccggtttcgccacaaattcgtccatcggtctgaagctaaaaatatttataaaaagaaggaaaacaaatgtgagagtgggcttcgtcagtacgagatctctcacttctagaaaaaaaagttctgtttcagccctgactcgtatacagaacaaa

SEQ ID NO: 37366 - DNA, 695 bp, Heterodera glycines
ttgttttataccaaaatgggtcgaaattttttggcactttttgctggaatatttaaatagcactataatttggtgcttttcgtaaaaatgtatctcctggcccccaaaaaagtgccggaatgtaaaatcctggcccccaaaaaagtgccggaatgtaaaatcctgacgctagaaaaagatttccgtacgaatggaaacctgatcgggcccgcaaaaaaatgccggaatctgaaatcctggcccccaaaaaagtgccggaatgtaaaatcctggacccaaaaattgtcgaaatgagacctcctggcgccagcaaaaagatttccgtaagaatggaaaacccgataggatctgcaaaaaaaatgccggaatgtgaaatgctgtccaaaaaaattgccgggcccgtatccagaaaaaaattgcgagcgaggagggcacccgaagagctttttttttttgctcttcgggccaaaacattttttgcaccagtgttattttcaaaatctgtagcgccggagccaaaaaacaggaaatagtagcggttttgcgccgaaaaaccacaaattatgtctttttgggctcaagctttaaaaaaataatggtccagttggggcccggcggtgccgacgacagaaaaatttttggaaaatgtgcaaaattttcagaaaatttgcccatttctgccttgaaaatttttt

SEQ ID NO: 37367 - DNA, 1053 bp, Heterodera glycines
  unsure (1)..(1053): unsure at all n locations
taataataaaaaattttttttaattttttttgaaccccaattaaaaaagggaaaaaaaattccagtcaaaaaatttaattggaatttctccaattttgtttcccataatttcagagggtgggtgggtatcataatgccaaaacaaaaagaaatcgttttaaaatattcctttctggacttgacttggtttcttgatatcgaagctgttttctacgctatttctaaaacggttataccaaaccccagatttttgaatccggttttcagaaaaaatgccttgtggtgaaaacaatatttcacatttcactccataactttgtgagttcggcacggatcgagaccgggataagaccattggaaagagcagctcgagctctacaagaaggtatggaaagaaaaaatagttatttctgggactttttcagaaatcagaattaattctccaatgtggcccaaattttaggcccccagccacagccctttgcttctcccagttttaagtcttggatttgtcaaataaattcaagacttcaaattaataatcaaaaattctcttaaaatttttttgaacccaattcaaaaaaggaaaaaaaattgcagtcaaaaaattattcgaatttctccaattttgtttccataatttccgaaagttattcggtatcataatgccaaaacaaaacgaaatcgttttaaaatattcctttctggacttgacttggtttcttgatatcgaagctgttttctacgctatttctaaaacggttataccaaaccccagatttttgaatccggttttcagaaaaaatgccttgtggtgaaaacaatatttcacatttcactccataactttgtgagttcggcacggatcgagaccgggataagaccattggaaagagcagctcgagctctacaagaaggtatggaaagaaaaaatagttatttctgggactttttcagaaatcagaattaattctcccatgtgggccaanattttaggcccccagccacaggccctttgcttctcccagttttaagtcttggatttgtcaaata

SEQ ID NO: 37368 - DNA, 1038 bp, Heterodera glycines
cagcaatattgacttcaaacatattttaaaactgataaatcacacgtatcagtgcgctgtatttttaagattgtcaaaagtactaattgcgtttctcttattgctttcgtgtgagatttttcttgatgaaattagggaatagaatggtcagcaatcaatttcagacgctttttgcaggtttaacgtataaataatgcttttccagcgattgaatataatcacaagcaatttcaattattgccaatgaagctttgcaagaaaaatgatgttgacttctatgcgagggtttattaaccatgaatattgaaatttttattgttggcgttcatgaaccagtttttcaaaacagcaaccgggccaatttagaactcgcactacccagcaatattgacttcaaacatattttaaaactgataaatcacacgtatcagtgcgctgtatttttaagattgtcaaaagtactaattgcgtttctcttattgctttcgtgtgagatttttcttgatgaaattagggaatagaatggtcagcaatcaatttcagacgctttttgcaggtttaacgtataaataatgcttttccagcgattgaatataatcacaagcaatttcaattattgccaatgaagctttgcaagaaaaatgatgttgacttctatgcgagggtttattaaccatgaatattgaaatttttattgttggcgttcatgaaccagtttttcaaaacagcaaccgggccaatttagaactcgcactacccagcaatattgacttcaaacatattttaaaactgataaatcgcacgtatcagtgcgctgtatttttaagattgtcaaaagtactaattgcatttctcttattgctttcgtgtgagatttttcttgatgaaattagggaatagaatggtcagcaatcaatttcagacgctttttgcaggtttaacgtataaataatgcttttccagcgattgaatataatcacaagcaatttcaattattgcctatgaagctttgcaagaaaaatgatgttgacttctatg

SEQ ID NO: 37369 - DNA, 687 bp, Heterodera glycines
  unsure (1)..(687): unsure at all n locations
ctcattaaaattccaaaagccgatatgacggatagaatttctaaaaattcaacaaaaggactaacaattatttcttcccgtgtatccaacaagagaagcagagaatttcatttacggttcctgatttactcattaaaattccaaaagccgattggacggatagaatttctaaaaattcaacaaaaggactaactattatttcttcccgtgtatccaacaagagaagcagagaatttcatttacggttactgatttactcattaaaattccaaaagccgatatgacggatagaatttctaaaaattcaacaaaaggactaacaattatttcttcccgtgtatccaacaagagaagcagagaatttcatttacggttactgatttactcattaaaattccaaaagacgatatgacggatagaatttctaaaaattcaacaaaaggactaactattatttcttcccgtgtatccaacaagagaagcagagaatttcatttacggttcctgatttactcattaaaattccaaaagacgatttgacggatagaatttctaaaaattcaacaaaaggactaactattatttcttcccgtgtatccaacaagagaagcagagaatttcatttacggttactgatttactcattaaaattccaaaagccgatttgacggataaaatnttctaaaa

SEQ ID NO: 37370 - DNA, 768 bp, Heterodera glycines
tcagcctcggcaggtacaaatgtatgacccaaatgtgagcaatgattacggcggatggttaactaatgcttaacccccccccccccccccgacccttttccgagtccccgacttattcattttttccccgtccctttcccccgaaaaagggcactccggtgtataaccgagtatgatcattaagaagataagacttcgggaattctatgatcaaattccatttaaactgactcgggctccatttttgtaaatttccccgcccccattctttcaactaacctaatcccaggccaattagctaattgttattcttaatgtgcctgtctattgttagatgaatttccttttcaaagcttttccttcgctgatttttgccccattttccaacaaaaatcacacatattttttgtgcctttgtccgtgataacgtcttttttttgtttgtttttgttttttgaattttgtgcccaaatcgcacttccatttccattgcgcgttcagtgtctaacgcacttctggcaaaccattcgactttgctgatcaaccaattgcaaggtacggtagcgagcccatcagccgctgctagccaaaaggtactgtaatgtactgtcattaagtgcaaattgtcttttgcacacaccaagattggcaatccgaggtcccaaaaaatttcggaaaaccaatttccgacctcaaaaatgtcggagatcggaatttccctgccatccctaggcacatcctcctcataaatatggcattttaatgacg

SEQ ID NO: 37371 - DNA, 790 bp, Heterodera glycines
  unsure (1)..(790): unsure at all n locations
ggtaccggtaccgctcaaccctacttttttcaaataattaaatttaatatatttataaattatgtacaaaaagacacttaaggcgtcgaaatgcacccgagcagcagttcatcgccaaaaataacatcaattggacagcaaggtaatgtggaaatgaatccagtttaaaaattggccttaaaaatttaaattgttgatattccctacagaaagaaatgtctgacaaatcaatgaaaattgctaattgttgctttaccactaaagcttttgaaaattgccgagtttttagcaaaactgccaactttataacaaaaagaaatcgtagcttttcataaaattaaccaaattaattattcattagcattcgatatgtagcttaaggttccaccaattgttcagatttaagtgaattttgagttaaattctgaatttaaggaaaacaaaagttaggaattctccaattatttattagtattattaaaaaaattttgagagccaaaaacaccaaaacatgaggctaaaaatgcagcgacaactgtcgacggttgtgacggaggaacgacggcgacaacgccgaagagtacggcgaattcgcaacagcaacaatctgcagaaaaagagaacaatcggagcagtagcaggacgagaagcagcagagagaggaagaagcagaatagcagtggagaggaagagggcgacagagaagacgagaaagggaaagacagggagaaaaacggtaggaaaagaggcgagaagagggcgagagagtggatggngtacacagtgaggg

SEQ ID NO: 37372 - DNA, 1120 bp, Heterodera glycines
aaaaaatatttacgatttgggaaaatggctgacccaagtacgaaattgagatggcatcagcaaattcgctgacctgctccatcgtgatgcccaacccgtacaggttgatcgcccgctgatgcttctcctgcatctccacgctgagcattcgtttgatcattggcgaaacggacataagccaatgggcagaaatggccaactgacgatcgccgatgtgcacagtcaaatcgtcgtccggcgaacaaattggcgggcatggactgagtaaatggaggggggcggggatgtacgaaaaaggatcagtaccatagccagataatttcggagtaggggcggaaggctaactaccattcccctcaaagcgagttgcgttttttacgagtaaaattttgccgcttttaaatttttgataagatgacctaaccaaacggtatcttttgccaaactctttcttttttcccattatttttgttggagtttcccattccaccaccggcatgagcctgaggccaaacaaatacggcaatttggtttacatttaataattaactgtattacttttcgatcacttcacgttttttgagaaatctgatcacaagagaaattggcaaatttgtttcaccttcagcaccaattgttcctcttttcttcaggataaaggtctaaaattggtgcctaatttagaaaagaaattagcaacaaataaatcaattactactttttggatggtctgtgttccctgagaccatttccacaaaataatttgcgccaacaattcggaaccgttctgcagtgaaccattgctaatatcggtgattgtcaaaaattctggcccataattattataattatttttgtaatgccgatttttcgtgaattcactaaatttagtaaaagtcttattttaaaatatgaaagctttttacattgcagaaaattgggatttgactttgagaattgaagctttattactacagcaattcgtggtaaaattgaccattttttcgtcaacaataagataattattgtaaatgtccatccatctaagccagttttatttctaaagaaaaaaattattgaaaaatttcctaataaaaatttaaatataacataaaaatgt

SEQ ID NO: 37373 - DNA, 1013 bp, Heterodera glycines
aaatatgccaaaaaatgtagcctttacttttttagtgaaaattcgatcactcatattttttgctaattgagcagaagcgtaccaaactttgcagggatactccccggtaaaggactaacttacactgaaatgagcgccgagctagctggctcaaaaaaattttcgaaaatctgagtctttcgtttttatttattttttgcaaaattaattcttaaatattttttcagaaagggttctgaaacgcaccaaattttatttacatgttagtttaggcactctgatgctttttctatcaaaaagggagatgaataaaatttttaaaaatttttaattcctttttaaacaggccaaaaagtttaggcttaacttttttttcagaaactgatcagaagcgcaccaaactttgcagggatactgaaaggaagagaaataacctattttaaatattatctagtcagttcatttaaataatttttatccaaaaaatttttttttgggttttcggggcagtccccctgaaccgatgcgcccagatttatggggagaccgaatccttccggaatagcttcactatagcctgtactttaattctgcgttggatttttgctccccataattgtttgagtaccccaaacggacacttgaaaaaatcgatttatttttgttttcggggcagtccccccgaaccgatgcgcccagatttatggggagaccgaatccttcgggaatagcttccctatagcctgtactttaattctgcgttggatttttgctccccataattgtttgagtaccccaaacggacacttgaaaaaatcgatttttttgttttcggggcagtccccccgaaccgatgcgcccagatttatggggagatcgaatccttccggaatagcttccctatagcctgtactttaattctgcgttggatttttactccccataattgtttgagtaccccaaacggaacacttgaaaaaatcgattttttttgtttccgggggcagtccccc

SEQ ID NO: 37374 - DNA, 761 bp, Heterodera glycines
ctcaacactcacatgaattccaaccacattttcggaatagtagcgacgaccctaatttttctggattttctttctgggcgagtttggctctgaaaattttgaaaaaacgtctatctctttttctgctcaacactcaaatgaactccaaccacattttcggaatagtagcgacgaccctaatttttctggattttctttctgggcgagtttggctctgaaaattttgaaaaaacgtctatctctttttctgctcaacactcacatgaattccaaccacattttcggaatagtagcgacgaccctaatttttctggattttctttctgggcgagtttggctctgaaaattttgaaaaaacgtctatctctttttctgctcaacactcacatgaattccaaccacattttcggaatagtagcgacgaccctgatttttctggattttctttctgggcgagtttggctctgaaaattttgaaaaaacgtctatctctttttctgctcaacactcacatgaattccaaccacattttcggaatagtagcgacgaccctaatttttctggattttctttctgggcgagtttggctctgaaaattttgaaaaaacgtctatctctttttctgctcaacactcacatgaattccaaccacattttcggaatagtagcgacgaccctgattttttctggattttctttctgggcgagtttggctctgaaaatttgaaaaaacgtctatctctttttctgctcacactcaa

SEQ ID NO: 37375 - DNA, 1014 bp, Heterodera glycines
cgcagagcaatgcacattctattctacagggattttgtaccatacaaatgttcccagcatgggcagagattctcggagagcaatcagaaaaatggttatctcttttttgcgagaaattttgtaccatacaaatgttcccagcatgggcagaggggcgcggagagcaatggccattctattctacagggaatttttaaatttattctctatgccagaaaaatggctatctcttttttgcgagaaattttgtaccatacaaatgttcccagcatgggcagaggggcgcagagcaatggccattctattctacagggaatttttaaatttattctctatgccagaaaaatggctatctcttttttgcgagaaattttgtaccatacaaatgttcccagcatgggcagaggggcgcagagcaatggccattctattctacagggaatttttaaatttattctctatgccagaaaaatggctatctcttttttgcgagaaattttgtaccatacaaatgttcccagcatgggcagaggggcgcagagcaatggccattctattctacagagaatttttaaatttattctctatgccagaaaaatggttatctcttttttgcgagaaattttgtaccatacaaatgttcccagcatgggcagaggggcgcggagagcaatggccattctattctacagggaatttttaaatttattctctatgccagaaaaatggttatctcttttttgcgagaaattttgtaccatacaaatgttcccagcatgggcagaggggcgcagagcaatggccattctattctacagggaatttttaaatttattctctatgccagaaaaatggctatctcttttttgtgagaaattttgtaccatacaaatgttcccagcatggcagaggggcgcagagcaatgtccattctattctacagtgaattttttaattattctctatgccagaaaatgggtatctcttttttgcgagaaatttgtaccatacaaa

SEQ ID NO: 37376 - DNA, 1343 bp, Heterodera glycines
  unsure (1)..(1343): unsure at all n locations
atttggtcaatgtaatccaagcaatgacgagagaattccttaaaacaaaaatttnngttttaattaggggttgctctggagtcaaattgaaaaaaaagtcgggaaaggatggaaaaaatctttatattttgacaaatgaaaattttctctatcagaatggccccatttgataaatgggtccccgtgaataacaaaaagtcagaaataaatttaatttcccatattaatggtaattagggtaattaggtccctctaattattaggataggccgggtccgggtattttggcaaataccgagtccgggtattgcagggttcagaaaagtcgggtccgggtacaagtatttcaaccgggtcggggtccaaccgggtcttgaaaaaattcaaaaaaaaaaaaatttttttttaattaagtttaaataataagaatttattttttgtgtaaatgttttaaaacccaaattttacattttcgttgagaagaagagcctggaaataggcaaagaacacatttggcaattcattaattgggaattccaaacaagctttgaccagcgaagagacattgtatttatttgctaaaatattttaaaattaaaaataattattattcaaaatgtatttatttgctaaaatattttaaaattaaaaatttcaaaaatatttttacccgcgtaaagcactgccatggcattttctccgttcaatccactcaaatcttcagcataaatgaaactgagcatcactttgaaagcattcgcactaatgtcaggaatttctaccgaactatccgttttagcggaaggagctaaaaattaatttaaaatatttgaaaaacatttaaacttttctaaatttttactttcagtctntggtttnttgtcatcaaaacggaacatcgattcgaacacattcgaagcagtcatcataatgcatttgtgcgcttttaaaagctaagaaaatgcaaaataaaattggggaataaatgaaaattccttaacaaaaaatacaataaaaaaaaaatctaaaatttcaaaataaatttttcaaaaattcgtcacctaaaatttgtttgtttttctcgaaaaagtttggtttttaaaatttagctcattttcggtttcttttttttttgttttgattttttgtcttcaattgaaatttgctacttaaaaatcataataaaattttttttatatacctctattttgctgttttttgtgctattttacattatatctattttgaaattttctgtgcctaaaatcattttcctaataattattaattattttattttggagtttataaaaattcttttgtgggccaactcgcctcctttt

SEQ ID NO: 37377 - DNA, 906 bp, Heterodera glycines
aacaaacgctttaaacattcttgattttttgggttttacatatttcgatttgattaaaacggcaatgaggtcacctgaatccgcaaattttgggccagaattacccactgttcccccccccccccaatattttttaaggattccctttgctatccctcccccattttgtcagatgatgttgatccgtctgtacgagtacatgttgaccagcagtcagtgccctcaaagtctgctcgtccacaagcccattctgatgcctttgctgcaattgcttgagtggtgccgtcgctcttcgctggacgaacagcgaatgacaataaatgcgacgaaggagcagcaacaacagcagcagcggaggagaccgatgacgaacggagttgatcgatgctttgttcgactgatcaaccaggtcaagcagcaccaggcaaaatacatggacaaggggcggggtcagaaagttactctaacgaaatgccccctcagaatcagaagccaaaaaatttaacgaaattgaatagaaacgctcaaattttttatgataacttttttcaaaactatttttgcggagctttttttaaaattgggaacaggggcaaactcccagaaaagctttgacatattttgttcaaaaatgagcacattgacggactttggcaagaaaaaatgtcaaattgtctctcatctcaattttcaaaaatggcagttttataaaaaattgtttgaattcagatttgtcgcaaaatcgcggcggacgacacgctgttgcactttttcttccattcgtcggtggagacgccgtgtgattctgaggaggcacagaacggagcattcggcaacagaaacggaagcattggccaccattatgagcaatttgttgagggaggacagggaccagcgacgacgcca

SEQ ID NO: 37378 - DNA, 807 bp, Heterodera glycines
tttgatcaccttctgctccaacaatcggtccagttcttcctctacaaccaaacgtgtgttgtaaggcactggccggggacgacaatagacgggcacagcctcaggcctcaattccaaatgagcctttgctttcgtgcagtgtccaagtccctccacaaaaacaagcggaaattttgtttgaagcgcagccaaagtggtctcctgttgaagaatcggcgactttttcgcttccttcttcaccaaattgacattcatggccttttcaacttcccttctgaaagcgtccaataggccaaaggcatccaacatatcaattcccaaaagattgagtgatcctttcttcgtcacataatattgcccattaattgtttttcctccaaatgaaaaacgtgctgtgccttttcccaaaagcttacagcttgtaccgtcatggtacacggcttgctcattgcagtgggtcagccgaggctttccaatagccatatgtgcgacttcgtccagcacagtcaaatcggcacccgagtcaagcacaaatttgatcggattgtcattcacccagatcgtgacttccatcagtcgtgttgatccatttaggatgttcaccatgaggccaccaattcgcagggcattcatcttcttgcctagctttggtcccttttgctttgtcagccattcatggtgcgcggcgcacatactctgcacatgcccaactttcgagcattttcgacatattgtcttcaatgcggacagtgcaatggggtgtgctctctgccacaacgccaacatgattgctgcttatagcccttt

SEQ ID NO: 37379 - DNA, 733 bp, Heterodera glycines
atcaatttgaaatgaaaaaggtcgccaatgcgaaccctaattggaacaaaaagttaatcggcatttgctaattgtaaatttaaacgaatttctttgaattaactgtgaattttaaaacattttgatttctcattcgaattcggcattcgagttggtctaatgaatgtcaaatttcgtgaccaacgacctcgaaaagccccacaaaattttgcaagttgaaaactccaacaatcgtccaaaaaacaaaaagaaaaccttcaaatcgatgtccattttcccctcttcgtctgtcccagcggccacccgttgcatctgatcaaattgctgatcagtgagccgtgtcggcttctcccctttgccatcgtccgacggaggcacagtcgtagtcgttgttgcatcttcttggcacttttcacattccgtgccggcggcaccgttttgggccgctggcgccgccgcactgttcggcctcaacacgtggccatcggacggaatttcgatgacaatgaaatcgctgtacaaccgcttcagcacacaacgaatttcgccgccgtcaaacgcggacgaattggacgcaaattcagtgaggccaaacattttgaaactccgaatttaatgatggcgctaaaattgaataaaattcttcatgagttttatgaaaaaatgtaagggaaatagaaattgtagtgtttatgccaggagtgtcattcgtccttggatgccaaggacgtcc

SEQ ID NO: 37380 - DNA, 1321 bp, Heterodera glycines
  unsure (1)..(1321): unsure at all n locations
cattatctaaataaacttttaataatnttttttaatcgcatatttaaattaatgaaataattttcaaaattcagagaataatggataatattttttaatgataataagtttatttttaaaaattaaaagtaagcatttgcttttacgtataaaaatttttcttgattataacagaaaacgaattaccatttaaaattaaaaaacctcattttattcaatttctaaatttttattttaaattataattttttttttaaattggcaaatattaattcattcatttgcattagaattattaaatatttaaccaaattgattttaaataaaatctattatgtatataaattagagaccggacaagagggtcggtcgaacggtttcggttaaaaccgaaaaaaaccgaaatcgaaaaaaccgaagaaaatttttcggtttttttttgaatttttttatcttttcccaaaaaaacaataaaccatttttatcaatagaaaaagcgaaagatcacctctgagtaaaattgtagagctattgaaactctattgaatggtgtactaaaggtttggaaaatgatagaaaaggcagccaaaaaacatgtgtttactccttgattataaaaaccgcaaagattagttatagcgatttggtgcttttttggcgttttttcccgaaaaattccattaaaaattcaaaaaaatcggaaaaatacacccctaagaaatgatctaaaaaattcatagaatatacctttatgaattgaacgccaaaattcatttttttcttgataaaaaattttaggtttaaaaatttccttattgaaaaacattataaaattgaattatcaataaatcagcaaaatttagttttttggttagtttttacgtgttttgctccctaaaaatcattaataaaaaaatttaaatgccttttttcatgcctttttcgggatttttgtgccttttttcagtgccattttgcgctttttggtgccttaattgtgagctctagccataactttagggccggcggtgttgataagagccgccgggaaacttttttgtaattttaatgctatttgttagcagattttgtctaaaaataccaaaatttgagattttggctaattttttaagaaaagatagctttttggggggtcggcggtgccgataggcgccgccggaggaaaattttaagaatttttaatgaattttgttaaaaaaatggccaactgatttgtcaaaaaagtcgatcgattgtttcggttttttaattatttcggtcgaacggtttcggttaaccgaaaaaaaacgaaaccgaaaaa

SEQ ID NO: 37381 - DNA, 1430 bp, Heterodera glycines
  unsure (1)..(1430): unsure at all n locations
tttcccattttgtncctctggccgtcaatcatcctaaccaattccatccccttnncatggcntattttgtatttccttcgcattgccattcaaccctttcctatgtaatgtccttctgctcttttcttctcaatttgtggcactatntaagaactcttcccantctcaaaaggcaggtcattctacccataattttccaatctcaggttccctgcctgaagcgatcaaactcactaaaaccttttaactttgctttgcttatttaattttgaaccttcacatttcttttaaacctttttgacttttaataaatttccaaaaaaccagtctttgcctaagaggtgaccgggttgaattaatttgggtaaggacacaacaattttggtgccacgacccgggacgccccttaaacggaagtaaggggaagaaaaggctgaaagccagagaagtgcgggactaaatccgcataacgtgtttggaatttgagctggtctagctgtgtgcttccaaccggctgtgtgccataaccaaaagtgaaaaaggagaagattaaacataaaaaagtttgttcgtgtgctgtgtgctaaaaaaacgagagagaaaagaaagacacgggaaaaaaatggagaatttgcctcagggaaatatccagcgaagtggatcagattttgactcaatttatttttcgcctgaggagaatcggaaatgggccccattactcaaccgaatgcggtcatttgagcaggctgtttgccgtcaatttcggcaaattgacacccaatttgtacagtttttgagccaaattcatatccaaaacatgtctgagcgggtccgagaattggaaagttccattaaagaactcgagaacaccaccgaattagacactttccaggcaaaggagcaaatgattgaggctgagcaagaaattggaagggccaatttgagaatggaatattatgaaaagctgacaaaagtgcgatttggaaaaagtgattgagaaaatgaaagaggaagtgaaaaagatcaccgaaaatttggacactctgcaaagccgtgtacaaattttggagtttgaaatggacggtgaaatacagaggaccgagtggatagatgatggtcattcggtggaacatgaccaattaccacttcacagtgcaaatggaaaggaaccgaatggcggtgaaggacagaatgaaatgcacgtggacgattgtgaaataatgataatggatccgtttttgggtggaatcactcctttggaagggtacgacggaaacccgggaatttcattttcccgttgggtcgcccgatttgaggacatgttggcattatcccaatatacggagacccaaaaattaagcagactccgaattttgttaaaggggcaagcaaggttagagtttgaagccatggagcccccagccgacact

SEQ ID NO: 37382 - DNA, 1116 bp, Heterodera glycines
ttaattttctgctggttgcagggagtaggtggtggctgcctttggagcctctccctggctatgcccttgatcagttttggcaacccatttttgccagttgggggactcctaattcatcgtgcctactttttttatgcctttcatttaaaagtgccggtttttttgccgcttcacggtgttttccatgtgctcagaatgggtgccactctgttcgtgcagccgttggacctggtcaagaatcggatgcaactgtcgggaatgcagggcacccgcgagttttcctcctccttccacgccctgcgcacaatcgtcgcccgcgagggaccgctggcgctttacaacggtctgccaaaaaaaaaaaaaaatttggcattttgtacaatgtcatcgttccctcatccccccttcccaaaaaaagttttttttaattttgtctaaatttgaaagtctgccaccaaattgaatggtcttcattgagtgccagggtcaatttgatggggaccggtaaattggacaccggaaaattggacactgtcggaattttggacaccaaaggaaaattggacactgtcggaattttggacaccaaaggaaaattggacactgtcggaattttggacaccaaaggaaaattggacactgtcggaattttggacaccaaaggaaaattggacactgtcggaattttggacactggaaaactggacactaaattcctcttttaaaatataaacccaggaatttaaatactcaatatgcacaatgattgatcaaatgtggcaaaaaagtgtacaaaattagacgatgattgatcaagatgccaaaaaatatacaaaattgcgtgatgattgttcaatgtaccaaaaaatgcgcaaaaatgggaactccataaaaataaaaacttttttcgttatgaatgtatggtgagttctgcagctgatgctacaaataataataacattatttatttcaattaaaatttttgtttttattctaacttatttattttttatccaatactgtccaattttccggtgtctaatttgccattggtgtccagtattctagtgtccaattttcggtgtccaattttctggtgtccagtttaccgggagc

SEQ ID NO: 37383 - DNA, 930 bp, Heterodera glycines
ttaggaaactacccatatttttttcatcagcattaaaacattccaaaaaaaaatcaggtaagaataactttgaagtgcccatacctcaaaaggtagcaacaccaagttgatcagatgcggttttttgaatattgtagcaaattttgtgctctataaaatgggcctactcaaaatttccagaaaaagttttgcacggaacgaaaacgaaactgaaaactttttgctagccgattctggtacatttttgttgaatgaaaatggacccccgcaacggtaggcaatgcgttttgttcgattcactattactttttttcttaggattttgattttcgggcgcatgtctcataatagctgggccaatcaaatgacagaatgttacgctgacggaagattttcattaagcccaccactatttagaattttaattttaatgcctcttcgaagatttttgtgtatttaaaacctattttgcgattttttgtgcctaagaaagggaatttggaagtgggtcttggcgcccagttggcggcgcccagttgagctggcgcccagttggcatcgcccagtcggcggcgcccagttggcgtcgcccagtcggcggcgcccagtcgacccccaccggttccgcatatattctcccgcaacataaccacctgaagctgtgaagcggtctgtgccgagacgccggttggcgcaagcccactgagcaactgattgattgcggccatttgctgggcaactgctgttgatgaagagccgccgcctccgtggaaatcggtgccggcgccgccgcctcccaagccgaacaacgatgatgtcgagaaggatgatcctgatcctaaccaaatttgaacataaaataatataccccagatccggttttactcatttgaacgcccctcccccctcttcacagggttgtcattttgc

SEQ ID NO: 37384 - DNA, 611 bp, Heterodera glycines
tttgtacggaggaaacccaaaacactggccgaaaaaggatcactaaacaaaaacgagttaatattttattgattaatttaatttttttttaaattcaaaattaattattggcttttgtatttatgaaagccctctctctaaccatttcgtctcttttggaactgataaaatcacaattgaccgggaacggttgaagatccccacttcattttccattctccatagtctaaattattttctttttaattattatttcattctcgcggataagttgcaaaagcgaaatgaaattaagggccatttcggtaaggatacggaggtgaaatggtttggctagaaatgagggcggccatagcgcgctaattaagcgttcatcgactgagagagggcgggattgtttaaatgcttaatctgtgccaaacaataaaaagtaatatttcagtggaaacaattctgtataaaactactgtagatttaatgccaacaattttaaggacaaatgcttgtgtctttttggtgagaaggacattgacttctctaacgaaaatctcacaattgaaatccccactgtaatgaccactccgaccctgacaactctgaccacgaaggaa

SEQ ID NO: 37385 - DNA, 124 bp, Heterodera glycines
atggtatttccatgcattggaatagttgccggaaggatttcaagtagttttaaaatttaaaaaagttttctgaaaaaaattggttaagaaagttaataaataattagtaaaaatataaacaaaa

SEQ ID NO: 37386 - DNA, 854 bp, Heterodera glycines
aacaaaccaacaaagtggctgagagtcggtgctttgccttctcctttgtcattagtcgttaattacccaatcaaccaccgtcggagagtacggtaaatgtccctcatcactcactaattcacccgcccctccgcccccaccccaaccacctcctttttggtgggctgcgagtgggcgtattccgtgcgaatttgtgcctcctcccttctgccgatgcgctgactctccgccgcattgccccgttcttcggcgaccaccaaacgctgcagagaatggctgtactctgaaccggagagaaagagacgacgagttaatgacacacacaaaccgtagtaattaatgactgattgtataaacggaaaaagacggaacgagtcgtttttggatgcaattcattcccctcgcccaaatttttttaaacttttcaaataaaaattttttcttcgtataaaagtttcaaggaaacttttcagcgattcaaaaaaaatcggggggaaacgacctctcaggtcattttcactcttggagattcaaaatttgattcaaaagaaaaacggtattgagtctgtagcaaatagggtgccagttagctatgtactttaaccaaatcattggtactcgaataaaagtataaaatttcattgatttccaattaaaaactccccgccccttttgttacgttttattgcgtttgggtccctctgctgctgctgttgtcctccttttccgtgccattgtcgtgtctccaaatgagccaatttggcctcgtaaatgcgtcggttgcccgcattcattggccccgcaatgcaattgcgccggcgcaaccgctcgcgcagttcgtccagccgaagcat

SEQ ID NO: 37387 - DNA, 1065 bp, Heterodera glycines
aagagagaaattgccgccacctatcagaaaaaatgaccatttgaattgatttgtgagaaacgacacctggaggcccatacatgagcacgcccttcggtggatgaatgccaatctttatgaacagctcctttttggtcattggaagcacctgaaaatgagaaaatgggaagttttgatccaaaattgttttttgacacgtacaatggcctcttgcaactctttgatttgcgtctcgcatccgccaatttcgctgtacgtctccgtcggtctttccaccacttccatggccttgacgcgtcggtcaaaatggggcggcaattttgcgatgatgtgataagtgtcgttgtcgatgccgaccaggtcccccggcttcagctcgtctgggccgacgagaccaatgcgaggcaaaaacatgacgagtcccttcgatattttgatgactgcgcctttcttctgacgcgcgtccaagtcgctgctcgagccttcttctccttccgcttggtcatccgcgaggtccagaatttccacgacattggccaccagccacggcattttcatgtactgaaaatgcttttcgtcataaatttgtcgttcctccttttgtttgtttgctcactttctgcatctgtttgttgttctccttcgtcttcgttcccattgttttgatgttgtacgcaattttgcgcatttcgtccctcatgacgcgaatttcttcgtcgagctgtcgtacgcgttcgtcaatttggtcggaagacatctccagcacttgggcgtcggtctgaaaaattgaaaaaatgaaatgacatagaaaaagaaaatgaaaagcaccaatcgctcaccacatctccggcagggtgcgccatcttctcgttgtgttacgccccgttagtaaaatatgagaaaaatgcatcacaacagcgacttttatacacaattttggacgttttttttttgcattgtgtgcagttgcagtgcgccaaaatgtgcgagtttcctattttgaatatttttcaaattaaatcttaattcagcacgatgatacacaaaatatgagtacggctacca

SEQ ID NO: 37388 - DNA, 1089 bp, Heterodera glycines
tgaggattgagttatttattgattatttttaggggaaaccttttgtggaaaataataattattaaatttaattttaaaatggtttaaccgatgactcctgtggtctagttgtttttctttagagcgttgaaaaatttttaagtgccaattgccgccaccggactccaaaaatctttttttaattacacaaaagccacaaaatttatcaaactttttttgaaaaaaattataaacatattcattattgcattgtttagaatttcttttattacttttaagttttgaaaaattaaaaggaacaccgaaaacttttattttgtttctgatttttttttcaaaaaattcttatttaatttttattgtaaattactaagcctttttgtgaaaaatattttttttttgaaatatatacgcggtaattactctttgttatcgcttaccgtgccgacactaatttacagtatggtgcatatgtttataatcaaagtattttttgtcgtaacttttcaaatgactttcccaatcttaatgattttggtatcaaaaatagcttcatcaaaatctcagttgacttgtttctgcatttttttgaaaaattgagctaaaccggtttaaaaaacatgccatttttcaagtcaaaggagaaaataatatgggaaaatataattctctacaagatgtactatccaccatactgtaactccattcgcattcagcttatttccattctgctgcttaatggtcagcttttcctgcccgtcttctgctgatgcgcatgagacgccccccgaccaaaagcgccgtctgccgcccctttcgcttttccgttgctctcttttggtcacttttggcgtcccattccattacgggtttcagctgacattaatcagccccgtacagcgcgtaatggtgcagtttatcaacgagtccgtccacagtcattacagtgtccggttggaccgttacgatgccgaggtacagtatacggagggggagaggggaatcacacactcttggggtcctctaactgtctgtcctcttctttggtacactctctcccctctccccccccctaataccaaaatggca

SEQ ID NO: 37389 - DNA, 1878 bp, Heterodera glycines
  unsure (1)..(1878): unsure at all n locations
ttttttaagttttttccatttaacgaaattaggaccataagcatgtattaagcaagtaattaatttttttaataaaaaagtattttttttaaaaatggaaaactttcttttttataaaagaaaaacaaatttanntaaaaatttatttatatacgcaanaataaatggctattaattattattataaaaatgaaattataaaactaataaataaattaattagatatacatatttcaatcacagaaatattaatactaggggcaaatcaaataataatttcttaaatgttttttttatattaatattcttacggtttattatttttcagttaaagagtatgaataanctgatgattcataaggttgagtgacctttttaaatgcatcgacgttacgtcgcttagtacaaaaggtgctatgtcgttatataaaaaccatcaaatgaaaatttccaacctaaaactgtccataacttttgttaatgtcagccaaattaaacattcttggtatcatccgataatgaacaaaaaaaagaatgaattttagttttaataaacctatattaaattttttgtttatttaataataagcctgtatataaaacataattgcatttatttaaattttgggttaattttttttaataaaattgtttaaaatcataataattgcatccggtgttagtcaaataactgaaaaatactttttttttaaatttttacaaaaaaactaagaatgaattgaatgaagtaattaatttcttacttggattaaaaagatttaaataaaaatttaaaaaaaaaatcccaaaatatctttctaaatgcataaattatcgagcaaaacaaaaataacttaactaaattgactaataaaaattaactcattttcacaaatgactaaattaattattaacacaaaataaagtaattgttttttaaacctttaattcactaaagaacttattaaaaaatgaatacaaaaatagtattttaaataacgactccgccccgtttagtggtatgagattttttttcaaaaaaattttatatgttttttaataaataaatatttcatttttgaattttactttacactacttaaagattatttttatttttatgcacctgaatgatgagctttactactattttcagttttatttgttttataaataattttttctaacaactaaaaatgccacttcataacaaatattgattttttaaataatatttgctaataaattattctcggcatttgactgtccagtgatatgctgatttaaggcgtaccttttttagggatttttgaattatatatataataataggtaaaattattaaataaaatttttatgttcattttttatatcaaatgcgtatccctgtaatgattacagtcgaatttgggagtttgacttttacttttgagtattcatgtccgtgaatggaagtgttgtcgagtgcttgagcgtttaaattaaaaatgcatttttattgataagttgaattaatttattgttttatgaaattaaactttttataatttttaaaattgtatttcattaattattttcaaaatcatttttatttattttttcttagtgattaaatttagttcttagcgaaagtaaataaaattaatcttatttgttattataataaagatttacaacttcataagaaataatatttaattatttattactaattataccattacgtagaaatatggtgatttaattttacagaaggaaacaaaataaaaattgataaataaataaaactaaaagatcgctgagcatggctgtgctaaatcgaaaattttccatgaaaaagagaatttaaaaaattatataatattatttttaagtag

SEQ ID NO: 37390 - DNA, 930 bp, Heterodera glycines
tcgcccggggtgctgtcggcgtgcctcaagcagctgcggctccacactggtgaacgcggcattggagcgcgtgtccttgtacagctcatccaacaccttttcaatcagcagctcacgtttttgggcctgcacttctgcattcttgttgttgctgttgttgttgtctttgtttggatttttcacgcttagttttctcattgttcgagtgagtgttgtgtgtcaccaaagttggggcttgaacaaaagagcactaccgatccgcttctttccaagcgccgcctttttaaatgtgtgcagcagcagcgcggaagaagcgccgcttccgcgaattttcttccctcttgctttccttgtagcggtaatagcaacagcagcggcattactgcttttgcgtttggtcaatatgcccccacgtccaccaccaccaccaccaccaccaccaccaccaccaccatgtccttcaccgctgatgctgctagtgctggaggtggggaatagcaggtgtgacagctgtggatgctgtttagcgttagcgatgaacgtttggtagccgggcgggggcttgagccgatggtgttgttgtggttgttgggcagatgtaaaatgataggcgagtacggcttgcaaactgctgtttttgatcgggcggtatgcacctttcatgaacttgtacacctgctgaccatcaccgatgcccagcgtgcccgcgtgaagtgacgtgtagtcaagggcctgctgttttcgtcgctgctccgcctcacccaggcgctgagctccggcaacaacgacggcgcctgttgatgatgatgtagatgcaacttgcggctgatgttgttgttgttgctcttcttctgctccagaagctgctgacgtatacgatgaggcagtggtggcggtggtggttcgtttccttttccctttttgtgcagt

SEQ ID NO: 37391 - DNA, 672 bp, Heterodera glycines
tgtttattaattgatagcatgttatgcccctccccattaattggctaattaggataaacgattgccatttgctcaatgggaattatttggcagacacttaaagccatttcaattaacattaattaataatcaactaatttattaatattggctcagttaatttgtaccaattaattaattatacctaattaatgatgttgtgattgcattgacactgcttcgaccaagtgttcaacgactggatagcctggttcaaaagctccgaaccccccatagccttaggctgatcgctgcgacgcgattgagattgggactgatgcgccgagtgggatacttggtgtttgactagtctgtgataaaagagaaagcaatgaaagtaagatgggtcatttgtcgaagcgcccgagtttttccaatgcttggaactgtcggaataatccacgcatttataaacaatcactttgggcgaacatacagagctcagtactgtgaacagtagattacttgtacgctcatattgtacgtgagaatgcgagagataccgacattttgtctgagacaatattagagcgctgtaagtttagcaaaatggcaatgatgcggccattagtcgttcgactctgacgtactgttagcttattgttggccatcacacaagctgatcgattgatg

SEQ ID NO: 37392 - DNA, 1070 bp, Heterodera glycines
ttttaagatttccggttccgttcttttagcccagcgcaatcttcaccagaacggaatttttaagattccggtcccgtactttgccccagcgcaatctttactggcgcgggatttataagatttccggtcccgtacttttggcccagcgcaattctttactgtcgcggaatttataagatttccggtcccgtacttttggcccagcgcaattctttaccggagcgggatttttaagatttccggtcccgtacttttggcccagcgcaattcttcaccagaacagaatttttaagatttccggtcccgtacttttggcccagcgcaattcttcaccggagcggaaatattaattttccggtcccgtacttttggcccagcgcaattctttaccggagcggaaatattaattttccggtcccgtacttttggcccagcgcaattctttaccggagcgggatttttaagatttccggtcccgtacttttggcccagcgcaattctttaccggagcgggatttttaagatttccggtcccgtacttttggcccagcgcaattctttaccagaacagaatttttaagatttccggtcccgtacttttggcccagcgcaattcttcaccggagcggaaatattaattttccggtcccgtacttttggcccagcgcaattcttcaccggagcgggatttttaagatttccggtcccgtacttttatcccagcgcaattcttcaccagaacggaatttttaagatttccggtcccgtacttttggcccagcgcaattctttactggcgcgggatttttaagatttccggtcccgtaccttagacccagcgcaattctttaccggagcgggatttccggtcccgctcgcgctcccggaaacttttggcccagcgcaattcttcaccggagcggaaatattaattttccggtcccgtacttttgggccagcgcaattctttactggcgcgggatttttaagatttccggtcccgtacttttggcccagcgcaattcttcaccggagcaggatttttaagatttccggtcccgtacttttgg

SEQ ID NO: 37393 - DNA, 934 bp, Heterodera glycines
  unsure (1)..(934): unsure at all n locations
tttataatttaaattaaaatgatataatcattcaaggattttcatctaaactttggtcaacacgaggaacaccagcagcccgtgctcggatcaaatttaacacaaaggaagcccaatccggttaagagtgaaatttaaaggaaaataaattttaatttagccaaaaaaccgatggagcgtaaacagtgatttcttcctaataaaacccaatcatttgaaagctgtgtatcgcgcaagaaagaatggtagcaacaataaagattaaaattaacttttttaaataaatttaaattcagccaatcaaaatttgtatgccaaattcgtgctcttcccgcatttggccattgtctattatgaaaccaaaatcataaagaataacagaaacatcaggtaagtattgatgttcgatttttaaagatatgcaaaggctggttgaggttgaccacatcctatggattggggcttttcagtgtttgctttgttccagaggaaatgaaaattttattaaaattccgaggaaaattgaattttttataaatttactttcattctaaaaaattcctttctaatatgtagagaggagagtaggaatctaagaaattgtggacaaatttaaaaagctgaaagtcggcctttggtattggaagccgatgctgatttgaatttgatatcattaggcatttacagtaccatttcgattggaatttggacaaaatccgacgacaccttttacaaatattcaaacaatggcttcattttcggacacagtgccactggcttgngcggatatccatcttttgcagagggcgacacaatcggatgcggcgccaatttaacatcgatggaaatcatttacaccanaaatggacaaaaattngagtgaganatattaatttatcatgaaattaagcagatgaagactatttttagacac

SEQ ID NO: 37394 - DNA, 861 bp, Heterodera glycines
gttaaatgacccgggtcaataagaagatagttcgtggtagtttgacggaggttggtagtcaaaacggtacttcgtagtcattttcttattgacccggtttaccaccaacttcgtggtcatttgaccacgtcatttaaccaccttcttattgaccgggccctaatcacttatcatattagcgcaccctaattgatcataaaaattaaatattaagagtaatggtgtgaagaattcaaaaaacaaagttttttatttgaatatttgttggtcatatcttttttaaaacataatgaataatttcctatgattttaaaacctatctaatttctctctttagcttttaaaattttataaccaaaaatattggttttttcttttaacttttcagtaacttaacgaaattttttttaatttcttgactaacagagcttcaaataatcccaaattttaaattcgctaattagtttgcttataaaaaagtgtcgcttcgctttaaggtgaccgcgttgaagtcgcgttgcgaaacgcatctgatcaattgcgtggaaattccactgatcgaccgtttccttctgattgatcgctacggacttgaccattttaaagtgattactaatcaaatatttattttttaaaataatttttaatgattcaattatagaattcttttttccatttggatgtcaacaaattgcgtgcctttttcgctgcgaaccatgaactatttttgcctattatcagcaaagaattttttgtacgctttgtctgtccgagcattggccgggctttgatcaatttgattttggcatttcataaatgttttttttgtacgaaatcttcattttcaatgggagaattgtt

SEQ ID NO: 37395 - DNA, 839 bp, Heterodera glycines
tcaattagattccactggtcaaagaaagcagtcgccggaatgcccctaaaatttaagttttttattttggtctcaaaatcattttccatgggttttcgggggttgctttatcacgaaactaactcggacttgctcgattacgaagtcctaattcatgaccatcgccctcgaaaatccccggaacctgattttgagagcaaattaaaacatttttaaatagaaaccccaattcttcaggattgccaacaattctttaccgtttcccgatcgcttccgtctcccattttgtccatttgctttcgtctcgcgcaattggacaacgcactaacaaaaaacgatagcaattgtcaattcttttcaacgcaaattgttcccgagtcaattcgttggtcagcacaaatggcacaacagagtgttgagcagacaaatgaaaaaacgaaatgacagcgatgaaattggcagcagatgaagccgaggcaaaagcctgaaatgtgcgaaatttgtaaaacaattaaatgaattaatttggttattaccgctttcaatgctgcaattttcggcgcccaattccatgttctgtcaagagaacaattgaacacctttggcacattgtcaggtcggggagtgaacagccatttggccaaagcttgcccatccgatgccgcggcattgtcatcggccggaaattcggcgaagatatccacaaaatgggaaaagacaaagcgaagagatgggcaatcgctgagaaatgaggggaccaatttgcgcaaacggcggaaattttcgtcggacaatcttatgctttgaatgtttttttcgagcagtggccaaatgttgtg

SEQ ID NO: 37396 - DNA, 1209 bp, Heterodera glycines
atgagatagtttttaatgtctaaatgtttgctgctgaaaaactatagttaaaattttatttttagggttttgtatagagtagagcaggaccgggacctggtactgaaaaaacgtacaaatgagtaccgaggtcccggttttggccgggaccggcaaaagtcccggttttttcccggttttgcccaaaaatttcccggtcccgctctactctagttttatttaaaagaagttaaattttattttaaaaaattgttttcaatttattttattataattttaaatttttttggttttcggtgaaacgccgagcagagaatgaaagagacaggaaagggaaaaatgtatccataaaaaatttctattaaattaacaatgagagagagagagagagagagaaaaggagagaaaatagtacattaaatgttaaggaagagaaatggcagacaactgagagagaagcatttgtttgtgcgctttctcttccccttttacaccccatcatcaaaataaagtaaaaacatttgagttatacaaaaggcacagaatttgggcaggaagtgcgatttgctcgttgacgccgtttcccgctttggtcacttgtattatgtactgtattggaatgtatttaatacgcatgtgtactgtattatgtttattgtttcgcctggaaatggcttctgatcaccgtctcgtcagaagacggagcggttgcattcggttggagtcgacttgagcaaatcggtcttttttgcccttatcacacaccatttttaaatttaaaaaaaaactatttaaaattgaaatttttatactttcatttattaaaaaatcttttactaattatttattttttgaatttttaaatttttcagaaaaatttattttgagtgatatttgaacaagtggcattttgaatatgtatggtgaaaattattgaaaaagatgtaaatttaaaaatatatatttaaattaattaattcccagctaggaaaataattcttgaaaatatttaaatagaaattgtaaaaaaaaagattttagtgaaaatttaaaaaatcaattttaatgaaaaattaaaaatcccccattaaatttccatttaaagtcatttaaatgaaactttcatgccacagaaattccaaatctatctccaatttactgaattttctatgagaaattaaaaaaatttttttaaataaatatgtaatg

SEQ ID NO: 37397 - DNA, 748 bp, Heterodera glycines
ccgcgggggatttgaaaaaaacacaagaggttaaaaaaacttttaagggtcactttcaacttttagtcgagcgcactcaaactttttgttagtttttcttcggcattctcggatttctttttgcgtaatttttgtttgcagaaaatggatgacggatgcccggaggggcggggggcgaggcggggcttaaaagaaaaagctggcctagtgaaaagggcaaattcgcgaacattatctcctgctgaagcctaagcagagggcatttgttaagctatacgattataaaaatttgctaaattctagccaatccgtgtacattaaattcggaatttctacccaaccgtaagttacttaaatcgtatttcactacccaccctaagtccttaatcttaatttttacccaaagtctttaaattatttttttaatccggtcttcctaataataatgaaaatttgcaacgacaaaaaatattcaaaacattaatttgcatcattttttgcctttcctctcctcctctgctgttgttgcatttgaatttaaatccttccgccggtggcactgcgcactttggcattttaatgctcaccagtgccgacagcaaacactaaaatgcttattagtctagggtcacataagccttattcccctgtgggtggcatcattttgtcatcagaaatttagtgagaatatgattcacttttcgttgtttaagtgctgccttggattgaataatttcccaccatttaa

SEQ ID NO: 37398 - DNA, 889 bp, Heterodera glycines
gcgcaattgcgaatagatttattgatttgccatgttatttaagtgattttacaaatattacagaatgcgcattgaaaatattcattccattacattcggccatttttaaatattatattactttttaatttttaatttaccttaacattttaaagggcaaaggcaattaaatttcaaaatgaaaattaaacaaaaaagagagaaattattgttttgcaatttatgttttttcatttttattattgccataaacaattcaaattttgtgtccggaggcaaaaaccaaaggataaaacaaaaaagcaaaataacggaacaaaaacaaattgtgcagcagcaaaagcaaattgagacgaatgagcaaattgaaaatgaagcacaaaaaacggtggaaaaaacgcaccaatgccccgaaaagcgaacaaaaggcaaaaatgggaggacggcgaaacaatcggcagaaaaaatgggtcagaaaaagggcgctcccggacaatccgacagtgagaacaatccgacaaaagagcttccctatagcctgtactttaattctgcgttggatttttgctccccataattgtttgagtaccccaaacggacacttgaaaaaatcgatttttttgttttcggggcagtccccccgaaccgatgcgcccagatttatggggagaccgaatccttcgggagtagctttcctatagcctgtactttaattctgcgttggatttttgctccccataattgtttgagtaccccaaacggacacttgaaaaaatcgatttttttgtttcataaatatttttttcagaaagtgctctaaagcgcaccaaattttatttacaacctcaattttagcactctgatgctttagtatcaaaaaggaagatgg

SEQ ID NO: 37399 - DNA, 931 bp, Heterodera glycines
  unsure (1)..(931): unsure at all n locations
aaattaacaaattatgatttttaaaattttctcaaaaaggatttttgctcttttcaaggtccgtcaacaagatgatcaggaagcgggcgctgcaggacgtgttgcggtgatgaaggagccgcgttcacgtgccgacacgctgccaccccagcatccaatttgcacactgtcactcacgctgcctgactacattggaccgttgccttgcatcagtgcgcaggctgacatgcaacgtggtgacaaacagcagccaccggacggcggtgcaccacgcgtgccgtcagtgagcgaacgttacgcagaggcgctgcatgcaaacctggccgaggcatacccaaacgtgccgcttgaactggtggctaaacgaatcggcggagactggtaaatcctgaaattttttgccactattttggcattttttggtcactttctgccgttctctttaattttatcgtctctccattttatttcttccaccgcttcccattttacttctaaatattgataaatatttatcccaacttttgacaacaacatctgctggacaacaacacatcattggcacatcctcaatcccccacaatattccacatatttcgtattcccatagagcccaaaaccacccctatttattagtactataataccacgaaaatccgaggggtttttttcttttcttgagtcgagactcttgaaaattgtttccccaatttttgttttcttcaaaattctgatattttataaaagtaaataatattatttttactgttgcttgagaattaagatttccgagactcggcaatgatactacaaacatccaatggnggttttttgagtcgagactcttgaaaaatcactgtttttttttaccggtttcccttatttttttttcagggctcgtctcgcccgtgtgctcggccttcacccccga

SEQ ID NO: 37400 - DNA, 1015 bp, Heterodera glycines
taaaaattaactttttgtgcaaatttcgtcaacaagtcttagaaaattataaaaaaattttaaatgccccatttttggcttaaatcagacaacaaacaagcaaataaattgctaaaaatggcaaagcattaaaacaattggagaatttaattttgttggttaaaatgaaattttagaattattttaattgcattttaaaaacttcttcatttttcccctaaatatgttttgttgattaatttgaaacattcatcactttttcttatttatgcaatttttaaaaaatttttaagggccatgacgacgcattttcagtgatcacattggacagagttgttgaacagttcttccgctggcgcttaatgcttccacgcgttaaggtaaagaaaaatgaatggatttgatttgatttgattattaattttcactaaataaaataaattattttatttataataaacaacatttattttttttttacattaagcctttctacgccgtcaaatgcaacaatgatccaattttattacaacttttggctaatttgggatgcggtagaaattaaatttgcactcaatttaaaaaaaacaatacattttttgacaggttttgactgtgcaagtcgtggtgaaattgaatcggtaatcaaaaaaatctatatatttttttaaattatttttgtttataataataataataatttgagattgtcaaaaatggtttgtgctccggggacaacattgtgtacgcaaatccgtgcaagacacggtcatacattcgtcacgctgaacaaatgggtgaataaaatttaaaaaatatatttttaaattcataaaattaaaaaatgggggagagatgagtcagcggccaatttgagaagtgatcccagccaagtaaattgaccacttttttttttgctttcgaaaaatttaaaatttaattatgctgatttgttaacaggtttagtctaaaaaatgaccaacgccgatgggaaatatttttgggattctttgaa

SEQ ID NO: 37401 - DNA, 935 bp, Heterodera glycines
  unsure (1)..(935): unsure at all n locations
aaagcctttggcatcgattatagacaaaatcatcggtttttaattttaaatgccattttaatttcaagatattcaaaaataggaatgattgaaagcgaaaaatgttattaattaaaaaactaattacggcctaatgttgttgctttaacgtttgttttcgtttttctgttcgagtgcgttatttttatttcggtttcaaaaaaattaatttagctaatgttcctcgggttcattttgatgaaaagctttcaaaagaattaaaaaataaatttaacaaaattattcatttaaaaatttatttatttaagtgaaaccaattttataatgtaatattgatgccgacggcacattttatgcgctatgtgctgataacaggtaggatttaaaaattaaatataatttttaaataatttataggaatttattgaagaatataaaaaaaaatttttttttaaaaaaataattaattttaggcgcaacagatggaatcggaaagcaggcaagcaaatgataaaattaaaaaaaatatattttaaattgaattttaataattttctaatattttttactttgaaaaaattgaaaaaaaaattcagttagcttatgagcttgcatcaaacgtagaagaaaattttgtgattgtgcacgggcgttcccggcaaaagtgtgaggaaacaattggttggctgctcagcgggcaacaccgaattggacacaattcactgccagcagcagctggcaatagccattcaaatgtggactttgtgacagccgatttctcaaaattggctgaggtaatcccaaacaaattttaaaaatggacaaaaattaaaaaaattanatatattatgccagtggaaaaaaacaaatggaaaacgagcattttaaggcaattanataagcgatttctcaaaattggctgagctaatcccaac

SEQ ID NO: 37402 - DNA, 1562 bp, Heterodera glycines
  unsure (1)..(1562): unsure at all n locations
gttgaaaatctggtttttttgagttcttcttgccataacttttttgaagcttaatgaaatttttctaagttttgtagactaatagaggacatttagggctttctaatgttaccaacaatgtttgatttggttgacaaagaaaaaagtttataaccaaaaacgtgctggcgcgcaactgaggggttccgacaattagagctaaaatttcttaaaatggatctgcgccactttttttggcatttttgcgccaaaggaactggcacaaataggaggcgcgttatttttgttgttttttttaattcaaatctaggcgccccaaaaccgaaaagtatcccaaaaattacattatgttgcaaagattttgccgaaattttaatttccatctgcttcttccattggttcgatccgtatttaaatgatgccatttgatgtgatggaatgccgcggcattcattgtcagccgaaagggatttgtcaatttggaaataacaaataaacaaaatcagaaataaattggcgagctccattttatcgctacaataaatggaggtaatattacttatcactagggcatagaaaaatatgtatataaaatcgcaaaatatggccatgaaatatggaccaaaaatcgcgaaatatggacataaaatggcaaaaatatggacataaaatggcaaaaatatggacataaaatggcaaaaatatggacataaaatggcaaaaatatggacataaaatggcaaaaatatggacataaaattttcaaattgagggtgtaatttctcaaaatttcttcaaattcgctaaatgtaaggtaaaaatttcaaaaatggccaaatatggtattaaaaatcatttagatgaaaaaaacaatgatagagctaaaatttactcatatttagacgaaaaatcaacccaaaagccaaattttcgcttttttgcttatttttgacataaattaaccatttttaagaaaatttaaatttattcaatattttcaagaaaattttgctaaaaaatgattttttgggaatttttccaatctttaggggtcaaaaaggtcaatttaactgatggggcggttctaatagaggttttctggaaaaatgccaaaatatggacataaaatatggataagaatgccaaaacatggacataaatcgcgaaatatggaaaaatatggaaaatatggatatagaaatccatcctagaagcttcaaaccaaactaaaacatgtttttcatgcgtttcaggccccccacagtccaggaaaaaaatatggatttccatataattggaagccctaattatcacatcttttttgaaatttattttttatttttgaaaaaattcataaagacgtgcatctagggggttttcggagtcgttgatcacgaatttgaccctcatttcgtgcaattccgaatcccggacccaaaatcgaacaaaaactcgaacgttgaaattttcgaatttttcttttttcgtctaanatgngaattttcggaaaaattcttaacaaaaaatgaacttacacccctaagaatcgacccngaaaattt

SEQ ID NO: 37403 - DNA, 1330 bp, Heterodera glycines
  unsure (1)..(1330): unsure at all n locations
tccaaaaaaataaataacgaatntaggactaataaaaaaaaatcgtaggcgtaaaaaaactctatttgttttttatcgtatntaataaataatttactttattgttaacttaggaaatatggtaaatattttaacagtgatttatttttattactagaaaagtaaaaacacagaatttatcaatgattttttctttcctttaattaattcgaataattattttagtttatatttttgattaatttttatataaattatttgttaattttccttctcaatcctaatttaaatgatttataaacagggatcattttttatgtaaatacatatttttttgctgtattctacgtagtctaaatagtaggaaaaatactttcttttttgtgtttgcgaacaaaagttgggacttttatttacatattttcggatttttctacatattacatatatacatatttttattgatattttggactttttcgtatatatttcgcttcgcaatttttcgtacatattttcattttttttacatttttgaggatttttgagaatttctagaaattttttgtgaaaaattaaaaaaaaatttttttgaaaatgtatccctaaaaaatcgatttttatttaatgagatattaaaaattaatttaaaatataaaaagtgattctaagcctagctttgtggcatttgtgcctattgtccgttatttcaccatttaaaggaattgtttccaaaaaataacaattaaaaaattttgatttacatattttagtacatattctgggtttttttacatattttaacatttttttatacatattttatttacacatttcacgatttttcttacgtaaaaaatgatccctgtttataacattagaagaaattattaattgagcagtatttgacagaaaaaaaccaaaaagttttttttattcccgaagaaaataataatttttattatagaattcatctcacatttaattttgggttttagaatataaataacgaaattaatttaagtcaatattaaattattttcaatatatttagtcaaatgattttgaattgtttaatttcggcattattaaataataattgtatttgttatttttctattctcattaaagtgatacttttttattaaataaaatttttacgacatattaatgatcatttttttgggtaaattttatatgaaagtacagaatgttataacttaaatgattttttcctttataatgaatatttataattttaaaaatttagggtgctcattttgcagcatttaatgctgatttggtttttctggattttcatttgtatact

SEQ ID NO: 37404 - DNA, 1439 bp, Heterodera glycines
taataaatgggaaaattaaaatttaaaagggggggggggggtaattaaaattcgggtaattaaatgattacaaattcttacgcccgaatgcttttccctctgtttcagaggcattcacatcaccatggatcagccccaattcgctgcttcgttttccccttattacggatgggacactcacaccgtaaagggatgcgacagaaggggacaacagaatgagacaaacaatcgtaattaagcattgttaattggttgatgattaattggtaattgcattcacagctaatcaattgcccataacggaactgccgccgacatacgcacaagtgatcggacaaaacgcagaacagcagcaaaggaatgagcagaggacaaatggacaagaacaaaggagcacaatcgaacaacaaagtgatcagcagcagggacagtgatcaaatggaagaaaagggaaagtgatcaaatggaagaaaagggacagtgatcaaatggaagaaaagggaaagtgatcaaatggaagaaaagggaaagtgatcaaatggaagaaaagggaaagggatcaaatggaagaaaagggaaagtgatcaaatggaagaaaaagacgagaaaaggaaagtgatcaaatgaaaaagaaaaagacgagaaaaggaaagtgatcaaatgaaaaagaaaaagttgtcaaatggaagaaaaagatgagaaaaggaaaagtgatcaaatgggagaaaaagagacactgatcaaatggaacaaagatagagaaagagagtaggaagagaagttgcagggacacatccctttcacctttctctttacttcatattcaaattgtaaattatttaatgattctgtgacaagactctgaaacatttttgctatttagggcataatgatcaattaattgttaattgagcacagttgaatggttcctccttctctgatcagtgagtggtcgcgcacctttagcttacgccagggctatcatagcataaataatgaaagataaacaaacaaaacggaatggagaaaaggggataattgtggtggtgattaattatacgacttttcctaattagaatcgttaattgtcagaaatggaaagcgaatttagcaaaatgaaattcaattttcccacacagaaatatttagctcgactctttcgactgttatttaacttaattactttaacccatttttctgaaaatgatttccgatttgtcccctaattcaaaagtagcaaatatatataacaaattcattaattactaatgttaaatgaatatttcaatttaaattgtattgataatttatgccctcggaaaaaataaataaaaatttatacattttcttcaagaaaatatttaaattcaatcagtttaacaccaatggatttgtttctccccccccccctcttaaatcggatattgcaatttgctcat

SEQ ID NO: 37405 - DNA, 1067 bp, Heterodera glycines
caccatcatcgcccataaatactgctctcttccctccttcctcgcttcgggcttcattcattctcatttatcatttgcatttcaccccacacacacactttttctctctcttcacctctgagtttatttatttgtttattgattatatttgttgttgttgataaacgacacaacaattcttcaaaaattgccgaaatgagggaacatactttgctggacctcttaggtcaatagcctttttaacccgtacagaagcagcttgatagttggccgcgctctcttcaatcggtgcgttgcctaacgcgtcctctgcgcaatcctgcataattttaggccacgcacttttctgcataaataagttttatattaaagtatttagttgtgaattggtatagcgcccattttaggtggtctatggaaaatttgtttattttacttcaactcaatatttttgggccaataaatctgaaaaaattcttcataactaacttttgatacagtactttttgcacatacaaaatttgaaatgcccataccttcgggtattagtcgtagggacttgcggtcttttgggtattgtagcaattttgtactctttccaatgggcttactaaaattgcgcaaaaattttttaacgcctaggattttttcctaaattctcccatataactgatcaacatgaaggagtgatctgagaagaagcattaaaaggcatcctgttagagtcgaatacaatctagaacccgaaccacgtgctcaccctcgaaaatccgagccggaagagtcgagattctccctctccatattagataaccttggcaaaaccttaagactgatttagaaggttggacaacaaaaaagggcccaaaatctcagcttcgttgctaactaattagttcattgtttaatcttatattctggtttatcaataaattgatcagttttttgttcacctgacagcacccggtttgtgccatcagtgtcgtcatgtctccgactgtcttctcctctcggtgattccattttggccatacgaaagtcggctgcctaccgatggcatttcaatt

SEQ ID NO: 37406 - DNA, 697 bp, Heterodera glycines
ttttttttgttttcggggcagtccccccgaaccgatgcgcccagatttatggggagaccgaatccttcgggaatagcttccctatagcctgtactttaattctgcgttggatttttgctccccataattgtttgagtaccccaaacggacacttgaaaaaatcgattttttttgttttcggggcagtccccccgaaccgatgcgcccagatttatggggagaccgaatccttcgggaatagcttccctatagcctgtactttaattctgcgttggatttttgctccccataattgtttgagtaccccaaacggacacttgaaaaaatcgatttttttgttttcggggcagtccccccgaaccgatgcgcccagatttatggggagaccgaatccttcgggaatagcttccctatagcctgtactttaattctgcgttggatttttgctccccataattgtttgagtaccccaaacggacacttgaaaaaatcgatttttttgttttcggggcagtccccccgaaccgatgcgcccagatttatggggagaccgaatccttcgggagtagcttccctatagcctgtactttaattctgcgttggatttttgctccccataattgtttgagtaccccaaacggacacttgaaaaaaatcgatttttttgttttcggggcagttcccccgaaacgatgcg

SEQ ID NO: 37407 - DNA, 1185 bp, Heterodera glycines
ttatgccattcaaacggcccaatgttttttattgtgatatttcttcacatgtcctaaacatttctatatttgtcctttgtcagcagataatcattaataatacctaacattctcatgttgcaaatttatgtatcgtaaatttctcgggcctccagaaagacaatcctcttggccagaatcgtcttgttttattccaaagcaatcctaatacgtcgatttttcaaatatcttcattggtggttcattcattttagtctcccccccccctcccctaaattagagcccccctccctaaaataaagcccccctcccttgaagagggttgagaaatatagccccccccccttaaattagcccccccccccttgaagagggttgagaaataaagcccccccccttttgaggggggttgagaattgagaaataaagcccccgcccccttaattagagcctccccctaaaataaagcctcccttttgatggggttgagaaagaaagccccccttttgagtggggtcgagaaataaccccccccccccccgccccctaaattagagttccccttttgaggggggttgaaaaatagagcccccgggggctcttttttaggaaatcggtattagttttttgttaactcctttccatggatttgtgtaaattttatgctgaattcaaaaagtaaataaataatttagccctaatttttatgttttattttagggaaattttgatgctcaatttgggtgtccatttttcttccaaaaaaaacctttaaccaatatttctggtcctaaatctcttctgttttcctcccaatgaatgaatgacctgttcgagctcgtcctttgccacattgttctttgccattttgcgtgccgtttttccatgctttgttccaatggcaaaagcaacacagaccagtaaagcaagcaaaaattttggggcaaacatttttgggaggtattttggaaagcaaaaatttcaagtttttcgagtccgaatgagagtgattggcttcgctgtctccaaccggcgtatttatatgcaaccgattgcgggtgccatgtgaaaagcagcattccaagaatttgacatttcattatcgccatggcattttctagaaaaacagaacaaataatagcataaggctgatattttgggccaaatgggcaaaaacacagcaat

SEQ ID NO: 37408 - DNA, 1420 bp, Heterodera glycines
  unsure (1)..(1420): unsure at all n locations
aatgatggcattaaaaatttgacaaaaacttttctctacattaaaagcattgtaaattcgccaaagagtaaaagtgctaaaaatagattgacagaagaaaatggcggcgcaatagaaatgattgaatttgatgatgatttaaaaaatatgggaaaccaaagaggatgacatcactctcaaacggacactgacgatttcatgggcaattgggtgtggattgactgatgagtagggcacagatttgtatggatttccatatttttttgcacacttatttcggcctaaaaacacgtaaatagtatttttagcttggtttgatgcttctaggatgcctttttatttccatatttcaggtttttgtccatatttccctattttcatacatattttagcattttcattaaaaaagtcgaaaaaataaacccctaaaggtggaaaatttttaaaatacgccaataaatggaaaattttgaaaaaaataccaaaaattgtgcaaaaaaattcattagcaactcgcttaaaaatgattttttttttacagaaaattactaatctttgcaatttttttctaaaactttattcttataacaattaattcattaaatttcaaatctttatacgaatgtatctcgtttttcaagaaattctgattcactaacgcttttccactgacgcattttaagaggtgaactaattttggccggttcatcgacctaaaaaaatttatgtaagcgacggctgcatattttatttatttatttattcaaaaataaaaataaccaaaagaagggcattgctgccgcttacacttgaggtggaaatacgagaggtcaaatgggtagaagtgaaagaagacaatttacatttggtaatgaaatgaggtcaatgggtagttgtgacattattgttgaaattttaagcaaagggaaattggtttttataggaaattgagaaaaaatttttgggtaaatttttaggaaattgtgtagagatattttttttttcgatttgttggaggtctgcagaactatttatcgaagcactgggggaattgttttcgaaatgattccagttggaggagaaatttgtcaatatttgagagtggatttggattttcgttttctgtgattgttttgtcaacctgcgatgattttgaagtgtcttcactggcctccttcggttctggtccattttctttggcaagagtcggaacatttgtctgtggggtttgtattgctggtgccaccggagctttctgtggcttagttatggcgagagaagcccaaaaaagcattttctcctaacaattttcgatttatcgatttagagcgacttataaaaacaaaaaaaaaaaaaatatattttggcgttttggcaaaagaaaaantatcgcacantatttcangggtttaacacgtat

SEQ ID NO: 37409 - DNA, 884 bp, Heterodera glycines
atcaatttatatattcagtattcttctttttttcaagccaaagtcgccatgcggcattgtcaggtcgtctttcgcgtgctccagctctttctgcgcgttcccttccaaaatagaccaaaaaggtgtagagcatgccgaccatcgaaaagaagctaaaaactcctatttagaataaattgttttctgatctgttctaacgagatcgagcctcttccccgcgcaccgcgtcggtggtggagacccccgtaccccgagacccaaaaaacccgagactcgagacttttttcaaaaaattttcctattcgcttaaaaatcgttaaaaacattttttgactctattcttaactaatttttgtttttttttttaattttgattcaatttggcacaatatttatcatttcaaaaacgcacaaaacaaaaattcattaaaatttaagtgcaatttgttaactgatttagtccaaaaaattaaaatattttacgaatttaattgttaaaattatgattgaattcccactgaaaaatgaataattttgaaaaattagaagaaaaacaactacttggaggggaattacttttttgaatgatcggccgaaagacttgttctttttgcactatatatttgtgaaagttgactgaaggtcctctctgatttcatcaataaacacttcatcgctttgctcattttcagccggaaaattatcagaaatttccggatccattactctaaaaaagttcaaaattaaggactacaactaaaatatgtgtgtgaaacgaataaaatatttcatctttatttattggcataatgtcaatatttttccataaaaaattctcattcataagctcattttcttattatgaaaagcctaatcattagggg

SEQ ID NO: 37410 - DNA, 983 bp, Heterodera glycines
tgatttttataaaattagacgtaaattggatttgtaatgaaaatgataaaaatatgaattaaaatgaataggtgaaaaatcaaaagaattttgaaatttttgtgcttaatacgaataaattaaatttcaaattaaaaattatttctatcttttgcaaaagtttaactaaaaagcttcgaagaaatgttttgtaaaaaggaaatggagtaaaataaatttaataaatttaaatttaaaaaaaagaaaattgaaatataaataatattactgtctttggaatgttttctcttttttttgcagcattttcttaaaaaaaaatctgaaaatgccaaaaattaataaaagcttaatagtcttaaccaattattccaattccaatgaataaacttttcctgccatttcaggcatgtttagcgaatttgaggtcaattatttgcgcaatttggccaatcaaattgcccaaaacgcatatgtggcaaagccgctgacagtgcaaacaaacattcataatctgacaataacattggcaatttttcgaaaaatcattgccgagcttgaaactaatcccaatgtgttcatattagacagcctgaaaagtgacaaagaaattgcaacaaattttttgcatctttgcgtttcgctgttggacgccaaatttgaacactttcagaaccaagtgttggcacgtttaaacgaatttgaccggatccgaaagggcattttggacggctaagggcaaagctcaaaatccaaataaacaaatttggttgggaaatttgacaaaatccgacaaactagttgatgaataaaaagttgttgattatttttattatttgaacgtttaaaaatgtttatttcatatgtgattgtgttgtgtctctatcattttactacaaatttacgataaagacaatttgtgaataccgtgaaaatatggtccattttgaagtaatcctttaatgtttgacaaaactttacttatg

SEQ ID NO: 37411 - DNA, 987 bp, Heterodera glycines
aaaatgaggataaatcctgagatctggcaaccctgattattatcctattttattctattattgttaattatttttgttatatttattttcattttaaatattataaaaattgacttttcattttaaatagcaataacaaatgcataccaattttgtatttcatttctccatcatagacgttcgggcaaaatttttatgtgcatattataaaatatttcttttcttttttaacttgtgccgcccaacaactagttttcaattgcatagttaatgatgctcgcccaaacttgatgaggattattcctttaatttctgatatatatatatatatatattgcattttttttgaggtttaattaattttttgaatgtatttctctggcttagttgttgaatttttccgattgggattattaacttttttttttgcaatgtttttttttttaattttatttataaatttttgattcgcggtagatgatattcaatatttaaaatcatattagtttttaggttcattgtcacttttttttataatatataccaaaattcgcctcaaatatttttgagaccttcatttatttattaaagtgcacgtatcacgaccatcgtgaataaatttttaataaatctgaccattatttttgtaattttgaggttatggatttatttagaattatttataaaatatctcgcctgtctcaagtcgaccgtggtttttgttgaccaaaaacataaacaaaaattttggatcggtttaacagaaaactcattttagagatatcggattaatccagcgtttctattgaaaatttttcaaaatcataacatcaggcttcaaaaatcagattttgggatcaaaaaatcagattttttacaattttttttgcggcgtatttttccaaaatctttgtaaaaaatacatccctaatgatttgcttatggtaaactttaatttaaatatcattattaactttttgtttttga

SEQ ID NO: 37412 - DNA, 935 bp, Heterodera glycines
aaaaaacaaaaattatgcgccaacctcataaaaaaaatttgcgatagttttaaaaaaaaatgtttttatcaaatttattagctttttattcgtctgtattcccatttttacgaatgttttacatgttcaatattttgccagatgatttttggcgagacgcccttctatgccgagagtttggtggacacgtacggcaaaatcatgaaccacgaggagatgttcgagttcccggaggacatcgacatcagcgacgaggcaaaggacctgatctcgcggctgatttgtgcccgcgagacacggctcggcaaaaatgggctggccgacttccgggaccatccgttcttcgccgacatcgactgggagaacatccgaagcggtcggtaaaaacacagagaaaccaaaaaaaaaaaagcgtaattttctcgaacatataccggaccaataataactggaaaaaattgtaggggaaatttcaagtttttttttctggcgcttgcccccccccccaaagtttttaatattttaaaaaattgtgttcaaccggcgcaggtcgtccccccccccccctcccgccatttcgcttgtgaaatattgcaaattaagaatatttgcaaaaaaaaaattgttaggaatatttttccgtaagaaaatttcaagaaaaaaaatttgaaaaatttttcagcgattagtggaggcgcctttgcttttcctcaccccttaaattggcgtaaatttttaggcccaaaaagagtaatttttgaatacctatttttggaccaaagcaatttttttttaaaataattttaagaatctacaggaaatataattgtaatttttaaatttctcaagaaaaagggtatattttataacaaatcgttttttattctttttaaagagcaccttttctatttttttctaaaaattaaaaatttatt

SEQ ID NO: 37413 - DNA, 1497 bp, Heterodera glycines
  unsure (1)..(1497): unsure at all n locations
acgggggaggtgaagaagtaatagcattggacancacggcgagaagagacaaaagtattggaaggactcagaaaagaaagacgaagaaggaccatttgaatgtcaaaatataatctgaaaaaaagtgagagaggaaaggcaattgaaactccaaacgagcatggcattaattggcttttaaatcatcattgaaaaataaattaattttgagttattttttaaacaaagtgccaaataaattcaatttttcacgcattttgttttgcttctacaagtacaaaaatatgcttgaacttgttgaacatctctttaccttttattattccatttaatccactggcactttgctgatttctctcccgttccttcaaaaaacaaagggccgggggggggcttttttcgttatcagcaactccaaaaaccctgtgaagatttattatgacaaagaaaactttgcaaccataaggggtcccattttgtttaataaattcaaacatttttcgggggagtccatttgcaaaaccattacatttttccgtttacagcactaaacacatggtagtgacctcagcattggatgatctgcagaggaaagcgcgtcttttggaaaatgaaatcgatgctcaacttatttctctgaacaagttcaatccttcagacggtggactcattatatatatttttaatttaatttcaattttataaactggaccgatttcatttaaaatttgtccttttgtttttgttgaattaaatgttttccttttcagctctttcgtcttactcttacaactcaaatcagacaaagggtcaaggcaaacgggcggtgttcgattcgttaacaactgacattgaaaataaactctcaaaattgagcgaaataaacgatgcggttcgttttgcagaaattatggtgaattttagactttcatttgcacttccctcttcagatgcgcgattgctttgagaatgatatggccgagttcagcaaaacttccgtccaacacattgtgcgacgacaccgcgacattctcagggattacagcacggaattcactcggacaacttcgaacatcggaaaccaactgcacaggttaaaatgcgattattcacttttttggattataaaattcagagaagaattaatggccatcgaatcggagtcatcggtgaataatcggtgcaaaccgacggactatttactaaaggaacacgaaagcataagcaggcattaattaacacattttgtattaacggatcaataaaatctcatcaaaaagttaataaatttagctgtgatcggcttttgaatgaacaaataaggtataattatttttgcttaatttcctggcttttcttagcaaggtttttgccgaatcgttcattttcttccatatttagcattgcaatgtctgtcaaagagaatctgtacacccaaagcaccgggttgggttcgattggcaagcgtttgaatcagttgacaagtgagcaattggt

SEQ ID NO: 37414 - DNA, 730 bp, Heterodera glycines
tggaaataagcttaatagggcctagttaagctgtaaaaaaatttgggggcgatttgaatgagaatagaaagagccaggttcgatgaagttttggtaagccaaaaaaaaatccaaacatttaaaaatctataaaaaatttaaaaatgagaattcatgcgagattttctggaaataagcttaatatggcctagttaagctgtaaaaaaaaatttggggcgatttgaatgagaatagaaagagccaggttcgatgaagttttggtaagccaaaaaaaaatccaaacatttaaaaatctataaaaaatttaaaaatgagaattcatgcgagattttctggaaataagcttaatagggcctagttaagctgtaaaaaaaatttggggcgatttgaatgagaatagaaagagccaggttcgatgaaattttggtaagccaaaaaaatatccaaacatttaaaaatctataaaaaatttaaaaatgagaattcatgcgagattttctggaaataagcttaatagggcctagttaagctgtaaaaaaatttggggcgatttgaatgagaatagaaagagccaggttcgatgaagttttggtaagccaaaaaaaaatcaaacatttaaaaatctataaaaaatttaaaaatgagaattcatgcgagattttctggaaataagctttaatagggcctagttaagctgtaaaaaaaatttggggcgatttgaatgagaata

SEQ ID NO: 37415 - DNA, 680 bp, Heterodera glycines
attatatgcctaccttaaatagtttttatagcaataaaacttttaattttaaagaacttaagtttgtaacttttattacatgtattttaaatattcactaactcaaacaatcaaaaaatattttttaaatttaaagttggtgtcgtgtcgggttttccagtgtcgaatttaccgctagtgtcggattttccaccggtgtcggattttcttgcttgtgtcggattttccggctcccatccaagaattgtgcaatttttatgatttctaatttacgacaattttagaaaggttatggggtaatcaaatttggtaaaaggggaaaaaacaaaaaaaaaacaaaaattcataaataaataaaaattttgaaaatcaaaaaatccttaaatcattgtttctgcatccaatttgttcgcttgtttttgtctgcctattaacgctctcaaatttggtgtagtttcaatcaattttaaaagctatgggtaatcaaatccaaaaaatttgttaagaatgctgcgccgcttattgctgcgtaattgtcatcaggccgtggaagtgggtggcggttgagttcgagtgcgttgtttaaaccggttgagaaatcaatgcaaactctgattttgtcatttttctttttatggccaaaatgggtgctgccctgtggctaaattctatcggattaa

SEQ ID NO: 37416 - DNA, 1035 bp, Heterodera glycines
  unsure (1)..(1035): unsure at all n locations
tttacaaaaggttgaaatacggctcctaaaaatgcatgagggagaagaatgaacacacttttccgatttcaatttcacttttaacttttgttgtcaaatgtcaccaattaattttaattaaaattatttggtggtattaatctataattggcactttcatcgtcgtgtgagcattaacagatataatttcttattttttgccggttttctgtttttgtacgcggtgtttctttttttctgaataaaatggtaattattaattaaacatagtctaaacctggaatttttacaagatttaaaaaaaatatttttaaatgcaaaaattaatataaaatcgtttgcctttgatttaaaattctcttgggattataaaaaaaataatttttaattttttaataaatcccccctgaaatattttttaaataattatttttctaggataatttttagcgtgatcacgaatatgacgtttatttttagccataacgtgttttacgtgacattttacgcgaaaaagtgagaaattaaaaaatttaaaaaaataattaggtgccataaaggcaaaaaatttcgtaaaatctcataaaaaaacatcatttatggttttttagttgtttccttacatttaagccgattttgaaccaaaaaaacgaaactagaaaaaaaatttgaagtttcgactttttgttcgaattngngttnaaggttntaattgggtngaaatggatgtaagaatnggattntnngagngtgaaaannnntaaaatgantttaatttaagaaaaaaaatttgaaattttttngaaaggggggtggagtaataanantgttanntttttaaatttttgatgttatattttanttaantnantggaaaaaagtnatggttaaaataaaagttatatttgtgattagngnttaaaattatnnnagaaaaaaaatttttttttttaatatttnaggggggtggaaaanntataagtantaaaagttttatttnagtaagtgattagaaagttgggaggggtttatttt

SEQ ID NO: 37417 - DNA, 1104 bp, Heterodera glycines
gagaagttggagcgggaaaaagcagtgatggaaaaattggccaaagaagcggagaacagagtggaagagggaaaggtgggacaatggggaaaagagagagcaagggagagaacgagcagagcagagggataaagataaagaagagggagaaatagaaagggagagatggttgataagggtgggaaaaagaaaggaagagggaagggtgggacaataggaagagaggatgcggaagagggagagcagtggagagaaagagaagagcagagatttggatcatgcggtagagaaagaccgagagagcgaaagagagactgattgagagagaaacgagagaaaaagccaaagagagagatagagacgggggggggggataaattgataatgaaaaggccgcccacttttacgtaaaagttcagaatcacccactaacaaaaaagtcactgagtgaattgaaccgacaagtgaaagcagcaattgaagcggccggaaaaacgaagttggggataaacagaataaaaaaagataaattcagaaatgaatggtaatttaagagagttggagcaattactgaaacaattggccataaaattgcaaaagaatatttgcgaaggaatcgcagcaacggaaaagaaatgtgaacaattaaaagagcaaattaagcaatggaatgaaatggaagaagtaaaagagaaaaagtgacaaaaaaggaaaaatttaaatttaggaaagaccggcggaaaatgacttaaaagaaatgggagagatgggacggacactcggagaaagcatcggaagagcggaggcaatggcggaagagggagcagtgttggaagcgtaattaattaattaattaattaggggaattaataagcgagaaaggaatcagccattttagacaaatgaacgaaattcgacaattgaagaagtgctatgagaagaaagccatggaaatgatgggaagcagcgaaagtcataaaaagtttttcgcagcggaaatggaagaattggaattccgatggcaaagactgtgtacgaaaagcaaatggataaagaaaggtggagaagagacgacggaaaaacactgggaaatgggaggagaag

SEQ ID NO: 37418 - DNA, 1318 bp, Heterodera glycines
tctgattttgttgcatttcaatttcttcctccaaatgtgagctttgtctgtccgttctcttcttttgctgtgctcttccgtcccctcattttctttccctttctccaatttttctgcttttaaatgttcgaagattccgtcgatttgcaatcccttaaggttttttaagccgtgataaacggcatttgaaataaaaatttgtttaaggatccctcggggattttcgatctgattgaggtggtcggcaacggcacttatgggcaagtttataaggcaaggaaaagggggaaaagcgaagaaaaaaggcacaaaattattaagggaaggcatttgaaaacgcaggcattagcagcaataaaaataatgaacataaacgaagacgaggaggaggagatcaaagcggaaataaacatgctcaaaaaggttgggagggaatcaaaaagaagggcccaaaaaagaggggaaatggctaaaaaaggaggaaaataaccaaaaaagaaaggaaaaatggcaaaaaaaagaggaaataaatggccaaataaagggggattaaatggcagagaaaagggggccaataattggcacattaagtgggctaatgggacggatgaacgtgcaactttttagtattcacatcacccaaacatcgccacttactacggcgccttcatcaagaagttgccctcctcaactggcaaacatgaccaactttggctcggttttctcgccccctccggcatttcagtctttccgttaagtgatggaattttgcggcagcggatcggtgaccgatctgatcaaatcgttcaaaggcggttatttgaaggaggaatggatcgcttacatttgcaaggaaatcctttcggtaggcccaattcttctctgaaggacatttccccctttaggggctaagccatctccacaaaaacaatgtgaggggggggggaagagagaaggggacgaggcgggagagatcggacaatgccattgcaggtgatccatcgggacataaaaggacagaacgttttgctgacggacactgccgaggtgaaattggtcgactttggagtcagcgcacagcttgacaggacagtgggcaaacggaacactttcatcggcacgccttattggatggtggggagggaggggaaagggatcgcatttctgggaaggatggcatgggatttggaggatggccactcgcaatgggttttaggcccccgaagtgatcgcttgtgacgagaatcccgagtccacctacgactcgcgcagtgacttaagggttgagacttcccatttgcaattggcaatctttcat

SEQ ID NO: 37419 - DNA, 996 bp, Heterodera glycines
tgaaaaatttctgctcaaggatatgcaaccattctgcagctcaacttgcaaaatggcaagtgaacaactctgaattgttaagagaagcagaacgccaaaagaaaaaagatttgaattaaaaaattgtatttaaatatttgataaaaattatttgtcaaaaaaaaataaattttttgaatatttcatatttatattttaagaattaaattttcttatgtgtttttgtttttagcatatgaatattttttattttttcctgccctaaaatggatccgagatcgagatcccgaccaaatctagattaaaatcccgttataaaaagtgccttttaaaaaagttcaatgcatatgattaatatttttatcttttcttttttcgaattaaactacatccctcctccaattgtaaattctctttatttattcaatgtttataataaatatattgtggcaaaatcaaaaatcatggggaaaagaattgaattaaaaataaattacaaagtttttggcctaaagcctaaaattgtaatgtttgaaaattattgggcaaaatagttatttactttatgattttttatatttattaagattccgtttggtcatttatcattcgaattgtaattaattatgtagatttattgattaattaatgaatgcaaattacatcatcaaatatagtcccgatatatatgaataaaataatattttggaaacactttttcattttaatctcttcttttcaccgttctcatcatatttcataaagaattgaattgttgggtggcaacaattagcgcgtggacggcacaaagaatggctaatatgcaaaaaaaaaatatatttttatcaataaaaaattattaattcaccaatgattttcaaatagcaatacacagcactgctgacgcgaacaccatttcctgtaatttacaaattctattaaacaagtaattaataaattcattcaacaccctcattaatggtttattgagccaat

SEQ ID NO: 37420 - DNA, 990 bp, Heterodera glycines
tcagtacattttcatgacaacatatgtcctcttgtttcgtccattttcggacggaatatgcgtcgcgatgaacgcctttctccttcagccctttcttcgtgcgaaagtattaaaaagttacgcgaagcaatcaccgaaatggccacactttgcgcaaaagaaccaaattggttggatgagactcaccagtgccgacgcagactctctattctcgttagtgacggagaaatgaaagcaagtgaaatgacggaatgtcgagccaagaaagccgggagcacaaatgcggaggacttggcggataatgaagaaaaaccaacacatacggagctgatacctctttatagttctgaacaacagaataacagcggaaaaatggacagcggtgggaatgtatttttttgaaaaaaggaccatccgtgttcaggtatttttgaatggaccgggagcgatggagaaaacggcggggcaacaactgcggatcgggaagaaaacaacgaaaaagaggacaccgacagtaactgtgagaaccatgccgacgacagtacgacgcgtagtcgcaaaaggtgtgagttctattacttacttattaactcgtttgaccttgtcatttaagtgcaattgaaaataagttgccgaactgcacagagaaagaagggagcacttttatacccaaaattgtcacgaacgatgaaatggattcaggcctagtagcagatatgtccccagctgcagaaaaacaccaacattttcagttgccgccatcacctgatcattaattattatacttggcccaaaattctcacaatcattagattctgtttattccaaaaaagatctttttcaaagtattcacagcggaacattcccatgggtatcaaaactagaccggacaactggtgtcggagggatcccgactgaatcccgatcaatcccgaacattttggaaaaacgatcgggacggatcccgaccgatcccgaagattttttttc

SEQ ID NO: 37421 - DNA, 892 bp, Heterodera glycines
ttttctgaaaaatgtaaataatttgatcgatgtttaatgttccgtttgttacgagttttgtcccaacgcattttcccgcatgatatccgttgcgatgtgcacaggcaacaccaaatgggcactgtcactgacgaacagtcggtctgccgaatcctcaattttgttgctctccaattcctcgaaaagggcgtccaaattgacgacgactccgttcccgacaatgttcaacacctgcaacagcaacattagtttttgttttgttttttgggtcaccttttctgaggccaatccggaaggcaaaaggtggaaatgatactcgcggccatttgccagaacggtatggcccgcattgttaccgccttggcatcgcgcgacaatgtcaatctgagaaagtgagagggtttaacaaacaaaacaacaaaagatatgcagaaagcccttcggaacatcaataacgaaggatttccagaagcccaccgtaaccgaccttgtgatgtccgatgagaaaatccaacactttgcctttgccttcgtcgccccactgggcccccaaaagaatagaaatggacgaaggcgacatcggattttattcggatcttaaaatgagaattaggaaattgaaccatcagcagaatgcattaaaattatgaaaaatgattgcattgtaacttttcttttccttttatgtgtttttcacaaaaaacatgctcttatttttcatctcttttaaccataaaatgcgaatgttttaaagggaaagaaaaatttaaattttgtttggcaattaattaattgttctaaagtcgcagcttttacccgtcaaatgcacggggaaagagaagtggcggaagggtcgctttttggcgtactatttctttatctctgttaatag

SEQ ID NO: 37422 - DNA, 994 bp, Heterodera glycines
  unsure (1)..(994): unsure at all n locations
cagaaggcgccggctatcattttcatgacgaanttggattcgattggtgcgcgcatttttgaatttgctttactgacattgtgtttattccttctgcaacgcaggcacgaaacgattcgacgcctctgacacgggggaccgagacattcagcggacgatgttggagttgctgaaccaactcgacggattccaacccaacgacgacatcaaagtggagtggtggagcaagccaatcaattcacattcattttgttttcatttaacgcaggtcattgctgcgacaaatcgtgttgatgtgctcgacccggcccttcttcgctccggacgttttgaccgcaaaatcgaattcccagcaccaaatgagaagggcagggaacaaattcttcgcattcattcgcgccggatgaacgtcgagtcggtgacagaattttaggaaaacaaattattcctcgttttcagcaaaaatgtcaactttgttgagctgtcgcgctgcattgaggacttcaatggagcacaatgtcgagcagtttgtgtggaagcggtgagcggataaacattttttgaggatatgcgtcagcttatctcatttttacagggaatggttgcacttcgtcgtgactccactaaaattctgcatgaggatttcatggacggaattttggaggtaattaataacaatttgagaaattttggaggaataagccaaaattttcaggtgcaaggcttgaagaagaataatctggtgtattatggctgatgggcgtcttctccggcggaatttaactgatgtgccacggctgaacactgcccagcaatttgtattgacattgacccatttccatgtgatgccttatgccttgtagcctgtattgtaatacatttcgtatatgtgtttttgccactgtatttcatgtacaaatgttctcgtttagtgaaattgttgtttgtgtgtgtttgtttatattatgtacataaattattcgcgcgtatagag

SEQ ID NO: 37423 - DNA, 993 bp, Heterodera glycines
aaagaggaatttttagaaaagagcgcaccgcatcggggcttaaaagcattgtacagcgtaattaaaagctgatataattttcgtatatttttcacaatttatttcaaaaagccaaaaagtccggaaccaattttaaaaactaaaatagtgcacaaaaggggagccgccgcacggcggggcttaaaagcattgtacagcataattaaaaccgaaaataattttcgtatatttttcacaatttatttcaaaagacaaaaaaaaatgattcaattttgaaacgaaatagtgcacaaaagggagggatggttagacgaaaagaggaatttttagaaaagagcgcaccccatctgatattcccatttttccgttccacaactggccaaaggcgactgtgctcattgacacgtagttgtccaataaggtacttggactttccacagtaaaatgtggtacaaaattttggaactgtcccgcctcacggcggggcttaaaagcattgtacagaataattaaaagctaaaataattttcgtatatttttcacaatttatttcaaaaagccaaaaagtccggaaccaattttaaaaactaaaatagtgcacaaaaggggagccgccgcaggcggggcttaaaagcattgtacagcataattaaaaccgaaaataattttcgtatatttttcacaatttatttcaaaagacaaaaaaaaatgattcaattttgaaacgaaatagtgcacaaaagggagggatggttagacgaaaagaggaatttttagaaaagagcgcaccccatctgatattcccatttttccgttccacaactggccaaaggcgactgtgctcattgacacgtagttgtccaataaggtacttggactttccacagtaaaatgtggtacaaaattttggaactggcccgcctcacgacggggcttaaaagcattgtactgcataattaaaagctaaaatattttcgtatatttttcacaatt

SEQ ID NO: 37424 - DNA, 1298 bp, Heterodera glycines
  unsure (1)..(1298): unsure at all n locations
ttttttcatcggattcattcagtggtgaatactgtatgacacatatacagtgatgtgtacagtaagaaacgaatttacataggttctgtgggaaggttctcatttctatctgttagcgcttttctttggcactttgtccactgaattggacggggttcgcttctgcttccacttggacttggtttacgaaggcacggctgacaatttgttgttagaagggaccgacgtttatttgttcattaattagttaattgccttttgttttgctagttaatcaccttcccgtttttactaattaattaattgccttctctttttcttaattaattaccttccatttttgttcacttttgacttttgctggtgaatgtcttctgacaacggcaattggaccgaactcacctcaaaatatgccaaaaaaagtttaggtgtttggcattttcaagggtttcacccctttcagcacgcgaccctgcgaatccaccaaattcgtttggagaatcgtattcactccgaagtcctttccgattggtggcggaatcttttaatggtaaattagcttagcggcgatcagatggcgggggggggggagggttttggccaatgctaccgtaatcctagcttttgccggcaaagtttctgtctcattaatcgcctaaattaaaatgtataaaatgccttttccttcgcttcgttttacaaatgccactcccaatggaccgccattctttcttccgttcctcaaattcttatggaaaatgagcggctttgaaccgttctgaaatttcattatttacaatatttcgccattatttatccgaagaattacaggggaaattgatgggataatgggctcggttgggtgctgctaaagaaagacaagcggacaaagtaccgaaaagcattttttggaaatttctccgtttttctgaatttcgttcggtccacaaaagtcggaattcgaaattgcttcccatctcccacttccctccccgttggactgactcttccgctctctctccgtccctccgtttgttcctcccttttttcgtgctgctgcggctcattcactgctttggccggtcgaagtccgaccggcactttgtcgtttttgagtgccgaacaaagaaaagagacgaaaagaataagcaaaggggaaaaacagcaaaacatagcgaaaggngggggggaagccaaagaaacgaatggaagggaaaggaaaagcatccgcagaaagaaagtcggcgtcttcgatcatccgtcacttaagggagtcatttttctgactgcgcttcccc

SEQ ID NO: 37425 - DNA, 1181 bp, Heterodera glycines
gcacaattaattaattttttattgtatcaattctcttgttcagtcctgaaaaactgttgcagtatgggtccattgtcagcacgcttggtgtccgatacatggtgcaaattacttacaccgattgcgaattatttaccgattcaaccttttttccaattttttttccagtcgtactgttccaatgtcgcgcgcactatgatggtgatgcccaccccgttgatggaggagctgtacgagttgctgttgaccacagagacgacagtgatcgaagcgttgaagcccggcacttcaatgtccgcagcttacgaagcaggcattcggcattttcgcagcaaaaagcccgactttctgcaataccttgtcaaaaatttcgggtaactatttttgttgacaaatattatattttcacttgaattgaaattttgtttattttcagttttgtcactggcattgagtttcgtgagtcccaatttttgatcaacgaccgttgcgcgcacaaagtgcatccgaacatggcatttgtggtggcggtgggccttcaaaattttcccaaccaatcgacggaaaacggaaagaaaatgatgtccattttcctcagcgacaccattctgatctgcgaagtttgtcttttcctatgacccaacattttatatgaattttaaccgtgataagcccagagaagcattccaattaaagcacataaaaatggggaaaaactttttggtcgaccctttttaaaatttgcctgtcctatttataggaaagagaatttgcacaccgacatttcaggacggacccaacgatgtgctgacaatggtggccaagagccgactgcgctccaacgccattcgctttcgggaggacgagcagcagcagcaacaccaccagcagcagcagaaggcgaacagagacactcaagaaatggccaacggcgggcgcaacaaacggtcggtggtgttgcaggaacaaacgcgggtaaaatatgcaaaacaaggcataattatgattggtaatttgcataaattaaagcacaaacaaacaaatgaagagaagcggaaagagcgccagagggaattggccgagcaactgaacagagaagcgcgggagcgtctctcaatcaaatcgggcggagtggaggcacaaaagtgggcatttttttaatatgggtggatggttttgat

SEQ ID NO: 37426 - DNA, 890 bp, Heterodera glycines
gacaactggtttccaaagaagttcaacggaaaaacaggaagccttccaagcactgaagcagcgattcaagaattttgtttcgccatatttatttaagcgaagtgtttgaaagatttataaataataaattaaaagacccaaataaacatttaatgaataaaatatctaaatttagaaaaaatatataataaaaaaggaaatttcatttaaagagaaccaaaatgagaatcgtaaagaaatttttcattttcagatcacaagccgtaataaatgaacaatttctaaatattatgaatttttaaattttaaaaatatttatttaatatcaaattaaaacagaagtgaataaatgacatctgggcacgtagaataagagagtggtagtggttaaatgatcatgaccttgtggtaaaaactgctagaataagagctcgtggtttgcaaccatgacctcatggttatttaaccatgaacttcggggttatttaaccatcaactttaacctgtagaataagagagacgaccatggttatttaaccctatgaccatggttgaaaaagctaccgcgcgagagggcatggttgcagaagtaaccaccagatttagccgcttataaaaattaatccaataattttaaaataaccaaaatgatatttttagataaagcaagcttttctctttctgtatatactaatttcaataaaaaaataattgagatttaattaagatttatttattctaaaaaagatattgaaaagtcataaaaaataaatttttatgatctctaaataaaaaaattatatatcaaactttttttttactatgatttacatgtattagccttataaattatttcatgaaaagggaaacgcgtattttgttgaagctta

SEQ ID NO: 37427 - DNA, 1538 bp, Heterodera glycines
ccaatttgaggacgagttgaaaactgtaaatatggaaaggctggtgaatataataattttataaaatagtccgaaaaagattcggacttattttaaaaataaatttgtaacatttttaaatttaaaaaaaatttactgcattccacattgaaatttcttcacggatttgcaatcgtcgcgttccaaaatttcgcacaacattttttggtcaatttgcaaaaatccctccgattcgatcaaagtgtcggcattttcgtaaatgtaaaataaacaatggtaggcaaaattctaaatttgaaaggaaataaagtattaaaaaaattggctcgattgagaataaaaataagtgaaaaaaggaacattatggaaaaaaatcgatgcgataatttccgcttttaaacacaatttggaaatatcaagttaaattgagagaagtttttctctcaaatttccttactattttttcttctctgcccgccgctaaaaatggtagcagcgacaagtcagagaagagaaaatagtaaggaaattaaagagaaaattttatttttttttattcaaaacaatttagtgattaaaaaaagattcagacttattttaaaaataaatttgtaacatttttaaatttaaaaaaatttactgcattccacattgaaatttcttcacgaatttgcaattcgtcgcgttccaaaatttcgcacaaaatttgattagaagaggtgcaacagtgattaaaagaggtacaaattgttagaagaggtacaaaagggattagaagaggtacaatggtgattagaagaggtacaaaagtgatagaagaggttaacagtgattagaagggtacaatcagggtttaaaatgaaataaataagaataaattaaaacatttgttcaccaaaataatttaatttaaattaaaaatttttatttattattaataatacaaaacaaattaattaaaaaatgtaaaagtaagcaaaaaatgcatagtaaattaatgtacaccgcccggatccgaactccctcccccctcaaaatgatgtctcagaatccccaatcacacagggattctgaggtcttaacgatgtcaaaagtaaaatttgattacgtattcgtgatcagcggcccaaataacgcctaaagacatgtttttggaagatttttggtgaaaaatttttttcactcaaaaaccatgtgcacccccctttggtcccgaatcccaaaatcacttttatgtttgtatcttttttttaaaatgtgataaaaaggtcaaataaaatttatattatagagcaaaaaattgcggatttttgtagtattttacttttacagtatgacttttcagaaccgagttctgaatttttttctgaaaaatcgaaaatttccagaatttctggaataactttttttatttttgtggtataaatttcaaataaatctcataaaattcttccgattttttgctatttttaaaactttaattcacttaaattgagaaagcctccattgagttatgaattttcaaattttaacccaaa

SEQ ID NO: 37428 - DNA, 1312 bp, Heterodera glycines
  unsure (1)..(1312): unsure at all n locations
cccatctccccatctattccttcctcataaaattgttctatttactcgacgatggcaaataaaaaatgcacaaatctaagaagcactttgacctttttttgaccttcttattcgaattcacgagttccatgagcaaaataatatttgcattagacacaggcttggggttagttgcggcatgataacagagatagcggatcaacagttcaggcactgcgttcctatattggtcgcctttgagatttgagaagattttggtgattgttgcaaatatggaaggtttaggtcttagcgggcggaacgaacggcgagaataattcttgactagagcaatagctatggtcgctcattcagtggccttttaatatgtttaaattgtcattttatatctgcttattttatattttaaaaaataattaattaagaatccattaatcaactgatcaaaatgtcctcccgcgcttcggacgccatccaggagttacgaagaatggtcagtgatcagaaccgcatcatcttcaacttgcggtcgcagttgatagatcaaagggcggtagttttacaaaatcttgcgcgcatcgaacaattggaatgcttcacatcgaatgtaatttttattttaaaccccggggcagtttaaattttaaaaggtgagatgttgtaatgcacattttcgcaaatgctaatttttttaaatataaaaaataattattttgttaaggaccgtgctgggcgcggaaatttccgcctccgctacagtccaatggcagctgttgagctcactctactcgggcaacgtctcgaggatagagctcgtcgccatcgaatggcgataggcgcaatagcatcaacttccacttcgaatggagccaatggggccgggggctcggctgagggagacgcagcaaacaatgagaacggttggttaaaaaaataagttaatcaaagaaataaattaaaaaaattaaaaattattttaaaaaataaggttaaccaaaataaataaacaaagcaattcagacttttcaactccacgtacttcacgtgtaccgttgtccgccataagtataacatcaataatctcatatatttgtatctaatgacaaaaactttttagataatgtgccagctgatcaaaatgcgcatggaggaaatgcttcgggtgatggaaatggtaaataattttaaaataactcaatttcagtctgaaaatttcagtcccctcgtttggngcaacgattgaacgcacatggagagatctcgtcgacgttgctgcatgatgagatgggtcagcgcagtgtcagcagcattt

SEQ ID NO: 37429 - DNA, 977 bp, Heterodera glycines
  unsure (1)..(977): unsure at all n locations
tttttntgtttaaactcaaaacatttatgtaggtatgttaaattaaagaaaatttatttgtgttttgtaattatattttaattgggcaattaccgccaattttgattttgtatacaagcaaaattttgtcgttttttaatatggataataaccatggccaaaaaaagctcagccaaagatcaacaacaacccttacagtcatcgccaagtctccgttatttgcgtcggcaattatttcttcgctgccatttgaagttgccaaagtcaccgctgcgaacagcagacacatcgccagaatacttgccattttcaatttgtttttccaatttggcctcagtttccgacactttctcggccaatgcattttgattctcgcgcattcccaaaataaaaatattaaattaaaataaatattattttgcaccattttccaatttgttggacaacaaattttggctgtcgcgcattcctaaagcgcatttcaagaaaataaataatattttctaccgttttctattttggtggtcagcccctggtgattgttgcgcagttcagtaaatactaaacaaaatttttaaattattttatttaattaaataaattaatttatgttttaaataaaaatacttgccattttcaatttggttttccaatttggtggacaacaaagtttgggtttcgcgcattcctaaaataaaatataaaaattcaattaaatgaatttttaccgttttaaatttgtttttccaatttggcctcaattcccgacattttctcggccatcgcatttcgattctcgcgcattcctacagattagaaaagagcagaaaataattaataaaaaagtgcatattaatgcattttttaccatcttcgatttctttttccatctgtttgatgtcaacattgtcattaatgccaaattgccaccacctgtgacaaaaaatggcattaattattgcttttcatatatattt

SEQ ID NO: 37430 - DNA, 1384 bp, Heterodera glycines
aagagagttcattatttatttgtttttgcataattaattcataaatattttttcagaaactgctctgaaacgcaccaaacttttatttgcaagttattttaggcactcagatgctttcactatcaaaaagggagatgaataaaaaatctaaaaatttttaattgctttttaaatatgcgaaaaattttaggcttaactttttttttataaactggtcagaagcgaaccagattttgcgagagcatcaaaaagacaaggaaaagcactgctatgatgctaactccagtaattctgaatttaaaattttttattaatttttaaagcttcactattttatttttttagcaaaatcaattcataaatattttttcagaaactgctctgaaacgcaccaaatgttaattaaaagttaaataaggctctctgatgctttttctatcaaaagggagatgaataaaatttttaaaaatttttaattcctttttaaacaggccaaaaagtttaggcttatattttaaaaagtttcatcgaacctagcgcactaaaatcgatataatctctccaaattttgcaggccttctccattgtaaaggactaacttaacctgaaaaaatgccaacgcttgttgtttttaaaatttttcaaaattctgactttttcattacttatttattttttgcaaaattaattcataagtattttttcagaaagtgctctgaaacacacaaaatgttatttacaagttaaataaggctctctgatgctttttctatcaaaagggagatgaataaaaattttaaaaatttttaattcctttttaaacaggccaaaaagtttaggcttaacttttttttcagaaactagaaatcagaagcgcaccaaactttgcagggatactgaaaggaagagaaataacctattttaaatattatctagtcagttcatttaaataatttttatccaaaaaatttttttttgggttttcggggcagtccccctgaaccgatgcgcccagatttatggggagaccgaatccttcgggaatagcttccctatagcctgtactttaattctgcgttggatttatgctcctgataattgtttgagtaccccaaacggacacttgaaaaaatcgatttttttgttttcggggtagtccccctgaaccgatgcgcccatatttatggagagaccgaatccttcgggaatagcttccctatagcctgtactttaattctgcgttggatttttgctcgccataattgtttgagtaccctatacggacacttgaaaaaatcgatttttttgtctcataaatattctgttcagatagagctctatagcgcaccaaattttattagcaacttaatgttagcactctgat

SEQ ID NO: 37431 - DNA, 791 bp, Heterodera glycines
ttgttatggtcattaatcttcggcagcttttgtattctctgatcactggtcaatattacccaatgcttcggaattttttttcaaaactcatttttttgcgtcgaggagagcgggggggggaatcaattaaattcataattcacatattttaaagtttgcggcattttttgtttctaattttatcatttcccatttttttctcgttgttttatgcctacattcaaatttgtattctcaatgttgtttattcttcaccagaaacgcctcttttttactacaattattttatcggtgcatttaaacaaaataaaattggcacttttattacggtcattgatcacactgatcactgattagacggggggggggggaagttatcggagagtgttaggtatgttgactgactaatgatcaatttctactcttctccgcgcactctccgcgtcccattcgtccgcgttcagttccggcgccgccagcactgctgcggctcgtccatcatttccgagaaggactcgccctgggcgctgctgactttgaccgagcgttgtccgcgccgcagttggcgcatcagacggcgcgcctccgactccgcgcggtccatgcacacaaagtggacacgcttcggcttttccccgctaagctgctgatcggcttcttcgccgccgttcgttgtggtgccgcgcgggcattgcttgaccggctcggtggagaagcacagcgcgtggttctgctcgtacaccttggtgttcattgtcggcataaccgctgaatggggagggggggggggg

SEQ ID NO: 37432 - DNA, 1342 bp, Heterodera glycines
acgtcattacattttgttgggcgagctaaaaccccggacgagaatggatgaatttggtgagtgacaaagtccatttaattctctgaatatcttatgccttaattgatttatattttctgtttattgaatgtcgcagaaaaacatgtgatgcaccaagatgattatgggacagtaattgcaaaacttcgccgtcagatataccaattgcctaatagtcgctcagttttcgctaaaaaaacagaggcccaatggtctgattttatataggtagttgaatattttaaaaaaatcattaacattttaaggtttaccgagctggcagaaacatggaagcgaatccgagaggaattgccgacaatgacagaggatggatgcacatttaagcgacagcgtggcattggtgcccattcacatttgtttggaattttaaatcctcgatactcatccttcagtgactccattttcacgcaatgcatccaacgatgtgtttatgttgaagcaacgaacggcgccgcagggaagtgaaattgggcgcgggagacaaaggcgaaggagccgtaagggaggcaccaattgggaggacaacaccggaagcatcctccggagagaagcagtgaattttaccgaaacagctacggatgaaaccgaggaagtggagtcgaaggccaacgaacatcgaaagacgacagcgacagccgagacagagggacaacagcaccaaaaacggagagtgtggcgaacgcgaaatcgaacagcacttgactgtaagaatatgacaaggaagcaatggaacatcgagcagaagacgaaggaagggtcatcattaaagcacaaatctgttgtagaatgggtggacagagagcagcagttagacgaaagtggaaggtcgggcacaccagacatggagacaatgaagaacttgaccaacgggaatgaagtttctatatttgaacaacgataaaatcaaatgcttacgattataaatagtgtttatttccttaatttgaaacagaatatacaatctgatcaaaagcgaatgtgtgtcaaagtcattttgccgatttgagtccaaaaaaacttataagccgtatcaagaaatgactaggcaggtcccttgtagaattggttttaatgccgtagatttttttatgcggcttggcgctattatcaaaatttgttaaactctaaataaccagaaaaaattgcaaattgaacttttcgcggttgtgtctatgttacaatccagatacgactaaatcatcgtggttaggtcagtggtgaatggtaagagcatttctgatcagagtgaaaatatgactctcctcacgcatttgcccacgct

SEQ ID NO: 37433 - DNA, 927 bp, Heterodera glycines
aaaatggaaatcccattgggactgactttgccggtttcgacagtgccaatggggtgacgcgtttggtcgcccgtttgttgttgtcccccgagaggggctactgattctttgccgttgttttctgctgctgccgggggcccacaaatcctcccaaacaaccaacaaatcttccgcggatgatggatgggccacaatcggccaaaagatgaccccagcggcgccctcggggaatgggaggaaaggggagaggaaactttggcaaaagtgccaggcaaaagaaatattggagcgataatcgtctacccgaaatttatggtgtaaaataaatgtggggggggggaatgaaattaataactaatatttaatgataatgacgcgatgagggattatttatggtcgtaaaatgtgaaaataataaaaaaatttagaaaatttgtatataaattaaaaaccgataagaaaattaaaaatgtttcggataaatttaatattttttttaataaaacggtgttcattaaattccgattttacaaaggcaatttgaaatattcttaaatgtagaaacaaaattttaaaaaattaataaatttaaaagaatttgaaatgggatttaattagttcaattttttttgccatagaatttttgtagaataattaattaatgtgtttatttaatgacaatttgggcgttgaatttattggaaaatgcatcaaataatagaaaatataaaattgtgagtgattcttctcatttgttgtaaaaattcaacaacaacaaaaaaaacacctaatattagataaattagtgataacgaagacaaaaaaaaatttatgacaattgattaaagaaagaaagagacaactaattatgtaattagctaattacttgatttttaaatcgaaactgcaaaaaagaggggagagctg

SEQ ID NO: 37434 - DNA, 1067 bp, Heterodera glycines
cacatttcttgacggcatttctctgcttaaccgcgttttttgtcccaatcattctttaggcatttcttccctttaataattttacttattttccattttttgacgatttgatttttctcgagcattacaaattcctttgattgttccgatatcccaactctcttttcagctgcattttacttcattttgaccacctcaattattgtgtgttgatatgtgctgtttttcttttgttttgtgatttttttctctgctatttattaaattatgcattttgtatttatcgcttcgggttatcatttcaattttcctccatttttatcatttcaattttattccatttttatcatttcaatttgattcaattttattccatttttatcatttcaatttgattcaattttcctccattttttatttctttttttaattcctttctattttcgaatgcattatccttttgctaattctctcacttattttttcattttgtaattaaatgaagaagatcatcattatcattactggtgggttttaattaaagcaataatttaccccattataaaaaattcatttatgcgcataatattaagaggtggttttgcgctgacacaattttttattggaaattgtgagcaaaatcgaattggtttgagaatttgtgagagtgacaaagggttattgagctattgggttttatttgatacaaaaaatgccgaattttttttcaaagagtaggaaaaaaatccattaacattatttttgggttttttaattgcggcattttcgtcccatttaatttgggattatttagacatttattaaatatcacacaatgtttttggtttgatggcattcattgtgtgggccttgaaatttaaaataagctccttgagggcgaggacaaaaaagtaaacagacaaattcaattaaaaaaagttcccccgagagagagaagaaaagagaggaaaggcgctttagtcccttttaaaacaaacatttcccgagatttggattttggccttttgccgtttccttttaaaaatgcaaaaaaaaacgagtcaaaa

SEQ ID NO: 37435 - DNA, 1059 bp, Heterodera glycines
agagagagagaggagaaaaaagggcagagacaacacggaaagggagagagatatagcgacagtgataaagcgtagagagagagagagaggatgagaggggatctgtgagaaaagggtgggagtaaagatagggaagatggtgaagtctatgagagagggtggatatggcgacagagataaagttatgagagcacgagaggtaaagagatagagagagaagacagagggagagagggcgagggatttctatgagaaagaatggataaagatagagagacagtgataaaatgaagagagcgagagatagtgagtgataaagtgaacagtgtgagagaaaggggagagtgagagagaaggcgagagatagagcgacagtgatagtggagagagagggagagcgagagagtggagagagatagagcgacagtgatagtggagagagagggagagcgagagagtggagagagatagagcgacagtgatagtggagagagagggagagcgagagagtggagagagagagagagcatgccttcacttctcgcctttgacttagaactttgaaaatcgtccgtcatcagccgttggtcaaacacgggcggaagtgtgacgtcaccagtggggcgtgaaaagggaataaagatcatcgccaaaaaacgtctcaccaattaattaaccaattaattgatcattgaggcgcctgccgacagatggagcgatgagcaaagcacacaaaaagtgccgttggcgaccatggggaaaggggcgggggcgttgtcgtcgaccaaagatttgaaaatgtgcaaaaattgcaaaatcagcgccacgcttggcgttctgctgacgaagtgccgcccccggtggatcgtccaaaggccaatttcaatcattaaacagaataatgcaacaaaaaattgttgttttattggcgttttctgtgctatgttcagcaaatggggagggggcataggttaagcaaaaatcattgataataaatttaaaattgcaaaaaaaaaaggaattctttggcgctctgacgccaacccccaggggaatcgg

SEQ ID NO: 37436 - DNA, 951 bp, Heterodera glycines
  unsure (1)..(951): unsure at all n locations
ctccactttttttagcccttttctcttttggcgtttcctatgctttgcacgtgaatttcctctgcattcgttgcaaaactctagcgagtgggcgagcaaatgcgctgcccacacaacaacaaatgtcggacgatggatggggcggggaggggcggagaaaccttcgcccaatgtgacttttggccgggggcggcccgtcctttctcatcaaatcgtccataaaatgagggggacacagtgaacccttctcattctcatccgcacctttttgtacggaaattgacctcagtttttgggtggttaactcttttcttgggacttcgattgactacgtggtgagaaagaaccagtccaaactctttgatcagatggacattttgtttgtttagcgctgcgctcaccgatttctcggcccaaaaattctccaaggccacttttgcaataattttgttagtttccccaggtaggaggggtcctcccccgtgccgtacacagctgacacatacatatgacaaccaaaacacaaacaaccacaacaacaaactctcctcagcccatccttgcgtatttaaggctgtttaaatctaaaattatcactttttatctgttcccatttcgagcctaaattattttgttctcatttaaaatcacaacagcctgaaatgtgcctgaatcgtgtggtattggggcctgaaattacgcgaaggccggcggcgatgccattctgggccgatttggcccagggcaataatgacaacagagacggggccaactggngagggagcgcggcatttcgaacattggctaagggagggggagtagagcccataaggtcggtcgaaggaaaaccagcgcaaggcgtagaagaggaaaagcctagcgaacccttgggaagagaaacgcgaattgagaccaaaggggagggcgtggcattcagcgccactaattttg

SEQ ID NO: 37437 - DNA, 1100 bp, Heterodera glycines
tgctaaataaaagaatttgttttgatctgacgtcagtttgtacatgaagcagctgtcaagtgaaccaaacaaagattttgcgaattttgttaaaaaatagaaagcacaaaaagatttaatcatatttttatttttgtgtgcaatttatttaagcatttcggttttattttattttgatttttccattttgtatttatttaataatatatgtataaaaaagcgcgttaaaattgctataattaatcttccgaccaataaaaaaatagtcataaacagaattcacaaaaaccggaatatttcaaatatcacattaattttgacattttttcagtaaaatattttaaataattgatcaactaaacgatgatgtgcgatcaatgaagaacttcctaaaaagtagggctggtcgggaccggcaattttgacaaaaaccgggactgggacttgccgggaccagaaaagtcgggatcgggaccgggaccaagtttttcgaccgggaccgggaccgcgagaaaagcctggaccgggaccaaccgggaattttcccaaaagaaaattttttggaaaaattttgaaaatagcattataagatggaaaaaacagttttgtgaagaaacttcgtcgaaaaaagaatgatccaggctatttaacgcgataaagaaataaaaattccgatcaaatttgttttcccatataaatccaacaagaaattgttttattaattttggttttttgaggcaatatgtccggcggtgtatgttcggtacataattttatgagatttattataagattatacaacaatatttggtcatattttcccaatgtggcattttttcattttgtattttttgacggtgtcgtaaatggcaaagattgacttgaatttgtaaatacctaacaccatttttcatgttcttatgagcaaatgtgatagcaaaatctagtctaattcgaaactgagctgaataatctccaaactgtaccaataattctgtttgatcagataaagtgcacaggagccacaggtatgagtcctccttatcgccttgatactgggattggggttatttgttaggttggttggcttttcaaggggg

SEQ ID NO: 37438 - DNA, 959 bp, Heterodera glycines
tataagataaatttaaaaaattctctgtgaaattaaatggcgattgcgcaccgcacttcctatcatgctcgagagcatttgtaacgtataaaatttctcaaaataagagatagtcatttttcttggatataagataaatttaaaaattctctgagaaattaaatggcgattgcgcaccgccctccctctcacgctcgagcgcatttgtaacgtataaaatttctcaaaataagagatagtcatttttcttggatataagataaatttaaaaattctctgagaaattaaatggcgattgcgcaccgcacttcctatcatgctcgagagcatttgtaacgtataaaatttctcaaaataagagatagtcatttttcttggatatagataaatttaaaaattctctgagaaattaaatggcgattgcgcaccgccctccctctcacgctcgagcgcttttgtaacgtataaaatttctcaaaataagagatagtcatttttcttggatataagataaatttaaaaattctctgtgaaattaaatggcgattgcgcaccgcacttcctatcatgctcgagagcatttgtaacgtataaaatttctcaaaataagagatagtcatttttcttggatataagataaatttaaaaattctctgagaaattaaatggcgattgcgcaccgccctccctctcacgctcgagcgcttttgtaacgtataaaatttctcaaaataagagatagtcatttttcttggatataagataaatttaaaaattctctgtgaaattaaatggcgattgcgcaccgcacttcctatcatgctcgagagcatttgtaacgtataaaatttctcaaaataagagatagtcatttttcttggatataagataaatttaaaattctctgtgaaataaaatggcgattgcgcaccgccctccctctcacgctcgagcgcttt

SEQ ID NO: 37439 - DNA, 961 bp, Heterodera glycines
  unsure (1)..(961): unsure at all n locations
ctgcgcgagtgttcagccgtttatttttgtgtcccccccaactaatcgatatcaacggaaattatcgatttgtgaacgcaacaatttttaaaacacgaaattatgaattgaaaaaacttaagaaaaacgatcggaataaaccccttggttctcttttgatcttcgaaaatttattagtgcgggaaataaaggactatgaaagtgtgcgaaaattttttggttttaatattttatcctttgttcacgattttatattacgaaaatttcgagatgatttttattttgggaaaactcttatttattttcggtaatgaaaagtgtcctttaaaatcgaagagagtgcgcgaataaatgcaaaacgaatagttgaaaaatattttttggaaataaatttttataaagaaaatgctttaacatgatagatgtgctaactatattatacactaattaaaagtcgaagcgaaggattattttaaaattagttgatatgaacaaaaatttaggttgcatattaaatcaaaaatgatcatcgcataggatattgccagtgggatttggatgaaaaattggtgaaactattaaaattttgcgcttccttttgtcctcccacccaaaggaaactgtctgtttttatatcgattaaatcagttgaaagcaagttaaaaaaaatttaaaaatgaaccaaatttattaaaacgagaaagttaaaaaggataaaaataaagatttcatactatttaaaatagatatggaaaggtatataaataatcttttaattttcaattttgacatttggtaaattttagaactcgaattttcaattttcatttcctatgataaggtgtgtataatatttcatanactttattaattttggactgccctctacggtaaggcgtanagaatatttctttctctatttttttcgctcacgtattttttaattactttttctaattca

SEQ ID NO: 37440 - DNA, 1650 bp, Heterodera glycines
  unsure (1)..(1650): unsure at all n locations
atgccctcaaaagtctaaatcagatgacaacggttcgccatcctttccatggccaaccgaactcttttggccagggttggcaaccacatggcttggacttggcacattttgatgcgcggaaaatccttggaaatcattttaaacaaatatttacttaaatttttttgtttgcctttgcttgggtgtccaacatgcacatccgtaactgtaatgttcaattcttgaccaattgctttgattgcttggctttcttgttcaaattgtcctttcatattttgccattttgtgtcggtgcccgcatggccagcagcagcagcggccaagtcgaacatggcacgggcaaagcccaaattgtatggacactcgtcctcataattgatctccatttttgcaatgtcttaatgagttaatttagtcaatatttttaaattaattatactctcgtaaaattcacatctctccaaaaattttctttaattattttcgaaatttgtttaattactcttcagctgtcgatcgatttcgcccacaatttgtgcttctcctccgcttgggcatccgccgcgagagaacaaatcactttttattccatccacagtatttttcgcggttgagcatactgtagatttgtccacatcagcagcagagaaagtgtcaatgtatttggacatcacagcaaccacttgctgactgcccgggcagcacgggaattctgtggaatttaaatgtaataaataattttgttaaatacctttttggaaaaataaacatttacattgaatggtttaaatatttaaaatttgacatttttttatttatttgaatttacttggcattgcatggcaacagactaaaaagaccattgagaagatggagagcagcagagaagacatggcaaaaaatatttttatttaattaatgaataaaatttgaattgatgatattttttttgtgttttttctgtgcacttaaataccccctttttctgacttaattaattgacgtggcctttagtagacaaaaacatcaaaaaatcatttttgcggaaattgctgctggttttcttataatctacgctttcacatgaattttcaaagacttaggaaatgtatgcagagaattataaatattaatattttttttaaattattatatttttcataatatttttgaacatgaaatatttcatatgtaatttctcaacaattttaaaaattcgccatttttattgcaaaaatgtatttcggccgaaaaagcaagccaaaaattttatttttttttatcaaaaaactttcttatttcttttctataaataatcaaattaaaatattgatatttagaactgagaatttaagaaatgacttttttcgtacatttctttcactttttaagaaaatgccgaaaaattgccatctgtgaaataccaattcaaatacggtatcaaaataagttatggcccaattgttttaaaatttcgaaagttttttgaaaataatttttatgattgtttaatttaattatttatgcagtttttgtcaaaattggttgcccccatcagtttttgtcttatgattttttttataatanataaacggaaaaaggatgacctaatatccctattaattgnngttgtcataactaataaattcc

SEQ ID NO: 37441 - DNA, 1383 bp, Heterodera glycines
tccaacgcagaattaaagtacaggctatagggaagctactcccgaaggattcggtctccccataaatctgggcgcatcggttcggggggactgccccgaaaacaaaaaaatcgattttttcaagtgtccgtttggggtactcaaacaattatggggagcaaaaatccaacgcagaattaaagtacaggctatagggaagctactcccgaaggattcggtctccccataaatctgggcgcatcggttcggggggactgccccgaaaacaaaaaaatcgattttttcaagtgtccgtttggggtactcaaacaattatggggagcaaaaatccaacgcagaattaaagtacaggctatagggaagctactcccgaaggattcggtctccccataaatctgggcgcgtcggttcggggggactgccccgaaaacaaaaaaatcgattttttcaagtgtctgtttggggtactcaaacaattatggggagcaaaaatccaacgcagaattaaagtacaggctatagggaagctattcccgaaggattcggtctccccataaatctgggcgcatcggttcagggggactgccccgaaaacccaaaaaaaaattttttggataaaaattatttaaatgaactgactagataatatttaaaataggttatttctcttcctttcagtatccctgcaaagtttggtgcgcttctgatcagtttctgaaaaaaaagttaagcctaaactttttggcctgtttaaaaaggaattaaaaatttttaaaaatttattcatctccctttttgatagaaaaagcatcagagtgcctaaactagcatgtaaataaaatttggtgcgtttcagagcattttctgaaaaaaatatttatgaattaattatgcaaaaaacaaataaaaacgaaagactcagattttcgaaaatttttttaaaggaattaaaaatttttaaaaattttattcatctccctttttgatagaaaaagcatcagagtgcctaaactaacatgtaaataaaatttggtgcgtttcagaaccctttctgaaaaaatatttaagaattaattttgcaaaaaataaataaaaacgaaagactcagattttcgaaaatttttttgagccagctagctcggcgctcatttcagtgtaagttagtcctttaccggggagtatccctgcaaagtttggtacgcttctgctcaattagcaaaaaatatgagtgatcgaattttcactaaaaaagttaagcctacattttttggcatatttaaaaagcaattaaaaaatttttaaaatttaataattttcctgcaccgaaggtactcactcggcctcttcgcggcctcgtggtgggccttcgcccccccccccccc

SEQ ID NO: 37442 - DNA, 966 bp, Heterodera glycines
gaataaaaatcaatctttttaaaaaaattttttgatcccatccgatccttcgggtgcttgagaggtcagggatccgctccaacacattcccaaaatcaaaatttcccatgccaaaattaggctgattttgatgtgtgttaaaggtcgggggcggctgatagttcatctgcggcattggtggttgttgcacttgaacttgggattgagggcgaccaaaattttgttgaatcgctgctgtattttgctgacccggcattcgaaccggtatgttattggctcgacgcgcaaaaacagccgaatggtgtatttgctggtggatttcaacaccatgttgcgtcaaatttggtgccgggtttgtgttcggattttgatgagcactatttagctgaccaacgatgaccctcccaatttgttcggctaacaaccctatttcattaaggttttgcgggccaaccccaacacagcggttttcattgaccggagtcgaagttcttctaatgtttggatgatcgaagaagtcatcttcattttgggaatgtccaaagacaaaatttcgaaaaatttgttgggttgggcctgccctctctcccaaattttgtgtccaatccgttcggtttcgcataaaaccttggtttgcctactcttcttcgttttcgtcaaggctggcacgttcattttgtcgcaactgtcaagtgcgctgtcattgttcgggttcaaaaggcgccgtctcatttccatcgagtccagctgctccgaattctccaaattgggatccgccaccaccacgttttggttcatcacgcctaaagttctatttggtggattctcccgaaaaaaaacatttccatctctgtcgagcaatatcccttcattttgagctcgctgtctagtcaaacgagtatgattgagtgtccgttccaagttttccatttcaaaatcgactatttgcaccccccagggacttga

SEQ ID NO: 37443 - DNA, 616 bp, Heterodera glycines
tatcagtacaaaaacaggatttgtaaatcctattacgatagctgtactcattggcacataggctagacttgagccctggaaaaaactgtaatcctgtgcgctctaatatttggttatatttagttgaggaccgggttcaggtattgcagggtcttaatgcccggctcgggttcgggtccaataggttctgaaaaaaagttggccttcaccagcagttggcacagttgtccctcttcagaatgaaatgattattccaatttttaacacgtattttagcacatattttggggtttttagcacaaatttcagcatttttagaacaaattttattacatatttcaatatcccagctctagttatggtggtcaaaataaagaatacaaaaaggcaattaaaaatttttagattttttattcatctccctttttgatagtgaaagcatctgagtgcctaaaataacttgcaaataaaatttggtgcgtttcagagcagtttctgaaaaaaatatttatgaattaattatgcaaaaaacaaataaataatgaactctcttccttaataattttcctgcaccgaaggtactcactcggccgcttcgcggctcgggtggggcctt

SEQ ID NO: 37444 - DNA, 846 bp, Heterodera glycines
aaacaaaaaaatcgattttttcaagtgtccgtttggggtactcaaacaattatgggggagcaaaaatccaacgcagaattaaagtacaggctatagggaagctattcccgaaggattcggtctccccataaatctgggcgcatcggttcggggggactgccccgaaaacaaaaaaatcgattttttcaagtgtccgtttggggtactcaaacaattatggggagcaaaaatccaacgcagaattaaagtacaggctatagggaagctattcccgaaggattcggtctccccataaatctgggcgcatcggttcggggggactgccccgaaaacaaaaataaatcgattttttcaagtgtccgtttggggtactcaaacaattatggggagcaaaaatccaacgcagaattaaagtacaggctatagtgaagctattccggaaggattcggtctccccataaatctgggcgcatcggttcagggggactgccccgaaaacccaaaaaaaaattttttggataaaaattatttaaatgaactgactagataatatttaaaataggttatttctcttcctttcagtatccctgcaaagtttggtgcgcttctgatcagtttctgaaaaaaaagttaagcctaaactttttggcctgtttaaaaaggaattaaaaatttttaaaaattttattcatctccctttttgatagaaaaagcatcagagtgcctaaactaacatgtaaataaaatttggtgcgtttcaaaacctttctgaaaaatatttaagaattaattttgcaaaaataaataaaaaacgaaagactcagattttcgaaaattttttttgag

SEQ ID NO: 37445 - DNA, 385 bp, Heterodera glycines
ttggcaattgtgaggattattggtcccacaaaaaaaagaataaaaattaaaaaaaaccatttttagggggttatttgatgcactgagcacgaatatggcatccatttcgaccaatttcaaaccaggacccgaatacgaacaaaaagtcgaaaattcaatttttggattttgcagttttattctaaaattgattaaaactagcagaaaataaatcacaggtaattttaacagcaaaaataagtcattttatgtagattcgaacatatataaagtaaaaaaaaaaaaaaaaaaaattaaattttcgactttgttcgaattctggtccggggttcgaaatggatatcttattcgtgatcagcgaccttgaaaacctcaggaaagactt

SEQ ID NO: 37446 - DNA, 1147 bp, Heterodera glycines
  unsure (1)..(1147): unsure at all n locations
ccgtgactccaaaaacnccgcaatttccttaatccgcaattgcgtccagccctgccgagcagccaactttacctggtaaaaataggcactgggagtgctctccccgacaccgttaaaatcgggcacgtcgatgaactgaaagttgtgcaggaaaccggggttggcacattggaattcgcgttgttcgaggacgtgtggcaaattgcccaaatttttataattccaattgtaaagagaggccaattcagcacgagcacgcccttgagcgtcgagctgaacggatggcacgcccaaacgaatgagacgggcgaaaagggactgctccatgttggcgaatttttggtaggcaacgttttgaacgacagggggaagctgatgatggtcgccaatctgcaagacatttgtcatctccaaacccattgtttctctaaactgaccataacccatcgcttcagccgcgaccgtccgtcctgggggtcctggagcagcagaggaatgaatgtctccacctccaaaatctgtgcagcctcctccatcaaaatattgtcgtagcgaaatccgaggtcgaccaactcgcgccgtctcagtgccgcgtgggtacaagtcatcgcgatgattttcgcttctttcacctgacaatgggttaaagcggagaagtcgttagttgtaagagttccctgccaaacaattacaagcaaataactcgcgcggtccctcccattgcgaagcaattcgaatgctctgaactcttccaacttcttgaaaatgtcttttatccgctcccatccgtccaacgcaatcgtcaaatcttcttcaaagtcacgtaactaaaagtgtgaaagattttgcgatttccttccctctatagtaaatttctctcacttcaaatttcaatgggagtaaattggattgatgtcgtcgattttcgaagaatttggaaaacggaaaatgctccgcgacaaattccttcggtaacgcattttgctggtgctgcttttgcatggtttgcacttgctccataaaatattcccatgtcttgcaaacctaaacaaattgagacaatcactcgcatatcaaattgagtcattcgcatgtgccaccctcttcactgcttccctctctccgttaagaatgcatntataatgaa

SEQ ID NO: 37447 - DNA, 1354 bp, Heterodera glycines
  unsure (1)..(1354): unsure at all n locations
ttttatttgtataatattatnagtcgtaaaataaatattgatatatatagattgtaagaaggtttctttgactttttttaaatttcctatgttgcaaaaaatttataatgtaaaactaacttatatgaccgattcaaatattctttagagattgaacatctttaaattaataaatatttatttctcaaaaaatcacttgttgaaaacaagagaccaaggaagacttaaacaaaaaaaaaattcataaacacaaaaataaaactgaaagtctgataattaattgttaagaaatagaaatatgggtcttacaaaaatcatctcgaaaaataatccaaagttccagttacggattacaattacgcacaaatcgcaaaagcccgtaatccgtaattgctgggtccaaaaaggccgtaatttctctaatccataatccgtaattggtgcagccctgctcccaaatatttatagttttgctcaaaaatttgaattattttttttattgtaagatatttttcctaaagtactttatcattttgtcgtgcattcgttcccagttgagtttattttaatttctaaactcaatcagcaactattattttagacaaattatattaagaaatgcaattaatttttctaatttttcaaattaacactaatccaaaattcggcaattaaatttgaactatctttatttaataataaataataataatgcttttcgtttatataggtaataaaaatatatttaatagtcaattgctaatcgtaatattttgaaaatatctaaaaaaaataacagaattccttcatattctttttttttaaatttaacagattacaggacatgagaaagggattttttgacaactatcaatgaacttatagtataatgaataaataataattaataataaattttcaagttcaaaaaatattatatattttaaaaatcattttaaattttgaaataaataaattatatttcaaattaattatatatttttttcatattaaaaacaatgaaatagttttcgacaaaattggttattgataatatcaaattaaaaaacttagttttctattaaaagaaaactgcgaaattacgaaattaataaattaaattaattcaatagatttatataaataaattgtaaagataaagatttatctcttttatatttataagtttttaaaaaattctttttttgttctaaataaattaatattaccaaattttgcaattttattaatatttcttaaaacaaggcctaaaaataataaagaagtgcgaagaattttgaaaatttttccataaataacaaaaaaaagttaaaaagtccaaaacgctaaaaat

SEQ ID NO: 37448 - DNA, 867 bp, Heterodera glycines
tgtgtggtccacaaccaagtggctcgcggggaatgcgttggtcctaacagatccggccgtgggccgtacggagggggacagccgcgtcagcagcagaaccgcattaccgggatgggccccctgtgacccgaacccttggaatcatgaaggccaaaggtggtagatgatgagaccttaatttatcgcatatttatttgacattttatttgctattgcttagttataaatggactaaattgaatgctgtgtcttctggactctgtgagtatctttaaaatgtccaaaatcgaaaaacaatttctccaatgttcgttgtttgcccccccccccccctccctccccgtttttgattgtccaccgtttccccctcaaatggtcgccgccctttctctgctgactccgccccctcccatttcctttcgtttctttgtgaaatggcgacgaactccaaaacagcagaacaaatccgtcggtcctttttctctccgccctttctctgacaaaattcggccctctgaacgccctcggcgctttcgttctgtccgactcagtcgcgggcagtgatccgagcgaacgattttgagtcggtccaccgatcaaccgaatgatagtggggacggcgagtggccgcggcggagggacgacccccgcggcagtcccagcggtgaccaaagtgcgcacaaccgacggaggaggcgcagaggcggcaagtcttgtcgctgttcaccgagcacagaaagggcggaacagcggtggcaatggcactgcacttttggaactttctccgccgacggcgacgacactttttgggcggccaattcagtcccagcaatactgcacggaacagcagcgaccgccgctgaatgg

SEQ ID NO: 37449 - DNA, 648 bp, Heterodera glycines
tccgtctaaaccttcatttgtgtgccattcattcgtcgtttcaattgccaattgcaaaatcatttcattaaatatgaattttgtcacatttccatatcattcgcagtaaatgcaaaatgccaaggtgggtctcatatttttgcattgaatattcactaagtttggtttttcttgataacctttcataaatgcaattagcattttgtcattgacctaattcattaaaatggattagtaaaattaatttccctaaataattgctcaccgatggacttgcatttaaaattgaaattaaaaaatgcttagcaataattatataagaaattaaagagaaagaataaaccattatgtgctttcttaaataaaattaatgttccagtaaaattaaaaagcacattaattataattttcaatttatttacataaaagtcaattaaaaatatttttttattaagaaattgactaatatctataaaataattcaattatatttttaaattaaaatgaaaaaatggaaaatcacatggccttctaaaccgagcaaaaatttgattttaaataatgatcataagtagaataatccaataagccttatttatttaatataatttgtttatcatattaaataatgatgcaatatttaaaaat

SEQ ID NO: 37450 - DNA, 1715 bp, Heterodera glycines
  unsure (1)..(1715): unsure at all n locations
atacatatttgtctcccctttctctttcattcctgctctgttccaatcgcaatttagaccaccactgatctgnagtcttaaatagagatcggacatggagcatgcccgtgcacgggttttacggaccccgtaccccgtgttttttaagggctgacacagatttcacggggtcacttagttttagcctgtgacccgtgtcgtttccaaccccgtagcccgtgtatgtggaaaatgccgatctctagtctaatctataatttaagtacataattcattttccattgtttttacagtcacctcttttcaggttattatgatattaaaattgaaagctccaattctgctgtattgttttgttcaatgtttaaggtgacaatctttaaattcttaatgatcgttgttatttttttttaaattagtgctgtcaaagtggacaatgccgagcaatccgaccaaccaactggcgattcttcctccggacaattcccaatttcgtatcctccaataaaatatgaaaacgatttggcctatgtggagaaaccgagtggcaacgagcgttgtctattctacgcggaaggactttctgtcgtcgtttttgccactaaaaaaagtcaatcggcgtgggcggactatcgctctgacaccaaagaaagtccgaagtataccgcgtcaattgaatgccaaggcaatatgaatgtgggcagcagctttgagtaatttacagttattgtaattcatgaatccataattctttaattttttcagtgtctatttgaaaattgacggcaaagcggaaggagttgtgagagctgacattggaaaaaaggacgcaaaaagtgtcttcactgtcgaaggagccgaatttatgtgtgtttcttctcttgtggtggtgacgctgtcccctccttcagactcaacttcaacgtcacacaagtcggcttttggcaattggttggtgccaccgtggaaagaattgaagtgaaaggctcttcggatttcctgaacaaagtaattttgttattatttttttattttttttataatattttaacaattcagaatttgaatgtcgacaaaaaatggactttggagccttcagttgttccatccacaaacattaacggcttcaaagattacagctttgcttgtggtcagaccaacccgatagtgtgggccctaaaggactcaaatgattacgcagtcggaattacgctgaacaatgtgcaggtagaaagaaagaaagaccatcaattataaaaaaaaacttcataaatccactcctttcattacataaattcttttcaatttatcttgttttggcctgtcaaaacggttggcagaaattaaggctctattgcagttcccacgagtataaaaaaaggcacgaccataaaataagttagcaatttaatgcaccatcactttttctagaagcatctcaattaaacattattgaaatcattcactagctctaagggtactttacagcacccgtttttaccaatttcgaacccctgacccgaactcgaacaaaaataaaattagaaaatttgtatggatgatatcctcatgggcatcttgctcatgagggtattattggtacagggagcctgtcaatttgttgtccctgtacagcttatgtagtgaatggtagcgctgatctgagcccggattcgtgatcagcgacctcaaaaaccccttaaaacttattttca

SEQ ID NO: 37451 - DNA, 1110 bp, Heterodera glycines
tgtgtttcccgtctttttgtccccttttaacttgccgacttccatttttttctttcaaatttgagtcaaaaatcggcaaatttattattctcttgggatttaatgtattttcaaacggataatttctgctagggttttacgcttgcgaatttatcattttattcttctaaattacctcatttgttaggaaatttttgcaaattttagtgatttggtatgtaattatctgacaaatatccattttctcgaccagtcgtaagtcttgggcagaattgaatttatgtctgtgcctcctttaatagtaatgtttaaaattagtgttactgcatttggcggcattttataggaagacaaaggagaaatggcataaaatttttgttgattttataagcaaacattgaaagagcagcatttttgtttatttgctcagtgagtacggcaaattgaaggaatgaatgaattcttttgcggcacaaaaaaggaaacacttatctccccccccctccattttaaaataaattttttctatgtttaattcagggcttgtactctctttccaaggacgggtatactgatttacaaggacacaacgggcaaatttcacgaaaatcaaggacattaaaaaattagttagaatttattaaaatgacttgtatttctcaccagaatgattttttcaattttttttttgtttccgctgatcactttactcgcttcaccgcatgcgcactttttgcggcgcgcttttttcaagaaacttttagggtccagcggtgccgatcaggcccgtagccaggggggggggggaaccacccgaaaacacaataaaaaatcaattaaaatgtttctccatttttaaatatagccaaaaagccaatttttaggttcaaaatcgtttaacagattgtgacaagatatccgaaatttcccggaggagcctgacggcactgccggacccaaaattccataaaattttgaaaatttatccaaaaattcagaaaattgatcattagtggactaaatatgttaacaaacaataattaaatattatacattaaatcgattttcactacttgattaaatatgagaaaataaatagattttgaataa

SEQ ID NO: 37452 - DNA, 1075 bp, Heterodera glycines
ctagtctaatctactcaaaccggttcagaattcaataaaaataacattcacggtgcgaaaaatggggtttgacaagtttattggggaaaaaagactttacaaaataatacccctgggagaagggagtgggaaacatgatttcaaaattttcaattttttatagtctaatctactcaaaacggttcagaattcaataaaaataacattcacggtgcgaaaaatggggtttgacaagtttattggggaaaaaaagactttacaaaataatacccctgggagaagggagtgggaaacatgatttcaaaattttcaattttttctagtctaatctactcaaaccggttcagaattcaataaaaataacattcacggtgcgaaaaatggggtttgaaaagtttattttgaaaaaaagactttacaaaataatacccctgggagaagggagtgggaaacatgatttcaaaattttcaattttttctagtctaatctactcaaaacggttcagaattcgataaaaataacattcacggtgcgaaaaatggggtttgaaaagtttattggggaaaaaaagactttacaaaataatacccctgggagaagggagtgggaaacatgatttcaaaattttcaattttttctagtctaatctactcaaaacggttcagaattcgataaaaataacattcacggtgcgaaaaatggggtttgaaaagtttattggggaaaaaaagactttacaaaataatacccctgggagaagggagtgggaaacatgatttcaaaatttttgttgaaatatttgtcgtgctctgaaggcggggagggggggggaccaaacccctcgggggacatacaaatgaaatagataaagctcaggttgttgagatcggtgagaattgttgttgagcagagacgaagcaaatggttcagatcatcaccatttggaaagtgcaaatagggaatgtttggcgcaaaaattggacagatttgactggccaaaacatcccaaattaaactgagattatcttgctgttcgcatgaagaagactgatcgaaagtcaaattgttgccgat

SEQ ID NO: 37453 - DNA, 766 bp, Heterodera glycines
ttataaactaatggggaaatttatgattttgagagagaaagtaaaaaataaataaattacgtgcttaaattatcttattatttttgtagatggtttttaattaaattgtaaaagccttgacgaattttgaaaatttactctttgtgccggattttctgagtcaaaaaatattcattagctcaattttcattaacactgttttttggcagagttttggctctcaaatctcgccgtgctcgagttcggcagataacaagagaattttcatagtaatttagtatattaaacaattacatgtaattagtcggctttattacaatgtaattattctatgtggccagaaaatacaacgaattaacaaggaaatggctctcaaatatggccaaaaaaaggctttgacgaaaatgatgaagccaagatcgaaaattaaatccttgtgctgactgtccaaacaaggccgaccgaggtcgatccgtttctagtcgattttttaaatttatttcgattttcggggaggattatattgaggagaggcggagggagttcggggagggttatattgaggagaggcggggggagttcggggagggttatattgaggagaggcggggggagttcggggagggttatattgaggagaggcggggggagttcggggagggttatattgaggagaggcggggggagttcggggagggttatattgcggagaggcggggggagttcggggagggttatattgaggagaggtggggggagttcgggg

SEQ ID NO: 37454 - DNA, 909 bp, Heterodera glycines
attgaattggcacgcaaattcagcgaatgtttcttttgtgttgtcaaattggcaattgtgccatttagaaaaaatacaaaattgaaaatggaataatcgaaaatgaatatggccaatcttcgcgtggcatcggcacttttcgacgcggttggccaacgcaatgggcgccattggtcggggactgataaagcctttttataggattattctggcacggccgacctttggccacaatggcatcttttacatataatgaggccacaacactctcccacaaatactcaaaccgccgacagttgggccaaatttgtcgcggcgtggcgtaatccaatcggtcgaaacgggtgaaatgaaatatttgaagtaaaatttggcaccaaaaaagtaaatgccaaaaattcaaaaattaatccgttcaaacaaagcgaaaattggaaaataacgacagaatttgacaccgaaaatatattgttggatggcaaccatttgaggaggtcgaagccgccgccgaatatttgtttttctcgcgcattttctgagggatgactgtgccggggagggaattttttggccaatttgccaaacaatcccaattagcggcactttctttggccaagcgaagggagaataagcttcatcttcttcccgccgttgttttttctgccttttctattgctgttttttgtggccacattcattcgtgccactttcttaaaatgcgcaaaatgccaatgttttggcatttgttgggcccaaagtgatctttgcttaattttggtctttgtttttggtcgaattttaaatttcaaataaaaatttatttaaaaaattgtttttgaagcaaataattattttgcaatcgaatatacgggaaagttgaattttttgcgtgccgccgggctgttgggt

SEQ ID NO: 37455 - DNA, 1157 bp, Heterodera glycines
  unsure (1)..(1157): unsure at all n locations
ccgtaatttattttcagatttgaaattgaaaaacggatggcactcgtccaattgncgcaacggggaatatttttgaaattctatgcacccttttctatttaaaaagtcaaatccgggctcaaaacagaaaatgaacgcacctttttccaaatttcgaagcttttcaaattctgcctctaattttgatttggtctcttcgaactttgtcatttgtttccttaaaaaataacttttttctcaacaataaataataagaattatttaaaaggaaatattgatgaggtccataataaacccattaaaaaggtacacaaatctcttttttgtgacatgacatataaaaacaacaaaaataacaataaaaagtagaataaaaaaggaaataaacaaaataatgcaaaaactcaaattcttagggagccaacattaagccaatcattacaataaacggcgcttcgcagtttttttaaagagcggagaatccgtgaatttcaaataacccctctggcgctgttcgtcatgagtcgggaatctgatgtcccaataatggtcgggagtcttcggtaattgactgattgtgaggagaggagtccgcgaagactgcgaagaagagacggacgacttgcgactcgtctcgttctcccgtgtcaaacaaatgctcaacatggaaattccattcatttgattaattaactcaattttgacataaaattcacccgttgtccaatggtaacaaatgtttcggtttgttgtcgttggcttggaatggtctctttgttctgcagccgggatgagtgctgaagttgatttcacacctaaaaaacatacgttcactaataataatcatggaatgggtcggtcggacttcgtttccttcgccaaaatgcgactgcgcggactgtcctcccccgcctcggccattcctttggctgtgattccgtttcgttttgcctgcaaaatggaacggactgatcatttgcatcggcactctccgcgtgctcctctcacccattcacggcacacgtcccacagaaaagaggtcggcgcgtccgttttgactgcccgcggattgcagtgggagatggagcagcggaagcccgcgttgagcagggcggaccggaagacgttcattntgngcgaggggcattcatgacgac

SEQ ID NO: 37456 - DNA, 1460 bp, Heterodera glycines
  unsure (1)..(1460): unsure at all n locations
ctgctagcctccagactggggtttgctgtccttctgttcagtggcgaatggggcatttgcaggcggagtgcgctgagatgctcggagtagctgcgtgagctcggtattgaggccagcctttcggggtctggtacccggatcgggggagtgctgtttactctgggtgaattgtgcaatggtttcgggtccgtgttgactcgagctgggggtcggtggcggtcgcgtgcgacacgtaccagcaaccagttcggtccagctcgggctctcagttgtgcgttctcggtgtaaaagccggtcatctgttcgacccgtcttgaaacacggaccaaggagtttagcgtatgcgcaagtcattgggtgttcaaaacccaaaggcgcaatgaaagtgaaggcttcttacggagctgatgtgtgatccctggcactgcggtgttggggcgcaacatagtcccgtctcgatcgcatgcgatggggcggagacagagcgtatgcgctgagacccgaaagatggtgaactattcctgagcaggatgaagccagaggaaactctggtggaagtccgaagcgattctgacgtgcaaatcgatcgtctgacttgggtataggggcgaaagactaatcgaaccatctagtagctggttccctccgaagtttcccccaggatagctggagctcgttaagcagttatactcggtaaagcgaatgattagaggacttggggacgaaatgtccttaacctattctcaaactctaaatgggtatgaagccagggttgcttgactctgaacccaggcgttgaatgtttgagctccaagtgggccatttttcggtaagcagaactcggcgatgtggggatgaaccaaacgtggagttaaggtgccaaagtgcccgctcattagaccccataaaaggtgttggttgatatagacagcaggacggtggccatcggaagtcggaatccgctaaggagtgtgtaacaactcacctcgccgaatcaactagccctgaaaatggatggcgctggagcgggccacctatactccaccgtcattggcttgtacacgtgcttgtcgcgtagtctggccatgacgtgtaggagggtcgtagtggttgcgttgaaggctttgggcgtgggcccggccggagcttccaccagtgcagatcttggtggtagtagcaaatattcaagtgagatccttgaagactgaagtggagaagggttccacgtgaacagcagttgaatgtgggtcagccgatcctaaggcaccggctaacgccgtaacacactacggatgacgacttttctgtgcttgcgcagttggtccatccggttgccgaaagggaagtgngttaacattcccacgccaggctagggaaatgacggttcgcaagagctgttttgcgcggtaacgcaaatgaactcgcagacgtcgtgtggagtccgagccagagttctcttt

SEQ ID NO: 37457 - DNA, 941 bp, Heterodera glycines
accttttggctagtcagcaatcgttgcttaacttgccagatcggacgggtgcgcatgattccactgttccaagcaccccaccaaaagcaaaacgatataaccaaaatataaaggaaaaattaaaaaaaaaatttttctccatcttcctttttgatactaaagcatcagagtgctaaaattaagttgtaaataaaatttggtgagctttagagcactttctgaaaaaaatatttatgaaacaaaaaaatcgattttttcaagtgtccgtttggggtactcaaacaattatggggagcaaaaatccaacgcagaattaaagtacaggctatagggaagctactcccgaaggattcggtctccccataaatctgggcgcatcggttcggggggactgccccgaaaacaaaaaaatcgattttttcaagtgagtgtccgtttggggtactcaaacaattatggggagcaaaaatccaacgcagaattaaagtactggctatagggaagctattcccgaaggattcggtctccccataaatctgggcgcatcggttcggggggactgccccgaaaacaaaaaaaatcgattttttcaagtgtccgtttggggtactcaaacaattatggggagcaaaaatccaacgcagaattaaagtacaggctatagggaagctattcccgaaggattcggtctccccataaatctgggcgcatcggttcggggggactgccccgaaaacaaaaaaatcgattttttcaagtgtccgtttggggtactcaaacatttatggggagcaaaaatccaacgcagaattaaagtacagactatagggaagctattcccgaaggattcggtctccccataaatctgggcgcatcggttcggggggactgccccgaaaaaaaaaaatcgatttttttcagtgtccgtttgggggactcaa

SEQ ID NO: 37458 - DNA, 1566 bp, Heterodera glycines
  unsure (1)..(1566): unsure at all n locations
tatgtgtgcaataaattgtattaagactttaataagatttattagtttgaccacgaactaaattttcnccattcaataaatggcttagtctgaattgctgtgaaatttgttttcgtcaattggatttccaattctttattgaattcttcatttgtgtcatagggagtaaagtcttctaacattgttcgattgataatttcaaccaatttgggccattccaccataaatcagaattttttaattcagataaagacattcctcgggattctatatctgctggattttatttcgattttatgtaatgaaattttaggtttatgttgctgtctgtcgtattttgatttcattaattctattctttacaaatgtcggtaattcttttttgtatttaagccaactaagtacacatttcgaatcagaccacaattatatgtttggtatttcaagtttagtttctttaataatgaattttgcaattcgtgtaccgattaataaggctaaaagttccaattttggaattgttaattcttttattggggctaatcttgttttggcaaaaactaagtatatttcatttgtttcgataaatttcaaataagcaactgatgcataagctgctcctgatgcgtcggaaaaaatatgtaattcgattggaagatttattgaatttttaaaaggatagcgttttaaatgaatttcttcctcatacgcaatttcgttccaattttttatttcttcatcgctaagtttgtcatcacactcttttttggatttccatagattttgaaagaatcttttatgtgcaaaattacgggtgaaatccaccccataggatcaaaatttatggcaattaaatgaattacatttcttttagttgttcccttggctatgattggaatatttattgggattgttaattcgtcattttcgacattccattttattccaagaagcttgctcaattttggtatttcagaaccttcaattttttgtatttcgttgttagattcttcatgatttgaaataaattctcttaaattcattgatgcaattttaaaaatttctttgatccaaaaatgtttaaattttatctcgttatgatcttcacacatcattacgaaatcatccacatatgcattttcagctaattctctgcataatttttcgaatttatcttttttatcggatagattcagatcagtgtcatgtgtatttaaatttttgaaattttcatacattggttcgattttggatagatggagttcaattactgctgctaacaaaaatggtgaagcattaacaccaaatggtagtctcttaaatcttcgaatttcaatgtctttcatttcgacatctcttttagttaaattgagttcatttattgtttcttttttaatccataagtatcttgtagtatctctgtcacttgtgtctaaaccaacttgtaaaaatgctttctcgatatcgccaattagtacatattttttgagtctgaatctcatgatcattccacataaatctggcattttcttcggaccttgaaatatttcgtcatttagagaatga

SEQ ID NO: 37459 - DNA, 290 bp, Heterodera glycines
  unsure (1)..(290): unsure at all n locations
taattattaacataaatattatttntgtgcacaatcgctcattacgaatcgttgccaattttcgttctttggtcgtcgtcatccattctctttcgctgtttctcaaatgaacataaagcgcttcttcggctgcgtgaccttggcgaatatctgttaattaagagcaattaaattagaaattggcacagcaatttggtaatgtaattattatccaaagccggtaatagtaccgatggtaccccccccccccctttttcgaaaaaataaaattttttcgagaaaagattgtg

SEQ ID NO: 37460 - DNA, 959 bp, Heterodera glycines
tagattagactagaaatcattgaaaatattgaaatcatgtttcccactcctttctgccgaggggtattatttggtaaagtattttttcctcaataaacttttcataccccatttttcgcaccgtgagtgttatttttacagaattatgaaccgtttagagtagatcagactagaaaaaattgaaaatttcgaaatcatatttccctctcccttctatcaggggtattattccgtaaagtctttttatccgcaattagcttgtgctcaactacatttttctctgccaggacgttgatttttattgtaatatctgcacagtctcggagtcgaatagacttgaaaatattgaaatttttgaaatcatgatttcctcttcattcttccagtagtaaatcggagatatgagtcaaaataattgaaggattcgtgatcgggggccccaaaaaccccagagaatacatttttatgactatcacaaaaaaaattttgcaaaacaaaagggtccccccttttgaaaaaattttcaaaagtggtaacttttagactagcgccgaaaattgtattttgaaactttcgacatcgctccaatttgccgaatgccgagccggcagcaaaccaagccatattatttaaatcaaaatttacgcaatttgcattttaatttggcattaggttttcttcatatgtgaaaatcaaaaaatgcatgttgcctttttgagatttgcctgaattttgaggaattgaaaaacgcacctaaattttcaaaaattttgttggaaaaaacctaaataagataagctaagatattcatttttaactatttcaattatcgcataaatttcgacccaattcattttaaaatttgtgcctatgcttggagcggggatagttgtttttggggttggcactcttttcgggtgagttgtctgttcttcgttttcctggtcccatgttttttc

SEQ ID NO: 37461 - DNA, 1256 bp, Heterodera glycines
  unsure (1)..(1256): unsure at all n locations
aaacgaattgggcatttatttaaaaaacaaaagcgaaaattccncggagagttaacaaattaacgatgcttaatttaaatgttgacttgagtttattcattttttcatcagataaaaataaaataatgaaacgaccaaattttttgccttaaaatctctttgatctttggtcattttttcttttttctttggctgcgaatggcgggggttacggtatttgaaagtgtacggtagagtgggtacacaaattgatgagaagtgctgctttttcggcatggttttgccacaattcgcttctcctctctcttcccatttcagtaccatccccactttttcctaaatttacaaattaatttccttttgtttgtttttcattttcacatgtccgcgttcgccttccccagcagttcctcccaatttttcttctgttccgcgtttagtccccccgcgtgtttttgcagcaccgtcaaaaaggcgtcttttgtcttctgaaagtgccaaaaataagtgccgttttgaactgatcgaaggccaaacaaatggtgatcatctgaccgtccaataaatttcgtttcattacgtcaaaatatttgaggggaacgtccgcgtcgctgtaatgctctttaaaattggacattgctgagcgccacgagcgatcgtcggccaaattggagggcatttggacgaaagccttcaaatggacaaacgaaggtcaacacattgtatcggatgtgcatttccgacttgcaattcgttgatgcccaacatcacataccgctgggaccgtccgaccgcgtcagggtcaatgcccccgtaggcctcggcaacgtccgaatgcgctgagaaaagcctgaaaggcactgactgacaacctacacatgccaccgttcactcatcagtttcaataataatttgctagtttccattaattattccctaatagtaattgcccctctaagtccccccccccctttttgcccactctttgtaataatccgttgccgccggcttgccaactttcagctgttgcgcatgcttttgaagtaattcactgttcaccatttgatcaaaaattattttgctttatctatttgactgatttaatgttgcgggaaaaataataaaagaaaggaaacacaaaatggtgaataaaacggggggggggggcatcaaacaaagcggaaaaagggggcgggggaaaggggggatgagtctaattacgaagattcaaaagtgacaaaggggagggatcgtag

SEQ ID NO: 37462 - DNA, 1278 bp, Heterodera glycines
  unsure (1)..(1278): unsure at all n locations
tgggaatgacatttggcaaattacacctaaatggcaatgtccacagggcatgtgaaaaagtacaaaaggaagtggtggagggaatctgatttcgaaaattggttctgaaaattggtgctaaaagttaatgaagagaaaaaaaaattattatttttcttaattacttttcggcatcactgtagttatgtagaaattcgcatgatgaccatgtaccgtacacaagtcaatggcaactcttacaataaaaaatttacataataaagaataagcctagcttagacttttaagcctaaagcttaggccaagtctaaacaaattgtacgagttgccttagtaccagttgtcatgacaccccgtaccaagggtggagcgcggacagaaaaatcccgcggatcgtgcaaacaaaaaaatttcgcacgtcgcagtcgcgctccacccttgccccgtacaaactttttttacaccttaaaataggtctaaaattattaattttcaaacatacttaatttaatttgtctctctgtagtccaaataagatcgcaaaaaacaattattcttgctaattattcgacatgaagcgaaccaacgcatcaaacatcactccgcctcgcgcaaaacgttcaatggcacctgcacaggacctggacccaaacgctgtcgcactcgcggagcaagaacgacaacgcaccctggtcttcattggcctcccggaaagcaatgccattcgcccatcggaacgtgttcaggaagacagggaagccgccaaaaaaatcctggaccatcttgaagttgaggcccaaccaaccgccgtctttcgactcggacgtacgcgcgcttcatattcttccttgagttgttctttggtcagcgctgggcggacgaacaggcggttcaggttttgtagagaacggagtcgagcacgcttgcgcttccatcctccgagtgccatgtgttggtgtgtggttgttggcatgaccaccttgagcgggcgtggtgttgttcgctgcgggtcgtaacgtcggctctaggaaaatccgacaccggaaaatacgacacaagcagtaaatccgacattggaagaaacgaccccaaccttaaattttaaaaataatttatgttttttttaaattgaattgattgcattagacgcgttcaattgtaaatgatctgtttttttcatttcataaactcgtttgttatttttacaaaaaaattaatataatatttttaaaaaaataaatttttttttcaaaanttctgatcggggggggggggggg

SEQ ID NO: 37463 - DNA, 876 bp, Heterodera glycines
atgagccccaagaaagggattgaaaaattctctcctccatgagaaaaagctgttaaaaattttaaacatttatccgtctgctgcactttatgtaaagactcctataaatgcacacatacgtaaatgaatgaaaatccattagtggacaatacaatctaatttgggtgagaccaaatgcataaatcaaatgagaatttttccacttacaggattttttttcaataattttcatataaaataacagttttatatcatagcaattttgatttttttaaatttattaattttgccatttttgctttaagtccatgttttttcactatttttgggaattttataagaaaattgcaataaaacgaaaattacatcggctttttgaaattttcaaaaaatatactaccaaaattcgaaagtttgagtttcatggaaggaggcaaaagaatacagataattaaacttaaatttttttttaaaatctacaaatttatatgacattttatggttgtttaaaatgttttttattttaatatattttgttttttagtccacgcttaacccacatttgtcgtttttctatacatacaacgcattgcctttttgttttctgagtgtccaagaatttttaacatagcctgctattaagtatagtccttctcttcataatatactaagaaatggatataatgtaaagcctcgggtgggaattgaacccactcctccaccaaatccttgcgcaactctaccattgagctaacaatgccgtagtgcgacatatgcggaccgacatttgcggaccgacttttgcggaccgacttttgcggaccgacatttgcggaccgacttttgcggaccactatttctgggaggtactgtcaa

SEQ ID NO: 37464 - DNA, 1366 bp, Heterodera glycines
aatttttaacgaattttcccagaaaaacggagaccacttccaaaacatagtttttcgagctctatcgactggtattttttttggaaaaatttcgattttttcccggaaatagaaaaaatttttggcctcagcgggacatttgagtcctgggcccataactcgtcaggggtcggttttagacaaaaaattccttagagcaaaattgtagagctttttaagctctatcgaacggtgtgctatatgcccggaaaatttcaaaaattttcgagctaggccccctagaaattttcagaattttttttatgggccaaaatgggggtgaaaattttttttctggggtattttgaggtgctgagcacgaatatgatgtttgtttttcgtttcatgatttttggaattttttaaaaattctttattttttggcaattttttggccctcgggattttgacctaatatttgaaaattcataacaaatcgaagggttgatcaattttacaggaataaagccttaaaaatagagaaaaatcaggagaattttatggactttatttttattttacatttttatcacatttttaaaaaaagatataaaaataaaagtgattttgggattcgggaccaaaggggggagcacatgatttttgagtggaaaattttttcgacaaaaatcttccaaaaacatgtctttaggggttatttgggccgctgatcacgaatacgtgatcagattttacttttgacatcgtttagacctcagaatccctgtgtgattggggattctgaggcatcatttttgggggggggggggcgaagttcgagtccggacggtgtaaattattttctttgtattttagatttatttttcaatgcttttagttaattaaaagataagatgtaaattttaaatttttgtaataaataatttcagtattattttttatctgtaaaaaataatatcatttgcaatttcttaaatatgcaaggcattcgatttttgattctgtaataagacccttttccctagtaatataattttaaaccatgttgaacctcttcttatcacttttgtatctcatcttggtcgtagtagtccctcttataatcgctcttgtaacttttataaactaataaataaataatttttatgataaatggactacatctcgatattccattcctttccaaaccaaccacaagcacttcgaacccaagggcacagccgggtggaggggtaccgataggcgccgtcgaggggaaaattagaaatagtggccctattccttaaaagattcacaccaaaaattgccaattttatacctttttagattaaaaatttaaaatacatagaaagaattgcgtgataaa

SEQ ID NO: 37465 - DNA, 791 bp, Heterodera glycines
ttttgttgtccttccatttcccgctgcgttctgtcgggaagtgcccggtttctccgactcgcgcaaaaacacatttttggcatctgctaaaattaaaaaaatactatcaagttaaaattaacttttaatccaaacatacccccgccaattttgaaaaatgccgtcgttgttggctttatgtcggtaatcatcggcttcttcatgccaacggaaaatgcgattttcgtgtcatcgttgcgaatcaattcctgcggctctttggcgacttcgtctccgtcctccgtgccctgcttctccttggctctaaaggggaaggcttttcatacgaattttcggcatttaaatgcctttggtcaaccaatccatcccccgccttccgcttgcctttcaatttgtctctgcaattgttcatgcattcgttcctcgtcgtccttttcctgtttggcgcgctgctgcaacttttgacgacgtaactcctcctcctggtcaatgtattgaatgtgccaacctcaaaaatttgctaaaaagtgaaaaaactaatcccatccgccacacctttctcattctcgtcaattttacatttgccggacttgcccaaatacatcacaaagccggtcaaagtgtgccacaccgtcgagttcatgtgcacatgacctttgtctttaatctgggggggggggggtaaggcgtgaagcaattatcaagtatgaccattaaactcacatattcctggtaaacttcgttggcacggatgcgttttgaaccaaaagtgtgacgaagaatctatcaaa

SEQ ID NO: 37466 - DNA, 935 bp, Heterodera glycines
gggctgcgcccctcccataggcacgggtttgtgcgcgaaacacccgctcggaacccgctcgctttcggggtcttatactacttctattctaatcattttgtctttgaatattgtagtactgttgactctaaattaattacttcattcagcttttttaattccaattgattcagttttcttttcccattttgttctattattatttactctacttttcaattcaatttcgagttatatgtttaaattaagctcatttacagcttatttcaaaagaataaaatattaaaccttttcctttataccctattcccatgtcttctattgcttcgactttcaagcaacaactaatcttttcttttcatccctttattgtcatgatttaatagtttgtgtttgaaataaataataaatacaattgccttttgcaattttatttttgtgatttcaagaattattctttatttattgtatttttaaaaaaatttattcaaacgaaacggaggaaggattgaataagcaacagttttttaaggggtggcattgaaattagcaaagacttttctgtttagagaggaaattggaataattttatgcaaaatcgtaaaaaaatatataaatggaaaattaaacaaatttaaataaaaatgtaattaaaagagaatttaaaatgacaaatttatgtaaaattttgtacacaaaaaggcgacgaaagagagggggtgggataaagcaagcgcaaaaaagcgaggagattggaggtaacttaattagagtttagcggtaccaaccgaaaactgtaaaaaatatgacaattattttgtgttttggcagtgattttttaaaaagctaaattcagtcgttgacttttttttaattgtgtaccaaatttcggtgacgcattctaattgaggcaacacaaatttttataagctgtt

SEQ ID NO: 37467 - DNA, 1010 bp, Heterodera glycines
ttccactgttccaagcaccccaccaaaagcaaaacgatataaccaaaatataaggaaaaattttttaaaaaattttttctccatcttcctttttgatactaaagcatcagagtgctaaaattaagttgtaaataaaatttggtgcgctttagagcactttctgaaaaaaatatttatgaaacaaaaaaatcgattttttcaagtgtccgtttggggtactcaaacatttatggggagcaaaaatccaacgcagaattaaagtacaggctatagggaagctactcccgaaggattcggtctccccataaatctgggcgcatcggttcggggggactgccccgaaaacaaaaaaatcgattttttcaagtgtccgtttggggtactcaaacaattatggggagcaaaaatccaacgcagaattaaagtacaggctatagggaagctattcccgaaggattcggtctccccataaatctgggcgcatcggttcggggggactgccccgaaaacaaaaataaatcgattttttcaagtgtccgtttggggtactcaaacaattatggggagcaaaaatccaacgcagaattaaagtacaggctatagggaagctattccggaaggattcggtctccccataaatctgggcgcatcggttcggggggactgccccgaaaacaaaaaaatcgattttttcaagtgtccgtttggggtactcaaacaattatggggagcaaaaatccaacgcagaattaaagtacaggctatagggaagctattccggaaggattcggtctccccataaatctgggcgcatcggttcggggggactgccccgaaaaacaaaaaaaatcgattttttcaagtgtccgtttggggtactcaaacaattatgggggagcaaaaaaatccaacgcagaattaaagtacaggctatagggaagctatttcccggaaggattcgggctccccataaatctgggcgcattcggttcggggggactgccccgaaa

SEQ ID NO: 37468 - DNA, 1742 bp, Heterodera glycines
aaatcttgattgttttgctcaaatttataattgattgaattttgaaaaccagagggtccctcctccctttgttttaatgaaattaaaaatttctcactttgctactggcgctaacatttgagtcaccaaaaatctgtttaaacgggcccgctgaggtgccactcttcaacatggagggtgccgtggtgggctcgttcatatcaccggtcacaactgtgtttttttaaaaattcatttgactcacttatatttatttgttggtacataaaaaaagaagaaattctgtcttaaataatgtcaatgtcttcattaaaaaatttatgagaaaaaacggaaaaattgaaatgacaaaacaaatgaattaataaaaattattttacttttatttgcactttatttttaaaattatccatttatagcatccatgatatttttggcatgatttctgcggcattaatcactccgcaatttaatgagccggaaattttcctaaaacgggcattttcatgttttaatgatttaattcaattaattaatttttaattttcgtccccttattaattaaactcgcactgctcacttgaaaatttgcttggtcgattatttacttcgaaaatatctcacccccctcctcccgaagtgacaaaattttcgctggcggcataattcgtcattaagtaatttgaaaaaataaaagaaacttaaatttaataagttttgatcaaattttttttataattccgtaattctcttcaaacttgttcatttttggtttatttggcctatcgaattttgaaaattattattttatataaatttcattgaatatttaaatttatttgggtctttttgatcaaaatttttttgtttataatggcgccgtatatttcatgcctttaaattgtgtgaaatttgttatatattcatattgcattatattataaatgtttgtgtgctcctcgtgttaataaatgccttaaatgggccggccctaagctgttggttggcctccaatccaatcacaaaatgctttttgattttaatgttttgtatttttttaaaacgtttttcacattaattaaaatttatatattttgtgaaaattaatcaaggtttgttaacaggttctcagaaaattaccaatttttgtgacttatgaaaaaaaagatataaatgattggaatcggcggtgccgataggcgtcactgggaattttgaattttaatgagttttgcaaataaaatttgactcaacgattaaaaaacagggaaaaatcaataaatagcaaaattaaaattaaatgggccaaattccgatttttaagctttgtcttttaaaataaaagacatacgatcctgattttaggtacaataaatttatagaaatttatttttatttatttttaaattttttgattcttttccatgttttgtgaccttttctctgttttttcaatttaacaccgtctcccattcgtattcgaccggcaaaaattcccaacgcaaaggatcaccgtaatgctttaccgtaggagcctaaattattcagtgttaaaaatcgtattttagaaatgggtttcacttcaccttacgattcattcattccctaataattttcaattctttaaaagtctatcgcttttcgcattttggttagtcactatgataaattattactgatagtgattattagagctatgagtgtatacactaaaaccccctcaaatatgcccctaaaaattt

SEQ ID NO: 37469 - DNA, 1222 bp, Heterodera glycines
aggcaaaaaaaattaaataaataatgctaacttcataaaaacaaaattaaggaacaaataattaaagcttggatagaatatgatccttgtacaggaggatttggctctattacagtgtttacgcgtccaattaatacaaattatttaattatcagccagggtttcccagggccctagtccggtagtccgggccctgtattttttttggaaaatgtaaaatggtccggagtcctgttaaaataggactttttgatccggaatcctgtccgggtccgattcataaatccgggccctgttccgggttttttttcaaaattccaggctctacaaaaagacaaataaaataaaataaaacttgctttcagtgaatttgattttaattagatatattattttgttgttgattttaatttttgtttaagggccaaaagttcgagcggcccaaaacggcgatttcggaaatggacgaaacggccgaaggcaccgccaacacggcacattgagcaacaaccattgagcagcgaatcaaaagatggagcaattcttttttacgcatttaacaaatttagaagaattttgcgataaatttaaataaacgaaaaatttattaatttttaaattaattttcttttttttgctttgatcattttggaaatcgataaagtcaaaaacgttttaaattattgcttggaagcacaaataaccgagacttttctcgagtttttactctcgaaaatcactggcaattcatccatttaaatctttttagctcccatcaaaaatttccttcgaatactcattttaatttaagatttttcgatcgcccaaaattccttcaggagtgatcactctgatcagatgtcatcgtttgactcactctttccgtgtcaatcgtttggccattcgttcttcggctgacagttggcccttttccgtcgtttcacatttatttgtcattgtgttgcaaaacaaaaaaaaatgcttgggagtcgaactttgagctttaacttcacattggcctggccaatttgacacattttgccaaattaaataataaaataattaattttaattaatttaattaccgattttcaaatgtcaattaaattttcttacgtccgcttaatgcgatcacttcgttaaagcgattaaattgctgctcaatgtcaataaattgcacagatttgcaccccaacagaaagcaaacacagaaaaaggcaaa

SEQ ID NO: 37470 - DNA, 1091 bp, Heterodera glycines
  unsure (1)..(1091): unsure at all n locations
gggcactcgttttccacccacgaaaatttatttaaatcaaacaatgatagaacttttcaaaaaaatncgtcggaatttataagaaactaaaaactttcctcgtgattatgtaaaatttatgataaattattaattttttcaaaaaatttctccgaaaatgacaaaattttcaacaaaaaaaaattcaggcgggaatagtcataaacgattgtttaggtggtcgctgtgttccaagaagccaatttggacccggcctatttgttcagtcagttggacccgggcgctcgcaagcagaacattgccaggtcgaaaccacaaaaccaacttcaaattagtcaaccgctcagggttttggttttcaggtttcgaaacggcgaatgctttctgttggttgtcactgacattgctgcgcgtggcgtcgacattcccttgttggactttgccgtcaatttccatttcccacccaaagcaaaactctttgtgcacagagtcggtaagtttaccaggcaaataattttcatcaaaaatgtaaacggtccattaaggccgagttgcccgcgcgggaaagacgggcacttccgtttcattagtgtcgcccgatgaaatgccatatttggtcgatttgttccttttcctcggccgtccattgcaatttgtcccctccgataagattggcagcaacattttcaattcctggaacaaaaacagttggaaattaacgacaaatcaagaattacatctattgcttcagctgattccgtgttaattggggcctttcccgacacaatggcacatttggagacggaatttttgcgttccattgagcagaattccattgaaattgtacgattcacttacccattaattttggtttttcactttggcactttaagatggatttgcagcgtaaagccgaaaatgcaatggccaagtatcagcggactcggcaacaaccatctgctgagtctgtgcgtagagtgaaggccgagttcagacacatttcgccgggcccacacccattttttgnggaccccgttctgtttccggatttggcattggaacaacgtacggttgacccaactgccatttct

SEQ ID NO: 37471 - DNA, 946 bp, Heterodera glycines
  unsure (1)..(946): unsure at all n locations
agacttatacaaaattgtctgataaatttatttntgttaaacaacatctgatctccgcaataataattcaaatttctataatttatttattttattccaaatattccggcggtgttcggttttgtgggaattaacgaaattttgtttgatctttttggaaatttttttcgctttttttgggtgtattttctgaaattttttcaggtcgattcttaggggtgtatttttaatttttattgagtttttattaaagaattttccgaaaagcctgaaaaaggagccaaaaatggcgaaatcggcacaaaaataggcattttcgcagttttgtcgtccatttttctttttttttcatttttaagacatcttattttttgtgaaaaatttgctaaacattagtcagccaattattttttcccgaaaatttaacctaggtagttcagcttcatatcagcaccaaaaaatcccgaatcaaaagtagaatgaatgtgataaggttaaaagtgagtttaaacaaatttaaaaactatttcaaaatgcatttaaaagctaaaatattatttggttgaaaaattagtcaccataaaaatgttcaaatttttaccattttcccttgaaacttggttaaattttgatgattgtaaaaaatcactattttctgccatatttcaagagaaaatggtcaaaaaattgattatttttaggtgatcaattttcaccaagtatagctttttatgtacaagtcgtatccccaccattacaaaagcaatttgatagtagtaaattttgtgctctatataatcgtgactagacattccgacagtaaaatacacaaaagataagaaaatgacgtcgccgaaggcgaccgattgtgccataatccacaggatggcattcgtgtgcgaaaaattcagaaaagctctatattcacaatatacagccgtcgcta

SEQ ID NO: 37472 - DNA, 1519 bp, Heterodera glycines
tgagtccctttcaacccaaacgattctctccctcccccccccacagattctccttccgcttgccttccaagaatatgacataaaaacaacggaaggaaaaagtctgccccttacattttcggaagttgaaattttgcttggacaaattggtgaagaaaaaaatgcgggaaatgggaaagaatttcaagtcgaattatcttccctggaagcgattacagaagcctttcctaaactcgcttcacaacttttaacctaattgactaacgccaataccacaagcaaaatatttggtcctcgtatttgtttagcaacacttttattggtttgtataaaataatacaattttatgttaaatgattgaagtatcaccatgacaaactcgttaagagaaattaactaacagaaagagaatacacgtaagtgttgtaataaattgagagatttgcaattaagtgaagcgaattggaatgaaatccgaccatcggattgcctcttatttgttagttagttatttgttgttgtaaacttctccatcccaacattgcccttcataattgtatcatcgaatttcacatttccccgactttgtcccacgttttccgtggctctgtcagcgctttgttttgtttttgcattaaaactctccgaatcagccgatgatgggccttcgattccagaagagttgtgagaatctttggatggacagaaagacgaaggagaaacacttgacgaagtggtcgaatgatggcttaggtaaaaattggccgaactctgaagctgatcaccgccatcaattagttcgttctggaattttggaccatatttttgcttacgaattgttagattcgcacctccgatgcgcattttttacggccacaaaatcttcggggttttcccttttgtcctgtgaacgcactttggcgagaccgaagcatcggatccgttaatttcttaaaactgactcgttttacttcgtcgaaattacggtcaccttgtctttatcttcgcgtttcttctcacattcgttcgcattgacatcaattgaagtggaccgttttgtatgttcgacagaacgatccaatgaaattgcctttgacaacggtcgaattggacaaacggaaggatttcgaatggtcgcggcgaggtcagcccaaacgggtgaacctgtgaagatgcaaatcaataaaatcaaatgagtcaagaacgtacgattgagtaggctcgagctggacaccgtcctttcgcctgatggcgaaatgtaagcatttaaatcggcagatcgacggcgactcgtccgtaatgcatgcatcgaaggcggcggactcttcagcagcatttgggagctgattcgagacaaacacacttcgcttgagagtccgttgaccttcagtgctactcgcttattacacaaagcgcgcgggccgttagcaagcgaatcgagttgaatttgaatgcgcgtgttcctcgggtgaacgacttggtctgtgtaggtcaccagtgactgtcacagtgacgggca

SEQ ID NO: 37473 - DNA, 1222 bp, Heterodera glycines
  unsure (1)..(1222): unsure at all n locations
tgatatatcatcgctaccacatcaatcattttgttgctcaaatggtctgtgtgccgatgccaatgccacngatgaatgatgagaggccaagcacgggaggagaagaggaagaagaggaagagcagtctccaatccccaacagacggaccacaagaaattggcggggggggggggggggggggagacgcaacggcncatataaaagaagcgccacagtgccccggcaaagggtcaagagtctcgagccaaaatggggcctgagttgtgctgtgaccccgcatttagggaattcattgaatttatgagtgccttttggttgacacaaaaaatggtagatattattaaaaatcaatttcttccgaccaataagagcgctccattaaaactcattattgaaataaaattcaatgctatagctacagaaaattttttacgatcattagcatacaagaaaaacacttctaatcagtaaactcctttcatttggaattttattgcatctattctccaattttttgcacctaatcatcctcattatcttatttaagtcatccattttcccactttagcagttaaaaatcccagcaggccttaagccaaattttgtccaacacccaaaatgaatgtaccaaatcattaccgctaattaaaaaagtgtccataaaggcccagcagccaatttgtttccattcatccgtcccattcatttcttctttttccagtgatgatggttcgtgtcttctccatcatcatcgtcacttcctctgctgtttactcttctgtctgtcttcttctgtccactgttttggtcaccaaaagctgatcagccagccgaccgtcgtccgctccccgccccaactaagccaaaaatgggaggaaattggggggagatgggcccctaatgcgattgcgcactgctcgcgccgcactgttttaagcactataattggggnttcttccacccccctttccctcacaaaatccagcaccccccccccctaaaaagcgctatttgtccatctgtcacaatgcttttgttgagaacagaatgtgatgatcagcaggtaaaagggtgatgatgaagagaactaaaagtgatgggagagaaagaagaaaagaagccaatgggaaaacggatgaaatacagacgaattaatttaacacaaaaaggagactaaatccaaattgataattacatatattttgaattataccaaatttt

SEQ ID NO: 37474 - DNA, 1307 bp, Heterodera glycines
  unsure (1)..(1307): unsure at all n locations
tttgggctgatattactgattcttcgacttattcacacaaaaattctcagaaatagggtcacaaattaaagtgtctaacgctatgtaccatgcatgttacaaattaacaagtggttaagaaaaaaccattcttctcaagttttcgttaattatacacatttttttcgtgtgcatttggcgacggttttatgtttgaccaatttgaaataattattatttaggcactgaacatcgccgaaatggccgaatcgaacatgaacgcatgccccgcattcggagtgtgtcccacatgccaatggcattgcccttgcagtaagtcaaattcataatttttttttttttcccccttcgatttttcgctgaaattcgatctctatttttttttcaattcacttcaaatatcgtttattcacatactcattttcaattccgaattaagtatccaaagttactgtattattatagcagcatttccatatgaactttgctcattacagtcacttaatgttgatgatttctaagccgcggccgatattatcgcgatgggaaaatggggcgtaaaaaaatttattacaacccgcataaagcattccgtctctccagccacaaatcattttcatttccaagctctttctaatcgcaaaacaatttcccagctactacttctactgcacacagccaaaaaactttcatacataagtatccgcgcagcctaaattgcacgcttcctttcccgtattactcaccactgcgcaaatctatctcattcccactgattagtcgtaagactataagaaaagtttttggtttttttttttttgagtgctcatttaactcattcaactaattaatctaagccaaatagtagaagtctaatacactgaaattatgtcatttgtgaactatcctctggatagaatggaagaccaagtaactattgcaattgttgaaagaaatttattccaaaatataagcgctcctccaaattctaatgccccaatctcacttattgataaggttcaccaaggtgtaatacgtcttgaggatgccaccaaccgcagtttaagggtaattaataggagggcgactcanaatactgatgccattaaccaaacaacagctgatatgaatgcaaacatggacacaattacgactaggttagatcaattggttgantaagtggatacacttgaatggtcagacaccaaatgatacaggacatcactacaagggaattgcaccatggtaaggcgaactgtcttcgaacccgaagaggacgaagaaatttctctatgtctcactactat

SEQ ID NO: 37475 - DNA, 1160 bp, Heterodera glycines
attttcacgtggcctcggcaaatttgggcggggattatcagagtccctaaataagcgaacgaattaataagaacagattccgaaaattgccgctggaattcgtcgctaagttaaattaccattaattctaaaaatgcaaaatcattgtccaaatctccggtagccttttccacgtttatcccccccccctcccttactttcccacaaacacatacgtatgtacaatgctgctccagcaatccttgtggccattctttttccgactaattaccattaatggatgccactttaccctccccccccctccgctcgtcaatctttcccccgctttggtctttcttcggcgccaattccatgcgtatttatttatttatttatttgtccacgccgtctcaaccttttggtgagctttgtttggccataattgagttagtccaatattcgcatccccgcctttgttcataggaatgaatgaacgaatgagtgaattgaattgaatgagtggcattcggccaaatgcccccccccccaatttctccgtctttcccttcacaaataattcatttcggtcgcgcctttcgtccggtcaaaaaatgccgccggcacccaatgccaaagtgtgaattgccggagttgtttatccgtttagcattcatttactttgtctaatccctcctctcattgactctctctcttccggtacggtcagcagttccatctaaattctgaattcttttgagtgcttttttgatcccatttttgtttttgtcttttaagacaaattttgggctcgtccttggtattttaagaatttttttgtcgcttttcccttagcttttcgttttctggccaaatgttctgctttttgttctttccaatgccatcgtttccttttcccctcaaattacactctttcgcccaatcctccaaagtttgtgcaacaaaatgtttaagttccttttgctctgccattaatagcttcatttccatttgcaaagcagcagaaaggcatcagtcattgctcagcaacttttcaaattgagcttttccttctcgcaattcgttcatccgatgagaagaaacgaatgaacgaatagaagcgaaggggggggaggaggagaagtcggaaatttactctcattttgacaccgttttaaaat

SEQ ID NO: 37476 - DNA, 993 bp, Heterodera glycines
ccgaattgaaatgcgcttcttttcttcccatggatcacatcgttcggtcagtgaaggaaaagcacagaacgatcacttaaaaaccggctcagagtgatgactagccgagaatgcatcgtggaagtgaaggtgagtgagcagcgtattgctaaacaatccgttaacattggcactcacttcattaattgcctcattagcaatcatccactttcttttaacaattcttttccattcattccactaattgcgtcattatcgcttaatttgtcgttcctttgcctaacctttctaattcgttcgctttatatttgatcatcctttctcttcttcgcaggtcgcctacctgcagtttctgctgcactgttacatcgacacggacatcgaactgaaggacgccagcaacggcgagtatttggacgccattttggaggatgccatcgcggatatgggcaaactgagcacgcggctgcgccagatggactaccagccgaagtttgggccggagatcgtcgcgttggagcggtacgtctgtcagacggtgacggaagtgttggtgcgcgtgtttgagcccgcctcttacggtcactcggcacacattgacattcgcgtgggtcatttggacaatggcacaccgaaaagaggcgcatttgcccatttagcagcagcaaaaacgcttttcgaccataatgcagcggctgagcgagttgcagaacggcgtgctgagggggcgacgccactcgaactgctccaagaactggtaccgtattgtggaatgtgcgaaaagactgacgaaatacggtaaggtcaaaagccaaaaagcaaagcctaacataaaaagttgtgaatgccaattgaaaattcagccaacgaatgcggcattttatcggccatgaacactttgggcgtcccacaaacccccggcgttccttcgaactcattcagtggcttccgcgcgatgactccgcgtcagcggtggcaatcggccgcgttctc

SEQ ID NO: 37477 - DNA, 636 bp, Heterodera glycines
ctcctcacatacacttttttttgccccactaaatttttccattttcgggaattttcattttttgttactaattgtaagtgtctataaaagggaaggcattggaaaatttgctctcatttgcattcgtctgtatattcatcaatttatatttgcccattgcgtcaaagcatcgttctgctgctccttcagctacaaaatatcacagcaaacggaagaagtcgtcacacgtggtggcatcatggagaagatcgtctacttcaagctgatgcaaattgtgctcactttcgcattcatttggcaactcatgtcacttcacgaattctgcggcacttttgccgacccaaaagtcaattcatttaccaaatttcactaatgatacataatgatgtgcttttttcaggcctgcatccatgacatctctgtgggccattgcaaacgctttgcgttcatcggaaaggactcaaaaagcggtgaattcggcgttgtgtttgaccatcacaaatggcacgaccaactgtcgatgagcagcaccaatggccgatcattcgaagaacagcaacaccaattcatggacgaattggccacgaaattgccacccgctggacgcctttgcattccgataacggtgaactagca

SEQ ID NO: 37478 - DNA, 960 bp, Heterodera glycines
aagaggaagaggcggcggaaggctcggaaagctggaaaggaagggaaaatgagaaaaaatattgccattttgtaggcaaaaaaaaaatgtcggggaaacggacggtcatccggggaaataggagaaatccgtcggaaaagatttacaccaaattctcaacaaaaaaatagcatggacaaatgtcactgggaatcggaaccaaaaaaaacttggaaaaataggggaattttgctcgggcggtgtctgtcacccgaacccttcaatttcttcaaaaaaaggattcagaaacaacgaattccgttgtttcaaagataatctgtaacaaatcctctcaaattacccaatcccaccataatgtcggcacatccaactgcgtgcggtccgttggcgagcagcggcaacacattgccaactggcggtggtggcggtggagaagtcgtgccattcggaggagttggcggtggagaagtcgtgccattcggaggagttggcggtggagaagtcgtgccattcaacggtggtgacggcgatggcgtcgttttggacggcaataatcccataacaaatattgatatgaaaaatttaaacggaataaattattttcgataaaaatggcacaacaaacacctctctatcagcagaatttgggttttttggtttgggaggagaagtccacgaaacggtggacccaaccaatttttgtcaaagtcgaccaaattaaacattcttggtatcattggatagcccttaagattctattttacgttgcaaaattccaaagaatttgatcatgttgaaaaaaagtgacaaaaacatttttgtttacaatttttagtcatcattttttttgaaaaatgaaatgttggttgtaggtaaaaaagcttaagagctattgaatgatataacaaggtaataatttgatctacttttacaaaagttaatgattagggctccaatttt

SEQ ID NO: 37479 - DNA, 1393 bp, Heterodera glycines
  unsure (1)..(1393): unsure at all n locations
aaataaagatcggcgagggttcgcatatcgacgcaggatgcactacgtcctccccccctgtcgttatagaaattttaagaaaaaattgaaaaaattttatagagatttttcaaaaatttgatgatgctttttcaaaaacatcgctttaaaattttaatttttttttcttgaattttaaaaaaattttcaatttttttcgaaaagtttcaattttgcaattaaaaaatattccggaggaaatgaactgctccggcccaacgataatgattgtttagctttaacaaatttttcaaaaaattcattgcttaatatttctttttttacaaggccaccgatttttgcaagaacattaaaaaggcaattattatcttaaaatttggcacccatttaaaaaaaattttttttttttttgcattaattaatttttaaaatttttcaatttttcttttactatatgatttttaaaattttttagcttctttttttttgttgttgcaaaatcttggcattcataaatttcagcaagagacggatgacagcgacagtgccagcgactggagcatggtgccgaactcgtccgcgggcgcttcgtcggcagacgacgcggcggctgcggttgtgccaccgccaccaccaccctcaacgacgtcggtgtcgccaacccaaccgcaacaccaccacaaccatcaccataccgcgccatgtgtcgctcctcctgccgcttcctcctcctcctcctcctattacaagtcaaagcggcaccaccactgtgccggccgacgaggcgttgcggcggcggcgccacgcgcgaccgcgacaccagcggcaacaacccaatttgatcagcaacaacaacagcgtgcggcctatgtggcgttggaacaacagtaccaccagttgaacccgttgctgaacgctggtgggtggcataatttgggggcaactaattaattgcctaattacacaatttttactaattcttaattgacagccgcccaacaatttgcggtggacacgtcgcgggccgcgtgggcaaacgcagcagccggttggtgtgccaaaattggatttttttttaaatacacaccatcccaaaaaaaaacgagaaatcaccaataattagaagagatacacctcttatatcggcgtactattttctttttctctgctaacagagaaaaccagattttcttatttccaaataactttttgttttttcataactttttttttccgacgcattaaaaatgcattaaatttgtttagcgaaagcttttccgttccagtaactttcaaataatacaaaatcatccnantttgttgaaaaaaccttcaaaaacagtcattttttaataaaaatagtatgtcatggagcgggctcgaccctccgaaa

SEQ ID NO: 37480 - DNA, 1022 bp, Heterodera glycines
caagtcctgctggcggcccgatggcaataattcttaatggagaattccatcgtcgcataagcagcatgcaagcaggcacgacccagattcctggcttcggtcagttgtacattctggacccagtcgaagccatggagcaacgacgaaaaaatcccacattcacgggtgaaaaaattacgaacgaagaagagtttgtgcagggtcatcagcttagtgatgagacccttgaagttttggaacaaatgatccaagaaaatcacccagcagcatctgcttataagcaggctcgtgaacagctccaagagttgttaaaacaacaaaggactgaagagcttcggttcttcagaatgactttgttggatgagcgctctgctccgggtgctatgaaagacccgaagttgcatccccaccagataatcaccccctcaacgggtgaagggatgttcgcgattcatgcggatctcaacggtgccccggcaccaaaagggatatgggtggaaaacaagcaagggcagctgaacgaaattgctcctctcagtccatggactgatagcttaacctatccattgattaagcctaagggcgacgatggatataaaattggcattccatatgccaaacccgcacaaagaaagcggaaaagcgacatgtctgatgatatgtttgacaatcaagcaatgtcagatgatgacatttgcgataccgagtcaattgcatcgtctgggtctgaagcatcgatgcagtcagtgaccagtcgctatgacaaatcaaaaagatttgtctccctgcgcgattattgcaaatatcatctcgcaataagggatgaaaatttggagtggcaataccatcacattctttcatgtggcggtggtcttggacagcgctgggtcttagaccaagcgtccaaaatgactggcaaattgccacttttttgcgccgtccagacatggacaggcgcgtaagtacaccaaaaaatttgctgcagtacttggtgaacaatacacaagcagcagctcggcaaa

SEQ ID NO: 37481 - DNA, 1440 bp, Heterodera glycines
  unsure (1)..(1440): unsure at all n locations
aacggcggatggccggcttggtgatgccttggatgttgtcacggagcacctgagaaatgagaaattcgaaacaactgaatgattggtatatttatttttgcattttttgggaaaattcaaccacttttaaccttttgttgaaaaagaatttccaaaattttagaggaattttattgttaaaaaaaatgaactcactttacgatggcgcttcgcgcctccctttccaagtccttttcctccctttccgcgtccggacattttagctgattggggatgagtgaagcgaattcaaatgagcaaaagaagaagagtgaggaagagaatgaccgtgggcgctatttatgctaagaaaaatggcggctaaattgttgaggcgcgcggagactcctttcgtgccaaaaaaaaaatccatttaaaattggacgccgttttactctctcactcacactctctcacgtccatttttctctgctcccaccggggatttgcattgtctgtcaatgggatgggcgttccctccactttagcgacataaaaggggctcactgtgccccattcgccactttcattagaaagcaaacgaatcgattcaccagctctcttcggcaaaaccttcgcctctccacatttcgacgacaaaatgcctccaaaaccatccggcaaaggagcgaagaaggcggttaagtcgaccaaggcggtgcgcacgggagacaaaaagcggagaaaggcccgcaaggagtcttactcggtaggtttttctgaattttttagggttttctgttttagttttccaatggcttaacaaaatgaaattataaatttaacccggctttccaggtgtacatctagctgtgctcaagcaggtccaccgggacaccggcatttcctccaaagcgatgtccatcatgaactcgtaaggcccaatttggcgtttttccgtcccaagattctcaattttcccatttttaaggtttgtcaatgacgtgttcgagcgcattgcggcggaagcctcgcgattggcccactacaacaagcggtccaccatctcatcgcgcgaaattcagacggccgtccgaatgattctgcccggcgagttggccaagcatgccgtgtccgaggggaccaaggcggtgacgaagtacacctcgtcaaaatgagcaggagatgatgaaagcggtggtgatcggacggaaaaaactatcccaaacggccctctttagggccacaatcactcaaatggacgcgaatgacactttttttcctgttttgtatttgaacgcaaataaattgactttacgcttcagtaaatttgggatttttggctaattaatgtgtgttanatggttataaattactttgcttttggattcactaattntttccgcctacactaatttttttgggattaaaagccaaccggttcagtaaattttcgcgagg

SEQ ID NO: 37482 - DNA, 1683 bp, Heterodera glycines
ccccccccccccccccccccccctcggatgttggattacggcgcggcctttactccggctctccgtcgctggatttgtatgacgggcgcgtattggctcccacgagcggaccatcgttgtgaccatcaactacaggtttaggcagagtatggtattgtagttcgagagtctccgtgttgaggagggctcgactcgagaaaaatctcgagttttcctttcgtctcgactctcggtctcgggttgcggggtcgagtctcgtcaattctttggtcaagaattgccaaaaactgatccagacgcccaaaaaagttttttgaacgccaataaatcactgtttaccggtcaatttcaaaaaaattggttacggtaaaaataggaaaaattttcaaagaaaactgtattcaggctaggtgcgtttggcttcctttatttgggcgacggaagcgccgcgccgggcaacatgggactgctggaccaacagttggcactgcgctggatcaacgacaacatcgcacagtttggtggcaacccgaacaaagtcacacttttcggtaaggttttttttggcattgtgccgcatgagaaaaattactatttttttttacaaaaatatgaaaatttgagcgattctatgccaaatttgaagttcaatgactaaggtcggaaatttatgtaaatattttgttgaaaacactccaaatttccaaaaaaaaaaacgttattttcccgtcaccaatgatcagcagctgatcattagggatcgaatttcaagtttttgtggttggaatttcaaaaaatatatgctttttattactctattaaaatagcattcaaaataaatttatatatatatatatatatatatatatatatatctactagcttatagaattatggaaaattttactccaaagcgtttgaaaatatttattattaaattctattcctaaactgaaattttaaaaagaaaacttggaaatatggagatttttcgggcattataatcacactttaaataaatacagtaggaaaaggaatactgtaaacatgggaagatttccgtatattaaatgcacacgaacaatatacagtaggaaattaattatttataaaacgatacagtaggaaaataaatactgtatataaacaggggaaagtgccggcggcgcgtcagcggcggcgcatttgttcgcgccggacagccaccgcctattccgctcgttgatcgccaaaagcggtgccatcgtgaacaactgggccacaaagccgaaggtggccatccgcgacatttcaatgcgactcgcgcaccggctgaactgctcgatgtcgacgatggtcgactggaaacggcgccggaggcaccggcaccgaccgcgacgacaacggcacgacaggcggcgcagaagcggaccgtcgccggacaacaacagcgatgacgaggagggcaccgttgcggtggctaatcaagtgatcgcctgcatgagccgtgtgcctgctcagatcatccaggtaggaaagttttttcggaaccccgctgggttaatccaaagatcccgtaagttccgaaaaaatccatctgtttgccaaccaggatccagcaaaatcctgctcgggatcccgtttttcgtgggtttcgtggtgcataggacgaggcacatttgagtagggacccaatatattttt

SEQ ID NO: 37483 - DNA, 951 bp, Heterodera glycines
atatttaaaatttttataattgatttttctttcccaaagaaaatttatgtttatttactttttatatttttaatttttataattttaattttattatactattatttttttaatttatttatttcattcttagtactcccggcttctcaaaaatcccgctcgacgcgcacatgcgtcatccatgctgcgcggcgcaccgggaacgccttcccgtgttccggcgcgttgccgtggccgtggcccccttgataagatgttcttcttctctggtagtcaaattttttgtaaaattttgcaaaaatttttcatatattaaaacatactctaactatttattttttaattttactaaatatattgtttttttgtgcaatttattctcatttttaattgtatatatttctcaaaacttttttgttcgttgtatagtttaattttttctcgatgtttaggaagacagatattatgcattatgcagtgaatgtactggactagaaattctcttataattcttcacttacgaaatattattcttttcaattcatttttttaaaatacttttaaataaatttcgtattggcactttttataatttcgtgtttcgtagtgttaatatatttttaaaatatttttggtttgggacttgtgatatgcataaacatttcaaagatagaaatacatactaatgtttagaatggttaataaataaataagaaattcgttgtcatccatttagaaacaacaattatttcttacaataaattactgactagtttttaatttatttttataaaaataaatatctttttaaaatcatgtccatttttaaagatcattatttatttgctagcaaaacaaataatgatttttttctgatgaaatttacaaaatttatttaacaattggggttttggtacgtatgtaggaatattataaaattattttattttt

SEQ ID NO: 37484 - DNA, 1228 bp, Heterodera glycines
aaaaggggacaaaggggcctgagtcagtggggtactggccaaaggcaacggaaacaaacaagggccaaagaggcgacaaaaatggcctggcaatggctaaacacaggcaaaataatgggatgggcggtccacagtgtccgggtgattggtggtgggtgggtaattctgattggtgggccaaccggtggttgggcgacagtgccgggtgagcaacgggcaacagatggacgggcaacggcgagggtagggcacaatcggaccgtgggggaggggggagcagggccaagaacgccaagccaattccggattttatcagtgcaagtcaccaaaatgcctgtggggatttatgggaagagagaaatggtgggcaaagcccacggattagcaattcatatttatgcgaaaaatgggaccattgggataatccccaaccaaaaaatatgtaaaaaatttgttttgcgtagaataggacaaaattccaaattaacttaaacaagcactgaatttgttggactgccgccaccaaataaactcaaatcaaaagcaaagtcaaagaccaccaattttataagagaaaatcataatatcggagatcaaaaccacaaaattaaaattaacaacgaacagccaaaacaaaagaaaaatagggagggaacaatttaatcaacaaaaaaaatgcggaattgcggactgggatcccgcaaaatcccgcgcgggatcccgtcccgcgccggtctctaaccttaatcacatcacctgtcttctgtgtacaaagagagagtgcacttggcattctcacaggcggcacgaacacgaaaaagcgcttcagggctccagctgagcatgtacccgtgctgacgcatgaattccgcaacgaaatgatcgaccgtaaatgccaaatttaattaagatcttcgttggtgacagttgtcacgccaacattggacgcaccgaagtcgaagatgagcacattgagtcattttgaaaattgttaatggctgggaaaagaaaacaaattcaaaatttaattattggctcattaaaattagtgatggatggtaaatttatgcggtgatcgtaaaaatccaacaaaaacagtaatccgcaaactaaaaattctttaaaaaatgcaagaatccattcaattttttggcaccattttgtgcttgactaccgtactcaatctctaccgtattcaatcgaagccgctgttggggcactgaaatga

SEQ ID NO: 37485 - DNA, 1216 bp, Heterodera glycines
gacaaattatcgccagtgccaaagttggaattcacttttatgggtgtgcattttgttgttgattttgttgttttgtcacttccgtccattccaaaattgaattttggggcgcagaatctccgaccaattttaaaagttttggagaataaattacaaaatttgatctatgagactaatttgattgaagaatatgatccgaaaaagagagcacatttgaaatggaagcttgaagaagagttatttttagacggtaattaaaaactaattaaaatttactaaggacgatcgacaggaattaaattaaaataatcaaaacgattagaaaaaatacgaacaatattaatttattaattatttaaaaaaatattggtcgaagaaaagaaattaaatttttgttttatttttaaaatataaaatatttaataaactttatattacacttttacaattgaataatattttttattatttgaaactgtaaaacatagaaaaaatagagattatgaaatttaagttcttcatcggattcgtctgtgtaaaattattctaaatgagaatgaaatattaatgacagcacattaaaatgtgtcttttttaaaatatttttgcaacttcatttaaacattcaaaatggaatagtgacaaatttataaaaaaattttgtctaataaataaaattataatttgaaaaaaagatttaattttaagacaccgatgaagacaaagtgcaacgaattttgaaccaaattgacaaaatgaataatgaagatgcatcgaaaaaatatcatgaattgaacaatgtttccaatgaaacaaaaagaatgaatcaaataaaagttgaaagtaatcgaaagacaattgaaaaaatgcgagcaaatttgaacgttttacggagtaataataattaaaaaatgaaaatattatttaaaaaattatttaaaattttagggcactcttacgaactaaaaattctcgaatttttgttacctaaagaagaattatcccgattaaatcatcttcttgatgaaactgtgatgattggaggaacactgacaaaattcagagcagtttatgctattttggaattatgggcaaaaagtaagtattaattaattaattaatttggttattaaaaaatattaaaaatttagaaaaacatatttttaacaaaaatattgggcattttaatgcgcaagtgatttgcattatgctgaca

SEQ ID NO: 37486 - DNA, 958 bp, Heterodera glycines
  unsure (1)..(958): unsure at all n locations
ttaaattttcatttttttagcttttttcgaaaaatttttgtcttttttcggcaggcactgcctctgacaatgttttttatttattagaaaaaataaattgattttttttcttttgnatttattttaattatatttcattcttaaattttttaataaacattttcaaactttcaccttattaatttaaggcgaattttgccttttntaataaattctcttgtgaaaaggcaaaaaaataggctcttttaaatatgcctatttaaattactttcattgctttcctttgcttacgaccataccacgttgaaagcacgccatcccgtccgtctggcaagttaagcaacgttgggccttcttagtacttggaacggagacgtcctgggaatcgaaggtgttgtaagcttttttcctttttcacttgtaaatttatttaaattttcaattttttttagctttttttcgaaaatttttttgtctttttttcggcaggcactgcctctgacaatgttttttatttatttagaaaaataaatttttttttcttgttgatttattttaattatatttcatccttaaattttttaataaacattttcaaactttcaccttattaatttaaggcgaattttgccttttttaataaattctcttgtgaaaaggcaaaaaaataggctcttttaaatatgcctatttaaattactttaattgctttcctttgcttacgaccataccacgttgaaagcacgccatcccgtccttctggcaagttaagcaacgttgggccttcttagtacttggaacggagacgtcctgggaatcgaaggtgttgtaagctttttttccttttttcacttgtaaatttatttaaattttcaatttttttagctttttttcgaaaaattttttgtctttttttcggcaggcactgcctctgacaatgttttttatttatttagaa

SEQ ID NO: 37487 - DNA, 1243 bp, Heterodera glycines
  unsure (1)..(1243): unsure at all n locations
ggggaaaattaagatgatactgatgattagcgttctgtttcgatttggcgcntagtgcgatattatttctcatgtttcttggaaagtactcacgaagtatttcgattntgntaaataaaccatcagctgatataaagaaaagcattcttgtctgtccttttccaattatattgccatttcggcatcggtctaacaaagctcgcatggctttgggaaattcctcaggaattaattttcgttgtctaaagaaatgcgctagtgtcgggcattttgacattaaaatgccattaaggcaccgttgtagcaatgatggacgtggtccttggaaattcctcaggaattaatccctgaatttcttctattttcttatcactcacaaatcactggggaaaattaagatgattctgatgattagcgttcttgttcgattttggcgctagtgcgatatttattctcatggttcttggaaagtactcaggaagtatttcgatttttgtaaataaaccatcagctgatataaagaaaagcattgttgtctgtccttttccaattatattgccatttcggcatcggtctaacaaagctgcgcatggctttgggaaattcctcaggaattaattttcgttgtctaaagaaatgcgctagtgtcgggcattttgacattaaaatgccattaaggcaccgttgtagcaatgatgcacgtggtccttggaaattcctcaggaattaatccctgaatttcttctattttcttatcactcacaaatcactggggaaaattaagatgattctgatgattagcgttcttgttcgattttggcgctagtgcgatatttattctcatggttcttggaaagtactcaggaagtatttcgatttttgtaaataaaccatcagctgatataaagaaaagcattgttgtctgtccttttccaattatattgccatttcggcatcggtctaacaaagctgcgcatggctttgggaaattcctcaggaattaattttcgttgtctaaagaaatgtactagtgtcgggcattttgacattaaaatgccattaaggcaccgttgtagcaatgatgcacgtggtccttggaaattcctcaggaattaatccctgaatttcttctattttcttatcactcacaaatcactgnngggaaaattaagatgattctgatgatttagcgtcttgttcgattttggcgctagtgcgatatttattctcatgngtcttggaa

SEQ ID NO: 37488 - DNA, 987 bp, Heterodera glycines
  unsure (1)..(987): unsure at all n locations
gtttttatctgttggacgattcagtcctaaagacatctggccatttcagtcccgggtctgtaactcttcagggatggttgccgcaaaaaaattccttcggattcttccaatacagaccgagagctaccgattggtatatatttcgaccattttcggcttgggccatatgatcaatatttactaaatattttccttaatataaatattttcctaatttccatttccttttacatcccttatataagcccgatcatttttttatgtcagattttttgaaaaaaataataaatatcagctggaagacgaacaaatatacctctttggacttttgtcaatcgccaaagaatttattttatttgcaaatatttaaatattattaaataaataggcattttaactaaaacttaaggttatttattcctagcataaataacatttctaattcttcgtttattcaatattaaatgaacttatttgcttatttatagcgagtcgcaacccgactccgccgaatgctgccgtattgttgttcattcgcagcgagatgataaaacaaaaaaaattaaatccaaattatattttattattaaaaaaacaattttttgcaaaaaaaaattaaaaacaatgaatctatacagttatacataaataaaattaaatatttgaatgtgagatgatgaccgggactagtcttctttattaatttttctcatataatagtaatattcattcatttttgtatattacgaaatgatgactcaaagaaatcattaataaaaataataattcaaactaaatttcgaaataatttaattcaaaaaaaagaaaaaattaagcaaaaagaatattcaaaaaaattaaataataaaattgttttttatttagttttcgaatattanagagaaaattgagtaaaaaagacattaactaatatttaatttataaaatatctattttattaaaagttaattattttagtaacattga

SEQ ID NO: 37489 - DNA, 911 bp, Heterodera glycines
tagctgaagataaatccatattcacaatgttagggatagggtatctacagatgaaaaccttagcctcctcccgaggaggttaatttctaaagattcgagtattattttgataagtccaaataaattttggagtatgtttaaaatttaaaattttttattgaaacttcaaaacctttaatgataatatttttattttttatttttaaataactgatttagagaacacttaatattgtataattttttttgtagtcaaactatttatttaaaccaagtctttgcccttttagttttctttataaaaaacactttaatttccttatttttgatgctaaataaaagacaattattaacaattattattatggttgggaattttaggcataaaaccacgaaataggcacctaaaaaggcagacaaaatcgaaaataaattggttgttttggtttttaaatgtcaaaatgacgagtagttatcaaacctaaatttttttatgtgatttgttttttgtttggcccaaatcaacgctattgaaaatatctggtacgattttttaaaattaatttccctgttgataatatatgaaaaggtttaatttttccaaccttttccgggctcggcaaattcaaaatccggtttgaccggcttgggagaggacgagcccggaaatcggttgatttgaaaatgtcggtggtctctcgtaaaacaattaaaaccacactttagactaattgctttaacgataagcaaatcatttggttttaaccctttaacttttttagataatgccaaattatttgttgatcagtcaaaatcaaacataaacaatttgtatccttgcgtaaagtttggtttgtcctggtgacaaatcacgccaaatttcggtgacaaatttaaatcaaaattaagac

SEQ ID NO: 37490 - DNA, 912 bp, Heterodera glycines
cctcccccccttccccctccctcttccctccccgtccatttgccctctccccttttttctctcatttttcgtttttttttctttcccgccaaactaaaaacttttcacttggtgtggttaatctttccgctgaattttgggcgttgtgcagcagaacaaatctttggcctgctgcgctcgctccgctgataaatattctccgaccgtcggacacgcaacctttaaaattgttttttgtcctttttatcaaattttcttccttcggtgctttttcactgtgtgcaaatgtcggcggattacgccaaaagagtgattgaaaatgagcaattgaaaaatgatttgacaaacggacgaacggacggacagcagaggaataagccaaaacgccaacaaaaagaaaatggaaatggaaatgtgatcaaacatcactttggtgggagtttaaaattttgaaataccccaaaatttattgggttttgtttgaatttcaatttcccaaaatttcgtcaattaattggtaagcataaaatttaattatccctctgctgcttctgtttactcagtccatcagtgacttcctttcccttttccaacttcattcattatgaaagtcaaaaattaatttttaatcctccctcaaattgcgccccttttgtcagaaataaacggagaatacgcaattgacccattggtcttggggcaatttccccctaaatatgtccaaggctccaacaacacttacccccacaactcaatgtccaatgaaaaaagttgagagcttgaaaagaagcgagaaataatgaacacgattttaaaaaccggaaaatttacctgcctttctgagcttttccgcgtggcgataatctctttaccgcactcggattctctttgggtgagaaaaacgttcctcac

SEQ ID NO: 37491 - DNA, 846 bp, Heterodera glycines
  unsure (1)..(846): unsure at all n locations
ctggacaaaaatccaggaaaatccatgtccaggaaacatccaggttgccgaaaaatggcctggacctggacctggatccaggaaaaacccaggcctggatccaggtccaggtcgatctctagttttgaaattatctttttatatgaattataataatttgtcaatttaaaacattataattttttattttttcttaatcatttcattttgcttattgattatccatcctttatttaaaatttataattgtatgaatataatcttttctttacattctaatattctattaaatttttttcttcgttctcattgtttgctatgatcatgcttttttctctctttttttttttttgcgttgcccaattccccccccnncccccacccattttcatttttcattttattaatatgccttttttaataatactttttttttgcccttttgcattttcttaaatttattttcattttaggctaaagaaaaaaaatgaatttttatattatattttttcttgtgattttttccacctttttttgtcagctgctgattgtaggagcaacaggtaattctgaagtttgaaggtgatttttgaaataggtatttaaatctaattaaaatcacggcattgaaaaatgcctttttctttgctgcacataaaatttgcatggcattaattgttaaaagtcagggcttgcaattaattaaaaaaaagaacccaaaatttggattggagtcaaaaataatgaaggattcctataaataaagagatttgttagccatgcacgtagccagaaaaaagttcacgaggggagagcttttttttgctcttccgagccaaaaatttt

SEQ ID NO: 37492 - DNA, 1018 bp, Heterodera glycines
  unsure (1)..(1018): unsure at all n locations
ggtccaaaagtgggtgtaactccgctggangatgcgttagaaaagaaagaaaaatatgttcggacagcttttgaagagctgcattgaatggctgcagtcgccgctgctgtacgcccacccgttgccgagttagggtcgagagcggcatgaaaaaagacaaaaaggaggaaaatgaaacaaattcgcggctttgccctcgcgttggagaaagcaatgcgcagaataactggggagacttagggttagcgcatcaattatttttttcagaatgtgatcggggtacaaaaatacgggtccaaaagtgggtgtaactccgcttggagatgcgttagaaaagaaagaaaaatatgttcggacagcttttgaagagctgcattgaatgctgcagtcgccgctgctgtacgcccacccgttgctgagttagggtcgagagcggcatgaaaaaagacaaaaaggaggaaaatgaaacaaattcgcggctttgccatcgcgttggagaaagcaatgcgcagaataactggggagacttagggttagcgcatcaattatttttttcagaatgtgatcggggtacaaaaatacgggtccaaaagtgggtgtaactccgcttggagatgcgttagaaaagaaagaaaaatatgttcggacagcttttgaagagctgcattgaatgctgcagtcgccgctgctgtacgcccacccgttgctgagttagggtcgagagcggcatgaaaaaagacaaaaaggaggaaaatgaaacaaattcgcggctttgccctcgcgttggagaaagcaatgcgcagaataactggggagacttagggttagcgcatcaattatttttttcagaatgtgatcggggtacaaaaatacgggtccaaaagtgggtgtaactccgcttggagatgcgttagaaaagaaagaaaaatatgttcggacagcttttgaagagctgcatgnaatgctgcagtcgccgctgctgtacgcccaccccgtgctgangtagggtcgagagcgg

SEQ ID NO: 37493 - DNA, 1180 bp, Heterodera glycines
aggaggagaagaagaagaagaaggagaagcagcagaacagtagtgccgatggaaaatgcttaatggcatttaggtaaatcaatcaatcaaagggttccctttccctgatcagtgatcagttctgttgctgctgatcggttagtgcccacccctagggatgtgcgagagtctcggttctcggttcccgactcgggaaatttcccgggtttttcgcttcccggtctcggattttagtcttggaaaccgagaaatttttacactgttaaggatgaccttttcggggagtgggtcgccggtaaagggagaaaagaggaaaaattattgaaacttttaataagttttcttaacaaaactctttaaaaaacccaaaaaaaaatttacggcggcgcctatcggcgtcgcggcccacaaattcccctaagatttcaaaattggaatctaaaattacccatttttcagtgaaatccgaagaaagatacatattcaaaatttcatttttttcagggcctaaggtcgtttcttatatactgccaagttgtaggaaaataaaaaatgtaagacatatatttcgtttcttggcccaatttcaaccaattaaatttcttggtatcattcaatagctttaagtgttgtctatcagaatataattttttaattttttttcttaagtatataaaaagttatggtgccaaaatttcaaaaaaacttgagtaagaattttttgggtataacttttttaaaagtcaatgaaatttttccaaaatttttaaattgagaaatcttacgactatctaatgatattaactaagttttggctcaattgcattttatgaccgtaaattttaaatgccaataattatattcgcatgaccattgcgaaaagcatagagatgccattaggtttatcagttttctcaataaaaatcacaatagagtcttaaaatatctattaatctatttaaacaatcaaactattatatctccccgatgtatcttccaagacaaacagataatttcatatacgtctactgatttactcagtaaaattccaaaagcctatcggacggttaaaatttcaaaaaattcaacaaaaggactatctattatttcttcccgtgtatccaacgagagaagcatagaatgtcatttacggagactgatttactcattaaaattccaa

SEQ ID NO: 37494 - DNA, 1227 bp, Heterodera glycines
ttgtgtccatagtttaatcgtcagcgaatttgaaaaaataatcatttatccaaccaacagaaagttatacagaatgagtcaaaaaaccaaatttaaatccgattttggacataggcgtaaatgtctgcctgcataggcttcatggaactggttcgaaatgatgaggaatgtttaatttctggcaaatgtctcaatggcgacaaattaaaaaaaattcattgtttacattaattaaaattggttattcccatgtctttagctagtggtatttaagaatttttcaaaaaaaaaaaatcttaggaaatcttttttttaggaaaaaatccaaaattatcgattttatagcacttttttcaatacgctgaatctaagttcctttaaattttcttataaaaaactaattttttttgtttgaaaaattctatgtgttttttgccccataactttgttttttttttgtcagctaaattcccaaatttggcagcattcgatagctctctatgtttagaatcgaaaatagccggatgaacaactcgcaaaaacttaacttttttataatttaaaaaatttccagacaacttcgccagtcagcaccgccggggcgggcgacagtttgccgaatgggacaacaacaaccgccgccaccgctggcgacgtcacccccaaaaccggtggtggaggagatgaggacgagaaaatggaggaggactacgtggggggagcagctgcgggcggcgccaccgctggcagcgtgccgccgaagaagacgtccaccggtgccgccgctactggttcagcaacggccgctggtgcaaagccaacagctgccgccgagcaaaggttcaaaatttcatcactggggagcaaaaagcaggaatttgtagccgtttttcgccaaaaaattacaaattttcgccattttgtctaaaaattcaaaaataagacaatgggagtcttgacatcgccggaaaaatttggaaatttttacacattttgttaggaaaattattaaaaaattacaggattattttatttacagtagtatggtaaaatggtgtacatggcataatttttacacatatgctcaaaatgctgttggttttcatcccccgaaaaatgccaaaccccccaaaatacttattttatcggtagtttagtaaaaaattcgtccatttaaaaacatttttttgcttattatttggttgactggtgtgaaaattagtgccg

SEQ ID NO: 37495 - DNA, 880 bp, Heterodera glycines
  unsure (1)..(880): unsure at all n locations
tttaaaaaaagttattgaccntggctgagaaatcaaaaaaaccaagtttttttttgaagagttaataatttttttgaaactttactaaactttttgaaattttgcaggctaattgatggcacctagagctatcgaatgatataaaaatttaaaaatttggtttcttttaagaaaagttatatgaaaaggtcagccgtgttccgggaaatttttttttgaataatttcctgaaaaatcagtgaaacttagtttttaatttaattaaattaaatttttaatttagttggaaaaaattgaccaaatgtttgagcaaggtatagcactggaagtaattgaacgaacattaaatgttccaactgtggaattgaaatgccgttttgcacgactttgtaagaaaatagcaataggcgttataaattaaaaaaataaatttaacattttttaaatataattattagggatgggaattttatgtaacacatatttttcctggattccccaaatgctctgaatagtagaaaaaaaacacattcttttttgtgtttgcgaacaaaaatcgggacttttatttatatatttttacatatttcgagctttttagcatatttacacatttcgggctttttgtacatattttggactttttagcaatttctccataaatttttgagaatttttaaaattaatcaaaatttcttgtgaaaaattaaaaaaaaatttttttttttgaaaatgtacccctaaaaaccatttttttcaaaaaaaaagagataccaaaaatcaatttttaaaatattaaaaatatgattctaagactatttagggcatttttatggcattttgtgcctttttcaccctttacgagaattttttccaaaaa

SEQ ID NO: 37496 - DNA, 974 bp, Heterodera glycines
tcttataccactttccgcgcaagacattttaccgaaaactcggcacttctttgctctcggttggagtgatattgactaagattaaatggccaattataaagaaagataaaccaactatttgtgtgtttagctctctgttaattatgacacgttgtctttaccttagtttgggttaattgtcatgagtcatgccattttgaggccagcattcttttatgaacctccgacacctttttaaaataatatgcattcactaataattcattcttcaattcaaatattagtatatttgatgcgttctgccaaagcaatttaagaaaatgttccatttactaaagtaactggtaaacctcgaccgacttgcataaataatttcattacaattattcgtttacttgaatatcttataccactttccgcgcaagacattttaccgaaaactcggcacttctttgctctcggttggagtgatattgactaagattaaatggccaattataaagaaagataaaccaactatttgtgtgtttagctctctgttaattatgacacgttgtctttaccttagtttgggttaattgtcatgagtcatgccattttgaggccagcattcttttatgaacctccgacacctttttaaaataatatgcattcactaataattcattcttcaattcaaatattagtatatttgatgcgttctgccaaagcaatttaagaaaatgttccatttactaaagtaactggtaaacctcgaccgacttgcataaataatttcattacaattattcgtttacttgaatatcttataccactttccgcgcaagacattttaccgaaaactcggcactactttgctctcggttggagtgatattgactaagattaaatggccaattataaagaaagataaccaactatttgtgtgtttagctctctgttattatgacacgttgtctttaccttagtttggg

SEQ ID NO: 37497 - DNA, 511 bp, Heterodera glycines
tgtttattggctgttgaagcgatgccaaattggggagacggcgacgattaattgggaggacgaaaagacgaacaatttgaacattgtcaaatttaatcttgatggagatgatggagatcgcattgggtcagtgagtagcaattgttgttgttgctttaatagtaaatttaaattgcccttaatttaggcgattgtctccaccaaaggcggcggacaaaatgaacacaaaaagtcgtccaaaaaagaaaagtaaaaagaaaagtgccaagcgcagcggtaaacggcggaagaaaaagtgaatgaattatttgatcgaccccccccctccccatttcgcccgcaaagggcccaaaatgtctgaccatttcgcgtcgagggtggggccggtgtaaaagaggtggggcggggtcgccggcgaaggggaaaaagagggaaatttctgaaaaatttggctattttcttaacaaaattcattaaaaattctgaaaactttcccaccggcggcgcctat

SEQ ID NO: 37498 - DNA, 926 bp, Heterodera glycines
ttttcggttcacaaaccaccaaccataatgctcaaataacccttatcattgaatgatattttgttgtcaaaacaatacaatgcattaataaaatttagggctaaaaaatctggggacattttttatgaaaagtattggtgaaaagccgaaaatgcatattaataaaaaaatagttttttattttatttcaaaaaaaattaataacatttttgtttattccatatcattttcattgtttttttaagaaatttttttttgtttattattctataaatttcacaatggaaaatcgctgcattcattttttgacatttaattataatttcaatttttgctagtaaaatttttcatcaaaaaatactaattcattttctatatttagcatgaaaagtaaagactttttgaattgagccaatttctaacacaatttattcgtttttggcatttttcctccgctctcaatttatttgatgtgccaaaatgagtgcctttttggcattttattggttacggcacataaaacaatcctccagttgaggcaaattactaacaattattttctaaaaatacatacctattttctttgtttttctggccatattaacaataaatcatcacactcaattaccaataaagctgtcatttaattccatttttcttcaatataattaaatatttttcttcataactcatacttttttgcctgctttacatagttattatgtgcatatatttttttctctttttattagtaacgaatgtttatttaaatgcaactaattaggacggcaaaatgacattaattggttgacaaatttaagcatgagtcagcttcataattttgtgcggatgaagacaaaaataaaaaacgtaaaaattaatttttagtgaaaattaaaaagatctggcccaggttcttagtggtg

SEQ ID NO: 37499 - DNA, 746 bp, Heterodera glycines
ctaattgcttttgaactgtgtctgaattttttcccaacatttcagaagcgctggccagatcaacaagggttgcgccattgttggccaacagatcattggccgtctgcaggttctgccgtgctttttgtactgtcacagttagaaccgaacgaattggggcagacattttagcaattttgaaaaaaggtttgattttatgtgttcagtggccggcttgggcaaaaaagtgaacttgggaaaaattgaaattagggccaattggggtcgaaaaattaaatggggaccgattggggtcaaagaatggaaaagcaagtgccgggataaaccccagagcaccagactcttaatcgctctgtcgcccaaggaatggggaaactgctgctcacaatggagaagaccgtcggagggtcgaaacgagcagtggcgacaggaatggagcaaaggcgaggagtgcttttgctggaaaaatcactgaaggatttttcctttcgtttggaataaagaaagaaagtttttttgtttttgttttttttatgggaaattaggaaacaaggatttgttctggtttggttcgactcggataaaattcccttagggacagggaagatcctagaaaattggctttggaggccttaagagtctgatagaaccgagttagttagaaatatcaactttactaaaaaaccaaagcaaaaataaatgtgaaaaaacaaggaaaatgatcaggtgaaatgatcacacaagat

SEQ ID NO: 37500 - DNA, 876 bp, Heterodera glycines
cagaataattacgccgatactaattgttctggaatttcttttactgcgcgattgattgggaaaaatttggaaaattggctttctctttttctgctcaacagtaataggaattccaactgcattctcagaataattacgccgatactaattgttctggaatttgtttctcggcgcgtttgtttgggaaaaatttggaaaattggctatctctttttctgcacaacagtaataggaattccaaccgcattctcagaataattacgccgatactaattgttctggaatttgtttctctgcgcgtttgtttgggaaaaatttggaaaattgactatctctttttctgctcaacagtaataggaattccaaccgcattctcagaataattacgccgatactaattgttctggaatttgtttctcggcgcgtttgtttggaaaaaatttggaaaattggctatctctttttctgctcaacagtaataggaattccaaccgcattctcagaataattacgccgatactaattgttctggaatttgtttctctgcgcgtttgtttgggaaaaatttggaaaattggctatctctttttctgctcaacagtaataggaattccaaccgcattctcagaataattacgccgatactaattgttctggaatttgtttctctgcgcgtttgtttgggaaaaatttggaaaattggctatctctttttctgctcaacagtaataggaattccaactgcattctcagaataattacgccaatactaattgttctggaatttgtttctcggcgcgtttgtttgggaataaatttgaaaattggctatctctttttctgctcaacgtaataggaattccaaccgcattctca

SEQ ID NO: 37501 - DNA, 1633 bp, Heterodera glycines
  unsure (1)..(1633): unsure at all n locations
caggtctcaacaacactttccggaatatgaatacaaatgacgaacatttatgggaaaaaattttccatttatctgacaactcaacccatataaaattttggctaaatagtttgcgcaaattcaaatttaaaaaaaaacgacaatcgtgtgcactttacaacaacgtaatggcattgtgtgagcgcgcacaaatatgccaagatttgcgtgccaactcaaattccatgacaatgaatttgctgtgcccgaaaaattttcgctcaaaaatatcgtaataaaactaatttcaataaaagaaaaaagagggggcgttggcacaattggggcacaaaaaattttttttttgttttgtttgccagaaacgaatcctgtttggaatcacgcaatgtgtgtgcgcacagcgggcatgggggggggggcacacatcgccaaggtattgtggtgttaatatttaaatgggacggaattttccaatttaccccactcacattgacaaccacccgccaaacagacagattaatttaaatatttaagttaaaattaaacttaaatttttgcatttggcattttatttttcagtcactctgtccgcctaattgcctaaaagatttggtaaaaactttttggcgaatcttatgacagagaatgcggcgacccacaaccgttctcctgtataatctgtttacgtgcctgggatgcaaaaggattcgtatttcagaattccaattctaagtggtgaaatttccgatttccgatcttttttttttgcatcgatgaaaatcgaagtattttgattcgagcccaaggtacaagtcatttcaggcctgaattttcctgtgtttttgtacaggaaatccagggtcaaatatggaaaaaagccagatcaaggctaaacacgaaaaaaaacctcgatttcctggacaaaaataaattagaatgtcttatttcagctaactaatcctagtcttttagttataaaataatgattagatatatgaaaaaaaacatattatttttgtaaatcagataatagatgttcctaagcattattagaaaaacccaggcgcaggcctggatccaggcctcaaagagccaggatttttttctggacctcgctttttgtccaggaaatccaggtccaggtctaacatggaattccaggtccaggctcaggcttttttcaataagtcagtctctactaatttttttaagccattagattgaggacaaattttgattaatatacatgagaattcaacaggttcttggtccatcaatttaaataaatatttttttaactttattttttgggataaaaattcttttttgttaaaatttccaattttctgtgtttttttttacatttttatgacacatttcagcgccctggcaacggtgaatttgggaagaacatgcaatttttttttgcgttaattcatagnttatcatcataaaaancacacattttttnaacttccttcctttatctttttaattcaaaaaacttaaaaacattaaaattaattttcttttaaaattaaattaattaaaataatcaaataataacaattaaattttcttttctttttatttcataagggtagtttttaatattacaaaattttaaataacc

SEQ ID NO: 37502 - DNA, 898 bp, Heterodera glycines
gcttccgaatgatgccaaatttgtccgagtttggccgttttaaaaagtcaagaacccccttttcactcaaattttcgagttttaaaccggttcaaaattcagaatttcgaaaagatcctttaaaaaatgcgacaaaacgaaaaacgaaattaagttttattgttaagtttttggagcctcgacaattgcgtctatgtccaaaatcggattcaaactagaactttttttcttcaggacctgatagtctaaaaatcacattaagattaagaaaatacagtcttcaagtttattaggagcattaattctgctgttatggttttatttttttttgtctgagcttgtcagctgcacttacggggttgtcagaagcgggtagaagtgcggcgccgtccatttcgtcgggaaattcgtcggcaagttcgtcgggatgcggcaagtgtgcgtagatggttgaatttggaaaatcggaaggaccggggggccaccaggggaaagggccctgggcagcgccgggggcaaagaatgcctcgtaaaccaagggattctgctgggcgatcaccgccaccacttccaaatagtcgttggcaaatgcagaaacggaatgcagcactgaaaagtgggcggaagaattgggtgttaattatccaattaaggctaattaattgggtactaattcattaattaggtatcaaataactaaccaaatatttaattattggtcataattaattttgtcatttgaattttacaagcccaggcgtgggagcggatttcggaaagacaaatagattttcgggtcgaatccggccggggttttttgtaaaattccgaggtaggcttactagccgaaataaaaatcattcccggaatcgcgagaccaaaattcgtaattttttac

SEQ ID NO: 37503 - DNA, 979 bp, Heterodera glycines
  unsure (1)..(979): unsure at all n locations
tagcgattcaggcgcacantttgggcctgaattaagccattttccctttgatcggtacaaaattggccgaaaaagagatagccattttctgaggcccgaaggaaaatttgagagggctaatttatatgtaatattcgaaagtgccaagctaattagcgattcaggcgcacattggggcctgaattaagccattttccctttgatcggtacaaaattggccgaaaaagagatagccattttctgaggcccgaaggaaaatttgagagggctaatttatatgtaatattcgaaagtgcaaagctaattagcgattcaggcgcacattggggcctgaattaagccattttccctttgatcggtacaaaattggccgaaaaagagatagccattttctgaggcccgaaggaaaatttgagagggctaatttatatgtaatattcgaaagtgcaaagctaattagcgattcaggcgcacattggggcctgaattaagccattttccctttgatcggtacaaaattggccgaaaaagagatagccattttctgaggcccgaaggaaaatttgagagggctaatttatatgtaatattcgaaagtgccaagctaattagcgattcaggcgcacattggggcctgaattaagccattttccctttgatcagtacaaaattggccgaaaaagagatagccattttctgaggcccgaaggaaaatttgagagggctaatttatatgtaatattcgaaagtgccaagctaattagcgattcaggcgcacattggggcctgaattaagccattttccctttgatcggtacaaaattggccgaaaaagagatagccattttctgaggcccgaaggaaaatttgagagggctaatttatatgtaatattcgaaagtgccaagctaattagcgattcaggcgcacattggggcctgaattaagccattttcccctttgatcggtacaaaattgg

SEQ ID NO: 37504 - DNA, 1066 bp, Heterodera glycines
aaattctacggccaaaatgaccacttcaacttcggcaagaagcgcaaggaagtaccggccggtccaacacacaacattcggcccgactttgacaaggcggattggcgagacattgaaatattcaaacatgtgcgcgaatacgagcggaagacgaagggggacaaggaggtgcactggaaggaggaggaacactttgtgccgaacagaatgaaggggggcaaatgatggattggattggacggatgaatcatttgcaattcaaaggatcgatcaatcgatcaaaaaggactttggtcgaaaatgctctcaaatcagaatcttgggcttatgtaagtaaaggaaacctcctaattgatttgtatatttttgaatctgttgacagattccaaagattgcattatttttcgattaattattgtatcatagaaaattccatttgttattcattttccttatgtgtgttcaatttataggttggtatgtctccctttttatttctttacactattataattgtgatgagagtttattggaacacttaatttgatgtcatttgcataatttattcaacgaaaatgtcttttgcctatggaaagtccattcagcagaatggtggtcccaaccgtgtcacattcattctgcgaaaaggtgcaattttcttcactgggatggttattggaacagtcgttgtttttgtatgttttcaaaaaagaatttgttcttcaggtttaaacattgttgttgcttcagaaggcatttaagccaacgcgtcccttcgacgaagcggcagaacgtggaaaaagggagctgttggagaaatacacggaggagtacaacgcgttgcaggaagagctgaggcaggcggaagagcagcagcggaacggagggatgccgaagaggcggaagcgagaaaggcttagccgatgacaataataatgatcaatttgggtggaagggttgtaaatcctctgaagtaggatcacactgctaattaaacattttgaatttcacatttgtgcctaaaggaagtatgttgggtcatcagacagtagtactgttttctttt

SEQ ID NO: 37505 - DNA, 1080 bp, Heterodera glycines
  unsure (1)..(1080): unsure at all n locations
aaaagggatttgaccggcactccaataagaaaaatttggttcgcgctacagaaatggacgaacttttcacaatggaatggcccaagctatttgtaggacactcgaacacctcggcaaaattcaaattttttcaaaagtgttttgtccgattttattgagataaaatcataaattttaggcacaaattttgtccccaaatgacctggacggacttgagcgatcaattgacgatttcaaagtgtttttggcagagcaggaccggatgagtgcctttctctcaaagaaacccaaggcccatcttctactcttccactttgtgccatttgcacgacttcattggccttttggatgagcagggtgaaaaacaaattgcttaattagcacaaatttttaatattttcaaggtgatgaagcgcttcattcggtgtggcgaagactcgaacaatggtggaaatgtatgcctgacgcggaacaaattttgcaacaattggagcaccatttcgtcaacaattggctgctggacaccggaaggattgacgaattgaagcgggtttgttttttcaaaaggtttcccttttctgaattctcatctttagaattatgaagaaaggaagggcgaggatgacacggatgaagaagtggcggaagaaattgatgacgaatgccaaattgatgtaatttaacaaatttggattaaaggatgattttcaaaaaaaaagtgaagaaacaaaatgttttatcatttttgtttatttttcagaatatttatttgtcattttacaagtcttcttttgcttaaaatcaccaaaaacgtccgttaacatgcatcggattcgaacctggaaccccccttttggtgactagcacatataccactgagacaaaaattgaaatctttttggaactgggaggcaaaaactgaaacggtatgttaatgagaggaaccgttttagattttgttgaacattatgcgttttacccactcgaaggttcagtctcgaaggcatttagcctacccatttttgttccttgaaaggatccatcgtttggntttcgaccccacttgactttttcgaccct

SEQ ID NO: 37506 - DNA, 783 bp, Heterodera glycines
attctcattaattcataagtgtattaatagaatttttctatttcgcattttatgcgcattttttaacaatcgataagatagatatttaaaaatgagatgagataaaatgaatggaaattattattcaaaaaagaaaatggttttagaaatttttttatttaaaatgttaattcaaccattttttataaatttgttaacaaattttgatcaaaaatagtaaatttttattggcttttcatttactttaaaatttacgatctctatggcacttatttttttcaccttttacttcattaaatgtttttaatcaaatattttcatactttcagtttttacctttcactctagttttcttcagtaactttcactcaaacccccattcttaccagtgaatttttggtattccggtacccgtacctaccgggtcgggtaccgggtattggattttcaaaaaaccgagaccgggtccgggtattgaaaagaccgggtatccgggtctggacccggtcgggtacccggacccggccaaccctaatattaacttaataagaatttttttctccatttctataaatttttaattgttatacgtcattttataagaacacaaattatttggttaaaaaagattcgtaaagtttaaagaacaatgaaggtaaaacggaacatagagaataaaaaaatataaaatgattattatatatcatttattttttttattctttaatctcaagtttgcatatccccgttctttgttaaaattagcggaagtttctctttttt

SEQ ID NO: 37507 - DNA, 1465 bp, Heterodera glycines
  unsure (1)..(1465): unsure at all n locations
tacacggcgagtcaattttgggctccaagcgcaaataagtttattatctatttagtaatcagaacgccaaaactttgcaaaacttaaaatttattggggactttcccttgtaaaaatggaagagccgatctcgagttagaaaagaaactttcaaaaaacaaaagagaattcgatagagagggccgaaaaactagcctaggcaaaatttcaagaaaatcgcaactctggaaaaatttttacgactgggcaaagttttttctttttctctatttgggcgtactatttccttgtctctaacatataaaataacacatgaatcatttatttgccaataaactattttttaaatttttttttaactttgaaatattcttcagaattttcccttcaaaatgagcacaaaatggttttatttgatctattattaatagggctgccaaaaatatgcacgaaaagtggccaaaatatgcgcataaatatgcaaataaaattgccaaatatgcaccaaatatgcacaaaaaaacttgaaaattaggggtgcaaatttaataaaaaaatttttttttcactagtgcatttgccaatgagctacatttcctttataaaattctccttagcaaatatttgacattttttaaatcaaaaattttctcatgaaaaataaatttggggaaacaatttttgaaaaaattttccaattcttagcatgtattttaaaaaagaaaaaaaagcgacaataaatctttttatggataattattagggttgtaaattatatggactaaaaaacgcgaaatatggacattaaatatggactaaaaaagcccgaaatatggactaaaaaggccaaaaatggccaaatatggaccaaaatatggataaaaaatgccaaaatatatgttgtaaacccccaaaaatcccaaaaaaggtgtgcatatttaatatttgcttaaataaacctaaaaagtacaataaacaaccaaaaaatggggtttaaaacttaaaaatgcatattttttattgttgttcgttgtatcaaaaacacctccaagtttgccaaatttcgaaaaaattctcattaaaaaaaaagaaatgttcgcaaaaaaatgacgaaaatatttattgaaaatgccaaaatgacgacgaaaactcaaatttttcgtgttttgtggggtgtaatttttaaaaatttccaaaaagttgatctttaggggtgtatttttcgtttttttttcatttttcttgtgaaaatttccaaaaaatggccaaaatatggactaaaaacccaaaaatggcgaaatatggatttattcccgaaaacccccaaaatatggatttatatggactaaaaaccttcaccaaatcaaaaaattttaacgcagaaatgctatttttaagcccctttcttcatagcatatgcgcagaaagaatatgttaatcccatataatttacaaccctnaataa

SEQ ID NO: 37508 - DNA, 940 bp, Heterodera glycines
  unsure (1)..(940): unsure at all n locations
ttttatttacaccctctcaaaagcattcctttcggcggcttcttcagccaattaatctgcgaaaaggagcaattgggcaaaaagcaaaatggaaaggactgactaatgagcccatggaaatgttttgcaaaaggaaaccaatttaattggtgcctttttttctgcgattcaattaaaataagaacaagaaaagtcaaccaaaaatagaaatttaaaaaagaaaaaagggaattaaattttcaaaaaaaaaacactgaaaaagggaaaatgagcgcaaattattgtaaagaaagcaaagaaaggccggccaacaaaagcagcaaataactcgagatgagctgttgcattgattcttttttaatttgactgaatccgccaaaaatgaacgcattttccccttctctttttatgtccccggggaaaaattgggctgaaattttgcgccggaaggaaaggaaaggggcggcggttgtaaaagaattgtaacggacgcaaaacaaaacaaaacactgatgagaagaagagaagggaaggaaggaaatgcaacaaacttttgacgaaagaaaatgtcatcaaagccaaaggatttgcttagataagctaaagtttttttttgccattttgggagaaaaaaagcggaggatggcattggcatttaacatcaaacgcaaagcgaaaaagaaaaaaagagtgaacgacggcacttccgcccaattaaaagaaaaacaatcaaagtccaagcaaattatcatttaaattttattgtaaaaagcaattagagaaaaaaagcaaaaattaattaattattgtaattaattgcaattattatcattanacaaatgagtaanaaggngaagagaacaaaatttgagagataanagaaaaacaaagaattagagaaatgccaaaagtgaattgccaaatgaaaaacacctgcaaa

SEQ ID NO: 37509 - DNA, 1471 bp, Heterodera glycines
  unsure (1)..(1471): unsure at all n locations
tagtgatgagcaaaggagaaanaagcaaaaacagcaaaaaagaagtgaaaagagaaaaagaaaaagcacataaaaagaaatatgaaagggtagaagaaaaaaattgttatgaatatttttacggaaactagaccaaattttccaaaatttagaatcaaaatttagaagacttgcatctttttatagagaaaggaaaaaattcagggtgatgtgaaaagcacaaatgtgttgaaatggggaaaatttcctaaaaaattcttagggggtttgaaaaattttttgttgttgttgttgaattgaatgaacggacagaaagagtaaaatttgtaataactaaacgcaaaaagatgagaagtaggtaaatcataaaccccataatttgtgatttcaaaaaacgaaaaatacacccctaaaaatcgaatttttgacttcagccgcccccccccccgaagccaagggtctggctaagcccttgctgctgttgtctgatttgtaactataaatattgattgttcctattttttggtctgataccgctcgtatagagaattttaaacagccgagagaagagtgacaggacatttgaacagtagtcagttcgtcagtgaacatttgcacactaagtcatttggacagaagcggacaattgggcattacgacagcgaatggaagtttatttattgttataaattgcttagcattgaaactttattattattctttttaagattgcttacaaattagcattgaaactagatatttttgaggtcctaagaatttgaaaaaaatttcattgctaaagaaatttataataaatacggcttaaacaaactgaataccaaaaaatttggttcttgcgactattttagaccctcgatctcgattcacatttaccttgacagcagtcggctgaatcagtacagactggtttgataagtaaagttgaaagttaccacgcaaagacagatgtaattggttttttctacttttttaacttttttcaggaaaacgatttacaaaattgatgaaaaagaaagcagtggttcaagttctgggatattttttcttgttttgaaaagacgcaaaattttatcaactatttaatactgtttataatttaataccctcctcataatgattaatttaaggcaccatctccaagtccatctgccgtgaagacaagacaaaaagccgaagtggaattaaatgaatatttacgggatcaaaaaatcaaatccagggccaacccatcattatactgggaaacaaattcacaaatggccattgattggtgaagttgcactcaaaaatctttctccgcctgcaacaagttcagaaagtgagaggattttatcaacggcctgcctgatttcagatgactagagaaagagtttgttccagaaatcttgcaaaacttttgttttttcaccataacttgcttttaactggtttctcaattggatgatttttg

SEQ ID NO: 37510 - DNA, 1308 bp, Heterodera glycines
ccatgatcttcagaggtgttgaatttataaaaaatttaatacatttatcactataaaacatctaattaatttaaaaaaataataaataatttttttgaacatttaaaatatttaattttaaaataatttgtcatgcatcaatttttttaatttaaaaaactattaaaaaattatcaaaatatttacaaatctttgttaaaaaattatatttcctctattaaaaataatcaacaaaaaatacagtatgttaagccgttaaacacttataagcaagcatattaagaagtaattatgtaatctaaggatggctaaaatcggattagattgtttacaaaattttaaaaaattggtgtttataagaaaattatgagttttttaattttttgttcgaattcgattagctgttcgggattggtccgaaatttcagatcagcgatccgccaatctgaaaacccacatcaataatttttaagattcgcattaaaatttatcagaaaattattaattaattaatagttaaatattgcaatagatgtttgagtttaaaacacaaataaacactcccataaccacctgtgcatcattttttcaatgaatacaagttaattaaaaggcatttattcgtatcttaatggttcatatatttaaatcaaaaaattaacatttgaatagtttgatgaaaataaaaacactgatgattttatcataatcatagataaaggaactggtgaattatcaaatgaaataaaaaaattaatttaattaaaaaaagattaaacaaagatttttttttattgaattacaattgacatatcaaagcaaaaaattcaaaaaatatatttaataaaacgaatcaaaaaatatataaatgataaaaatctcaagttgatgaaacccctgattaatacaagaaatttcatagcccaatttaaaatgcaaatattattttaggagggaaatctattaatgttgaaaaaatacaattaatatatttatatgcgccgacaacaattgtaatcccgtcacaattttgcattttgcaatacgggcaatggtaagctcgggaattgttttaaaattttttaataaaataaaataaactttaaaagatttaaaaaccaaaacaaaataaaaagtaattaattttagaaattatttaagacaataaaaaagaatttaacatactaaggaaccaaaaaaagaaaattatactaagattacaattttaaacaatgaaatttgacaattaatattattgagatgatttatgtattgagatataactttttaatatttaagatggataaa

SEQ ID NO: 37511 - DNA, 1323 bp, Heterodera glycines
  unsure (1)..(1323): unsure at all n locations
tggtaagttttattttccgttttaagcggtgacattcgtgatgccaatttggctttggtgaagagtattcgcaaccgtgcctcatatttcgctgagcttctccacaattcgatgaaggcacttattaattttcaattgttactttatttttcattgttagggcattggcacccgcgacaccgatttggtaaggaaatggacgaacggataagcgaatgctccaaatttatacaaattatataaaatgctggctttttgcacctttcacagattcgtctcgtcgtcacccgctccgaagtcgacttggccgacattcgccaggcatatcaaaatatgtacggcacttcactggaaaatgccatcgctagcgactgctctggcgcttataaggtaaggcccatcgcgagaaaaattccggggatgggagaatccgctggacagcccctctttcaatttttgattataagagaatatgtaatgtttgttatacaataaaaagctacatttaaaaaatcgtcgtattttgacattatgcaaatgatatttatttaacccaatttataattgtaagaaagcgatttcatgaagcgaaaacattgattttccaggatggtttggtcgctattgtgaagggatattaccactgattgcttggcactgctgtgaagaactttcaaacgataaaaaagttaaaataaaatagcggttgctaattactaataatttaagtgtgtgaatatgtatcactttgtattgtaatgacccatttcgaaaataataacttgcctgccaatgtgccgcataaataaacattaattggtacttaatagtatgttattgctgttaacaataagtttctgtgcttttatgttaagtattatattggtttttaaattaatctgttggcttcaagtcgacacggattttgcaaatgctatcgagaaaaattagttaatatgaaaaagagccaaaaatgggcactctttctttattaggtaaagtgtcaaatttctggcaatccttaagaattggtgtcccgccgaaaaaaaatgttaaaaatttttcggttattttttctaggaaattcatccagatttcattgcctttttatcgatcgaaattttatttttcggaatttcctttgtatttttcggcattttcttcgctaaaattcaaaaaaaaggtaactgtacagaaaaaaatatattctgatttgttattgtgttattgttagttagggctcaaaatttgtctaattttggacataaaattaaatttttttaaatatatttttttgttttattaaaatccccnaaatgtcgg

SEQ ID NO: 37512 - DNA, 1117 bp, Heterodera glycines
  unsure (1)..(1117): unsure at all n locations
ataataaaatataattgtttgcaaatcccagttggtcccggcttttctggtccggttttgcctaattcncgtgctattttaaaggttttatgaacttaaaaattagataattttttttttctatttaggctcaatttctactttttccatcaaaatccaaatgatagaatttaaataagattttttcatttttaataaaaattattcgtactttttttcattatttatttattataattactgtttttttaagattttgaattatgattatatttttataattgtttggcacaatttcaaaatcttttaaatttattttttatttgtttaatttaaacaatttaaagaaataattgcttaaaataattgtttacaccgttttattgcacctttatactcttttacttcaatgctttattttttacattcactaatactttataatttgaatacgcacaaaaattccatattaatgatttgtatttaaaaaaatatatttttatttttattatgataaaacatttgctgttcataaatttatctcagccctcacttttcttataaattttgaaattacttgtatggaatttgtctttaatattaattattcatttttaccatgacgaattgaatttcttctgtattgtggactttccagcttcgttaaattcctttaaaattgttatattcgttaaattgtgccgaagacatattgatcaccgaggacacagtaaaggaaagtgagaaaacgaattaatagacaaataaaaaaagtccgagaaataaaagaaatcggtagacaaaattttgtagaatgaaatgtacaaaattcaaacatttcaacttaaggggggaggtgttgtgtagtgaattatcatacattcaaatttacgccaaaataatgctcatttattcaccatactgtatcgcccatttcatgcatttaaggagtggactttcttcactctttagactcagcccacatcacccatttgactctgtcctttcattcattggcccggtcaataaagccttttgacacggaaaattgtgagataaaaataaacaaaaataggaatttatagattgaagggtgctctttcttctgataccaaaa

SEQ ID NO: 37513 - DNA, 1235 bp, Heterodera glycines
  unsure (1)..(1235): unsure at all n locations
gagattaagtagctgaatnntgtgagattctctatttacanntntcatttatcacttgnnaaattctcaaaaatttcagctcatttatcatggaaatataaattgtataggcgtcgcagaaggatcgagtcgataagcgccaataattttccatttattattttggtttggccagcttgtataattcttacaatttcagctcattacccccttaaaataaactgtataagtgttgcggaagtatggagttgataaacgctaataatctccgatttacaatttacttaagcaaattaatacagatacatttggaggaaaatgagctgaaaatgtgaaaatttcacaaagatggtcgtgaaaataataagtcggagattattggcgctatcaactcaatatttccgcaacgcagttagagtttatatttagaagataattagctgaaattttgagaatttcacaaggatggtcgtgaaaataataaatcagagaatattattaacccgatccttctacaatattgctgcagtatttatttagagattaagtagctgaaattgtgagattctctatttacatttcattatcactttgaaattctcaaaatttcagctcattatcatggaaatataaattgtataggcgtcgcagaaggatcgagtcgataagcgccaataattttccatttattattttggtttggccagcttgtataattcttacaatttcagctcattacccccttaaaataaactgtataagtgttgcggaagtatggagttgataaacgctaataatctccgatttacaatttacttaagcaaattaatacagatacatttggaggaaaatgagctgaaaatgtgaaaatttcacaaagatggtcgtgaaaataataagtcggagattattggcgctatcaactcaatatttccgcaacgcagttagagtttatatttagaagataattagctgaaattttgagaatttcacaaggatggtcgtgaaaataataaatcagagaatattattaacccgatccttctacaatattgctgcagtatttatttagagattaagtagctgaaattgtgagattctctatttacatttcattatcactttgaaattctcaaaatttcagctcattatcatggaaatataaattgtataggcgtcgcagaaggatcgagtcaataagcgccaataattttccatttattattttggtttgg

SEQ ID NO: 37514 - DNA, 1034 bp, Heterodera glycines
aatgaagtaagacaccgaattgtctctcattttttctttagtttgaagaaataaaaaaaaatttgaaaattactgattacgggaaatacggcatttttgaccccgtcatgacggattatggaatccataattaagaaaatcgccgtaattacgggtttccgtaattgaaaatccagttacacccagcatgctcggtagcttaatggtagagcttcccacggattgtgtggtcgattgggttcaattcccacagaagttgccaattatttatttgcatttctgttattgtaaaggaaaaaatgggaataatcagtgaatgattttgactggtcggtggacaatttgtgttggaattgatcaccaccactttttggcattccgacacatttgattttgtcatttttatgtgcatcataataataaaataatgagaattttcattgtaaagatcacctccgccgcaaaatgtgtcgaactgtttggtgtgtgcaacaattaccgtgtcgactaccgatcgtttgacgcacagccaattctcggcttggaaccacactttcatacggtaatggagttggccattggcacggcacagttcagccactttctgctcgagatcagcaatggcgtgacccttctcgagctcaatggccaactgggattggtaaaaaataatgtaaataattttagggtgacattactcacattttcaaaaaatcttgtcacgccgtcaccaactcgcactgctcttggacaaaaacgtgccaaacttttcgggtcaaacacctaaatcttaggagaatgagtaaattgtcgtcaagactctcgagagttttatctgattttcaatttataatatcggaaaatataaatttcacttcacccaaataaaatatggcctaagaagtgaaaagataatccatttatttttgggtttcttctataaactatttttggttactgatcaaaaatcaatttttttttcattcattttaaaaataaataaataatataaaatttttaaattaaaaaaaaaa

SEQ ID NO: 37515 - DNA, 1386 bp, Heterodera glycines
  unsure (1)..(1386): unsure at all n locations
gatataataatttgaataaaaattaatttatttacnnaatgttaaaagattttactctttattataatcaaaaattttttattataatacgagataaataattatttattaattatttataaatatataataatacaaatatttaattttgcgttgaatgcaaaccatctactatgaacatcgtggagacaacaagattgaaaatattaaaggaagaattagttcacgatgtttaaaatataaaaatatattgcaaaacttaaaaaagatcactcactgatcactaacccattttagcttatcagtcagtaaacagataaataacgtacaattttatttatgccttattaataaaattgtatgaattgttaaatttttccttaatataattttaaagtaaatttatttatattaaatattgaattttctataatttgttactagacgattaatttaacaatttcaatttattttactgtttttttaaattttttcttttataattattttattattattattattattgtaagcttaatatcagctcttcatattacttgcttaaaccaaatattttcaaattttttaatcaagggtgtaggacgattctctttattatttcatttaaaatactatctcatttgcatttatataattagaatgaatcaattcataattttaaaaaacagtaataatgcttctctctttttcacttctattacacttttaaattaatttacttttattttctatttccgataatttttatatattttggaatggtatttttttaataataaacatacattcctagatattagatacaattaaagataaaaaattataattctttataaaaataaaaaatattttttgtattttcttgctctgctttagaaaaattatcatttgttttaactatttttaatcttattgtaaaattgctgttttgtattcaatccaattttttttcttatttttaggattaattcatgttcaactgcccaataaaattgctctttttttatgcgatatttaatttaaatattcgtgttatgatttgcttacattagatgttaaattaatatataataagtttattctttggcctttttattcaaaattttttaaatttataataaaatgtttttataaataattttttaaatttgaaatttattataattatcattttatttaacgattgaatgtacaaattatattcgtatagtttgaattatagttgaatttttaattttccatttctttcaataaaattttttttataanattccacattttcagtanacactacgattacagaaaaaaccgaagtttttgcgttnataattactttaatttctgtattatcanttatatacaaaa

SEQ ID NO: 37516 - DNA, 1328 bp, Heterodera glycines
aacgagataaagaaatcaaaatttgatactcttgaacaaagtttttaatattttcgtcaaaaattttctatttaataattttttgaggaacgccttttttgatgttttgagtaaaaacgaccccagaaccgatgaaacggtgcatttttccttcctaaaaaattttcaattagcaagcattttttaaaaattttccaattattgcgcagcttcgtttggaagcccatgaatttttttttgaattctgctaaataattttcattgtttgtttttgtatacaaaaaattttttaaataaaatttacactttgggccaaaatctgataaaaatctcatccgaaatttggacatttttttgtttgaaaaagagcaacttaaaaaacagatgttaaagcaaaaaaaaggtcactacttcacctttttgttgactttaattaattggcaaatgcatatcgcaaaaagaaaacttaaaaattaaagccatttaatttttggctaataataagcgtgttaactttttgtcccttctaagttcaatgggatattagggatgaatgatgaaaattttttgctattatagcttagttatgaataatttggaagcaacaaatttatctgctcgattgatctcattaaaataaattttctagatcacatcttgtcaaatgcgttttccgtcttgggcatggaaaaatgccgagatcgcttatggcgataaaaatttttaaggactgcggttaaaattgttgcaaatcaaggattatattttacataacaaaccaggactcggattgtaccaagtaactttccaagtataggcatgccaatttccaagtacataacggggaaaatttgtaaaattcaagtacacataaaaatttgaacaaaaacaaaaaaaattgaaaagggaattttccttaaatattttctattttttccggaattattttatctggagctgagcgggaccgggacctggtcgggaaatcccggtttttcaggtcccggtcccggtttttgaaaaaaaggaaaccccggtcccggttttgccagtcccggtcccggcgggactaaataagcactggtaagaatgtgggtctgggtgagaaaagagaagaaaattggtggaggagaaatttttgagaaaaaaatttaattatttatttagcatttgttcatccacaaatgtggtctagttgctaaaccttcctgaccttcaatatttgtctctcgggttcaattcctcaacggaacaaaaacttttttcatattttctttatacttatttcaattgaaatttaattaataaataaaatattccaattttta

SEQ ID NO: 37517 - DNA, 979 bp, Heterodera glycines
atacgaacaaagacgatttataatgatgatgattgatatataggtaaagtagggcgacaataagcaagaataaaagccaaaataatcaactttttccaaaaattaaatgagcttcaatattattttcattgttaacaaataaaaaaaatagaggtgatgagtgataaagggtgacgcaaattcagaccaaggaagatgtgtgaagcattactaaaaaagattataaacaattaaaagaataatattattaaaagcttatcatcattttcaaatattcggcaaagaacatttatacaaaaaattaaatacggcaccaaccgagtgcaatataatatatgaaattaaaggaaaatttattcagaaatcttgtccaaaaagttgtaaatttttaattgcgtatccctaataaaaaaaaagagtgaagccacgccacccagaaccagagacttgtgacaacagggcaacagcagttttaaatggtcaaaaaatgataaagtattactttttaataaataaaaagcaaaatacttagtaataacaataataaaaataaaaagctgatcaataatatacaaattttaatcttaaatattattgttcttaattttttaactataaattatcagaatgcataaatactagaattttgattaaatgagagaactaaaatcctacctaaaacataaaattgatcaaaaattcatcagaaagatagtaaaatattttatgcattaaaatattgattattgaataatgattatttttctttgagttaattcaagaacaaaccaataaattctcgtaaccaacatttatatgaaatataatgaatatgaaaaacaataatctaaataacatttactaaaaaaataacaaaaaactcagttcatttacgtcaaatcaactcttcgacaacatgaattacagctaagacaagttaagaatagaaaaaatactcaaagaaaattataatgaaaaa

SEQ ID NO: 37518 - DNA, 952 bp, Heterodera glycines
aatatgtaataaaatatggtgctaaaaaatgctgaaatatgtgctaaaaacccccaaaaatgccaaaatatgtgctaaaatatgtgttaaaaattgaaaaaataagtgtgtttttgcataaaaattcccaaaaatctcattctttatcatttttagcccatacaacgcaaatcaaatacatttcgaagtgtttggggtaaaattgtctttttttgataaatcatttctataaattgaaagttccagcagagaacttcgaaatccaatgacgaattaatgaattcgagatttcattagtttctacaatcgaagaaaaaattttttaatttgaaaattatgttaataattatgaaaaaagtcgatttttaggggtgtatttttcaattttcttgtatttttattgcaatttttctcaaaaatgccaaaatatgtgcaaaatatgtgccaaaccccaaaatatgtgctaacatatttttgtgccaaaacgccaaaatatgtgtttttatgtttttataagtcgctctaaatcaaaaattgttcggagataatgctatttttgggcttctctcgccataactaagccgcaaaaaaaatatgtaaaaacataaaaatccggtctctagttataactcaagtcctaggcagctctttctaaccaaaatgctaaatttattcttttttctattgattctaaatgttcaaagtgattttgtacccttataaccaaaattattagaatttgcgaattacatgatttttaatgtgttagagacatgaaaatagtacgccaaaaagagaggaaaagaaatacttttttaggttttatcttataactttttaaaacaacatttaagcgatgataaatgttgtctttttacatcattaaaatgaagagatagtacgccaaagtgagagaaattataaagaaaaagagaaacgaccaaatagtacc

SEQ ID NO: 37519 - DNA, 649 bp, Heterodera glycines
tgactgatcagacagacagcgcaagtgaaaaaggggtagctttgattgtttcgcatggaacaaacacaccacacacatttggtgataaggtgtgatttaaaaaggcagtgtttaaaaggctttttgtccaccgcttatctcccgggccaatctttcgcataataagcagtgaaactgcttttccccttgccattacctctccccctttccccaattgcttttccttgacattacctttccctccattttcccatttcccctaattgcttttccccattccctccccccccccccatttccctttggcccctccgccggtcaatcgcagggaatgtccacctgctgctgatcgccgctcttccgatcgttcttctctcatccgccaatgttcacttatccctgcccatcttccggttttctttctccgtacgtccgtttctttcaaatgcaatttaataaatttcacaattaatgcagtgattccccaatttctcttttcgtttcgaatggatatgcctgccttttatggcaattttttgcaatgatttggaacttttgctgtcgtccacccatctttttgtatttgtcgcgcactgaccattccctctccctctcccctccctcgcccctcctctgtctgttgcccctc

SEQ ID NO: 37520 - DNA, 901 bp, Heterodera glycines
  unsure (1)..(901): unsure at all n locations
aatctttggctcgtttccaaaatgtgcgatccaatatttgactgtaatgctgtctctgtttttgcaatcagtagttttaaaaatcatttttgggtattgacgcaatttggagatccacaataaatatgctgggcatagaaatcttaatctctgcgaactttacgtgttttcgaaaagggttattttattataaaattccctctactttccataatctttggttaatttttgacaaaccttattcttacaagcatttaactgtttccatttttagacctgcgaccccatttttgccaagcacagttacggacgtgaagtatgcctaaaaactttaccaatttcatggtttttcttacaataaattgaaaagattttgacattcttgctgatcagtccattccgtcggtctcttttaaatttgttcgacttttctctctgaaatttcatactcaaaaaaattcggcgcgcaatttccaaaccttgaaaaaaattttggccatgatttctgtttaatttttgccgatttctaacaaatcacttgctcaggatttgcttgcgatgatgggcagaaacacgatgaagccgccgcttgacatcaaacgctgcccattctttgtggacagtgcacagacgcccatcattctgatgccgttcacggacattgaaatggttttttaatcaatttttagcttatagtccgacaaaacaaaatcgtgcattttaataataaatttgcacaattgggttacagtttgcttttcacacctttcaactccttttttggtagacggtattctcctttctattagttctactacattgcccctaacccagtggnggattagcgggcaagttggcatttgccatttgaaccgaaaaaatttttaaagaaaaaattgaa

SEQ ID NO: 37521 - DNA, 995 bp, Heterodera glycines
  unsure (1)..(995): unsure at all n locations
gtccggagaaataaaaattaccagctatttgaaatgcagtgggaaagcacagcgagtcgcttaaatgcacaccctttgacacgtaaaatattccaaaaaaagagatagtgattttttctggattaggccggagaaataaaaattaccagctatttgaaatgcagtgggcaagcacagcgagtcgcttaaatgcacaccctttgacacgtaaaatattccaaaaaaaaagagatagtgattttttctggattaggccggagaaataaaaattaccagctatttgaaatgcagtgggcaagcacagcgagtcgcttaaatgcacaccctttgacacgtaaaatattccaaaaaaagagatagtgattttttctggattaggccggagaaataaaaattaccagctatttgaaatgcagtgggcaagcacagcgagtcgcttaaatgcacaccctttgacacgtaaaatattccaaaaaaagagatagtgattttttctggattaggccggagaaataaaaattaccagctatttgaaatgcagtgggcaagcacagcgagtcgcttaaatgcacaccctttgacacgtaaaatattccaaaaaaagagatagtgattttttctggattaggccggagaaataaaaattaccagctatttgaaatgcagtgggcaagcacagcgagtcgcttaaatgcacaccctttgacacgtaaaatattccaaaaaaagagatagtgattttttctggattaggccggagaaataaaaattaccagctatttgaaatgcagtgggcaagcacagcgagtcgcttanatgcacaccctttgacacgtaaaatattccaaaaaaagagatagtgattttttctggattaggccggagaaataaatattaccagctatttgaaatgcagtgggcaagcacagcgagtcgcttaatgcacacccttgacacgtaaatattccaaaaagagatagtgattttttctggat

SEQ ID NO: 37522 - DNA, 755 bp, Heterodera glycines
attaatttaaagtgagcaaatataaccattaaaagcatattaaaattaactttggttaattagtttttggaaaagtcaagtaaaaaagtgccaaatattatggtggtttaatttaatatttaaattaaaatgatcagacagaaaaaagaggatgtgataagtgatcagaggacccacctggaagtaatcagccaatttgagaagcatcagcacatttgtggctaaaaattggaatcatattttaaaaaaattatattttcaaccccataaaaatggaagagtattttttaggggattgaatagaataagtacagtatcatgaattacggttgggcataaaaggtccgttcagataagtgatggcctccaaaaactccatgaattggtccatgtccacgcccaattcgtccaaagtgatcattcgctgctgcttctccttcatctccacgctgagcatgcgactgatcaccggggaaacggacatcagccaatgggcggacacagcaacctgatcagaatggttatcagtgctttgaccaaaatttcttagggatctgatcaaattttatcagtgatctatcaaatctcatttttaaaatcggggcaatgcccaattttatcagtgatcatttgccttataggggatgtgagaggaatgccattttgatctttctgattttcacctgtttgtcgccaattttcaccgtcaaatcgtcgtcaggtgagctgctggatggcgccgggaagggacttaa

SEQ ID NO: 37523 - DNA, 996 bp, Heterodera glycines
  unsure (1)..(996): unsure at all n locations
gcgaagcggccgaatgtcccccaaaaaattaaaaaacgggcgcgaagcgcccatcctgaggccgcgaagcggccgaatatcccccaaaaaattaaaaacgggcgcgaagcgcccgtcctgaggctgcgaagcggccgaatgtcccccaaaaaattaaaaaacgggcgcgaagcgcccgtcttgaggctgcgatgaattgctaaattacatcactttctagcgacgcggcgaagccgcgtccctgagcgcgaagcgctttccccacagcaacagaactcaattgataatgtttttgtatgttttaaaataacaaatgagggccatatattaccaagccacgcatgcacaccatagccaactgctcaccctagttactatatatgttatattgacaaggagtttcgttgctaaaaccattttctcccggccgaaggccgggagcgccctgaaagtagtggaagggtcttacaactttttgaggagcatccgggaaaaatataggttttcaggtccaagggccaactgagtaccagggactgatttctcattttttcgtgcgtttgacggcccctaactttttttgtaaaactcgaatcaaaaagtgcccgctgtgagggcactccaccaaagtgtcctctaaatgctggtattttttaaaattttttttgagcaaacccctggcctgcaaaaaatggcaactgaagcgtgctcaaaaagtacacttcattaccaggtgaataccgcngccagggtttgatctgangcggngggtggccagcgaacttattgtagagctttggaagctcgattttttgaaattttaaaatttcgaaaatttttcaaatttttcaagttagngctaaaaaccggtttttcgggtttttgaattttatgattttttaacgattttcccgggaaaacgaagacacttccaaacatagtttttcgagctctatcgattggtaatttttttgaaaaaatttcgattttttcccg

SEQ ID NO: 37524 - DNA, 1125 bp, Heterodera glycines
  unsure (1)..(1125): unsure at all n locations
ttattcagaattagttatttttaacagtcaaattattgtaaatacattcatgcggtattttcgtctccttttacaatacagtatttaataccgtaccttcaaatttcaaacgttttctcttttctcctcttttttttgtcgttatttacagtacgaccaattggttattacacagttgccactttaattttcggacttgtcaagtaataaatggcgatatttgaaccagtatgttaattctgttccttttgtcaggaatttaataaccttttttcacttttgccagccaatatgatattaaaactgatgatttgaacaaaatctcaccctcgcttttttttaaacaatgtcactttttaatgctccccaattttaataccgtgctcgcacaaagtcaatggaaaatgaggaaatctccgcgcgctgaaattgtcgtgccaatcttctccgaatttgcttctggttccagttaattcctccgaaatgtcgtgccaatcttctccgaggctctccgatgtaatgaggctttttgggccaatggtgccttttttggaacgacttttcgactctccgttcagctgtgtctgatcagtcagtaaagtgcaaatcaattgatgatattttattttgagaactagggttagagaaatatgtgattgctttttgctaaaattgtgaaaatttaatactaaattgtacagagttaatatttaatcagtgaaaattatttaatattttcttgagtcgagagtctcgagagtggaaatcaaatggcctaggattaacgagatcccaaatgagctttcattttcgcctgagcacaaatgttttattatttgccttattactttactttgcccgtcttttactgattaattattctgttgggagaattgggaaattttcgcgatttgggcgattttcgcaacacattcctgattaattgttgtgtgatcacttttaagctggncatccgattcatttttgtcccaattctcgtgattggcgattttttctttacatttggtagtcacattcttttaatccccctttctgatccccgctatttttttccaatcgggcccctaatgatcatccccaacggcgcctggttgaagcaatgtt

SEQ ID NO: 37525 - DNA, 937 bp, Heterodera glycines
ttccaggggagtggtgggggaatacggagcattgtattaattcgttttcccttcccgcggtgggacgaaaacaaaaaaagtgaactatttttaacagaattaaagattttgttgcccatcgaagaaaaccccgcttgtccactttttaataaatatgattggaaaataatcgacaaatatggtgttttacagctaatgaatgcatatataaaagaccgtatttgtaatatttcaagaacaagcaattactctcacatcaatcaatgagagaaagggatgcaaaagaaatgatgcaatcgtatgctattatttggaattgattgattggcaatttaatgttccaataaattagacaaacaattggtatagtatttttcatattttagaagtatttttcatattttagaaattaattacattctataaaattaaatgattataaacatcttaaaacagctaaagttaaatcccactttattgtccattttttgaaaggcttccattcatttgaagcccaaatttgaggaaacggtcgtcgacttagtggtggtgatgattgtcgcaaacatattctgcaccgtcgactccaacgcgggcagtgctcgccgtccgccgcttccgcccgatttgcacagttggaagagtcgtctgacctgcgcgtccccccgggggtggtagcgcgtgttgttcaacgcctcttcagcgatgtttctgcaaaaaacggataagagagagaatggtgatttaaacgaagtttgcatattaaaacagtctttttacttactttgcctcgcttcggccaatgtcctcgcgaatttggaggagaacggtgagaaactccgcgggaatgtcgggaaacttgcgcatcatcgtcgacgcctccaaggagagtaaatgttttgtcccgcaaatccaacacttcccgcactgcggaaag

SEQ ID NO: 37526 - DNA, 1037 bp, Heterodera glycines
atgcttcactatcaaaaagggagatgaataaaaatctaaaatttttaatgcttttaaatatgcgaaaaattttaggcttaactttttttttataaactgatcagaagcgaaccagattttgcgagagcatcaaaaagacaaggaaaagcactgctatgatgctaactccagtaattctgaatttaaaattttttattaatttttaaagcttcactattttatttttttagcaaaatcaattcataaatattttttcagaaactgctctgaaacgcaccaaatgttaattaaaagttaaataaggctctctgatgctttttctatcaaaagggagatgaataaaatttttaaaaatttttaattcctttttaaacaggccaaaaagtttaggcttatattttaaaaagtttcatcgaacctagcgcactaaaatcgatataatctctccaaattttgcaggccttctccattgtaaaggactaacttaacctgaaaaaatgccaacgcttgttgtttttaaaatttttcaaaattctgactttttcattacttatttattttttgcaaaattaattcataagtattttttcagaaagtgctctgaaacgcaccaaatgttaattaaaagttaaataaggctctctgatgctttttctatcaaaagggagatgaataaatattttaaaaatttttaattcctttttaaacaggccaaaaagtttaggcttatattttaaaaagtttcatcgaacctagcgcactaaaatcgatataatctctccaaattttgcaggccttctccattgtaaaggactaacttaacctgaaaaaatgccaacgcttgttgtttttaaaatttttcgaaattctgactttttcattacttatttattattttgcaaaattaattcataaatattttttagaacgtgctctgaaacgcaccaaatgttaattaaaagttaaataaggctctctgatgctttttctatcaaaagggagatgaataaatattttaaaaatttttaattcctttt

SEQ ID NO: 37527 - DNA, 333 bp, Heterodera glycines
cgttttaatgaattttaccattttggtcttttagttggagagggctctgcgagaaaccattacgcgtgcagctgaccaactttgggtgcagcagctgcaaaactcagtgactgctcggaatggctgtgcctccgcaagtgccgaagtccgagtggcggacaaattgaacttcaaattttgcatcgaatttaggtgccgcatttaaaattgttaatgatttgttttgacattctaacatggaagcctttttaaggtccataacttattgcgaaatgccggcccatctccaggaaaatttgttccgactgatcaattctttgtgaatggatggcg

SEQ ID NO: 37528 - DNA, 1173 bp, Heterodera glycines
atcaaggcatcactaaatttaaattctcccaaaatttaaatatttcttactaagaaatttcctaagttttttatgaaaaatttctagatttgaaaaaaaattttttaattttttcgggggggggggggggggtacgacacggggggggggggaaacgacctgctccggttacggacatttagtgagtcaatgtatgattattacgtcagaagacacagcgtcgctggcaccacccgcaccgcccggaggccgctgcttcttagccacaggcattgtcaccaccatgatgtcatcatcgtcatctccaccagcactggcttcagcagtgccagcaccgccatagtcaccaaccgccgcagccgcagcgactccaacattttggtcgtccgagtccacgcccattgtgtcgggtggcagcggcaagcgccacgagccgtcacggagcagttcaatctcgtcatcgccggaagcgacggcggacagcacttgctcgaagtagctgaagaagcaagcgtattttcatggtaaatgaattaataaatacgcacgcgtcaatgatcagcttggagtagatggcattccggtcacacaccggacacttccaagttggtcgcttctccgacatcatcaggtagctgttcaggtcgaagcactgcaagtgcgtgcactcggctgctcgtgatggtattttgatgcgagtgcgcatcaactaaaatttgcgtaaaattatgatttcaatttttttaaaattttttgggggagggaggaggttaaatgccctaaaacccaagccctaattaaagaagaaaagaaacagcaattttatttttatatttcaattttctattcaccggatccatcagtgagattttcaacgagtccatttgcacgtcatcctcgtccccgttgaggcgtcggacaattatctgtttggtcttctccagcggacggcgcgcattcggattgttgagaatgcgattcagcagaatttccgagttcaatcgcctcaccaaagtcacctgtgaaagaataaagtgcaatcaaaaacgtaaccgggggctgggagatggctttaccccccaatgaaatgaaaaaaagtaattaattaatcaagcggggagaaaaacaaagagataggctacgccccggaggaggcaaagtacaagtccgagt

SEQ ID NO: 37529 - DNA, 869 bp, Heterodera glycines
ggtcatttaatttaatttataaaaaaaatatccggcacgtaaaatattgaaaattacgattttttttaggtaatttttggtcttcgcaaaatgtcggcaaaaattcgtgccgaaatgaagcgcaatgggccaaatgcaattgacttaattgagccaataaatgtgctggtcggctcatcaataaaccttcttttgtatgggaattcattggaagaggcaaataaaaaaatattattttttaaattattaaatgtaattacattaattaattgttttcaggggaatatggacaatttttgtactgtcaaggaaaatatgaaacaacttttacaactatttccatggtataattttttttccaattatttaattagatttgaaatataaaattttgcttttaggaaaacaacacagattgtctgtggcacaaatttatggttagctatttgcatttaatttttacatttttaaggcattactacaataacagaccactttttttatcgattgatttccaccccaaacctattggcttcttttggggcgagagagtgcaccgtctaacctctccagcgacgagagagtgcaccgtctaacccaccagcagacccgtgcctatgggctgctcggtcccgcctcgacacgaattggctgctcggtcccgataatatccgagatctcgacacgagatctcggctattatcggttcgagatcccggtctctgtcgtgtggtgcgcgagaatttaagcagaaaatttaaaaactgaagtggactcgaacctgggaggcgaatcctgacacgttaaccacttggccaactagtcgttggaagaaaaagattaaatgttgtatttgtgatggtgaaaag

SEQ ID NO: 37530 - DNA, 1264 bp, Heterodera glycines
  unsure (1)..(1264): unsure at all n locations
gaacgaatgggcgaaccctttcgatcgcaattaattaattatttaactgacagtttttacgtagaattttaatttcaattaaattttagaaacatttgccgtttcggtgccttttgtgcttgccgatttatctgactttccatgcgttaattccttttgtctttctctcttttttctccttttcttttgtgttttccttctcaaattatgctaattagttaattaccttccccgattttctaattgtttttaatgacttattgtttcattttgctaaatgaacgaatggatatcgcccagtttaataagcgacgaatgaatgatgggacagacaaagaaagaaagcctcgggggcaaagtgttcgctgatcagagacaattcaatcattctgagcgatcggcacactgcacgtgatcatttccggttatatgaccaaagagacaataattaaaagtgacgaattcgatttttgatttattacccctaatttatttaattacccctctcctcctctcccgcaattcgttcgcttttacttttccaatttggtatcagttttctcatttgcccttcagcgcccaccgtttccgtccgccaattttgagcgccttctccagccgactttgcaccaccgtcacttccccccgggggtcgtcggcgccgccgctttgccattgctcggcaattagcacaacggaggacggcgcatcggaagagacagccggcgaagagggcgacattctgtggttgttgttgttttgctgctgttgttgtgtaactgcgggcgatgggccgttgctgagctcatcgatgagacgaaaatcggccgaaagaacggccggcggcgacgcactgatcagcattggctgatccctgagattaaacgaactaatcactgatcagaggcagggaaacggagtttggcaatgaaaaaaccaaataaatcaacaacaaaaaaacattttaaaagacagagagagagaagtaagagaaaagtgatcggaaggatgagggggaaagggggtggaaatgcnggtgggagaaaccaaatcaaatcaaatggacggcgaaggaagtgatggggtggtgacgggtgggggggaagcgtctccgctccatcccccgcagcaaaagcgccccgaggcatttgggtaaattctttcgcgaaaaatttgcggaaggaatgctaaactanatggaatcaacggcagcagacggggaaaggcagtgagcacaatttgttgttggggggggggcgacacg

SEQ ID NO: 37531 - DNA, 921 bp, Heterodera glycines
aaattttgaaaatttgattaaaatttgttgacagattttcaccaaaaaatcatcaaattttgtgatttttgtatcatttttctaatgagaaataagagttttggcgcgccgctgagaacagtttttcatcaaattaccaaattttgcgattttgggccattttctaagaaaaataggagttttgggggcgcggcggtgtcgataggcgccgccggggaaaaaattggaaattttgatcatttataaacagtttttcactgaaaattagccaatttataggtaaaattttgaaaaattttatgggaatttaatccaattcttaggggtgtaaaagtcgcatttcgcgccaaaaagcgaaatgcgaaaagcgaaatgcgaaacgccaaaaaatgcgaataatgcgaaaggcgaaatgcgaaaagcgaaacctcggcccatccctggtacatacagtctttaacaaaattctaagtccaagaattttttgaactttacctacttcacatggaccaattgagctcctcaattttttatcaagcataccctccacattaatattaagattgacagaaaaaaaattgaaagtgcagaagaaaaaaattttaatgaattttcacgaaagttgcccaaatttgctgttacaaaaatataggtccaagatttcgaaacatataactttttttctagggtaagaaaggaccaaaaaaaattcatattattataacttttatgcttatcaaaaagccaattgcacccagcgatcagatcaatccttcggggtgatcgggagtgatgaaaattttaacacccccaggggaattgagctttttctgaaaattttcaaacacattaaaactgcacccaatcaacatgaacttcatacgcagacatcctacaagcatttctgattgaaaaagacca

SEQ ID NO: 37532 - DNA, 1256 bp, Heterodera glycines
attagcatcggggtacgagatagaaattgtcctaaaaagagataaccatttagcatcgaggttacgagatagaaaattgtcttaaaaagagatagccatttttctgagaattaattcacaatttccgcagctcttacggtaatggaaaaaattttgaagaggctctcaggaacggattagcatcggggttacgagatagaaaattgtcctaaaaagagatagccatttttctgagaattaattcacaatttctgcagctcttagggtaatggaaaaaattttgaagaggctctccggaacggattagcatcggggttacgagatagaaaattgtcctaaaaagagatagccatttttctgagaattaattcacaatttctgcagctcttagggtaatggaaaaaattttgaagaggctctccggaacggattagcatcggggttacgagatagaaaattgtcctaaaaagagataaccatttttctgagaattaattcacaatttccgcagctcttagggtaatggaaaaaattttgaagaggctctccggaacggattagcatcggggttacgagatagaaaattgtcttaaaaagagatagccatttttctgagaattaattcacaatttcagcagctcttagggtaatggaaaaaattttgaagaggctatccggaacggattagcatcggggttacgagatagaaaattgtcctaaaaagagatagccatttttctgagaattaattcacaatttctgcagctcttagggtaatggaaaaaattttgaagaggctctccggaacggattagcatcggggttacgagatagaaaattgtcctaaaaagagataaccatttagcatcggggttacgagatagaaaattgtcttaaaaagagatagccatttttctgagaattaattcacaatttccgcagctcttacggtaatggaaaaaattttgaagaggctctcaggaacggattagcatcggggttacgagatagaaaattgtcctaaaaagagatagccatttttctgagaattaattcacaatttctgcagctcttagggtaatggaaaaaattttgaagaggctctccggaacggattagcatcggggttacgagatagaaaattgtcctaaaaagagataaccatttttctgagaattaattcacaatttcgcagctcttagggtaatggaaaaaattttgaagaggctctccggaacagattagcatcggggtta

SEQ ID NO: 37533 - DNA, 89 bp, Heterodera glycines
tgttcgagccggtcagcgacgcctatacccgcgagtcggtgcgcgggcagatccattccctggtgctggaactgtcgaaggtcgagccg

SEQ ID NO: 37534 - DNA, 1114 bp, Heterodera glycines
  unsure (1)..(1114): unsure at all n locations
aatatatgtttatttaaattatttaaataataataattttatttatttatttntaagtgatccaatacgtccncattccaatgctgccactttcgtcgttagaagatcgtttccaaggcattccatggccacaattttctgcatccactcgtgaagcatacatggaaatcagtgaaaaaaaattcatttaaaattcaaatgaattaattttctaatttccagcaaaggatcggcctcggatgaaaaactattacagtaattttgaaaaaaaataaataaaaaaaactatgtaaaaatttaaggaaattcatttattcaattttggagcggatttgtgccagtactgaatcggatgggtggaaaggatgtttcggaggtgtgtaaattaattcaaatttacaatttttcccaattaaaaattcacatttttgaaggaccatcatcttttgccctcccattttgaccgtacaacattttttggcgttccgcgtccgttcggcgccatttcaaacattccatttcccccaccgccgccacccccaccaccgacaccgtttccgaaggaattgcatgacaaaatgatggcacagggtgccgccaatggttgggcctagtttttggaggcgttttttgaaatttaatttttagcggcgttttctacaacaaaaaggccgggcacggaatcaggcgaatcggtaaaacgtgccgaaaaaaaggattaaaaaatttttttgtccgattagcaaatgtatccatccaaaatgccggacaatggcatcatcagtaaaacggcggaatttaatccgaattggggttggatggtgttgatcggtgtcacattaactgtcatcaacctgtgcattctgattgccatctccagaaaggtgtgactaagtttttttttaaaattttccaaaaaatcgcaagaatttttttttgaagtgcattcgacaacactccgagggcaaaaagaagtttcaatatcagagctatgcaagcggtggcgtgccacctccattgccacccatggacatgaattatgcattgatggcacaacaggtgggcaaaaaaataaatttttaaatttaaattttaataaattagtgccaaaaac

SEQ ID NO: 37535 - DNA, 964 bp, Heterodera glycines
ttttgcataattaattcataaatatttttttcagaaactgctctgaaacgcaccaaattttatttgcaagttattttaggcactcagatgctttcactatcaaaaagggagatgaataaaaaatctaaaaatttttaattgctttttaaatatgcgaaaaattttaggcttaactttttttttataaactgatcagaagcgaaccagattttgcgagggcatcaaaaagacaaggaaaagcactgctatgatgctaactccagtaattctgaatttaaaattttttattaatttttaaagcttcactattttatttttttagcaaaatcaattcataaatattttttcagaaactgctctgaaacgcaccaaatgttaattaaaagttaaataaggctctctgatgctttttctatcaaaagggagatgaataaaatttttaaaaatttttaattcctttttaaacaggccaaaaagtttaggcttatattttaaaaagtttcatcgaacctagcgcactaaaatcgatataatctctccaaattttgcaggccttctccattgtaaaggactaacttaacctgaaaaaatgccaacgcttgttgtttttaaaatttttcgaaattctgactttttcattacttatttattttttgcaaaattaattcataagtattttttcagaaagtgctctgaaacgcaccaaatgttaattaaaagttaaataaggctctctgatgctttttctatcaaaagggagatgaataaatattttaaaaatttttaattcctttttaaacaggccaaaaagtttaggcttatattttaaaaagtttcatcgaacctagcgcactaaaatcgatataatctctccaaattttgcaggccttctccattgaaaaggactaacttaacctgaaaaaatgcaacgcttgttgtttttaaaatttttcgaaattctgac

SEQ ID NO: 37536 - DNA, 1025 bp, Heterodera glycines
  unsure (1)..(1025): unsure at all n locations
tgccgtaattctcagcggaggaccaaattcagtttatgtggacaatgcgcccgtgtacgacccggaactgctcggtggtcgtcttccgctgctcggcatttgctacgggttccaagtccggtccaaatgattcatatttattgccagaatttgagtgcattttttccttcccattttagctaatcaacaaacacttcggtggctccgtcagtttgcagccgcggcgggaggatgggcgaactcagatccaagtcagcccaaagtcggaccttttccactcgttgaagccggaccaatttgtgctgctcacccacggggacggagtgacaccggaaacgtcagccaaaaatgggtttcaaccaattggcttcagcggggaatttgtggcgggtaattaattaattggggttaatgaacaacaaaaacttgagtattcagccatcgaaaatactgaacggcgcatttatggtcttcaatttcatccgggtaagagaacaaatatttaaatgggaattggcaagggatttacgtattttgcaaatagttcgaacccgcactttttcagaagccgacctcaccgaccagggtattcaaatcatcgacaatttccttcgtcggatttgctcactgaagtgccattacacactgcgcaatcgcgaacaaatgtgcgaggaacgcattcgaagtgcggtgggagagaagggcgaagtgctcgttttggtgtcgggcggcgtcgactccaccgtttgtgccgcgttgtgcaccaaagcattgggcgcagagaaagtggtaagggttgaaggcacggatttgaaacctccgacaaatttttccattccaaacgattattttttgttttctggcggcgattctttagcgttaagacctcccaattgactttccggctttagcatgccattcacattgacaatgggttcatgcggttgaacgagtccgnccgagtgatgaattctttgcatgacttaaaggtgagtaagcaaattccaaaaaaatcttcaaattca

SEQ ID NO: 37537 - DNA, 1247 bp, Heterodera glycines
taaattcatattatgacttaattgtgtacattgtctgaagaagagcatgcagagagagttcggactgagcaaaaaacgaatcgaagtcgagcattctctcaagtttagacggatggacttggtgcaagttgcaacgagacaacagttcgggaaaaatgttttcacgatcggacaaactgtgcccaacccaacggacgatgagactggattgaaatatgaactttgccatactggttttaaagttataaatacttaaggtagacatcggcacggacgttgctcgcatgccgtggcatttcaagcaattcgaccaatttgatgggttcccagccaagcacatcagcattttccaaaagacatctgaaacggcttttgctcttaacacacaatagaccgaacaacccatttatatttgagtcgaagaattcgttggcatgcttttgcaagcgcggcaaattgtaacgggaggccaaatcacgaattgccaagcaatttgcaacatcaatgtaacgcatcagataatcagcacagtaatttttcaagcggatcatctaaaaaaactttaaaatgggaatctaattttgcaaaacccactagcaaattattcgccaattttaacaattccacaacaatggctctgtcaattgtcactgagccgctatacatataattgagaatgcgatcgaacacagtcggatcttgacaattgactataatctgaagggaataacaaataacaaaggattccaattaacaaacgctctttaccttctctttcgcaattttgttgtgacgcaaaattgaatcaaaatacggactatgggcagccaaaaccattctgtgagcactgaactggcggtctttaacgaaaatacatgcatcacaaaacctaaaagaactaacaaatgaagctgtgttgtctaaaaggaaaaccttccagtgattcgctggtaatgcatccgttccaacattggacaagcatttggttctttgaatgacattggactgagacttgcagcaccatcttttgagcaagaaggaagcgtcatccggaaaataccaagtttagaaaatttgatttccactaatttgaaacactcgagaatggaattttttttttgtttcattaaatttgaattactcccgccgggtctacgggtaaaaatttataacattttttacgggagttcccagttccgttcccggaaaagtttccgaactcccgctccccgaaattttttttttta

SEQ ID NO: 37538 - DNA, 1336 bp, Heterodera glycines
  unsure (1)..(1336): unsure at all n locations
aattatttttaatntaattaatttatttttccgctttttctgtacctccatccgttcgaccgcttcgcgtgccgccgccacgttcagcagaccgccgccgcttatgccacctccgttctccaccatcgatgccaacagcgatccgccgctgccggacgaacacgggggcaactcgttcagctctttctacaataaacattattatacgcatatattttaaatttcccatcctgtacaaattgacccgaattagcctaagtttttctcattttttttgacccaaattgccgcaaaattagatatttgtagaattaattaaaaaatcaacaacaaattaaaagttgcccttcctttgattatgaggaaaagtgccactttctggatatgggtgtgattcacttattcattcgttttattctccgaactcccaaccccaagcgaagattgcagtgccatttgctgctgttgctggcgccggtgtgccaattcggcgagtgccgcgttcaccgccgccattgtctgcgctgtgtcctgcgactgaccaatgccgctgccgctcatcgccgctgatggcccagcagcggcaccgctggtggtcatggagtgttgctgctgctgctggtggcccaacgcgacaatggcatttgggccaacgacgggacggccggcgaactgttggaagggcgactgaccgacgacgacacccaccgatggagccaactctaccccttggggctgcttgtggtggaacttgcgagcatgacgcacacgacggcagctgaatttaaaaaaatttccaaaatccaaattcaaacagagatttaccgcgccgccaatttgcgcattgcctcgcgaaagtactccttgaactcgttctccttcccgacccggtcaaacagcaccttttggcatacatctgcaaaataaattaacagtccatgtttcgaatttgcatgcctaatcgtctcaatcaaaatgaaatgtttgtaaaaaatgaatgtacagtaaatgtagatgatgcccggaagtggcaaattgctgtagcttgagtgatttggcatggcaaacgttgtcttggccataagtcgggagccgaacacgcgtttctccgccagctttttgcacaattgggccattgtttcggcaacgctttggttctcatgctttttgttttgcagcacttgttggatcacttgttgctcggacatcggtttgaaatcttatcaaagagttcaattacaattgaaaattacgtcaatttaaataattatggcacttacacgggtcgttttgtgcctccgccactgggatttggattcgctgaatttgctcttcg

SEQ ID NO: 37539 - DNA, 1758 bp, Heterodera glycines
  unsure (1)..(1758): unsure at all n locations
aaaaatatggaaatcattttaaaaattttattttttaatatttccgaattaaaatcatacatttccatttaaaaagaaattaggcgcaaatggtgcatttaatgaattcaaattaaaacaccgcaaaaaatgatatttcaaacttaatttttaataataacccncaaaatntaagaaattctaaagtctgaataagtagaaatattcggtaggcgcttctctcaccgccaatttgcctttgctgtcaccgccaacagtcgacggcggaggcgttcttcaagcagttcaacccgcccaaactgttgctgccgcctccgccactaccgccgcttcttcggccgatgaggcagcggctgtcggggcgaacggcgaagcggcggacgccgtgcaaaaccaactgccgctgtcggtgatgaacaattacttctccatcggcgcggacgcacatgtcgcactccaattccaccagtcacggagtgcaaacccgcagatgctcaactcgcgcttcaaaaatcgcatcgcttacggaggccttggcaccatcgacctgttcaagcgcacatggaaggtggttggcggcattcatcggcgatagggggagtggggaggaataggcacggcccaagaagggtggcatgacaacactcgcacaaaaagggaactcgtacaatggcttaggctaggcctaagcttcagactaggcataggcttagacttgtttggcttaggctttattttgtaaatttttattgtacgaattacctttagtacgagttgccattaatccccaagaggggttggcacaactccaaatttaagggtttatgctaaatcagttgggcatgaatgggggagtactgggttggcacagtcggagaacagtgacatccaaatttggtgggtaggagcgtttggcacgttcactgaaccgattgagagagattggcacggctcagaacaaatgtcactacagaacccaaccaaatacataattgtttatcccttaggacctttccgagtacattaatgttgagtgtgacggggtggacatcaccgccaaaattcgcgagttcaaattccactgcattctgttccacaacatctctttctacgccggcggcaccgtcccgtggggtgccggcgacggagtgcaagtgaggcgattaatgtgttaattagtagtttttggcaaaagcattcaaacaattagttggcaaataatgccattggcattttggcaaaataaatttggcattctgctcaccaattttactgctccgatttgaggagaactgtggcgaagtgttctcccgtccgtcgccatgtgatggcaaaattgaggtgctcggcttcaccaccgccactttggccgccctccaaatgggcggcaaaggcgagcgcatcgcgcagtgctcaaaggtgcgcattgagacgagcaagccgatcccgatgcaagtggacggggtaagcaaaaggacacaatgggggggggcacagggataaatgacaaagagcggaagaatggataaaatgaggagaaacgacaaaatggggacaaatggacaaagagggacagctggaaaagggcggcaaattgggggcgggagtaattaggaatcgaaagttgcaatttggaggtaaatcagccccttctcctttcaattcaggagccgtgtctgctcggcccatcgcttattcatctttcattccacaacaaaggtaaagccattaaacagttaattatctttattatctatc

SEQ ID NO: 37540 - DNA, 929 bp, Heterodera glycines
ggctccgcacgggcgaccatctcatttttggcggacgacggatacggcggcactcagcgctatttccgcgacatcagtgtgccccagcatggcgtgcagctgagtttcgttgacctgactaatttgaacgagttgcgaaaggccattgagaccaaataccaaagtgagtgccgacaaacgcagcgaaaggggcattcattccgattttgcttacagatggtttggttcgagtcgccttcaaatccgctgctcaaagtggtcgacattgcggcggtgtccaaaattgtgaaggcacacaattccgaatgccttgtgcttgtcgacaatacggttagcctattattggcacagcaatgctttgcattggcccctccttcagtttatgtctccgttcttccaaaaccctttggcattgggtgccgatgtcgtgctgcactcgctgaccaaatatatcaacggccattccgacgtggtgatgggctgtctgataaccgacagcgaaaggctcgaggcgcactttctcttccaacaattgggtcagtccacgcattacaattaattaactaattaattctgttgcccgttcagcggtcggttctgtgccctcctcatttgacgtttatttggtgctccgtggcatcaaaacactgcaccttcggatgcgtcagcatcattccaacgcgatttctgtcgcgcgttggctggagacggacccgcgcgttgagagggtaattagttggctaattagttaatcgagtgaatgcggaatcatggataatcagcagcagaagtaattgaaggtttcccttcttaggtgctttaccctgaacttgaatcgcatccccagcacgaagtgcacaaaaaacagaccagcggaatgtccggaatgatcacagtttatttgcgcaccgactggaaggatctcgaag

SEQ ID NO: 37541 - DNA, 989 bp, Heterodera glycines
gcccagaaaaattgtagattcagaattttaatggtaataatagaagaagtacataaatctagaaataagcatattgcagtgattgggaagaaagatttaagtgattaaatactgaatttttggggccatcaactcctttgtttttgccagagtttgtgtgccacaaataaaaaatgcgggaatagaggaagaagaaccaaacaaagatgaacgatgaaaaacactttcaggaagcgctaggtgattattggagcccagaaaaattgtagattcagaattttaatggtaataatagaagaagaggtacataaatctagaaataagcatattgcagtgattgggaagaaagatttaagtgattaaatactgaatttttggggccatcaactcctttgtttttgccagtttgtgtgccacaaataaaaaatgcgggaatagaggaagaagaaccaaacaaagatgaacgatgaaaaacactttcaggaggcgcccggtggttggttattggagcctagaaaaattgtagattcagaattttaatggtaataatagaagaggtacataaatttagaaataagcatattgcagtgattgggaagaaagatttaagtgattaaatactgaatttttggggccatcaactcctttgtttttgccatagtttgtgtgccacaaataaaaaatgcgggaatagaggaagaagaaccaaacaaagatgaacgatgaaaaacactttcaggaagcgctaggtgattattggagcccagaaaagttgtagattcagaattttaatggtaataatagaagaggtacataaatctagaaataagcatattgcagtgattgggaagaaagatttaagtgattaaatactgaatttttgcggccatcaactcctttgtttttgccagagtttgtgtgccacaaataataaatgcgggaatagaggaagaagaaccaaacaagatgaacgatgaaaaacactttca

SEQ ID NO: 37542 - DNA, 1750 bp, Heterodera glycines
  unsure (1)..(1750): unsure at all n locations
cagcagcaacancggagttcatcaccagcagcagtcttaccccgcggttggcggtggtccattgccaacggctgctccaccggcttcgtcgcccagtgtcatcgcagtcggaggtggtggcatgcttcatcccggctcaaatgcggcagctgcggcgggcatggcacgcgctccgacattcaatcaccacacccagcagcaacagcaaatgtttaacaaccaaagcgcggcggcattctatgccgcttatcaacaccagtttttccaggttttatttttttgaaaacagtgctcttttatacaaaaacaaatttgaccatatgaccccaaattttccctacgccggatccaaatttccttttattttttgccaaggcttacaattagcctcaaaattttcaaatttttgcaaaaatgactaaaatttcccgtttttcccacggtagacaaaaattcaggaaacttacatttgacaaacaatttttgaccgaaagagaaaaaaaagttccaactgctcctcccgaaatttttttaagtttacgggcctgggacaaaaaatatagttttgtatataacctgaaaaccaaatccaatgttatatcttcgtaatttcagatggcaccgcataactttgtcaacccacaagcggcgcacctccatcaccagcaaccgccgaacaatccgttggccgctgccgcctcagccgccgctgctgcagctgatgctgcacaacagcatcatcagccacaacatcatcaccaaacagcagaatgggcaagcagcacaacagcagcaacatgttcatcccaatctgtaccagcgacagcagcaaccggctgttgtccccagcatggcgccggtgggcaatccgtgcgcgaccttcgcaccgtcgaactgccattctacgaccagatcaaagtgagctggttttctaacaaaaagaaattttctatttattaacaaaaagttgtcatttctcagcagatttttatcaattattttggttttaataatgtctgattgtgagtgagaatttttcttgtttcaaaaatttaaatttttggcatacaatttggttaagaattatcccccccccgtcccggccgggctttcattgcaatttgtttaggtgattgtgccaataactgaactgcctccgtatccggtgcctattcgacctggcgatgcgcgtgcttcgcattcgtttagcgtacccagtgaggacatacaaaaggtgcactatcgcattgaggaacaaccactgccacggtaattgtcgtctctctctctctcttgccaatctcgagcaatttgggctctaccaataagtagcagatttttttagaatttctgaattattcctttggagaaatgataaatcatctttttgaaattaataattcacaattaactctcacgtaagtgttgttggcaatttaattcagtcccatacaattttcagttacgagctccagttgcgcatgtttttgttggagaccagtgaggagcagcaggacgcttttccgcccggctcgacggtgcgagtcgatgaacacggagtgcaattgccggtctgtcggcagctcattcaaatttatattggcattatatttgccatagttattattattacttttgctgatcaatatcaacctaatcacaaattcagccagtgattccaaccaacaaaccgaacgcggaacagaaacgttaccctcgcccggtgnaacatcagactctagaggtcccc

SEQ ID NO: 37543 - DNA, 979 bp, Heterodera glycines
  unsure (1)..(979): unsure at all n locations
agcggactgaaaattccgccggagcgtcgccgtgaacttctcgcgctctccggcgggggtggcgaatcggaggacgagcgaacgtcgtccatttctgaacaaccaccagcaaaaaaagcgacgacaacaatgaaaaagccatcagtgaccatccaaaaagaggaggaaaagcagccagcacaagccaaatcaaaatcgccatctccgcgaccagcaaagtcaccgtcaccgaatccgaaagaggtgggtactgtacaaatggtaccggtgccgtccgcgtgcatcattaccatattccctccggcgggtcgccgggaagtggtcgaccaattcggcatttgcttctactcttttaaatgcattttcagtgtgtgctaattagccacttaagtattcatgatacggtgtcctgaatttgatgagaccgtaatcatcgaaaattccgtaaatttatgagccgacaattccaacgcctaatttttgcagttttttccgtttattttcattttgaagcttttttgaattaaattgcatatattttggcagttattccgttgcaactaacaaagctaatcaacaaaatgccaagtcaacagccgcggcgcgtaattttgaaaaaaacgaatcgcattttttggatggaataaatttattgcgatcagttgccctcacataattattggcggtgaaattgggtgctttgtttacttatcccctccggggatgcctttcatttcatatccccccccccctagggcgaatgcctttcctccctctacattttgtgctttttctttttcattgagcgaaatcaacgcttcaagaccccgactctccccctcacccccgcccattcgtcgatccatttttttcgcactttttgccactccaagcccgatcatttgatgaagccgccactgatcggtggaagcacaacagctccagcagcagcagacggacgacgacccngcgatgaatg

SEQ ID NO: 37544 - DNA, 830 bp, Heterodera glycines
  unsure (1)..(830): unsure at all n locations
ttgattatgtttaatttcatttgaatttgcgaattatattcgaaatgcgtaagcattgattttccacgtataatcatttatattgtacatgtatttttatgcaattaacatggtcactttattgatctataagatgacatgggttttaatttttacattcaaaatcgtaaaataaaatggaaaaaacgtaaggtctcgggtgggaatcgaacccactcgtccacccaatccgtgggaagctctaccattgagtaccgaggcacattcgctttttctttttatgggtcttatcaatccgcgcttaaacaggtgctgtgatttttggaaaaatccaatttgatccgtaaggaagaggccttacccgggaacaagttgtttttgaaaatggcccggaccggctgatttgaaaatctaggtctctagttttaaggcacaaaaaataggttcatcagtgcctaataattcaagaataaaattttaattacaataattttcgcactgcaatttagtttctcgagagttcgggaatgtatgtatttaaattttaaacgcaaatggacgggaaaatattgatgaaacaaaagttttcgaggtaatagatagaaaaactcacaggtaaggtacaggtattttaaaactgagtccaagcacaaaaccaaggtaaaatggttttttttcccgctaagctacacgtattaagtgcgcaaaaattttaggtatttatctaaacatccgaaccctagtcatatgaatcgccaaaaatcacgaaaagtcataaaagacgaaaaaatgcaaaaaattcatganaattagtcaaaagttaacatttt

SEQ ID NO: 37545 - DNA, 887 bp, Heterodera glycines
  unsure (1)..(887): unsure at all n locations
aattaacttttttgatgtaatttattcttaagttacttttttagtttgtttaaattatttttttaattttataacagatgtttctggaaataaattaataaacttttttttaaacttgcatttaatttatattaaggtttttcttttgaaataaatcaattttttattattaaattatttttagtttgttatatttatattatgtgttgaatattatatttctcaaaatagcttaaatcttgtcttgatcaaattgtgatccatacaagttgagtctatttttattttatgctaattttaacaatcaatttagattcaatgcaatgaaattaaaattgttcttctataattatttgtgtatttaatataattgtttttgtttaacttaatcattttttattttatttattcacaatctctaattattctttgattacatttattttcctgaaaattattgtaacatcttattaattgtaaaaatttttaattccttattaaattatattggtataaattctaaaagttagtaagctttaacattatttaatagcttttttattaccattgtaaataattctacactttttatcatttaagttgttggttttacattaaaagaatattttagtattttatttattttataattaatatatttttgctaatagaacattccattattaaatatttatcagttcatgtcgcataaaattgtttatggccgaacagatctagagatttatttatcaaaccttctgaatgctttaatgtccccttttatagatttaacacaaaatataaataggcaaaaatttattccctttgcagggcgggctacaaaattatggaataacttatanagaaattattaaaataaattcttt

SEQ ID NO: 37546 - DNA, 1153 bp, Heterodera glycines
  unsure (1)..(1153): unsure at all n locations
tgcaggtcgaaanatcggagctgtcaaaccaaataaaattggcattgcctttatcgtcaagtgttgtggttactccttcaaattggcaaaaaaataaaggaaatcgaaaattttgtgggaaaaccgtaactcgagattaatcggaaccaaaaaaaaaccaaattttggatacaaattgggaagagattaaggaattatttttaaaaaagattgggatggggatcacggatttatttcaaaaaaattagaaatccttgaaacatgatcaaaaattcacagtttttctaataatggaatttgttagttaaccatttgctattgtagtacatcatttaagcattgtacacgtaaaaaaattgctttgttcttccattggttcgttagtctcaatggtttctcaattatttttgtttttctctctttatgatgttactttttttattttttcgactcatcgtgtgaatgactccgtggcgcagtggttagcgcgcccgtctgcctgtccttacggcaatgggtccatttgggttcattgtcatagggggtataagtgcgggagaggcgtgggttcgattccccgccggggtttcttttttcaattatattacaatgataattaattaattttttttaatggtcccaccttcgtttttccatttttctttccatcgaaaaattacaaatgtttcccataacaatttgcttgtccacccgagcactggcagcagcacaggaaattcgcaaggctttttaaaatttattttattaaattttattttaattaaaaaaacaatttttgtgacggtttgacaggtgctgatcatccacaaaaatttgtaaaataagcagaaaaagccaacaatggtgaacagagtctgcgacaagagaagaacaaataacaaagtcaaattttttggattaatttttaaattattttttaattcaaaattacgcacatataaaacagcgatgaaagcaacaaaaattgcgatttttgtccacaacccaaaaattgcaacggaatgaatggacacaanaagaattatggccaaattttgaagtcgcaatttttggtgttgtttaaagagaaacgnaaattgagatangcagaacagcaaaagaggagccaacagagaaactgaaattggaaaaa

SEQ ID NO: 37547 - DNA, 513 bp, Heterodera glycines
gcgagattctcgactcgggagatttctcgggcttttagtcttggataccgtgaaattttgaaatttgacttaaagaaagcttcgctgaaaatctattaaaagtcaaaatttccaactttttctacagtggtagggttaaactccgtctaggaacagaaaggaggaagagacgccggaagggaaggcaaacggtgggggaggaagaacagcagctggagaaatatggcatgacatgtcattatttattaacatggaatgattaaacaattgtttagttttggaggactctgaaaaaaacaacgggaaactttattccttttagttggagataaagcgagttatggctgatcaaaataaacaatgcaaaaaaggcactgaacatatcagtatacattttgaattagcgcgcaaaattacgccatttggtgttgtgagcaattttgtctgaaactggagcgaactcatagtgacgctggagcgtacgtgccaggaaatttcgacagtgaccgattt

SEQ ID NO: 37548 - DNA, 1014 bp, Heterodera glycines
  unsure (1)..(1014): unsure at all n locations
attatctctaattatccactcgtctccattaatccccccgtctccaattaccccccccccctttctgaggaggttgaacaataatccccccggggggttaattagagatatatgcacacgcaaggggtgtctcaggacaagggccatacgacggacgattgagacaggggggggggggtgtcttcggtgattttttttgtttttcacggaattttttgcggcgcgctttttcattttgaaaatttagtgctatttgtgacagattttttcaaaaaaatggattttttccaattttgagaaaaattggatttattaattagaatattcattccggttccaagtccggtagggaaggtttgaggacagaaatttttcacaaaagaaaaagtaaaattttcttacatatttaaatttttacagtagcctaaaaaactaaaataacattttctgttatttttttaaataagtaaaaaaaaaaatctaaaaatggttattttagagtaaaatctcagccaagtcattagtgcccagaatctgaaaggaaggggacagagatttgaagattgaccggggcgggggtcccgggaccttttttccggcactccttgtccacaatttttaaccgaagctcaaaaattatgttaaaaatttatttttcaaaattttgatctttgataagtatttaaaataaagatttacgaaaaagccaaaattttatgaaatattgtataaattaaaaaaattcccaatgaaaaaaaacagtgaataacaaaaccaaaaatttattcactgctgctggttgcagttgccaataaggcacattttgaggatttttctactataaatctttattctcaaacccgagaaagtctttcgaattttttatcgtaccacaactcactaaaatgtttcaagttaattcattaaatttaaaaaattaattgaaaaaattcgcttcgttccgacatggaagtctagttttttgcttttttaaattattgataaaagantttt

SEQ ID NO: 37549 - DNA, 756 bp, Heterodera glycines
agatcacatgcgattttcggcactctgataattttagcgttcataatgggatgtataaaggcgattgtagaaggaattggaagcgctaaaattgtttgaggagctttttgagcgtaattacgattttacttacaccattttttgctaggcttagatcacatgcgattttcggcactctgataattttagcgctcataatgggatgtataaaggcgattgtagaaggaattggaagcgctaaaattgtttgagaagctttttgagcgtaattacgattttacttacaccattttttgctaggcttagatcacatgcgattttcggcactctgataattttagcgttcataatgggatgtataaaggcgattgtagaaggaattggaagcgctaaaattgtttgaggagctttttgagcgtaattacgattttacttacaccatttttttgctaggcttagatcacatgcgattttcggcactctgataattttagcgctcataatgggatgtataaaggcgattgtagaaggaattggatgcgctaaaattgtttgagaagctttttgagcgtaattacgattttacttacaccattttttgctaggcttagatcacatgcgattttcggcactctgataattttagcgttcataatgagatgtataaaggcgattgtagaaggaattggaagcgctaaaattgtttgaggagctttttgagcgtaattacgattttacttacaccattttttgcta

SEQ ID NO: 37550 - DNA, 1261 bp, Heterodera glycines
  unsure (1)..(1261): unsure at all n locations
aaaatgatattatatatagattaantaataaactataaaataaaaaatctaaaaaagaaaaacgtttatcttattagtgcaattaaatgtaaataaatttangcagagaatatttatgttgaaatattacaaaatgtgattaaattttatattcaagtgaaaataaataaatgaataaattataaaatcgacgctaatgatgtgtgggaattgactaaaataagtacagcgcaagaagttgaaataaattttaaaaaatgattgcgtattatttcaaaattacttcccattaaagtgattatggtgttatcgtacctttgataagcccaccacagaaagtacaatacgtggaataatatcctttattccgaaggtacatgtttaacaatggtgagcttccccgattcggagcggggaagggagggggtcgggatccggatccaacggccaggtggagtgatgtgtggatggacaaaggaaaagcctacacaagcacattgggggaggagacaaagggaaggaccgccccaggcaaattgtcatatggctataagcaaagaagagggagagaagaaaaggagtagagacaatgaggaaaagagtaaatgattagatattagtcatcaagggcccccagattgaccgtccccggtcaatgaatagcgaagtacaatcaaatgaatattaatcgatttgtgggaagagagaaaatgagcagttttcgctcctcgtcgtcctcctcctcaggacctaacgaaacctcgtcttcatgttgggacacttttttccaatcttcttccgaatcaattaacacaatttccttcttttttgcttcttcttttccttttttgtctttcttttctttttcctcttcattaacctccttcaaatctctttcatttccaattccttttaattccttttcatccttcttttctccatcctccgtctcttgtacttcttttacatttgttggcactttattcccttccactttttcagtttttgtcaatctttttctcttccttgacacttccttctttttcaattcaaccaattccttttttaacttttctacctcattttgcagcattttttgcgagtcttccaagcgttttgctttcgcctcctccacttttttaaccttcagttcaacttcctccgtgtctgacaatgattcgtacattggttcagcgcatgtaaacccgtttgaattctgaattgtttttgaatttgcttgttcatttttattttcaaattc

SEQ ID NO: 37551 - DNA, 923 bp, Heterodera glycines
cattttccgaaatgatagcgccgaccctaattttttccgaatttttttctgggcgagtttgatgtcgaaaattttggaaaaacgcctatctctttttctgatcatcagtctgaagaattccaaccacattttcggaatgatagcgccgaccctaattttttccgaatttttttctgggcgagtttgatgtcgaaaattttggaaaaacgcctatctctttttctgatcatcagtctgaagaattccaaccacattttcggaatgatagcgccgaccttaattttttccgaatttctttctgggcgagtttgatgtcgaaaattttggaaaaacgcctatctctttttctgatcatcagtctgaagaattccaaccacattttccgaatgatagcgccgaccctaattttttccgaatttctttctgggcgagtttgatgtcgaaaattttggaaaaacgcctatctctttttctgatcatcagtctgaagaattccaaccacattttcggaatgatagcgccgaccctaattttttccgaatttctttctgggcgagtttgatgtcgaaaattttggaaaaacgcctatctctttttctgatcatcagtctgaagaattccaaccacattttccgaatgatagcgccgaccttaattttttccgaatttctttctgggcgagtttgatgtcgaaaattttggaaaaacgcctatctctttttctgatcatcagtctgaagaattccaaccacattttcggaatgatagcgccgaccctaattttttccgaatttctttctgggtgagtttgatgtcgaaaattttggaaaaacgcctatctctttttctgatcatcagtctgaagaattccaaccacattttcggaatgatagcgccgaccctaattttttccgaatttcttt

SEQ ID NO: 37552 - DNA, 1332 bp, Heterodera glycines
agtgactccgtagcccatcgctcaattaatttattaatgtcagtagtaacccaccccacaactgtaaatacagagacgtaaaggataaaattaataaattactcatttcattgcgtgttagagtggtaaaataaagcgatcggattatgtttaaaattattagtataaaaatgcggttaagtgtcctaaacattcattaattctgctatggttctcgtcagcgtctcttgcgctcaggtgctgagctgtcctgttaaatcgctacgcgatcggcttaatcaccctgaggatcggaacattgttttgaagcacatcactggacgcaaagtgcgcacaacatacaatgataggaatgggatgaaaaaaactttcttcgtcggtggaatttcaacccagtcggcagcctctcttcctgcatacgggcatttgcgccaaccatttaacgtcaatgtggctgcgcatttttacgcgcggcaccgtataaagctacactttccctatacaccatgcataattgaacgattttcgggaggaggggaggatcggcattacccaatggaactgctcgaacttgtcgatgataacaacgacggaaaagacaatgaacgatggttgggacgtctgttcagagaaattggcgagagcgatcagcaatctgcaaattcatcatcatcaagtcaaaacctgtgcctatcaaatgatgaagagattggggaaaataatggacgtaatgaatgtagtcagaatgcgcgacccatattttggtgaaagttaatttttcaactccctaactaattatgcacatttctaccataaagcgaccactttaattatttaatttaaaattgaattttaaattcattaatatttcataaagtgtgtcttctattgcctaattatgttcttttctacctaaaaatgacctctccaaatgcttaattatttgaaaattccatcttccaatcattaattattcatcaattctttattaatacaacaaataaaagcacataaacagataaattatacatattcagtataaaaagagaaataattgtacatatgtgtgggtgcgtatgagtgtgggtgtgtatgtgtatgggtgagagagagagacagagatgaatgaaggtgaacaaaatacattacaaagagtgaccaaaattcatcacacaaaaattatcccctataattcccttccccacgtacgggcgataacgtttttgcgttggcgtggacacgacacgccctccctccgtgatgtttgggcggaggaaattggggtatgtgacgtggtgggggtcagtgtcacccggagtcgcgtatcgcacc

SEQ ID NO: 37553 - DNA, 1152 bp, Heterodera glycines
  unsure (1)..(1152): unsure at all n locations
ggggggggggctttttttgtatctntagagaatgaccattttttgaagtcgcaaggtttttgaataaatttaacatattttggtcaatttaggattttaaattttgactttttgttcgaattcgggttcgcggttcggaattcaccaaaaaattttcaaaaaaaaagtcgacattttttgaaaatctcctaaaaatagctcaaaatcgcaaagttcgtcacttttcgttaacaaattgtattaagaaatgcaaaaattttccggcggcgcctatcggcaccgctggaccccctgttccccaaaagtcttttgaacgcaaaaaaaagtggcgtgaaaagcaaaaaaaaaaggtcgtcgcctgggcggaggtacctccccacaccaagccgaaattctgggaccgtccctgctattctacatacttataattgtttacaaaaaagaatctttttaacttttggttaattttcacaacttttttttgcactttttcgtgacttttttgccggtttttgactttttttcagtcgactttaaatttgatttcttcttaggaaaaaattttttttgaggagggggggggcttctaactcaggggtggcttctaggcacggcaactaatatcactgcgactaatgaaagcggcaacgaaatgacacagcaattaatagggctgctaattttatgtaaatacatattttttcctggtttctccatgctctaaatataggaaaaacactttttttttgtgtttgcgaacaaacgttgggacttttatttacatatttttacatattttgggatttttcattaaatatgtacatatttttatacatattttggctttttcgtacacatttcgcaatttttcgtacatatttttcatttttttttacatattttgaggatttttgagaatttatagaaattttttgtaaaaaatttaaaaatttttttttgaaaatgtatccctaaaaaatcgattttttttcaaaaaatgatatatcaaaaattaatttgtaaaatattcaaatgtgattctaagcctattttggtcgtttttatggcattttgtgcctatttcactttttacgaagaatttttttccaaaaataaccattaaaaaaatttatttacatattttcctacata

SEQ ID NO: 37554 - DNA, 965 bp, Heterodera glycines
tcaaacaccctattagtgcttgctgtgccgagagccggcaggcaatggatggctttcaatctgcaaaaaattagattggcaatatgtggttgtaaaaaactttttgggtatggaatttttttttgaagtgagtcaacccccttattagtgttttgctgtgccgagaaccggcagccaatggatggctttcaatctgcaagaaattagattggcaatatgtggttgtaaaaaacttttgggtatggaattattttttgaagtgagtcaaacaccctattagtgctttgctgtgccgagacccggcaggcaatggatagctttaaatctgcaagaaattagattggcaataagtggttgtaaaaaacttgtgtaaggaattattttttgaagtgaatcaaacaccctattagtgctttgctgtgccgagaaccggcaggcaatggatggctttcaatctgcaagaaattagattggcaatatgtggttgtaaaaaacttttgggtatggaattattttttgaagtgagtcaaacaccgtattagtgcattagtgctttgctgtgccgagaaccggcaggcaatggatagctttaaatctacaagaaattagattggcaataagtggttgtaaaaaacttttgggtaatgaattattttttgaagaaagtcaaacaccctattagtgctttgctgtgccgagaccggcaggcaatggatggctttcaatctgcaagaaattagattggcaatatgtggttgtaaaaaacttttgggtatggaattattttttgaagtgagtcaaacaccctattagtgctttgctgtggcgagaaccggcaggcaatggatggctttaaatctgcaagaaattaaattggcaataagtggttgtaaaaaacttgtgtaaggaattattttttgaagtgaatcaaacaccctattagtgctttgctgtgccgagaaccg

SEQ ID NO: 37555 - DNA, 796 bp, Heterodera glycines
  unsure (1)..(796): unsure at all n locations
tctagagtcacatnnttcttgtaaaaagcaaaatgggagaaattaaaattatgaaaaataatttaaataaaatgcgcagagatttgtacagaaattttgaagaaacgaaaataaaaattttggaaattttaaaaaaagacggagaaaaaatgggaaaattaaaagaagaaaatgaccaaaaattcgaagtgcaaaaagcgacgcatcgaaaaacatttgaaaatgtaacgaaaaatatcgaagacgaagccgaaattgggcagatgaaaagggaatgttcgctgtttttccaaaggttcgaagaatgccatcggttcacagaagagaaaatttacgaattggcgacgaaaaacggcgaaattcggaaaaatttgatgcaaataaatgtcggaggaaaagcgcttcaaacggtgggccttcaaattcgccttacgcttttcgacggcatcgaaagagcgatggaaagtgagcaaagcatttggggaaatgaaaaatgagaattttaggtgaaaattcagagttttcccgttttgaaattgtgtccgagtttttgagtttgggctaaagaactatgattaatctatgagtaatcgctaaatttttatcaaagcaggaaatctgatacttccactaattcaaaattaaaattttctttaaaaatcgtaaatatattttttaattattttaaaattttaaatctttttgtctatttttttttggattgtttgtggatcctttgtccgtgggtcctttgtcactttacctaagctcttagggggggggggggaggatgagt

SEQ ID NO: 37556 - DNA, 1399 bp, Heterodera glycines
attcctggaaaatcgaattttgcggtgggtgagggtgagtgagtatatgggaaatgaaagttgtgctgttcgagaccgaaatttcccgagactcgatacgagatcgagaccccaaagtaccgagacttttctcgagttcaggctcgagaccgacagtctccaacgcacttattaggggaaaggggtaaaattcagaaaaacggaataaataaaactgtatacataaaggtagccagagatattcacgagcccaacactaatgactgataattgctctcccccggttccctaatgggttttggatattacccaccgctcgttcatattgttggacaatctgaaaatttatttgaaagcatttaaattaggggattttttatttatattttctttgaattatttactttaatacacatgaacacggagatcggaaaagtgatgattgtgatgatgtaggacagaacgatcagaatctttgcgcaaattctgaaaacatttaaaaaattatttaaaattaaattaaaaaattatttatgttaattactcacccgtacggctccgtgtcgtccgcgttcggcgatgcccacgcggcaattttgccgcttccgctttgtgccggcggatggatggcctgaggatttaattagggttaagctccgacccttggggagggaaaagtcgggaatcgtggagggaaattcctcgacaaaatttgtcgagattggttggagaaattttaaaaatttcgggaacaccctcgtcgggtaggaatttctcaaaaaagcctaatcctaagcctaacagtcgaaaaaaggaaactttttataaggcaaaaagtctcagaaactcatttaaacacaatttcccctaatatggagtgaaatagacgaaattagtaatttcccgcatcgggtcgaggcttaatcctaaatttaataagccgaattattagtccgatgatttgttttaaagacatcgatagatatgatcagttcaatatggatatccataatcgtcttcctcttaattaccccaccacctccaattagtagcaattaattacccattcattgccccgcttaattgcccccacctgttgcgactgctcgatggccacggcggtgttctgtggcggatgaccaccatcttccggattcagttcagcagttgatgaagacattttgggtttattaaattattaaatggaacggaaattctctccctataaaaatcaatttttatttgtttaataatgaatgctaattatcaaatttaaaattatacaaaaaaagtatttcaaattaaaattttctgaacatgtcaatttttaagttatattgttaattcattttctacctaataaatggtcgtcatgacaataaaaaaaaggcgagcctaa

SEQ ID NO: 37557 - DNA, 1174 bp, Heterodera glycines
  unsure (1)..(1174): unsure at all n locations
aaaaaatagaattttttttttttcgggggcagtcccccccgaaccaatgcgcccaaatttatggggaggccgaatctttcgggaataacttcctataagcccgtcctttatttcagcgttggtttttgcttccccataaatgttggagtacaccaaacggacactgaaaaaaataaattttttgttttcggggcagtccccctgaaccgatgcgcccagatttatggcggagaccgaatccttcgggaatagcttccctatagtctgtactttaattctgcgttggatttttgctccccataaatgtttgagtaccccaaacggacacttgaaaaaatcgatttttttgttttcggggcagtccccccgaaccgatgcgcccagatttatggggagaccgaatccttccggaatagcttccctatagcctgtactttaattctgcgttggatttttgctccccataaatgtttgagtaccccaaacggacacttgaaaaaatcgatttatttttgttttcggggcagtccccccgaaccgatgcgcccagatttatggggagaccgaatctttcgggaatagcttccctatagcctgtactttaattctgcgttggatttttgctccccataaatgtttgagtaccccaaacggacacttgaaaaaatcgatttttttgttttcggggcagtccccccgaaccgatgcgcccagatttatggggagaccgaatccttccggaatagcttccctatagcctgtactttaattctgcgttggatttttgctccccataaatgtttgagtaccccaaacggacacttgaaaaaatcgatttttttgttttcggggcagtccccccgaaccgatgcgcccagatttatggggagaccgaatccttcgggaatagcttccctatagcctgtactttaattctgcgttggatttttgctccccataattgtttgagtaccccaaacggacacttgaaaaaatcgatttttttgttttcggagcagtccccccgaaccgatgcgcccagatttatggggagaccgaatcccttcggaatagcttncctatagcctgtactttaattctgcgntgnatttttgctccccataattgttngagtanccccaaacgacacttgaaaaaatcgatttttttgttt

SEQ ID NO: 37558 - DNA, 954 bp, Heterodera glycines
aacaaccggaaatatttcacgtttcatgttgccaactactgaaaaaaacaaccagagaagattaaagtttcatgttgccaagaaccggaagatttcacgtttcatgttgccaacaaccggcagatttcccatttcatgttgcaacaaccggaatatttcacgtttcatgttgcaacaactgggagattttcatttgatgttgccatgattttccgtttaatgttgccaactaccgaaaaaacaacctgaagatttcacgtttcatgttgccaacaaccgggagatttcccatttcatgttgcaacaaccggaatatttcacgtttcatgttgccacaaccggaagactttcatttgatgttgccatgattttccgtttaatgttgccaacaaccgggagatttcccatttcatgttgcaacaaccggaatatttcacgtttcatgttgccacaaccggaagactttcatttgatgttgccatgattttccgtttaatgttgccaacaaccgggagatttcccatttcatgttgcaacaaccggaatatttcacgtttcatgttgccacaaccggaagactttcatttgatgttgccatgattttccgtttaatgttgccaacaaccggaaaaataaccggaatatttcacgtttcatgttgccaactactgaaaaaacaaccagagaagattaaagtttcatgttgccaagaaccggaagatttcacgtttcatgttgccaacaaccggcagatttcccatttcatgttgcaacaaccggaatatttcatgttgccacaaccgggagattttcatttgatgttgccatgattttccgtttaatgttgccaactaccgaaaaaacaacctgaagatttcacgtttcatgttgccaacaaccgggagatttcccatttcatgttgcaacaaccggaatatttcacgtttcatgttg

SEQ ID NO: 37559 - DNA, 1271 bp, Heterodera glycines
  unsure (1)..(1271): unsure at all n locations
gtacacgcatcgattatgaagccgcgcatgcactagcaacgaagtcctntgcgcgaagcgctcatgtaatgcatattcttntcatctctcacaagtaaactgtctacaccgtgcaatcactgtgcaaagcatacggtctacaccgagcaactactgtgcaaagcatactgtctacaccgagcaattactgcgcgacacgctagtttatatactactaaagaaacaaggcaactcatttccaaaaacaaaatctccttacggtttgccgggaggggttcgaaatttcgaccttgggggcaacttttgacggcgcattcaggaaaactatagattttccgatccgagggccaactgagcgccaggcgccgaaaagtcatttttttaaaaatttttttgccgtttttggaattcaaaaattttttaaaggcctaattgaaaaatcggcctcgtaaaggcactcggttggactttttgggatattttttgtttcttgaccgaacccctagggcttaccagtttttctggaaaactgcgcaaaaatgggtcacttttttgggccatttcagcgccggccgaataactcgccagatattgatgataggaggtcggtgtaagcggcttttttgtacagcttgacgagctctatccaaccatgtttttggatttctgaaattttcagaaattttcgagctaggccccctcgaaaattttccgtttttgaattttatgattttttacagatttttctggggaaaacggagaccactttcaagcaaccgtttttcatgctctatcgattggtgtcattttcagaaaaatttttcaaaaattttttggaaatagaaaatttttggttgctaggcctcaatttcagttctggcgcaataactcgtcaggagttgattttatcaaaaaatcgtctaagagcttttttgtagagaattttaagcccaatctaatgtgctttatctcatgtttttaccatgagtttaaaaaaagttataaaattaattgtgattttgaaactcaaaaccataggggggaccccatggttttgcatttcatgaaaaatttttttgctcctaaattagccaaaatgcatttttatggcataatttgaggtgctgaatacgtatatacgctttattttgtgtttcagactttttggaaggtggttaaaattttttgaaaaatcgtcaaaatttgagccccggaaaatcctgtgaaatatggaaaattcataaatctcttcgtttttgatcaaatttagt

SEQ ID NO: 37560 - DNA, 994 bp, Heterodera glycines
tttcgaggcagtccccatgaatcgatgcgcacagatttatggggagaccgaatccttgcgggaatagcttccctatagtctgtagtttaattgtgcgttggatttttgcttttaatattatctagtcagttcatttaaataatttttatccaaaaaatttttttttgggttttcggggcagtccccctgaaccgatgcgcccagatttatggggagaccgaatccttccggaatagcttccctatagcctgtactttaattctgcgttggatttttgctccccataattgtttgagtaccccaaacggacacttgaaaaaatcgatttttttgttttcggggcagtccccccgaaccgatgcgcccagatttatggggagaccgaatccttcgggaatagcttccctatagcctgtactttaattctgcgttggatttttgctccccataattgtttgagtaccccaaacggacacttgaaaaaatcgatttttttgttttcggggcagtccccccgaaccgatgcgcccagatttatggggagaccgaatccttccggaatagcttccctatagcctgtactttaattctgcgttggatttttgctccccataattgtttgagtaccccaaacggacactcacttgaaaaaatcgatttttttgttttcggggcagtccccccgaaccgatgcgcccagatttatggggagaccgaatccttcgggaatagcttccctatagtctgtactttaattctgcgttggatttttgctccccataaatgtttgagtaccccaaacggacacttgaaaaaatcgatttttttgttttcggggcagtccccccgaaccgatgcgcccagatttatggggagaccgaagccttccggaatagcttccctatagcctgtactttaattctgcgttggatttttgctccctccccataattgtttgagtaccccaaacggacacttgaataaatcgattttt

SEQ ID NO: 37561 - DNA, 1113 bp, Heterodera glycines
cgaaattgccaaaacggattggagccttttaaaatcgtgaataaaaaacattaaattttcggcatactaaaaaatggggctccctaatttaagctgtttccggaggtttacaagggtgctaattacgtatctgaacttggatttgcccaattccgaactccggacccgattttgaataaaaaaaaatcagttttttttaaatacgcgttaaaatcggtcaaatttggcgcaaattgcgttttttttagcttaaattttaaaaaaaaattaaattaaattagggaccccccccattctttaggatttccaaattttccttaccccaaaaggggggcaattgcatttgtgaacgtgtacatgagcatagtgctggaatatcctccaacattaatgatcataatgatgatcaatgaccgtaacaatcgtgtgttcgtctgttggcttactgtaataaatatatttgagttggcaaaagtgcaaaattggcacatttttaccgccatttttgcaccggataatcacaaagattgccatataacaacaggcgctgcacagagaaagaatgtaaatgccatcagtaaaaaaatcgttcacatagtcttgaaaactttcggacactaagccagtggttggcctaaattaaaattaaattagaaaaagtatttaaatttagcgccatactttcccgcattttggaaagcaaatttaagcaaattgtacacaataaaagctccgtaatttatacaaatgaaaagatggctgaacaaatattggtacttgtattttgtgaaaatgaccgaatgcctaaaaaataaaataatttataaataaataaaatatatttataaaataatccaaacaatcaaaaaccattaattatattttatttttctcacttaaaaggcaatgcaacagcaaaaagtcggtcaaaagcagcacaaaacattgccattaagccgcaattgaaagcgaaaatcattggctaaaaattggaacatttaaaattaaatttgaaaaattcaaaatataccgtcataattaagtcagcagtgagcaaactgacaaaatttgtgcccgaaatgacaacaaccaggaaaaaagtgtgcccaattt

SEQ ID NO: 37562 - DNA, 341 bp, Heterodera glycines
tgcggacatctacatttttgaattgaaaaaaaattcgctatttacgactttctttttctccatactgaccatcatactcacactccccccaccctttctcctccttcatttttttttcctttccttctccaaccctctcctccctctcttgatagtttaaactgaaggcgggaaacggcaatctgatccccatcaagctagcttctgcaggtcctgttcgagcggacgaccggggatcgatccccgatttagtaatatagatgactccggaattgcaagcatgaaatcttgtaattgcactactatctgctatgaagtcgcataaataaacctgcccctac

SEQ ID NO: 37563 - DNA, 1380 bp, Heterodera glycines
  unsure (1)..(1380): unsure at all n locations
gggaaaaaaaagcaaagtcaaagacaaaaccttaaagcactagccgattgaaataaatgggaaaaaaaagcaaagtcaaagacaaaaccttaaagcactagccgattgaaataaatcggaaaaaaaagcaaagtcaaagacaaaaccttaaagcactagccgatcgaaataaacggaaaaaaaagcaaagtcaaagacaaaataggaactttatacaaatttaaaaaagtaatattttgtatatcgtatacgcatttaatcaaatttctactttctttataaacgttagctaattagtcagcgtctatttattttctgtaaaaatttgcctctttatttaaaattaaattaatataatttcatgaaataagacactaaatgtatagagaatgaattaacgtggtcgatcggaataaatggaaaaaaaagcaaagtcaaagacaaaaccttaaagcactagccgattgaaataaatggaaaaaaaagcaaagtcaaaacacaaaaccttaaagcactagccgattgaaataaatggaaaaaaaagcaaagtcaaaacacaaaaccctaaagcactagccgattgaaataaatggaaaaaaaagcaaagtcaagaacttattctacctaatttcatggtgactgacgaggcatttgactcccttaagagagccttcccttctcatgtacttgtacctaaaatgttgttggcacaaaaagtaaagggggaaaaagaagacaaatcatccgatcaagggctaagtctcaacagatcgcagtgtaaaagctgctctactgctaacaaccccctgaccagtagtcaagtcgtatacaagtgattttgcgccccgacgttccaccatggcacacgagtgctacggctttggcaatgtgcgagcaattaagcacgcacatcgggccagatgctggggcatttgtgctgcaccgcaagcggcgcataagtagtgcctcccgacaccggggagcaagaatattgctatcttgcctaggcgggattctgacttagaggcgttcagtcataatccctcagatggtagcttcgcaccattggtctatcgaccaagcacatgaaccaaatgtctgaacctgcggttcctctcgtactaagcaggattactatcatagcaacaggtctttagtagggtaaaactaacctgtctcacgacggtctaaacccagctcacgttccctattggtgggtgaacaatccaacgcttggcgaattctgcttcgcaatgataggaagagccgacatcgaaggnatcaaaagcgacgtcgctatggacgcttggccgccacaagccagttatccctgtggtaacttttctgacacctcttgctggnaactttacactttcaaaa

SEQ ID NO: 37564 - DNA, 473 bp, Heterodera glycines
cggcacccaaacgatgaagcaccagcagcaacggcaccaactcaccaacaaaatgccaacatcgatgccagcaacaacaacaacaacgcgaggtgtgtgagattttggtaaaatgcaaccggacaaaaacgtcgcttggacaaatgtcgatgggaatgggatataacgtcccagcaaagacaaggaatttttttgtttccagaaatttagcaaattaggttccaacgacaatttattttattttattaaaacaaaaagaaataaaagtagagtaaaattcttttgttagggaaagcctcaacaaagaatttttaatttatagaaacaatgttggtgcataaaacaaaaattttttgataaaaagtcacagtttgagaaaaattttctgttttttttgggtcttgctcttgcgtttcgggaaattctcggtctcaaaccagggacgcgcggggtacgtacccccccccccccca

SEQ ID NO: 37565 - DNA, 1147 bp, Heterodera glycines
  unsure (1)..(1147): unsure at all n locations
tttgagaaatttatacgtacaaaagcgctcgagcgtgagagggaggcggtgcgcaatcgccattttattctcagagatttttaaatttatctatatnccaagaaaaatgactatctcttattntgagaaatnttatacgttacaaaagcgctcgagcgtgagagggagggcggtgcgcaatcgccatttatttctcagagaatttttaaatttatcttatatccaagaaaaatgactatctcttcttttgagaaattttatacgttacaaaagcgctcgagcatgagagggagggcggtgcgcaatcgccatttaatttctcagagaatttttaaatttatcttatatccaagaaaaatgactatctcttattttgagaaattttatacgttacaaaagctctcgagcgtgagaggaagggcggtgcgcaatcgccatttaatttctcagagaatttttaaatttatcttatatccaagaaaaatgactatctcttattttgagaaattttatacgttacaaaagcgctcgagcatgagaggaagtgcggtgcgcaatcgccatttaatttctcagagaatttttaaatttatcttatatccaagaaaaatgactatctcttattttgagaaattttatacgttacaaaagcgctcgagcgtgagagggagggcggtgcgcaatcgccatttaatttctcagagaatttttaaatttatcttatatccaagaaaaatgaatatctcttcttttgagaaattttatacgttacaaaagcgctcgagcgtgagagggagggcggtgcgcaatcgccatttaatttctcagagaatttttaaatttatctatatccaagaaaaatgactatctcttcttttgagaaattttatacgttacaaaagcgctcgagcgtgagagggagggcggtgcgcaatcgccatttaatttctcagagaatttttaaatttatcttatatccaagaaaaatgactatctcttattttgagaaattttatacgttacaaatgctctcgagcatgatagggagggggcggtgcgcaatcgccatttaatttctcagagaatttttnatttatctatatccnagaaaatgactatctctttctttgaganattttatacgtta

SEQ ID NO: 37566 - DNA, 1225 bp, Heterodera glycines
  unsure (1)..(1225): unsure at all n locations
cgagtgagtacatcggtgcaggaaattattaattgtaaaatttttaattgctttttcaatatgccaaaaaatgtaggcttactgtttntagtgaaaattcgatcactcatatttcttgctaattgagcagaagcgtaccaaactttgcagggatactctccggtaaaggactaacttacactgatatgagcgccgagctagctggctcaaaaaaatttttcgaaaatctgagtctttcgtttttatttatttgcaaaattaattcataaatattttttcagaaagggttctgaaacgcaccaaattttattcacatgttagtttaggcactctgatgctttttctatcaataatggaggtgaaaaaagactttacaaaataataccctttgggagaaagtttaggcgtaacatgatgtgaaaattttcaattttttctagtctaatctactcaaaacggttcagaattcaataaaaataacattcacggtgcgaaaaatggggtttgacaagtttattggggaaaaaaagactttacaaaataatacccctgggagaagggagtgggaaacatgatttcaaaattttcaattttttctagtctaatctactcaaaccggttcagaattcaataaaaataacattcacggtgcgaaaaaaggggtttgaaaagtttattttgaaaaaaagactttacaaaataatacccctgggagaagggagtgggaaacatgatttcaaaattttcaattttttctagtctaatctactcaaaacggttcagaattcaataaaaataacattcacggtgcgaaaaatggggtttgacaagtttattggggaaaaaaagactttacaaaataatacccctgggagaagggagtgggaaacatgatttcaaaattttcaattttttctagtctaatctactcaaaccggttcagaattcaataaaaataacattcacggtgcgaaaaaaggggtttgaaaagtttattttgaaaaaaagactttacaaaataatacccctgggagaagggagtgggaaacatgatttcaaaattttcaattttttatagtctaatctactcaaaacggttcagaattcaataaaaataacattcacggtgcgaaaaatggggtttgacaagtttattgnggaaaaaaagactttacaaaataatacccctgngagaagggagtgggaaacatgatttcaaaatttt

SEQ ID NO: 37567 - DNA, 1429 bp, Heterodera glycines
tttgtctactttttttttattcatgaatttagtgattcaattattttagcatttggtccaccaccagtggcacgattagcaccagccgaggttgattggatgagcatttcatcctatattttatatcataatttttttttttttgcattttaccgcatgaatttcgttgtaaatgtgttggacttccccctgataaggttgcattggttgcagttggtacaaaatttgttgttgttgttgcggcgctggaggttgcggcagacgatttgtttgttcttcttgcggttgttgttgttgaaattgcggagtttgatgcggcaggatttgttgtgaagttgcctgttcgtgctgctgctgttgaatgagtgattgttgttgttgctgttgttgttgcggcgatcctacgctttgattttgcaaaattgtttgttgcggttgctgcggttccggcgcagcgttttggaattgttgcagttgttgttgttgttgctggtggtggtcaaggtgttggtagtcatgatcttggggttgctgcacaaattggtgacgctgatatgcaatgttttgttgcggttgctgagttggagtgaacggcagaaattgtggttgttgctggcgtcgctgaacattttgttgttgttgttgttgttgatggcggtgttcagtgtgaaaaggaaaggcagggaccaaaacaaattgctggtgttgcaccaacggggcacctgcttgattcatgtcagctgctgcaaaaactaaaaaattcgcatacaattaaataattttaaaaaatccgtaaaaaagtttttttaccattttgccccatttcgctaaaacccgctccggttcgttggtgtacacgaaaaaatgggcgttgtaatgcgcgcacgtgaccagaaaaaaaaagaaaataaatcgtattacattttacaataaaagtttaataaaaattgtttttttacctcctctaaattgcctatttccgctacgaaaacgcggttgccattcatgctggtgatggccaaggctgttatcgtggtgcgtaccatgatagcgctggccctgtgttttttttttaaaaatagatgaatatttgatagcatttttgagaggcacatttcccatattttaaaagctcatgtcagaaaatcgatcaaaaaataaggcaaaataataataataaattttaatcatttaccaaaaatcgaaaaggaaaagaaacagtttactattctttttaagcccaattcactttttaaaattctgttgtatctgaaaaatttaacactatttaaaaaccatttagcaaacagtctcaaattagttccattttttgtaggttaatttacaatataattttagaaagttactcgaaaaaatataaaacacaaaaatggcattttgagccttttttgagagcgtagtaattcaa

SEQ ID NO: 37568 - DNA, 1085 bp, Heterodera glycines
  unsure (1)..(1085): unsure at all n locations
ttaaagtttttggcaagttaattattgtgaaatgaaaaagtaatgaaaacncatttaaaaaaagagtgataagaagccaaaattaaattatttttgataaatgaattgattaaagacgatatttaaccattagagagaattaattgaaataaaacaattaaaataaattgaaaattaaatttntaaaaaattattcaaaaaaattatttgtactattaccattttttgaataagaagtgtgtagcgctcagaaagtgcacgatgttgggttgaccaaaagctaagattaaaaaaaatatttatttaaatttaattttttttttaatttttagccaccgttcaaattgctgaaaaatacgcgctttgcattccacattgaagcggattgattcagagagtgtgtccaatatgacatcaatcgcaattgtcatgaacactcgagtgtctaaaccggagaattaattatgtaaatcgtatttgaaaatttggactataatttatatgtttttattagttatttatcaataaaaataaattaaaaataattactttaaatttatgagtgtttattttttaaaagaaaatattttattttatttaaaaaaaatttttttttcccttattaatactttctaaaaattttttcattattatttgaatttttttcatttcatattttacaaattttaatcttttaaatgcataaattaaataaaattaatataatatagatttgatatttaattaatttgatatttaatattttattatttctgaatgcctcttggtgtttctgtgttcagcacttcaaaattgtgatcgcttggattccaacgtgcttccgcaataaatacgaagggattttgttggccttcgccagcactttttaattctaataaatgcctaaaaaattgaatttttttaaaattaaataattcaaaaattaaattttttttataaaaaaattccatgaaaaaaaaattgaaaaaaaaaattcagcgatttttttgaaaattttttttataatgttttgaaaaaatcgctagaaaaaattttcaaaatttttataaatttgcaaagttttt

SEQ ID NO: 37569 - DNA, 731 bp, Heterodera glycines
  unsure (1)..(731): unsure at all n locations
tcgtttttcttcgctttctgtttctcactgcttgtcaacaatatgtccatcttttcatcagttagtttgagtaaaacaccccaaagtcacgagaatcctccaaatttttgcgcaaaatgtcgataaatctctgatcatattcaacaagtgcttcgttgccttgggttctttaaaaacataaaaaaattaaatttaaggttgtgataaaaattgtttgcttgccattacaaaacatggaatttatttgcgaaccagtcaaacagatcaggatttactttttaatgatttatggattttaattttgcgagaaatttcataaatcctagataaggacaggacctacaacaccaaatatgcaaaaaaaaaaagagagaaaaaccgagtgaacatttgtcaatgtttttaagttgtccttgtttgaaggggtcgagtcttcgaaccaacccaaaaaattaatcaatttaatagaattatcagactcatcctacacagagaaatcaggctatcagaatttgaaggctttgatgcgattgaaaactcaaacgatgatgaaattaggcatcatctaagaaggtctttgcaataccgacttaggtgcaatgatttcggaaccggaatgatgatccagataactataagttttttcgctcacatggccgcccttgtgaaaggaattttctttttttataatgataaaatanatttctgcttatttttttagattctatttg

SEQ ID NO: 37570 - DNA, 1632 bp, Heterodera glycines
  unsure (1)..(1632): unsure at all n locations
agcttgctgcctgcggtcctggaaacactgaatttaggcaatactatagaaaggaagctatgcaaaattccacttcttttaattttcagatatttctgacggaatgccttcagcctattcgcctcggtacgtggaggccgcgtggtacgaatggtgggagcgccgcggtttctttcggcccgaatacggcggacggaatctcgagtttgcttttttgtttttttaacgggttcaaactttttcgcttggccaaaagtgacctaagtgctgcattattgtgcgatgtttgaataatgcgaacaatgtttttcagtgctccgaacccaaatggccaatttaccattgtcattccgccaccgaatgtgaccggcactttgcacttgggccacgcactgtccaccgctgttgaggacaccatcgcaagatggtcagcaaaaaaatacgcacaattactagtataggtaaaaacggtagacggctcttctctcccttcgaattttgaccctattactccaattaattaggagtaggaaatttaattgaaataaaaatttttcctccgtttttggcatcgaatgtgcggtcggactgtgctgtttgtgcccggctgtgaccatgcgggaattgccacccaagtggtggtggagaagaagctgaagcgcgagcggggactcagtcggcacgacctcggccgggccgactttgtgaaggaagtgtggaagtggaagaacgagtgagtgctgcgggcatcggattcatttttcaatgggaaacttgcgctgttttttcattttgatcgttttttttattcgttcagaaaagggcacataatttatgaccaactgaaaaaaatgggcgccggcgtcgattgggaccgagtggtgttcatgatggacccggtaaacccaataaattcgaatgaaaattttaagaaattttttggcatcgaataaaccccatttgatcgtcttttcctagaaaatcatgcgcgctgttactgaagcatttgtgcgaatgcacgagaagggtgtcatttaccgaagcaaacggctcgtcaattggtcatgcgcattaagttcagccatttcggaaattgaggtacaataaactgacttttctaatagcacagtgacgaagatataaaaagtgatcaaaaaattcaaatttgaacttttttttaaaaaacgaatcatttgtgagaaagttttgattttcaaagcatcgcattttgattccattctcctaaaagaacgttttgttttatttcaggtggaaaagcgtgagattaccggtcgcactttgctctccgtgccgggccatgccgaaaaggtcgaggtcggcgtgttggtgttgttcgcctacccactggaggaggaagtggtggaggaggacggcagcaaaacccgtgaaattgttgtggctaccacgcggctggagacaatgctcggcgacgtggccattgcagtccatccggaggacgcgcggtacaaacgaatcattggcaaagtgtgttttgtgggagattaatcgaaaaacaattggcattaatcggtgaaatgtactttcaaattggtttttaaaacanggggtaagaaataggctgttcaagattatataactttccaatttttg

SEQ ID NO: 37571 - DNA, 1022 bp, Heterodera glycines
tgattggagtgtcagtgccaaagtgaaaaaaaggggggcaaagagagggaaaagagtgggcggaagagcaatggcacggactgttcatcagcagaagagaggcaaaaggaagggaggaaaaaatgccaaagggaagaggaaacgattgtggcaaaggcaaaatgaattaaatggataataaataaatagtttcattaaagcaaataaaagacccaaacttttttggtttatacaacaaaagggaatgaatgccctaccgtatgccttgggattgttttgttaatttactgtctgttgtatatttatgctggtcttgtttttttgagtctgccactgctgatcaaccagcagtgtttgtcgtatttgttgtgattaccgtatgctgacagtgctgagtcatttcgccaattgtcgcggaaagagtggccatttccaaggccaactcccactaacaaaagcggagagcactctgtccattggcaaatgcaaaattggcaaatgaatgggactgtgtgccattctcgatggaaaaacattgccttttgccgccggcaattcattcgtattaatcaaaatatttcccgacggattttctccgtttgacgtccctcccgagcgaagaagggaaataagccgaattgggcactaaatttggacattggtcaccggcggattggattgtcgacgtcaacaattgcacaatcgaaggccaagtcggcggacaacaccaaagggacgtcggcatgcgcttttccgagagggaaattggggggagaggaaatgggggaaaagagagggggcgggggatgcgcaaaacgatgggcaattagaaagagtgccaatgccaaagtcgacggtgccaaccaaaaccatgaaaatagcgcaaaatggtggacggaccgaaggcgcaatgggagggaaagtccgcgaaaggtggaaccaaagcaattccataataaaaagtttgaccgggaaagtcaatcatatgaaagagacaattaaatgaataccaatgaatgtca

SEQ ID NO: 37572 - DNA, 53 bp, Heterodera glycines
tactgcgcccccagcctcgacaccgccatcaaggagacggtctaccaccagga

SEQ ID NO: 37573 - DNA, 1324 bp, Heterodera glycines
tcaaggtatattcattcgtgtcccttttttcggctggggtgacatttgtgtcacgggatttaccatccatgtcatttaagggctcagcgcagctgatgctaaaatcgcggaaagtaacttctccagcgcaatgaaaggtttcactacttttgaaatagagatttcaattaccaaaatttgcaggacagggtttgttcgcctgctggcactaccattgctggactgcgtgagcttgaacgctctggggtcagatcggcattcattgaagcattaagcgcttccactcgtcgtgccactgaaatggctccgaagacaaactaacaatttttctggttttgataattttttcgtcaataaataattgtttttgtaactatgcatatgtttttttaatccgtaacttctacttttacaaatatttctttattttctgatttatttttttttttaattttgtgggttccgatgagttgcaattccccccattcaaatagccagaaggagcaccaaaaattgctagaaaaagaaccaataaaagagaaaaggagacggagaccgctgactaaaggccttagatcggaactgaggaccttggtctgtcgagggcgtttaacgttttgaattccatccattgtcagttggagaatgccattttggattccgattccgcgcttctttcatcggttttctctcaagatgacacaactctcggtaattgtttttttttctatttttgaatatgcttttttaagttgcacctctgtcggcccttctcttttatctccaggagcttggtcataatattacacggttcaatgttttgtcaaattttgctctcgaaagcaccgccaaccgaactcgaatttttacaattgaaaacaaggaaaagcaacttttggtacgaataaatcctcacattcgcatgcacaatgatgagaaaaccgtttttgtggtcagtgataaatattaatgagcattttccttttaaatttggtttccattaggacaatttacctcctttctgtacgtccgatcgactgaaaaaacgagctgaattttttggtcgtgtggttaacattcgaatgccacagattgggcgactccaacgccgaatcgctcaaatgattggcggcgtttggccggtccattccggatttgcttttgttcagtttgtctctaaaacggcagaaaaacgcttttgtaaggtgtgtgagtcaagaaatgaaaacgatttccaaatcacgaatcatagctgaaaagaaaattatcaaattaagcgatatgcaacgaacagccgactaaaacgaattcacccaccacggac

SEQ ID NO: 37574 - DNA, 949 bp, Heterodera glycines
tttgttgaacttttgttattttcgcaccgcaaaatgattcgactttttgttagaattcgggtccgggattcaaaattggtcgaaatggatgtcagattcgtgaccagcgaccccgaaaaccccctagaaatgtttataaattgatttaaaaattatttttttatgggctgtaaacgacataagtaccagggttgccgcgggttacccgaaacccgacatttttctcgacccgaaacccacccgatgattttggtcgggtttcaatgaattttgggaattaatttttgagaaatttttaggtcgattcttaggtgtgtatttttcgttttatcgcattttttgttaataattttgggtaaaacgccaaaatagatttttaatatttttgtaattttttctcgaaaacaaaatcaatgattttggaaaaaccgagctcattgtctggttcattggccgactaagaatcatcacttgaggtcaaaaaccagcattttggaaaatattattcaaaatgaaaaaatcaataaaaatgtttcttgctgcgcgctttttccgaaaaatttttttgaacaaggggccggcgcggaaccaatttttgagattttgagccaatttttcatgaaaaaaatgttttttttgcggagggagggggttaagtgcattttatacctcccacacttcagaaaaaagtggattatttaccatatacctaattccgagcccaagaatatgagctgctaccgaccctgaaaatcagttgaaacgttttggcgggtcttttgctttaggcatttttaactgtttttgattaaaaatattagccgaaggtttggtgatgaaaggcgtggttttttctaggacaatccttcgtctgtctctctgtccgttgtctttcgtcagctgttcgatggacagaggaaggaagcacagactgacaatcagtgaaaca

SEQ ID NO: 37575 - DNA, 1458 bp, Heterodera glycines
acagaaatgaaattgttgcccactttgatttctctgtccatctcgcccttcacccgcccgtcctccagccgtggcaatgccgtgccagtgatgttcatctccagccgggcaagcacttggcccgcgtgttttatccatggtgaaatgtgcatgtccatgaacagacgcgaagtgatgttcagcgccgattcggaggggaggaacaaaacggaggataaattggtgggatggaagcgcaggtcgacgtgctggttgggatgaagccgttccaacggggggaagaagcggccaatgcacagttggaagaaggcacagctaacacagcggggaataaagggggataaagcccagccattcactaattagttgaccaattagtaacaagggcaaagatccttggaaatcacttgtaatgagtctatcggaattgacgaaccaaagccaaaatcaatcgcttaaattttaccaaatggaacagaaaatcactaattagtgattatttctaattataaagcaactgaaaagccgatcaaaatttataactattaaactgaacttgttgaaaagaaggacattggatttgcaacttttcctgagtgagaattacagcctcttttttgaacctcatcagtcggtaaaatgtcatttaatcccaaaagcccctaacgctaatccaatgcttttcctaagtgccacaattcggttttgccacattaattgcactgatcgcttctctctctctcctctgctctctgctgctgcttttacttacttaccttgtgctcaagaatttggcgaagtgtccgccgtcaaaggtcggcccaatgacaaattggacgtattttgcgtcctgaagcgatcggagcaaacagtcaatcactgtgcggtccaaccacagcgatgccattggcacattggcgggcaacggcatcggtagagggacgggggcggagaagggacacggggaccgcatgggcaccgaactgttgtcattgttgtgttgcacgtacacctctacaagcgcgaatgtttggagaaatgaactaaaatggggcgaggggaaaaaggaatgaacttattgattggtaaacagatcgccggtgatcaacatttgagcagggttagagtgaaaatgcttttggtgtccgatcagaatcagagattcataaaaaatttttatgtataatgaacgaggattctggtaaaatctgaatccaattttggagtcgaccaaattaccaagcgactttataaaaaaccgattaaaatttttgagcattccgttgaaaagcagtgttcttctggtcactatttattaataatcagttttaagcaagccattcaccaaatataaattaattttgtgggcattattataccttatcgattgatcgttcacaaaatttctattgatctgttgggcaagaatttcagactcaaaattacgcttatagatta

SEQ ID NO: 37576 - DNA, 978 bp, Heterodera glycines
  unsure (1)..(978): unsure at all n locations
tctcttatttgaatgaaatttaattcctttttttttggtcaaaaccgacaaggnttgtttcacgacccttccaaaatctcagaaaaaacgccacgaatcgcggtccgctccacccctgctgatgtcaaattaatgtttaccccccactaaaaaccttacatacgagaaattcaaataatcaagtgaaaaaaaaagactcactactctcatccgcgatgtccttcattccctgtgtttgtatactattttccatgctttactttgttaacaaaatattccgagagtgaataaagtagcaaaaaagtggcttttacatacgtgacaatataacgtaatgaaaagggcatttgttttcacagagaagtaaaacttctttattaagagatcataatgggacaatagatttcgccaaacaacaatataagaaggaatgaaatatatattgaaaatttaaataacgctaaaaaaaattttatgaaacgaattttattttaatttgtattgaaaaaaaagaatttttcgtggttttttctttagtaagtttctgacagtgacagttatgttttggttttttagttttcaaacaaattcttttcacttgcatttacggttttttgaccattgaatccttttttcacgatgttttattttattttgataatcggtcttttacattttttcattccttttcaagaacttaatttgaggattacattggaaataaattaattagacttcaaaatgggcatttcccaagacagatggcacaagcggcgaaagactggggggaagcgaaaccccattcacaaaaaacgaaagttcgaaatgggacggccggcagcaaatactaaggttttctgaattaaacatgtgttgttttattttcgttatttatcaaataatatttcattagattggtcctaaacgaattcatttggtgcgttgtcgtggcgggaacattaaacatcgcggacttcg

SEQ ID NO: 37577 - DNA, 902 bp, Heterodera glycines
  unsure (1)..(902): unsure at all n locations
atagtgacgaaaaagtgccaaaatagtgacaaaatagtgaaaaaagtccaaaatagtgacgaatagtgacataattttcatccaaaatgagcaaaaataatttttattcactatttgcagttgcaaatgagtaggactgggatttttaagaccaaaaaaccncaaaatagttacctaaaaaaatttttaaaattaaaaatttttgtcaagaaagtaaatttttgagaaaattttttttcatttcataggagtatataaattcattgaaaataacgtaaaaatgcacaaaaaataatgtacaccgcccggattcgaacctgccgccccccccccccccagaagatgactcagaatccccaatcacacagggattctgagggcttaacgatctaataactgaaatctgatgtcagattagtgatcagcagcctcaaatagccctaatgacatgtttttggaagatttttgtcgaaaaaattttttcactcaaaaatcatgtgctcccccctttggtcccgaattccaaaatcacttttatttttataactttttacaaaaaaatgataaaaggatgaaataaaatttattaaataaagaaaaaaattgcggattttttcagtatttaaaatttcaaaaacacctttacagaaccgagttctgaatttttttctgaaaaatcgaaaatttccagaatttctggaataactttttttgtttttgtggtataaatttcaaataaacctcataaaattctcccgattttttgctatttttaaagctttaattcacttaaattgagcagtccttcattgagttatgaattttcaaattttaacccatttccccaggaccaaaaaaattgaaaaatattttcgaatttttaaaaaattccaaaaaatatg

SEQ ID NO: 37578 - DNA, 615 bp, Heterodera glycines
ctctctcacttcaactgttatttcattttctcttctcctctctcactctttatcctttcctctattgtctcctcactctctctctctatcgtttcctctcttctctcctcttctcaccttttctctctccattcttctctcctttcctctctctccccctcctttcctctcttttctcctcagtctctcgccctccattcctctcttccctcgaatctctcctctcctcattctctctctatcgtttcctctcttctctcctctctcttattttatcatttactcaattctcttctctcctctctctctctcattttatcctttcctctattctctcctctcctcactctctatcgttaactctctctcttcttttctctctctctccttttctatcatctttcctttcttctctccattcctcctctctcttatctctctatccaatttctctctctcctccctttctctctcactcgttctttctctctcactcgttctctctctatccccctctcactatcgcttcctcttttctctctctctctttctctcactttctcccctctctctatatcctttcctctcttctctctcatttccccacttctctcc

SEQ ID NO: 37579 - DNA, 1025 bp, Heterodera glycines
  unsure (1)..(1025): unsure at all n locations
aaaaatcacgggtcattcgatagtgcgagaattccccggagaactccaaaaataatgtcaaatgattttttgaactcgcatctctaaaattttgtcatcccatcagaactcattttagcgaaggtgtaaaggtggccttcgtaagacaattttactttttgttttttggttgcaattgggttagccatttctgaaaagaatgtacatcaaattggttaactattaaaaaataataggatttggaataagtaaaattgtaaaaaatgagcgagtgttaattaaacctaacttatgccaagtggcgagggatccctcaggcttagtttttagaatcttaatttttaaaaaagcacatttttctatttttgggttggggcccaaacgaccccggggcccaaacgctctggtccccttaaaaatggcaagttgatccctcctaattcatcataataattttatacgcaaagcgtgacgccgccaaaataaaaacaacaataagataaagcaaaatggtcacatatgagagtggttcataaatgtgtaaaacgatccaaatcaattgagtcaagaagtttagaaaaaacagttgaattttgtaacctaacttctttaggtaataacctatagaagcgagaagcacgaacaaaaaatgaatggtatctaacattagttgagcaaaaagttggcttaattaaattacccagtctactagaaaaattgggttgaggtttattatatttaatttggacaaatccattagttatttcatggaaaagtcctagatcaatttttaatctccttttttggagagactccatgttataaattgaaagcaattcgtcgtagttaggtatgtcaacataaaaatttgagcgtctaaaaacaattcttaaaaaagttttctgaacattttctatttttctaatatttttcttcaaatgcggatttaaaaacgggggatgcaaattctanaattggcctacaataaacattanataaataantgagntattttangggtactt

SEQ ID NO: 37580 - DNA, 136 bp, Heterodera glycines
cctggcagggtcgaaaatggaggaaaagcgacgaaatgatcagaagcagaagaagccacagtgacttgtgaatgaaaaatagtggcggaaagaaggaaaacatctccgttttataaagccgaaaaaaggaacacag

SEQ ID NO: 37581 - DNA, 756 bp, Heterodera glycines
ttttacaatgtaaaaaattgtgtttccgattgtgttccattccggaatgtatttttagtccaaaatccattccggaaggtatttttagacccaaattttacaaatgtaaaaaattgtgtttccgattgtgttccatacccggaaggtatttttagacccaaattttacaaatgtaaaaaattgtgtttccgattgtgttccattccggaatgtatttttagtccaaaatccattccggaaggtatttttagacccaaattttacaaatgtaaaaaattgtgtttccgattgtgttccattccggaaggtatttttagacccaaattggtatttttagacccaaattttacaaatgtaaaaattgtatttccgattgtgttccatacccggaaggtatttttagacccaaattttacaaatgtaaaaaattgtgtttacgattctgttccattccggaaggtatttttagacccaattttgtaaaaaattgtgtttccgattctgttccattccggaaggtatttttagacccaaattttacaaatgtaaaaaattgtgtttccgattgtgttccattccggaatgtatttttagaccaaaatccattccggaaggtatttttagacccaaattttacaaatgtaaaaaattgtgtttccgattgtgttccattccggaaggtatttttagacccaaattttacaaatgtaaaaaattgtgtttccgattgtgttccattccggaatgtatttttag

SEQ ID NO: 37582 - DNA, 602 bp, Heterodera glycines
tgcatctatttggcacatggatacacttgcaagtgggccaaatggaattgaggcgggggcgcaattaatgaaactcatcaattaaatcataattaacctttgcttttcccctttttgtttaagatgcttcgccaattatacagatgaaaacacgcaaatgccgcgacgcaattgcacaacggcagtgcccgttggcatttttcaaccacaaagcaccgccggtggcattcttccgtttcttctccctttgctgttggcactgcttttcctgctgctcgccctttggtcattttctcctttttattatgataatcccttcttttcagctgttgtctctgggcactttctcgaatgcgatggctcggcggcaaaaaaagggcattcgatgcgttggacacgcgggcgagcgacgagtcattgtacggacaggcactgaccatcccacgggcgagacttgacgaggcgagtggcggtggatggactcattacggagcatttacaataaatcactctaatcactaactaattaattaccccctttaactcatttgttaaccccaaaagccttctgcccaattaagacattgactcaatggccagca

SEQ ID NO: 37583 - DNA, 1117 bp, Heterodera glycines
aaaccctagagaagtgtcgttcaacctacgccatttttgctatggtgcgctcttttgccgaaaacgtacgatcccaatgattttttgaaaagcgaaacttctgactcaaaacacctcaaaccctagagaagtgtcgttcaaactacgccatttttgctatggtgcgctcttttgccgaaaacgtacgatcctaatgattttttagaaaagcgaaacttctgactcaaaacacctcaaaccctagagaagtgtcgttcaaactacgccatttttgctatggtgcgctcttttgccgaaaacgtacgatcctaacgagctttttgaaaagcgaaacttctgactcaaaacacctcaaaccctagagaagtgtcgttcaaactacgccatttttgctatggtgcgctcttttgccgaaaacgtacgatcccaacgagctttttgaaaagcgaaacttctgactcaaaacacctcaaaccctagagaagtgtcgttcaaactacgccatttttgctatggtgcgctcttttgccgaaaacgtacgatcccaacgagctttttgaaaagcgaaacttctgactcaaaacacctcaaaccctagagaagtgtcgttcaaactacgccatttttgctatggtgcgctcttttgccgaaaacgtacgatcccaacgagctttttgaaaagcgaaacttctgactcaaaacacctcaaaccctagagaagtgtcgttcaaactacgccatttttgctatggtgcgctcttttgccgaaaacgtacgatcccaacgatttttttgaaaagcgaaacatctgactcaaaacacctcaaaccctagagaagtgtcgttcaacctccgccatttttgctatggtgcgctcttttgccgaaaacgtacgatcccaacgagctttttgaaaagcgaaacttctgactcaaaacacctcaaaccctagagaagtgtcgttcaaactacgccatttttgctatggtgcgctcttttgccgataacgtacgatcctaacgagctttttgaaaagcgaaacttctgactgcaaacacctcaaaccctagagaagtgtcgttgcaactacgccatttttgctatggtgcgctctttt

SEQ ID NO: 37584 - DNA, 1453 bp, Heterodera glycines
  unsure (1)..(1453): unsure at all n locations
atgcacataagtgattcctttctcaaaaatgtcttcacaaaaacacattagattctaatacattaaaacaataaataagttattgcatctttaacgtgcatatacatcaaataagctccattcccagtccaaggtccaatcccagcaatttcccgtagaaaagatgtggtttttccccatctaaattcaaaaatcgagaggaaattgacaaaaaaccccacgggtttcttgaacatcctcttgaggtccaccttttctttgcctgaaaatggcaaggatataaaattaagttcatatatgtaaatttgcaaggaagtacttaatttgccataaaaatctgtcttattattaagttaaaagcctatcgttaacattggaaaaaaaacgtggagaatttgatttgttccaacactcacgagtaagggcgatggctgcaatttgcccaccacacaccatccgcggatgcaaaactcgtggaatacgtggttacgatgccaaagcatacgtctaaaaagaaagtgtcaaaaaacgaacaaaaccgtgacaaactttttcttctggcagttcaagagcttcggtcatcactcctccattcgcttcatccaacgaattgaaattgttttggttggacgacggtttatgcaaattattcccgcagacggcgcacatatccgactcgagaaccctaaaatggtgaaaaaaacagtgaacaattccgttttgttggtaccgttttggcaatccgtcatgagtaaaatactagaaaaataataataatgtgttaatctctccatttcatttttaaaaccccgattttgcaggccaatctgtcggtcagagaatgtgccaaatcacgtccaagcacaccgtaataaaggcaataaaacaacaaatgcacgccaaaatccaagctcagattactgctaattccttaaaaagccttttttgaatttttagaaaatttaattttaccgaacaccgaatttattccaatgacagtaaagacgagtgaaaagtaaccgacaataccaaaaatgtaactgagtttatgcatgaacaaagtatttgtagacgagcctaaaagggaaatggacgaatttcccttttttgcgtaaaagccactgaaaacctggngagttgatccggaaattgccggctgattgaccctccgccaaacgtaaaatatttgaagaagtgaacacagtccaggaaagaatgaatcaccaccagccatttttaagtgacaccataaaagggattagccaaagaccgaccaaagtggcgaactgaaccaaaatcatatttattgttagacaaagccctttcagcgaaaccaccacccgttttttacccggtatgagcgaaaatgtcttctcttcacaacatcaagattattttgtgcacaaccattgagacaatgaaaatgatgaacatttccgcatgccatcgcatc

SEQ ID NO: 37585 - DNA, 356 bp, Heterodera glycines
aaactagagatcgacctgtacctggatccaggcctgtatttttcctggatccaggtacaggtacaggccagggatgggccaaattgaaaaataaaaagcgaaatgcgaaaagcgaaatttgcgaaactgaaaaatgcgaaatgaaaaaaaagcgaaatgcgaaaagccaaaatatgcgaaaatgcgaaaagcgaaatgcgaaaagcgaaattttttctacaactttttaatagttaaaatcataaagcaaaaatcatttttaaaattttattccaaatttaaaaatcaataaaacacttttttgaggcgcgctttttccaaaaaaactttttgggaaggggggggggggcaggcgg

SEQ ID NO: 37586 - DNA, 1273 bp, Heterodera glycines
ctctcatatgcaaagttccacggtggtttgcaattcttctagctaatgacgcctgctgtttggtggccaatccgatggtggttaatctattagcaagttcgctttattttgtacgtgagcacaataattggaccacttactgttaattaaaagcattttatatagaaaagttagcaattatgataggaagagctggaattggtttgccgacatcaagaagagagataacgagaggcgagagagaaaactgagagagggagaagagatgaagagatagagagagagagcataaaagaaaggagggcgaggaagaagagagagagagagcataaaaggaatacattaaacttttcgggcttagttgcaacgtggataaaaagatgagttttattaataaaaacaaaattactgtctccctccttcttgtaattgaccatcaattgttcggcacccgtaatttcgaggtcactgtgacaagcggaggaatcccaacaattcttttgcggtggaattgaaacagtctttggaatggtctaaattcaattttgaaataaatcaattatcatttagttactcaatcgttttgttcatacactcaaaagtttgaaaaaagtaaactaagagccgagcagttcagtgattgccattattttgaaaaaatgccttatttcgaaccaatttttaatcaaagatcccaaaattgacgttctttgttcgttttttaaattttgagtgtagaaaaacggagaagtcacacaccatttattatcaaatgatttatcattccaaataaataattcaccaaaaaagcgaatttgaaattcgggccaaaatttgcttcaattttatcacccggcgaacccaaagaaacgcaagggaacaaacgatcagccgaaggagggaagaacaaatcagatggatctgaaagtgttctttttgtaaatgaataattaaattaaaaaggccattaattctctattctaccgacccaatcgctgtccatttttcgtgaaaatgagacgtcgagtggccaaattaatgccaagtccgatgacatcgccacgagaacaatccgcttttttataatcccagcagaaagtgtcaatgtagaaaaggccatcgcttcgacatccacagccgttcgaaagtccgacaaattcgttcaatggcattgctttggtggcgaggccaattgaaatatactttttgacattaaaaatctccaattcgtagtagaaaatgccgaaattggcgtgcggaatcggatttttcc

SEQ ID NO: 37587 - DNA, 975 bp, Heterodera glycines
ctttttctatcaaaaagggagatgaataaaatttttatttttttttaattcctttttaaacaggccaaaaagtttaggcttaacttttttttcagaaactgatcagaagcgcaccaaactttgcagggatactgaaaggaagagaaataacctattttaaatattatctagtcagttcatttaaataatttttatccaaaaaatttttttttgggttttcggggcagtccccctgaaccgatgcgcccagatttatggggagaccgaatccttcgggaatagcttccctatagtctgtactttaattctgcgttggatttttgctccccataaatgtttgagtaccccaaacggacacttgaaaaaatcgatttttttgttttcggggcagtccccccgaaccgatgcgcccagatttatggggagaccgaatccttccggaatagcttccctatagcctgtactttaattctgcgttggatttttgctccccataattgtttgagtaccccaaacggacacttgaaaaaatcgatttatttttgttttcggggcagtccccccgaaccgatgcgcccagatttatggggagaccgaatctttcgggaatagcttccctatagcctgtactttaattctgcgttggatttttgctccccataattgtttgagtaccccaaacggacacttgaaaaaatcgatttttttgttttcggggcagtccccccgaaccgatgcgcccagatttatggggagaccgaatccttccggaatagcttccctatagtctgtactttaattctgcgttggatttttgctccccataaatgtttgagtaccccaaacggacacttgaaaaaatcgatttttttgttttcggggcagtccccccgacccgatgcgccccagatttatggggagaccgaatccttccggaatagcttccctatagcctggactttaattctgcgttgg

SEQ ID NO: 37588 - DNA, 1101 bp, Heterodera glycines
cgtttttcgggggggggggggcgacgccgagacttgggacttggtgtttctcattctgatggtgtcattgccttcgttttgccttaacactcaattttttgactcatagttccgctcatttcctttgctgtttaggttcggttccagttgttggtttgcgcatggggagaacgaacttcgctctgtctctgctggttcgtccttttcttcgcccatcgggagccgtaaaccgcgttcgttgttgccacgcccgcctccgccgctgatgttcaaccattttttgacccatggtttcgctcatttcctttgctgtttaggttcggttccagttgttggtttgcgcatggggagaacgaacctcgctctgtttctgctggttcgtccttttcttcgcccatcgggagccgtaaaccgcgttcgttgttgccacgcccgcctccgtcgctgctgttcaacattttccccaaaaatccctgattttcccgagaatgctttttttttccgcactcaccgtttttaatttttgaaatcaaatttacattttttattgtcaaagtttttcaaactttcgaataaatttatgatctgtttacaattctttttagagaatctattttataagattttaaacatagctcgacctgggcctggttctaggtcccatcgtaacttccacttgccgaatcgggctcttgtgcagactgtcataacccatttatttcatttcagtgctttcgctataaataccgacacaattttttatcgtgtcattgctaataatattttattttgactgtttttgctgtgcataattatggaaattgaactcagtcaaaatgaaactgctcacaatcggacacaaaaggcggacggcgaaaacgatgtgaaggaattggtcagcacttcgttcgccgcaatgggaaacgggcgcagtttcaacgcattgcttaagggggtcggtttgtgcagaattatggccggacatttgcaagaagtcaacaattttggcggagttttggactctattgaaattagtttgaattttttggtcaacttttgaaacaacaaaaatttttgaaattttgcgcataataaggactc

SEQ ID NO: 37589 - DNA, 1560 bp, Heterodera glycines
  unsure (1)..(1560): unsure at all n locations
aaaacctgaagggatntagcaatgcnttaatcagtggacggaaaagcagggaaaacgaccagagaaatgcgaggtaaagcgtaggaaaagcgacccgggacaccttaattaataaaatntaattaattaattagcaatcaattgcttttacaatgtccactcgtttggacaggtccacgccggagccgaagagatggcgcaaccgtcgcatggccctgccaaagacggcgaacggtcgctcacgccgacggcgctttgaggacgaacagccacttctgcgccgcgggaagaatgtgttgttctccagactcagcggcggatggtcgccgttggcatcgccgacgaagccgacgatggcactgttgttgttgctgttattgttgttgttattggtgcccggcacagtgagcagttgtttctgtggttgttgttggctcttagtgggcgatttgggtgcaaaaaagtccgggtgataaatgttgggagggggcggacagagacattcctgaatacggtaggggggtaatcaatttaccgtatttactcgattatagcccacagggactctattgttcaactcccctcagaagggggtgctttaatcgcgaggggggttctaatcgagtaaatacggtaatacggtatgaggaagggaaatggtaatcgccgaatgaattaattaaatcgatgtaatgattaatgatggatggatgcgcttatgactgatcacagaatgcttttgttggttggcttcttcattcacctgctgaaatgccatgctcagtcgtccgatgcccgactttccccgcttctcaatgttcataaattcccttcgcccatagtaattgacgagcgcatactccaaaagagcggcaaaaatgaaggcgaggcatgcgccgatccaaacgtcgacggccttttcaatttggcattttaatttttggattttaataatttgaattttttaaacattttaaaattggaacatttgttaaacactcactttaatatatgaaacgggcggtaatttagagttgatgccggatgcttgagtggtcattgttagcagcccaaaatgaattaaaattaaaaaaggagagagagagagagagagagagagagagagagttttgttttgcttacgttgtaacgcccaacgaaacgcgtgccggcactaaaaaagttaaagcaaaaattgttaaattaattaaaaaaagatattgtaaaatgcataaacctgcatctttgtcaagccaaaatgacacctaaaaaattggccatttgcaaaattaatttatttttaaatttatctaacccacgaaacgacgactaacataacacctgccaatgaaagaatgtaataacaatgggaattgatcatttgttaaaggtccaaatcaccaacagggaatgtacagttggatcaaataatagctgaaaaaggggggcaatcaaaaaacaggacaaaaaaggtacaatcagttcattttatctttttcaatcaaaagcagggctgggcgtaactgggtttcagttacggcatccgtaacccgtcatgac

SEQ ID NO: 37590 - DNA, 680 bp, Heterodera glycines
gttgtaccccttttaatcactgttgtacctcttttaatcacatttgtacctcttaatccctgtgtgattgtccgtctgagttcaactaaattttaaaaacgggcgcgaagcgcccgtctgagttcaacaaatttagaaaacgggcgcgaggcgcccgtcttgagcctcgattggactaaaaacccttaataattttttaactccaaccaattcgatcaatttgaatcgcttcacagcctaggtagagaagctcaagaagcgcgaagcgcttttaatctctgttatacctcttctgatcactgttgtatctcaaatcgtatagttccacgtcgaaatgtcactcaccattacgcccgtcaatcccattcacatgcatttcattttcgccaaccgtcaattcatcgatatttaagcccctgtcaatcatcccaccttatcagcacaatttatggggaggcaaaaatcatgccaccattgccttctcttctcccccaattcaatcgatcattttatgtaaaattgtaaattgtacaattttccccccattcattcattcatttttgctcatttatatgggcgaaggtttaattacccaagttttagatccggataaatttgttgtttttattcgcttttgaatttgggtacattttgcctatcgatcactcgccgaccccgac

SEQ ID NO: 37591 - DNA, 1099 bp, Heterodera glycines
cgcggatggacgccgttgtggagcggatacagcttcgcaatggttagcgaaacggaggcggaaaagccgagactctcgggactaattggaacggataaagaaaagccgagacttttgggtcatttaaggtcatagttttagcgaatgttatccaatgtaatgccaagcacacctcccttccgccaattccctgttttaattttcttttccgcagcataccgccgctggcgctgagggcaccgggcagaatttcgagtcgccggggagttgtctggagacattcttcgcggtgccattcatcgaatgccatggcaagggcacgtgcaattattacgccaccaatcacggcttttggttggccgtcgttgaacaggtggacacagttgggcacacgatacaggcatactgtactgtcagaaagggttacggttactgcgcaattcaaattttaaattattttttaatttccactacagtacaaccaattccgaaaaccgatgccacaaacgctgaaagcgggcggactgaaggacagagtgtcgaggtgccaagtgtgccggaaaggcggcggaacgccccactgaaaagcgccgcgaggcatcgaattccgcgcgaatgattccccccaatgcgcttcgattgtgttgtgtgtgccgttacaaaagcctttcctaccgtaatgggctgcactttgcttttctcagtccgttcccttttcgctttgtttaattgccgcccatttgcgggggattcgcccccccccccccaatttgacaaaggttggggtcggaattcttcgcggatactttcgttgttttccccttttgttccttccgcttcatgtgatttttattgctttccgcctgccaattaattaattaccccgaccaattaattacttatccaattgttcacccatttctgtaaaatctttatttaatggaaaaatttatgcaaaaatgcaaatcttttaaaaaattatatattctttcactgccatttccattaatattttgaccaaaagcaaaaggttcatcaaattcatgtgtcatttttattcgccttttttattttataaaaataaaaagacctgccaggc

SEQ ID NO: 37592 - DNA, 1100 bp, Heterodera glycines
gctcattatgtgcttcattaccaccaatgccttcccttaacggacttggagaattcatgaaactgttcaaaaagtctccggaacaacagcacttccagcagatgggaaggccgtgcagcagcggaacggtgaatgtgcagcagaggcacaacggatgcgaaggtgattaatagatgaaacaaagacaatgtaccaaattaaataaatatcaattgataaatatttaagtgacaattggcaccaaacgccaacggagcacttgcacaaaaagaagcattggcacggatgaggtaaaagctatttgaaagtcatttgtaaaaaaaattaatgacaatttcagcactctgattttattggtgccgaagtagtgaagaaagcggcactatcaaagccctatgaacaatttgagttgcagaaaccgagtcaaattggttagtttttaaaattcatttgtacataattatactaattaatgtctcggcattttcagttggcacaaaagtggcctcaactttggccacttcttccgtggtggtcatttctcctccgccacctcagaacatgctgaccccgcccaattcggaccagtccgtttactcaacgagcaatccaagcccaaacaacacaagcagaacgagcagtaacagcaccagctgcaacggtagtcagctaggcaatggcggaaacatttctttgagatttattaacttaatgacacctttttagttgtgcgtccactcgccgtcaatgtcgggaacagatatgcacaacaaccgcagaaccatcagcaacagtgccaggaaatgcttcgccatactgtggatgtccagcagcaacagcacattcatttggaacataatcagcacgttcagaaagtcagtaataaattacagattaatttcaaatttaaaaatagtatcattagccagcagaaggagggcttacaatgaaagtgcggttaattgtcactaattgtaagcactggctgcccctcctcatatctgaaagaaaaaaagcatatggcaaagctaacaaaatccatttgataatgggaaaatcattgacaatttgaaatttttctcaattaatttcgacctgca

SEQ ID NO: 37593 - DNA, 705 bp, Heterodera glycines
atgaaaaaactttctgtcccgttgaggaattgaaccctatagacaaacactgaaggtcagaaggtttagccactacaacacataagattatggaggaatactttaaatgaaataaaaaaaatatttttttttctaaaaaatttctcattcctctccaattcccttctcttttctcaccagacccccattcttaccagtgcttaaaaatgcgcggcgcaccgcgcaaaaaaaaaaaccgcggccgcgcaccgcgcatcgcgcattcaaattgccgcggccgcgaccgcggatcgcgcaaaaaaaaacgccgcgaatcgcggatcgcgcatcgcggatcgcggccgcgctccagccctgatcagcaacaaccacccaacaacgacaacaacaaccggattagttgttgtgtgttggcattgtgctcctcttcttctgatgggactgaattggctgcgatgagttcggctcaaagaatggagaaacaaacaaacaattagcagcagcttaattgtgcaattcactgatactttctgtcccattatttaaaatcgttttgagttgggaatttgttttttggctgagattagtaaaagagtaaattcagtcaacaaattgtctgattgtttttttaaatgatggtgaaacggaagttaatccgatcaaaagagcgatccgattgaatattaagcagcggctgacaccatc

SEQ ID NO: 37594 - DNA, 1124 bp, Heterodera glycines
  unsure (1)..(1124): unsure at all n locations
gatagataaagcatatttccttaaatgatgaacgaaaccagctgcaactcatcggtattagaacaacaaatgttttatagcagaagcaacagcatgggcacacagcagcagcgaattcagcaccaacgacaacaaaacggacaacgggaagaacaacaacggggaacatgaacaattccaagaacggattgaacacgcgcaaaactgtggtgggacgacagcaacggcacttacacgaacaattagcaacgaatttgccaacaacaacaccagcagcagcagctgttcacaaagacagcaacaggtgggcacaattaattaattaattggctaatttaattttgtaaaattattaattaattctttaattatgttgtaaaattagccaaagaattttgaattttggtcagttaaaaaacggccttttatcgttattccgctaattaagtaagcaggaaaaaaggacaatttaaaaaaaatcattcggttcttttttagtgagtccatttcatctgcttcctttcatttccttcgctaatgcttttgatcccttttctcgagtgtttttaaaaatattttttactattacaattgtctaatccctccccctttatcttaccgtttcccaccacttccttttgtacgtcctcagcagggataaaagcccggctggcagacgaacagccaaacgaaaagcaaagcgaaaagcattgccatgataaaaaacataatctcttggcttccgcaaaaatctataaaattagcgcgatgatttttgatattgccaacagtgtaaaaagcacatggactgagaatttgacgttcaatttggggggggggggagttcgggtggtgcaaagggattaaaatgcgaattagggattttggacggggattttgccgccaaagaagcaatccctccttaaaacgatgtgaaaaaggataattagcaaaaatggaaaaaagaaattggggaagccggtggaatgatgatgcgaaaatacaaaaaaagaaggtatattaaaataattgaaaaattctgtgggataattggttaaattttaaaattgtataaaatctaaaaaacataaatttaattctcccanaaattgaattttaattat

SEQ ID NO: 37595 - DNA, 667 bp, Heterodera glycines
gtctcaaccaaaaatcctttacttttgttcattttcctttgaaaaatatgtttttggcataatgtctttaactttaaatggtcaaaatttcaatttctcccccggcggagcctgtcggcaccgctgggcctccaaaacttttttctttttaaaaaattggcccaaaaaagcaaaaaatggtcatttttggttaaaatctgttaacaaatcgcctcaaattttcaaaatttttcccggcggcgcctatcggcaccgccggacccacttctttcttccccaaaagttttttggaaaaagggcgccgcaaaaaaaaatttattattttttcattaaacataggttttcaaaaataaaaaactttaaaataaattttttttgaaaaattgaattttatgtatttttttcggcgcattgtcttttctatggcgacattttctggtgcaccaaatttctacatataatagatgaaattttaagggttttttttcccaaattaacatgtgaaaatttaaatttttgccaatccggaatccggttccggatctggcaatttgaaaatctggattgaccggattatgagagatcggatccggaatccggttgtttttgaaaatgccaatccggtccggtccggcagatttggaaatctcgaactctaataataaat

SEQ ID NO: 37596 - DNA, 1010 bp, Heterodera glycines
tgccgagggcgctgatccaaaattgggagcgaagcaatggaagcgatggaaaaaggttggatttgtggaggacgaaaagccaaagttgaagcggaccaatgcgaaacggtggagcaaatgaatgaaatgagggaaatgaatgaatgccgtcgcactcaaacggccaatgatcaaagaaaaaacattttgaaatggaaaaatttaaaattcaatcctacacagaaatatgaagttgctgaaaaagtgttgaaatgaaaatcattcaaaagctatgaaaagagggatttgctaaattttggggagaggggtctcaaaattgatggcattttagtattaaggaagaaaaacattgacatttctatgcttgtccatagattaaagaggtcttttcaagataatagcagattataagacattaatctgctgatcattgatttattcaattgaaattaccccaaaaaacattcaggagcgggaggctcaaaacatacaattaattaattataattaaatgaaatggattggtgggctaagcaattaaatcgtccgtttgttgccccggcaatcatccaatcaaggagggattttataaattctcaaggctaagggaggcgagtgtccaactcagtgaaatgcttaccaaaataatttgatttaattaaatcagagaatttcttctcacctttaaagaatcaatcagttttttccagtaaaattttttattataccggagatcaaaaaaaatcgaatttaaacaaaaaatgattaaaaaagcatcggctgatcagtcttctgtcggccattgattgaatgatcagactttgtgcgccccgtgctgcgaaatgaaatgctgtcgttgcacaaatgtgctggcattgtacacgaccaattcaaaccaaatgttaatcacctgataaacaaaaatgaaaatggcgtaatttaaatttaatttgaagtgtaaatataaaagtgccgaaaataaaaacaaatgcccctaaaagcttttacct

SEQ ID NO: 37597 - DNA, 453 bp, Heterodera glycines
  unsure (1)..(453): unsure at all n locations
aaatgtttatctattgaaatntcggtactcaaaaatgccttctatgctaaaacagctccgacaattaattaattcatatacctgcagttttgaaagtataatcaagaaaaattaataaataaaaaaacaggttcatcataggatggaggatattcaatggccatttttccccaaatcatattgggcatttatgtttcgtcttccgttttgcttctttcactgtgacatcaatggccaatgtcactttgtcctcgctttggtcgtaaaagcctttgcttgggttcatcagttccttaattaccccataattggtcaattaagggaatgtttaattgtcactcacagcaattgaaatgtaattgtatccccagttgttcgatttattgtcaaaaacatggtcatcgagttttcttccgaaatccggcactccgttcttttgcgaaacaattcgaa

SEQ ID NO: 37598 - DNA, 1013 bp, Heterodera glycines
tttaaaaataaattataaattaatacaaacatattttattactgaccggcactgatggtcctaatgcctttattgggtttgtttttgccactcaaaaagtgtacatgagagtgaatgaattgtgtcagtgccaatgctcaaaaaagaattttttttttttgtaaattccacgtcaactttaaaattgcacctcgtccaaaatgttgaccaatctgctgctgattcatcgtaaaaactggctgcagctgaacaaatttggcaaactgttcaagctccagtacgacagagtcctcatatttctaggagggaaaaactttgagttttatatattgtaaaaaatgaaatcggttttctccaactcctcacaccagtgttaagcctagcagcaccccacccgggtgcatttggagaaaaccgattgattttttttaaatacccccgatttgaaggatatcaacaattggtcaaagtgcgggtttgcttttggcatctttgtctcgtcaaacatgcgtcggaattctttccgttccgccatcggaattccacgcctggaaatggaaatagtttagcttggtcaatcaaaatattaaaaaaaggaatcacacattttcgtttctcgctcctttttggccaattccatttggaccaaataacgcaaaaatgagttctgtattttgtcaacaccatcactgtcgagacggactatgaaagaaaaggatcaatcggtaatagatttgttattcgttagtatgttttgctacctgctgtaaatgcaagattcttggccagcgattctcggtccaattcattgaacgatttcttcaatcttttaaataaagatttatttatatagaaatcaaaaattataaattaaaattaaaaattaaatttaaaggatttaagttctcacaaatctttatatgtgaaagaacacaattttccgtagcgctactcaaaattgcattttttgaaaaattatcatacatgaaaaaagggaagggggggggtcaacc

SEQ ID NO: 37599 - DNA, 1174 bp, Heterodera glycines
  unsure (1)..(1174): unsure at all n locations
agaataatagtaaaaataaaattaagaatttttctaaaatgttaaaagaaaatanccggttatttttttttgtttaaaataaaaaataagttaaaatttaaaaaattaaaatattataatganaattgtaatttattaaaacaactaatattcgttaaatgagataactataaatttctatatcacgaatgtatcaaattagaatatagtttttttaatttatgagttaatattctaataaaaaaaaatttatagcagagagtcggattgctgcataaaatattaaacaatttaatttttaaaatagcaatgaattagattaagtattaattataattattccatacaactatgatactgaattcaaaaattattaatatatcaatcttctattattacaaaaaaattaatatgttaaatacatctaaaatgttaatcaaaaatttaaaatttaatgtttcctttttaggtattttagtgaattatgtaatattgaatgtgatttttgattaaaagcaaataaatttttggcaatttaataattttattcaattatttatgcaatttttttttattaatcttacacaaatcatctcattaatttttaattcaatatttttatttgtgccattaatgtatgatttatatttaatttcttttttgcaaaatcattcaaaattacgattaattatttttaatatctatttaatatatttttattcagagttttcctttccaattttttgcaaaagttcattattttcattattatttatagaaacataatattttttgcataatcaatttttttaattaattacttgtgaagcgctcaggcgttttggtggtatttaacgtgaacactaaataaaaattatatatgtttaaaataaaattaaaacgaaaatatttgatataatttggttatttagatatattaataaataccttcttagggaaaaaataacaatatacaaaaaatttattgtaagtttgttgcatataaaagtgaaatttcaattccgtctaagaaataaattactttttaaagtagatcaaggctctcaattaagaatgttatttttatacaaaaaataaaaatttttaggttataaatagttatgccttttaataggaacaaattaaaagcttagttttttaaaagttttatttt

SEQ ID NO: 37600 - DNA, 137 bp, Heterodera glycines
gaaggctcgatcggcatggtgcgttcggcccagaccaagtccaacgacccgcagtattcggcactgttcaactacaagaacgacgaaggcaccttcggcgtgatggtgcagggcttcagccagaagcgcgagctgcg

SEQ ID NO: 37601 - DNA, 881 bp, Heterodera glycines
aatctattaagttctatttcaaaatttgaaccaaaaacatttcgccagaatataactagtgttgtataattttcttatttttgttgcttttaattttctttcttttttggtgcttttcttttaataggtaaatacaatgaaatattctttgctccgaccgtttgtgaatcgaatttttacgcccggcaaagagcagcagcaattggtgcaacgaaaccaaaatgaatttggaatggtcaaaacaaacgccgggcaatcggccattttattgcgatttgtcagttggataagcggcagggaacaaattgagcagcacttcagccgattcgggaagataaaggagacgctaatgttttatgtatgcttttcgaataaagaaaccaaaaacatttactgaaccatccgaaaatggagcccttggcgctatatgcaaagcatttcttgttttcaaaatgtccgattaaatgatgccatgataacattttacaagtcatctgaatggcggtattttcaccttatgaggggattctttttaatttttaatttttgaacttcgaatttcgctaaaaaattcattaaaaaaataaatatataaataaaacatttgaattaatttcataattattttaattatttaatgaagtttaaattaacagaaatttgggttgaataattattaaaaaagaaataagaaaaatagaaaattttgtgatttatctattttatgtgatttaaataaaaaatacaaattcttagataataaatacattaaagaaaattattttctttaatttaatattattattttaaattcattttaattggcttttcagggggaaaaaaagaaatagaaaagtttattttaaaaaatcaaaaatttg

SEQ ID NO: 37602 - DNA, 124 bp, Heterodera glycines
actgtgttctttttgcgagttcgtattatatgcaaaaattcagatggttaattactacatatatttaaaattggaatttcaatttttttggttaaaatttgaatagtttttcgttggcatttat

SEQ ID NO: 37603 - DNA, 643 bp, Heterodera glycines
ttggaatagcaagtaatatagtttgtcaaaaaatttttgaccaaaattgttctgttgaaggatgcggcgagtgccattcggcccggtgcagggtgtgcgaaaaattgagggaacggaattgtgaaaggatgcgcatgggactaccctacggtcgcatcatccgcgaatttgggccgatgaccagagaacagcagctcagtgcaacggcagcgcgcaacccaatggaagccgcacttcaagctggtagcgaaacgacagccgtatttcgttgggggaaccctttggcacctgtccagttccccaccactttgttatacccaaatataaggggatgtgtttgtgtactgtagagatggcgcaattttttggggcctgtgggcacgtgggactgtgccgtcagtgtttgcttattcacttaaaaatttcacccagtcctgataaatgtccctattgtcgagtgtgcaccacattttacatgcagcattaaatatttgtcagttctttttgccatattatattttgaataaatgtacgaaaaaatttatttttaaatgatgaaaataaatggtgaaataaatggtaaaattaaatggtgaaatttaaatgatgagaaatggtgaaattttattggtgaaattaaatg

SEQ ID NO: 37604 - DNA, 909 bp, Heterodera glycines
gactcaacccaccaacatttcaatcactggggactccacctaccaagatttcaatctctgagactcaacccatcaacatttcaatctctgagactcaattctcaggctttccaatcgctggaactcaacccaccagcatttcaatctctgagactcaattctcaggctttccaatcgctggaactcaacccaccagcatttcaatctctaagactcaattatcagactttccaatcgctggaactcagcccaccaacatttcaatcactgggactcaacccaccaacatttcaatcactgggactcaacccaccaacatttcaatctatgagatcaattctcaggctttccaatcgctggaactcaacccaccagcatttcaatctctgggactcaaatctccggcattccaaacaatggactcaaatctccggcattctaaacactgggactcaacccaccaactttcaatgacattccaatcgctggaactcaacccaccagcatttcaatctctaagactcaattatcagactttccaatcgctggaactcaacccaccagcatttcaatctctgggactcaaatctccggcattccaaacaatggactcaaatctccggcattctaaacactgggactcaacccaccaactttcaatgacattccaatcactgggactcaacccaccagtatttcaatcgccaggactcaatccaccagcattccaatcactgggactcaacccaccagcatttcaatctctgggactcaatccaccacatttcaatctctgagactcaattatcagactttcgaatcgctgggactcagcccaccagcattttaatctctgggactcaaacctccggcattccaaacaatggactcaaatctccggaattctaa

SEQ ID NO: 37605 - DNA, 1474 bp, Heterodera glycines
aattcgccaaattttgaaatttaagggtctattccgttaattttcgatgaaaatcgaaaaagcactggaaatatgggaaaattactaaattggaaaaaagcaaaattttatgccaaaaactcaaaacctttacgttattaaattgcgtttcgtttaaattttacgaaattctttttcatttttttccattttgtaaatttttcaaaattatacatagatattttttatgaaatttgttcaaataaattcatgaaatggttaaaaatcgcaagtttgctcatttttttggtgtaaatctgtaaacaaattgcaatcaaatctaaaaaattcccggcgacgcctatcggaaccgccggatcccccccccccctccctgtttccaaaaaaattttttttttgaaatctgaacgcagataattaacaagtaccaatattttaccctcacttccattgtatttattaaaccaatttttatcaaaaaatttaaaaaatacttatacgtatacggatccgtattttttctggatacggattttacggactacggattttccgtatttttagtccgtaaatacttaatccgtatcggtgtcaagtacgtaatactgatacttatccgtattttcgcaaaattccgatctctactcttaaactattacccaattttcctttcgtttaaattcaaaattcaattttttgactaagtcatgaaaatttaatatatttcaaaataatttagacaaaaaccccaagaaaaaaaacaaaaaattatcagaaattcattttttggacaaaatctgttaaccgacccatccaaattttcaaaattttttccggcggcgccttataaatgacaagaaattgatgaatttgattgtttcaaatgaaaaatatgacagttaactgattttgtacgcattttatgatcttttaaaaaatgaggatttttcatgccaaatgaggattttttgaggtattttagtggcaaatgaggattttttacggctgaaatgaggattttcaaaatttattcgtaaaacttttttcctcatcatttcggtttctcactttcagaatcttaatattttcagaattgctacgtacagttaaaatttcagatcgattggttcatgggaagtggtcaaactcccaaaaaatagggtgtccttattctaatgcaacacagtgtagttacaagaaggacctttttgaaaattttttcacttttttttgacataattttttttttgtttaaaaagtcctgaaagtaagtaccgggagtggtaattagggatgatatttataggcactaaaaaccgtcaaaataggtaggccttaggctctaaaaaacccccaaaataggccctaaaaatggaaaataggcactaaaaacctcgtttttaggggtgtaaaatgacaaaatgtattcaaaaaagtaaaaaaattaggccaaatcagtactgagatatataat

SEQ ID NO: 37606 - DNA, 1011 bp, Heterodera glycines
accaaatttttatatcaggctcttctaaaatgtgaggatttgtttctcgtagtgtgtttagttgggtttggatggaattcgatatattgttgatctgattaaaatgtctttctacgtctctcccggcgcgttctgcggccctctttgcgacatcaatttttgagtctttggtatcttcagccttggcttctctcttcccacgttgttttttgattttgtaatgatgtgtgaatgcttcgttaattttatttcccaatcccccggcggttttaaaattcatgtccggtaaataaacttgaatggggacattgttgtcattttcccatacttttataaactcttgaccatttataccgagagcggtgaatgagtaggggtaaataattgatgagagagctactgaccaatttgtgcccaattccaaagtctcggggaggcgtactgtgaattttgacgtagtgttctcctgccccggtgtgttcgaaggtagtacaatgtaaaaatcatccatctgttttcactaattcctggttataaaatataccttttattaaatttccttccaaatcttcgatcctgtatgaatcgggtgtcgtcgaattggcaacaacgattttaaacaattcttcggtaaagtttgggaggtacccctttgaaaattttcccttttccttggtaatacgaacgatatcaccgattttaaattttttctttttcgaaattttaaattccctagccttatataatttttcccagagcgcacgggcattttcaaaattaattgaagacggtttggctcccagtgttctattcacactgttgttaatgtttgttattattttgtctattacgtcgacccatcgaagagtgtctttctttgtaaaatatctgtacaagcgctcctttattgtccgatttgccctttcacgactccggcgtgcagatcaggactatacattacatttttgatgatgaattttttctcaaaatattttttcatttttcctgctt

SEQ ID NO: 37607 - DNA, 1011 bp, Heterodera glycines
  unsure (1)..(1011): unsure at all n locations
tagcaattttaaatagaaaaaattttgcatatcgatagagaaaaaaatctgcatattgtaatacagccattttatgttttatacactttttcatgagatataaataaaacatgaaaatgcatttcttttcctctcattttgacatattattttcacatctctacatatcaaaaaacacaaatttgcaaacgctaacaatttttgttaaaatgatataaaaatgttaaaattttaatttcttattttattatctataaataaacatctgatttaacttatttgaagtgaattggaagctttgatctctgattatgaactagatcaaacataaagacactttgtttttcatttgagtgtgttggcgttttgttgtttacgccaattactttttggcaatttttttcgttttttaccgtccatgactgggactggagtgaattcatgttctctactgccaaccattgcatatttttttcccaaaagtgcgaattacctctgaagcgccaacaacaaggtaattgtcgtcgcgtttggcgccggcattgccgtttggtgagtcgtctgatcccctttcatttaattaatttctaatgccatttttccatatttaggtatttgcgtaagatgatgcgtaagcgagaggaggaagaggaacaggaggatgaggcgccgccgggggacgaggccccgcccccgcggaggacgaggaggacgcggaaaatgacggcgggccgggcccgcagcaggcgcagccccagaaaaaacctttgccggattttttcgttcaggaggaccctcgagacggtgccaattagcggcgacgaaaaacttatttctccatttttggacaanaagctgtaaacaaatcgaattanacattacaaagttttcccggtggcgcctattgncgccgccgtatcaccccccctgtcccacaaaatttttgaagaagcgcgccgcaaaaaaagcgtttttaaagcagaaaaaaattcaaattaagtatcaaaatta

SEQ ID NO: 37608 - DNA, 1157 bp, Heterodera glycines
  unsure (1)..(1157): unsure at all n locations
ccgaagatgttcatttgtcacatcgaatgatgagcaaatgttggcaaaaactgatggattgaaggaggagagcgtgtacaccaggggtgggacaccgacagaaaaatcgcacggtcgcggatcgttaaattaaaaacttaaaatttcattggtcgtcaaaaaaagagggataaatgacaatcggcggtgagtaatgtaattaattagtgcttgaagtggctattatgggaaataagaagaattttaggtgaacatctctttggtgtataaaacatgtaaattaggctaccgttggatcgaatgaatggttattaaaatttttacggtccctttgggaaatgtgaaagctttttcggcgctatatgaaagtggccgatttgattttagcaaaacacaggggggattttcaagtaaatttaaaatattaaatctttcttgnctgacttttgcctcccgtcggcgtcggttcccacgcgcgggcgccgcttcgtctgattgggctgttggtcagctgcctgttgcattgnctcttgctttttgtgttcctccccttgcttgccaacttgtacatcatcttcggctgtgccatttggcggtgccttttcctgtgccaccggtggcttttccgagttttccgctgtctttagctctggtgcctttttgggctcgtccgcctggttttcctcttccttcggcttcttctccgacttcggcttctcatcgactccttccggcttcttctttggttcggcttggtcgtccgctgccccctttggctttttctccccattcgatcaaaattcatgtcagtataagtttcggttgctgatcaaaaaagtccattgcaccacagtgaccagatcactccttcaggatgttcaagaaaaccttaaaatggcttggaatcgggaaaattttagaaaaaaattcataaggggctggaaaaatttttttcatggatgactaatgtgacggacagaatagcacaaaatttgctacaaaatgcaaaagataagtctaagctttagatcaatatttactgtatgtgtaaaaggccaagcgacaattttgagaaattttacagactccttaaagaatattcaaatttcagaaattgaaagaattttatttacaggaatatgaggcctaccttggcc

SEQ ID NO: 37609 - DNA, 839 bp, Heterodera glycines
acaatgaatggccagagggtgggggaggggaaagattaaaatggcaaatgagcaaaaatgggcaaacaatgaaagaaaggaattaaataaaaggaaaaatagttgaaatttttttgaaaagatcgaaaattaatttgaaaattggaaaaaatgttatgaaaattaaaattgtttaaaaataataacgacaaatgatagttaaaaggtgttttttttttttgcaaatttaagtaaatgaaataattaagattttctatttagattattttcaaatgaaataattaaaattaaatcaatttcattatttagaggttattaatacaattattattatttttttaatattttaataatttttatttagaattagtttaattttaaaatatataaaaaatatattttgagttaaataaaggtctaacgaattttttccttgtaataactaaataaatctttgaaatttgtttttttaataattatagttcattttcaccttttaaagatttttaaaaggaattagtaattaaaaattgaaaatttttcagataaaaatttttttaaaatatattttaatgaaatttcttagatttttaaatttttatataaaatattttaaaccgattttaaaccgaatgaaaggctaacaatgtttcaaaaaatggtacaaaatttgcatattttttttgcttggatcaaaggggcatatggatgaaaatgcggaacaatggagggaaagggggggagggggcagaatttgaattttcaatggctgtcaaaaaatgcgtccaatttttcgattttttttttcaccgctatgacaaattcttccgacggattga

SEQ ID NO: 37610 - DNA, 948 bp, Heterodera glycines
tcctactctttcctcctcgtcaccctctctctctccccatttttctcttcttgctctactctctctacctcttcacctatgcgctattttgatgcatttattccctacccattcccgttgacctttttctcgtattagaaggaaatccttttttcctgctgaactgtggtgtactaaacagcacaaaaatttttttttaccttctttagagttctaagatcggctttttgtatatgtctattttacatatttttcatattacccggtttatatcccagatttgtgcaaaaaatctaataatataaaagatgtactcagattttcgaaattttcccagtctcgggcaaccaagtctttgataatatttcatcaaaaatcgttgggtaattagcggttgaaagtttttcatatttttgataaatctctcatttaaaatcaaatattaaatgaaatgcgtgctgcttccgctggcatcggccatctttttagaaaattggaattaggaatgatcaaaactttgaatttttaatacaaaagtttaatgcagaaaatgaagaaatacttatttaaaaaaaaaattaaaatatttgaataatatttgaagaaagttgtaggagaaaacaattagctaattagttttatttaaaatgacaaataattttttatattttttcggttaaattttttatgtagatttttaaaattaattttaaaaattaaaagttttttaatattctttaattaaataaaaccgacaatttaatttaaattgtgaaatatttaactaaaaatttaatatgtcattttcagttttaaaaattcaaattttcaatttaatttaagcatatttattttaaaaattcaaatttacattaatttaaacatttttattgcaattataaatttatcagcggaatttttgctcttttccatgtcgcttttgacctt

SEQ ID NO: 37611 - DNA, 1395 bp, Heterodera glycines
gtttcattggcattggcaggtgcggtgccaaaaataaatatttgtcgaataaaaataataaaattaattagttttcgttcttaattagggtgggttcaaaaatttaataaaaaactaagaaattttttataagaaaataaaaaatctagcaatttttcaaatgaattaattactgtttttttcaaaattttccaaaaaataaatcgctgcgaaaatttttaaaattttcgcaatttaaaatttttttgtttttttttcaaaaaaaaatttattcggggataaacgttagaagcccccagcgggtcttttcaattgataaagctccattgccgggagttaatcaacagacggttttctactgtagttcttacaattagcagaaaaatacagtaatttcaaaagattcaactaaaggtacggtatatgtttaattggttggtttaattaattgattaattggttgccaattaacacaattcaaaatcacagtgcattcacttcgtgccgtccccgtgtcggctgctcgtcaaatcacccaatttgctgttgaccatcaccttccactgcacatacatttggaggagcaaccggcagaattttaatttaaataataatatttaaatattttattgaataatcgatgtttttttgccggaaatcgaataaatgaatggtaatgttagggggttcgaaacgggtcaaaatggatgtcatatatcctcttttttaaatgggatacaccatctaaagtgttaccaaattgattttgaggccgaattggaacaatgcgtcctgaccgactcgcaggggcgtgagccaagccaactgttgctccaagaaattctgccggtgccatattttattgaaatttgataaaaaaaatttcaattcgggcaccacctttttgaagccatcgccgcgtccactggactttctcaccgttgtccactgcacttacacccagcgccattccatggatggtacggccccgtaattacgaatttagaaatatatgggaaatgcgttaaccattaattgccggccgactttttgttttcgggaatagggttcggggatttgttttcgagtgacgaatgtcacaatcatgatcgatcagtgacaccaaaagcccctggcattgtattatacaaaattctcaggacatttgtttggacaacattttttaagacatttagacaatttttcggggcatttgttttttgttcagaatttgctgctcgcggtgcccacatttgtgtgtgcccgtgcacggaaggctttctcggcgacggagtgccaaagctggcggctggcgatcgcttatgtgtgggcaccgattgcacaatcgaaatcgtacattaattagtaactttattttaaaattgtttttcattt

SEQ ID NO: 37612 - DNA, 853 bp, Heterodera glycines
attcatctccctttttgatagaaaaagcatcagagtgccttatgccccgaaaacaaaaaaatcgattttttcaagtgtccgtttggggtactcaaacaattatggggagcaaaaatccaacgcaaaaataaagtagaggctatagcgaagctattcccgaaggattcggtctccacataaatctgggcgcatcggttcggggggactgccccgaaaacaaaaaaatcgattttttcaagtgtccgtttggggtactcaaacaattatggggagcaaaaatccaacgcagaattaaagtacagactatagggaagctattcccgaaggattcggtctccccataaatctgggcgcatcggttcaggggactgccccgaaaaccaaaaaaaaaatttttttggataaaaattatttaaatgaactgactagataatatttaaaataggttatttctcttcctttcagtatccctgcaaagtttggtgcgcttctgatcagtttctgaaaaaaaagttaagcctaaactttttggcctgtttaaaaaggaattaaaaatttttaaaaattttattcatctccctttttgatagaaaaagcatcagagtgcctaaactaacacgaaaacaaaaaatcgattttttcaagtgtccattttctgaaaaaaaacaattatggggagcaaaaatccaaggtaaaaataaagtagaggtatttttttcatttatcaccgaaggattcggtctcaccagaaactcaccaaatgttcggggggactgccccgaaccctacaaatgcttataaattttcttagaattttttgcctggaggaacacagttcttcacacttaccaca

SEQ ID NO: 37613 - DNA, 1728 bp, Heterodera glycines
  unsure (1)..(1728): unsure at all n locations
aggatcggctgacncacattcaactgctgttcacgtggacccttctccacttcagtcttcaaggatctcacttgaatatttgctactaccaccaagatctgcactggtgaagctccggccgggcncacgcccaaagccttcaacgcaaccaccacgaccctcctacacgtcatggccagactacgcgacaagcacgtgtacaagccaatgacggtggagtataggtggcccgctccagcgccatccattttcagggctagttgattcggcaggtgagttgttacacactccttagcggattccgacttccatggccaccgtcctgctgtctatatcaaccaacaccttttatggggtctaatgagcgggcactttggcaccttaactccacgtttggttcatcccacatcgccagttctgcttaccaaaaatggcccacttggagctcaaacattcaacgcctgggttcagagtcaagcaaccctggcttcatacccatttagagtttgagaataggttaaggacatttcgtccccaagtcctctaatcattcgctttaccgagtataactgcttaacgagctccagctatcctgggggaaacttcggagggaaccagctactagatggttcgattagtctttcgcccctatacccaagtcagacgatcgatttgcacgtcagaatcgcttcggacttccaccagagtttcctctggcttcatcctgctcaggaatagttcaccatctttcgggtctcagcgcatacgctctgtctccgccccatcgcatgcgatcgagacgggactatgttgcgccccaacaccgcagtgccagggatcacacatcagctccgtaagaagccttcactttcattgcgcctttgggttttgaacacccaaatgacttgcgcatacgctaaactccttggtccgtgtttcaagacgggtcgaacagatgaccggcttttacaccgagaacgcacaactgagagcccgagctggaccgaactggttgctggtacgtgtcgcacgcgaccgccaccgacccccagctcgagtcaacacggacccgaaaccattgcacaattcacccagagtaaacagcactcccccgatccgggtaccagaccccgaaaggctggcctcaagaccgagctcacgcagctactccgagcatctcagcgcactccgcctgcaaatgccccattcgccactgaacagaaggacagcaaaccccagtctggaggctagcaggccaacgtacagcaacaaacgggtgaatgcagaccagatacgccagctctgtccgtttccacctcatcggtttcacgtcctctttaactctctcttcaaagtgctttgcaactttccctcacggtacttgttcgctatcggactcgtggccgtatttagtcttagatgaagtttaccacctgatttgggctgcgatcccaaacaacccgactccaagacacgtaaagatgggtaggcaccgccagttggacaggtcttgcaccttctctggagccccggtcaagggaaacttgaacaagcgggccaacccaagctcacggtctatacgctacacctcgcaaccccagaggagctgcgattcagcgctggactcttcccagttcactcgccgttactacgggaatcctcgttagtttcttttcctccgcttactgatatgcttaagttcagcgggtgttcacgtctgagttcagg

SEQ ID NO: 37614 - DNA, 1069 bp, Heterodera glycines
tcgttggcatttgtgccggttgaagatctgacgttggcattggccgcgttggaaacttttttgccggacccactccagggcgtacttgactggtcagtgcatgcaaattttggcgcgcgcgcattttgattcattcaaaccgcgcggattgggttttggcatttttatttagacgggggggtgctcgcgttccatttttggctaaaatgcttgttgtcaaaacaggtttgtgatcaactacattggccgtccccgtttcgatggttctcgctcacagcccaccttcccgcctgagcaatggagtgtgcatcaacgggtgctggaacatgtggactggaccaacaatgccgtgatcacattccatcgccgactgcagggccggctggccactgggtgcatcagtcaggtgcagttttgaagggcaagtgggaaatgcccccaaaacccaagcgagccaggcccgtagttgtgtttttggcggcactatcaaatttggccattcttttgccactattcaatttggccgttctttttggcactgtccaatttgggcatttctttcttggcactggcgaatttgggcattcttttttggcactgtccaattttggcatctctttttttggcactatccaatttggccatttcctcccccctcccacacttcacgccatgctttccttttagacactttggcgctttgttgacatggtgcgcaaggagcagcgggtggtggacgctgaatttgcgagcttcgtttccggcgaagagccgccggcacgaccccgtaaaagtctgaacgcggacgaacgcattgtgcgcctagttcaaagctttgccaacatgaacagtgtggcggcgctaccaaatgcgcaccattacgcggcacggccgccccaaaacccgaacacaataatcgaatttctgatcgccatgtcacgcaattacggggccgaactttgaagaacataacgaaacgagaatctgatttatgtctaacctgaactgcttgtccacccctccaccaaaaggtcgagaaaaatttcaggaaaaaattcaaaattttaag

SEQ ID NO: 37615 - DNA, 747 bp, Heterodera glycines
ctcgtcgttcacgtaggctcccatctgtacgatttgcctcgctcccctctccatctcatcgatcatctccgtcaagatcgccacgttatccttagctgccggtaagtgtagcagctgagcccgaattgcacgttgcaagtcgtttgtgtcgccaaatcgctccttcagcagttgtacctcaaccgggtaattgccatccgatggtgggtacacctccaccgctctccgcgccggcgatccttcttttaggcaccgcagcagatgaagctgcttttcgaatcccgggattggtttgtcgtccaccgcccgctggaagtaggcccaaaaggtggtccaatcctccggtttcccggaaaacgtcggtggctgcaatcgaaccgtttcgaaagtcgtcaatgtttctgctcgagtttccgaacgatggtgatgtgagggagctgctccctgagttcggaggcgttcccgagtgggatgctcctccctccgagtacggacatgataggatgcccgagggaatgcttgtccctggtcattgagcgtgagtcgctcaaatcgttgctgttcggcttgcatcggttgctgagcttgtggctgctgttgcgtcgggggttcgttctctcccccttggttcctggccatccattccctaaccgggttgttcactcgatcgctggccactgagggggcatttgggcggcgttggataagtgcggccatgtttggcatgacggatggggccaccctgtt

SEQ ID NO: 37616 - DNA, 1756 bp, Heterodera glycines
ataaaagcattttcatttcttgagctcttttctcccataaatagatttttctttctttcatattcaatcggctctcttcaaaattgatttttgtataaaattcaaactagcgggtgcgtgaaccgtcggctatttagctgggaaaaagcgcttcgcgctttcggagcttcgctacctagactgtgaagcgattcaaattgatcgaattggttggagatttttttttgaatttttaaaaaattattatgggtttttagtccacatcgaggctcaagacgggcgcttcgcgcccgtttttcaatttttgttggccttggacgggcgcttcgcgcccgttttttaaatccgttgaactcatacgggcgcttcgcgcccgttttttagcttgttaggccgcttcgcggccttagtcgggcgcttcgcgcccgtttttcaattttattggccttggacgggcgctttgcgcccttttttaaatccgttgaactcatacgggcgcttcacgcccgttttttagcttgttaggccgcttcgcggccttagtcgggcgcttcgcgcccgtttttcaaattattggccttggacgggcgctttgcgcccttttttaaatccgttgaactcatacgggcgcttcgcgcccgttttttagcttgttaggccgcttcgcggccttagtcgggcgcttcgcgcccgtttttcaaaatttgttgaccttacagggattagaagaggtacaactgtgattaggagaggtacaatggtgattaaaagtggtacaacagtgatcagaagagtacaactgtgattaaaataggtataacagtgatcagaagatgtacaatggtgattagaagaggtacaacggtgatcagaagaggtacaccagtgatcagaagaggtacatcagattagaagaggtaaactttgattagaagaggtggaacaatgattagaagaggtacagcagtgattagaagaggttcaacagtgattagaagtagtacaacagtgattagaagaggtacaacagtgattagaagagatacaacagtgattagaagtagtacaaatttgattagaaggggtacaacagtgatgagaagaggtacagcagttattagagaggcacaacagtaaatagaagaggtacaacagtaattagaagaggttcaacagtgattagaagtagtacaacagtgattagaagaggtacaacagtgattagaagagatacaacagtgattagaagtagtacaaatttgattagaaggggtacaacagtgatgagaagaggtacagcagttattagagaggcacaacagtaaatagaagaggtacaacagtaattagaagaggtacaacagtgattagaagtagtacaaatttgattagaaggggtacaacagtgattaattagtaaattcattaaattaaaatgaaaatattttttaacaaatttaatttaaaaaaatacaagaaattctatcaattaaaaaaataattaatttaaacttataaaatgtattcatcaaaaaaaaaattaatttaaatataattttttatttattaactcaacaaaatattttaaattaattaaaatcattgaaaataacgtaaaaatgcacagaaaaataatgttacaccgtccggactcgaactttgccccccccccaaaatgatgcctcagaatccccatcacacagggattctgaggtcttaacgatgtcaaaagtaaaatctgatcacatatccatga

SEQ ID NO: 37617 - DNA, 957 bp, Heterodera glycines
  unsure (1)..(957): unsure at all n locations
tcaacatttgggcttaaaatcncggagaaaagtcaattgctttaatgttttcgggatttacctatagaattaaagaataacactgacaacttattaactgaaaattataggtgaatcacaagaaaattcaacattcgggcttaaaatccggagaaaagtcaaatggtgcaatgttttcgggatttacctatagaattaaagaataaaactgacaacttattaactgaaaattataggtgaatttgggcttaaaatccggagaaaagtcaattggtgcaatgttttcgggatttacctatagaattaaagaataaaactgacaacttattaactgaaaattataggtgaatcacaagaaaattcaacattcgggcttaaaatccggagaaaagtcaattggtgcaatgttttcgggatttacctatagaattaaagaataaaactgacaacttattaactgaaaattataggtgaatcacaagaaaattcaacattcgggcttaaaatccggagaaaagtcaaatggtgcaatgttttcgggatttacctatagaattaaagaataaaactgacaacttattaactgaaaattataggtgaataacaagaaaattcaacatttgggcttaaaatccggagaaaagtcaattggtgcaatgttttcgggatttacctatagaattaaagaataaaactgacaacttattaactgaaaattataggtgaatcacaagaaaattcaacattcgggcttaaaatccggagaaaagtcaattggtgcaatgttttcgggatttacctatagaattaaagaataaaactgacaacttattaactgaaaattataggtgaatcacaagaaaattcaacattcgggcttataatccggagagaagtcaaatggtgcaatgttttcgggattacctatagaattaaagaataaaactgacaacttat

SEQ ID NO: 37618 - DNA, 1199 bp, Heterodera glycines
cggcacaacaaatgtaagatagggagagagagaatgcctcttgtttaattgaattcattttcccacaagttttacctcgtcgcccacaatttggatcggtcggccgagaaagcggtgatttttatttattttaatgaaatttattccgagcgaagcaattaaattttattaatcataattagtgcatttgattaaggcaattgcaattgacaacattcgagtggccattgtaagtgaatttagagtagaaattcaattacttaaacatttatgccccgcccccatcaattaattgcccaattagtgcgacccccgggcagtctttgacccggaggagtccgattacgccgaattggctgaaggcgaacggatggccgtgccgcatgcccccataccgtcgttcgctgcagaatccaacgaattttacgcggatgaatcgtccgatgggagaagggaaacgacctgatcaaacaattgatcagatatgatcgatggcactccaaaaatggattctttgatctcattagcccccacccctcaagcaataattgattacactaattaatgtctttcgtttcttgtcgcgattacctccaaatgaatttcattaacaaagtaaaaaataaaatattaattaaatcagggctggcagatgaaaattttcaaaagcatcatttggcaggcaaaaaagcctcattttgagtcaaaaagccacaaaatgaggataaatcctcagatctgccagccctgaattaaattaatactgtcgccaatctttatatttccgccgcgcgcttggggatgggggtgggccaagctgaggcgggattggttcccgctcctcttcaccgctctcgtccctttttcctctgctcactccgctcgctgtgccgtaaagggaatggccccctttttcgccgttcgctctgatgggtctgatgctgctgaccgatccgatcagcgccaaagggggacgagaatgggaggggggaggggtgacaatgtgcagcgatttgctgcttgcttaacggcaccaccgacaaagtttggcgaagggcttgtcggacccctttgactcgacgaccacgggtttcgactcccgttcactgcggcggacactccggctggtgggagtccgctatgatcgatgcgcgcttctccggctggtgggagttgcgctgacgaacggcactgtcctt

SEQ ID NO: 37619 - DNA, 1063 bp, Heterodera glycines
  unsure (1)..(1063): unsure at all n locations
atcacttcatcaaattcgtccgccattttcgccncccttcgttttgcttccgtttaaattgtccgtttcagtcgtccctttttcctgcttcatttctcgccaccgtcttcctttggcttccttcccaaatccttcaattgcccggccgttcctccgaatattttaggcgttcgacctttgcccaccccgtgggcgatgggagtgttattggcgacattaatatccactcgacgaagcatcttttaagcagtgtttaaaaagcgtacctgaaaaaatgctatgtattagtcgaaattaatgtgaaatgccaagaaacaaatggcaaaatcgtaagccataaaaacatgctcatttgaagctttaaaggaataccagcaaagtccattcaattgttttattttaccaaaaaattaacaaaaaactttattatttcgtatgtatcacagattcacaatttaaaatttagagacattcaaagatcacaacaaatcaatgccaatggttatttatgcaaaaagagtccacaaaagaacgtagagaacagaagtcagaattgacagacggaaaaggaaggcggagaaagaactttgagtggggaagggaaattggtgaacctgaaaagtgccacaatttgttttagtatttttttgtggttaaacacctgaattgttcggtcaacgctcacagagacaagggcacaacgaaaatcggcgcaaatccccggcaaaaaacagcgctttgaaggcaaattgtgcgaaatagtttcaccgatatggcctaaatctttgacgtcgcacgaccgttgaggcaaaaatgaaagggcggtgacaaaagagcaatgagtttggcgaagaacagacagaggagagagcgaaagtgtgtcgaatagcgcgacacttccgcccatcgacccaaccgcggagaaacggccacactcactgagttccaagcaagaaaccgtctaaaataacgtaaccgcnagcattggattatcaccatatttttatattcatttaaatattgtctgttacttctttnaaagcgacttttgttccgaccattc

SEQ ID NO: 37620 - DNA, 1014 bp, Heterodera glycines
tggaagcgctaaaatgtttgagaagcttttgagcgtaattacgattttacttagaccattttttctaggcttagatcacatgcgattttcggcactctgataattttagcgctcataatgggatgtataaaggcgattgtagaaggaattggaagcgctaaaattgtttgagaagctttttgagcgtaattacgatttttacttagaccattttttctaggcttagatcacatgcgattttcggcactctgataattttagcgctcataatgggatgtataaaggcgattgtagaaggaattggaagcgctaaaattgtttgagaagctttttgagcgtaattacgatttttacttagaccatttttttctaggcttagatcacatgcgattttcggcactctgataattttagcgctcataatgggatgtataaaggcgattgtagaaggaattggaagcgctaaaattgtttgagaagctttttgagcgtaattacgatttttacttagaccatttttttctaggcttagatcacatgcgattttcggcactctgataattttagcgctcataatgggatgtataaaggcgattgtagaaggaattggaagcgctaaaattgtttgagaagctttttgagcgtaattacgatttttacttgaccatttttttctaggcttagatcacatgcgattttcggcactctgataattttagcgctcataatgggatgtataaaggcgattgtagaaggaattggaagcgctaaaattgtttgagaagctttttgagcgtaattacgatttttacttagaccatttttttctaggcttagatcacatgcgattttcggcaatctgataattttagcgctcataatgggatgtataaaggcgattgtagaaggaattggaagcgctcaaattgtttgagaagctttttgagcgtaattacgatttttacttagaccattttttctaagcttagatcacatgcgattttcggcactctg

SEQ ID NO: 37621 - DNA, 1118 bp, Heterodera glycines
gaaaaacacattaacattttctcccccattcccaaaaagtctcaggaaaaaagtgcccggaagaagcgttgtgaaaagtaaaaaacacaattatctcaaaatcgcaaaatcctcctttttcggtgaaaagctgttaacaaattacacccataattttaaatatcgttcaaatttattccggtgacaaatacaagccatttgaataaatattaatcatttttcattgcatataataaaaattttaaatgtccttggatttcatcaattttccccattatgtacttgaaaatcggcatacccattcttggaaacggatcatggacgatggcagccctgcataaagccaagcctttgtctttggatcctttgtgaggacagcgacaacgaatatattttaaaaatttgatttaaatagcgctacatagattatggaggaaaacaatttttgacccctaagaaccaaacccgtttaattgcatataattttatttcaaatttttttatttttaatataaaaataaattaaatttttgtttattttttaaaacaacaaatatatttatatattctttcaataatattcgaaataactttgaattcctatttttttttttacatatttaatatttatcattttgtaaatagacatttatttaaagttatgttttattaatttttattttgttggtataaataaaaatgcttattcagttttaaatttgattatcacactacttaagtaataataatatgtttttgaatattattatttttttatttaatcaaatcactcttgttaagttctgtctcttttttaaagttctgaagaatagctttttatcgttttgaaaattttataaaattttattttgatttactaactatttgttgggaaaggtactcaattgttccgcttattttatttatttcctttctattttgccctcccccactctctctgttctcccttccataaatacccccgtccctttgaccatccgttcattccctcatttatttgtatttgtgcactttctcccaatcgatatttgcccccattttctcttctttatttaaattgtgtcttcacccacctttgaataaataaatatttattc

SEQ ID NO: 37622 - DNA, 1698 bp, Heterodera glycines
tttttttctgaatttgtaaaaaaattaatttcgttttaaataaaataaataattaattttcaacgttgttttttattaataaaaagagtatttaaatttaaaaattttttaaattaaaatgcattcgatttttaatattaataaaaaaaagttcctatttatttaattttaaatcatgttgacctttttcacgttgttgtgccacttctaataggcaattgcctaaaaaaggaaaccctagtaatttgcaattccatgcagtttttcttatttaaatgcgatttgatgacggcgtctgacagcggacaatccgacagtaaaataaaataccgtcgccgaagggaagcgattgtgccatagtcctaggacgggcattcttgtacgatggaatggcaacaaaaagtgcttatgaattcaacaaatgtgcagccatcgcttaaaaatagcaaaccaaactaatttgcatcataataatttttagactgcatccacattttttaatgatgcccacaggcaaatcaaatgctataaaatagtaattactgcatagaaaactatcataatattttaaagcattatgctggcgcgtttcttacaaatgcaaattatgcccatttttcgattttaaacaaaaattggcatggttttgcttaaagaatgcaattttaaacttttcgtattattcgacagtcctgcgttttttaatttgccttcaaaaatttcaaaaaaaaaaataaggaattcgaaaaatcgtaatcgagagacagtttaaaatttggttgcttttgagcaaaggtatacgatttttaaaacaaatggaaaagattattgcaaaatgttatgttcaccctaaaacagattttttatttttcaaatgtaataataattataattttacagaaaatgtattttaatttgcttttgttttgtgcttttttcgtttctttggcgagaacagcagcacagaccgtccaacaacatgaacatgttcatttgtggaaaatcactcactccgaaatgaaaaagccgagttatttgcttggtcagtttatttaataaaatattaaaatgtgtgttccccttcccttcccttaccgtagacaaaccaatgcaaaaaagcaaaagcaaactaaataaaaattttttaaatttttaaaacatttccctgatcaactagctgaataggctcacaattaccaattagcaggttccatattttgacatatgtttgcattctggactttcgggtttattccaatttattttctttacatatctaaaataatactctaattaagcttatttaggtacgacgcatgtcccatggaagatactgtataacaaatgtaagttcttcaattactgtgccgttttacaaaaatgacgaatttttattccaaataaaagaggagttcttgggaatgccaattttacttgggtaataaattcgaaattttgattttcctaattcgagaggctgcatttcctgctgaaggtaccggccactttggcaccgttagttaggcgtcaaacgctataacatttttatttgtcatttcattagataatcatgcaatgattttaaagcgctttaaagacactattattatctactaatttccataagcatttttcagttccaaaaaatataaaaagggcaatcctcgagacggattttgttgtcactgaagcaaacag

SEQ ID NO: 37623 - DNA, 1313 bp, Heterodera glycines
  unsure (1)..(1313): unsure at all n locations
tgaattacttaatctgaaggtgcttaaagcgaatttttttgggcagcggacgatcgggcaacggaaaatacgcagaagtgccataattgatggtaatcacagatagcttcggttttgttccaatgcccttgctaatttcgattggtctccaaattgtcaattcgcttttgccattgaaatgtttgtccaccaacgcattgaaacgtggcgaaataagtgccaatttgaggccaagttgagcatggtcaaaactggggaaaatgtccatccaaacgtcgttgcaaatccaactgaaatgggaaaacagtttagtcaaataaatgacgaatttgtgacttttaaaagccttttaccgtcggttcatttttgaggcaattagcacaatttggacgagttccgaatgatgtcacacaaatagcagaagaattaattgcgttggaagttttatttttatataatgagaaaagcggaaaaccaaaaattttaacgaaaatcacattttatccaacaatttttgaattttgttcgtcttaaattgttgccaatggccaatgggaggcgaaaaatcattgataaaaacggaaggcgcggaaacattttgacataaaaaggccaaaccgttttttattagcctataaaatttcaaaaagtttcgttaagtttcaaaaaagttataacttgagaagctcaaaaaaccaagttttttacaacattttagctcataactttcttgaaacttaacgaaactttttgaaattctgtaggctaatagaaaacatctagaactatcgaatgatataaggaattaaaaatttgattgattttcacacatgaacgcggcgaattgctgctaattttcaccaattgctacagaagaaatattatacctaatttattcaaattaacaaaaaacggaattcctaggccaaaattttcacaaattggaggtacttttccgttattatgcatcccctaaaaatgttacgaccaaattctatttatccccctgggggataaatggagactgggggattatttttcaaacccctcctagactgggggattaatggagattgngggataattagagcaaatacggtattttaatgcggtatttacatatagattttcagcaaaatatgtacagtagcccaagccttaatggtgtcccgctcaccgcactccttttccaaattttttggacgtttttaaaatgtaataggtaaaaaatgagaaaaaggggcacagtaaaaaaagaatggatgggaaatacgggtatttatctatttatataccggtgggctggtcatttt

SEQ ID NO: 37624 - DNA, 1386 bp, Heterodera glycines
aattacttaatttgaaaatgagttgcactacagtaagccgttatcccttccttactgtaatgtttggaggcaatttccgcacccgcgccctctcacgctcgcgctcgatttcggcccaataaagcctaacaaaatgttttcttaatttgggaataaatttatggggtttaatttgtgtttcccttttggcaaaattaattagctgttttttcatggactgaccagtccggtgaatgtcggttgtcgcgaagttggcggacgtgaaggcggcagaaaagttggcaacggagtcgggccaatgcgacgcgtttcatacggtggacggcgaggctttgtaacggtggaaggcggggtctgtgaagagtctaacggcacggagggcgttgttgtgttgcgcaccaatgccgttgggttattaacgcccacggggccaaattggacatggacggtgaaggaggagcctaaagagggtaaatccgattttttcaaaattgaggctcgactttatggcaaatgctcctcacttaccccccactgtcacttggccattttcgtccctctgttcgtcttcaccaccaccagcagcattcttcctgtgccgttgttgttcttgccacatgacttctgtactattcgtcgcagttggtgtttttgccgttgcaaaaaaccgttgcaattggcgtggcgttgagaagtttcggctcagaaacggcttcggctgttgctgcttactcggtgttcctttcttaatggcatttaattagtcggtgttggtttcttaattactttaaaatgcatttgtttttgtttttattttcgtttgtccccaccctttgcgattgtttgcgtttctccgccatttttgccattgtcgcgcgcgacccgtgccgtcgtcgcctcccccatcgacgaacatcatcaaagacaccgccgcgggggttgggcccgtcgttggcatcgctgtcggcatgttgtccattgtgcgcgaaatgtcgcggatattgtccaatttttcgaacagagaataaatcagagttgcctgacaaacggaaagcgaaatttaattaaataaaagaaatactaaaatccaattaaatttattaattatgataaatgtcgataattaatgatactttatagcggatttgatgaagcgaagaggcgaaagctgaaatgaaataaaggggaaggggtggataggagggactactctttttggacgaatgttttaagcgatgaaaatttattttttgccaacggtaattgcggtaagccccccgattttggaaattttgccgcttcctcgaccacgattgaaacgcctgtaagcattttgctcttgacgggggtgaggaatgattggcgatggaatttgcacattgagca

SEQ ID NO: 37625 - DNA, 447 bp, Heterodera glycines
tttcggcgctagttacaagaaggacctttttgaatttttttccctttttgaaaattttttttgttttatttactcataatatgaacattaaacattaacagtacaattatggcgaataaaaagtatattcacgattttttatcaaaaaaaaaattttgcaaaaaagggtccaccctttggtttttgataaaaattcaaaatctaaagtctaaaataatacctttttgaatttttttgcacttttttttcaattattaaataacgtgaaatgcgtaccatctggtaaaaaaataaattgtgtaaaaaaatttttttcaaaaaagtgaaaaattttcaaaaaggtccttcttgtaactagcgctgctttttctaagcaactgctaaccgatttgatgagtctctcggcgaaagtggacaatctatcggcgaaagtggacaatctctcgg

SEQ ID NO: 37626 - DNA, 684 bp, Heterodera glycines
gttggatttggatatcgaatgcaagagttatagtggaaaaatgtgcgctcgtactattacgaaccgttctaaacctgacccctggtcgttacagcacatgaaaataaaataagtaatactagtagttaatgatcaccatttaactaataattataacaaagattatataaattgttattattatagtaagaatattttattggtccatctacaaaatatatgaactatcttttaataaatataaatcgtaaaaatataattttattttattttttgatataaatttaataataaaatgtaaattaattattttaattagaaaaatagaagaattataaaagaaattgaaatatttgtaattaaagtagctcatatgtaagcatgaataaactagaatcaatatcaatattaataaaaatgcatatgcgaaaataaaaataaatttattatgtaaataaaaaaaatttcttaaataatttaatataaatacataaattattgcaaaatacatcattatagttagcaatataaattttaatttttttgctaaataaaaataataattataatttgaaaaaaaacattaaataattcacaaatataattttaaatctatttattattaatattaaaaaagaaataaaatatcttaaattaaataattgttattaaataatttataaa

SEQ ID NO: 37627 - DNA, 849 bp, Heterodera glycines
aattacatggttttcttcaaatttacttattcatttactaaccctatctaatgattgattgatttcttttgagggttttttcctagtaatttttaaatgtttttattttatttaaagcttactcacttttcaatataatttttttatattcttttattcttatttttaaataaaataaatatacttttttccattcaagacttccttgtcatttctcgcaatacaatcggaagcccagcagatgcccaactcgtcgctgcgactccttgcgccccaacccgttcacaacaatcacttaccccagtcagaaacaaactgtgttggagtgtttcagaaaatgatgagcgatgacaaaattttgctgtgattttgatggtcgacaaaaattccgaatgctttttttatttattaattgatcggaataaaaaaacggcgctatatggagagtcaccgattttgaaaattacttacactttatttgtatctctttatttttgttaagattctttcattgatatgagaagatattacaataagataacgctgaattggaaccgattgtataatgcgatggtctcattgtgaatttataaaaatttattttaaaattacattatttaatgaataaaatattaataaaataatatgagtccttcattttcgtatctacgtctggagaaaatgaacaacatatatatatatatatatatatatatatttaactcaactgatctattagatgaaattatctttcctcaatcataaataaaaataataatattcaatatattctattttaaaattaaaaatcattaaaaaatataattattgaaaaatcaagctttacat

SEQ ID NO: 37628 - DNA, 950 bp, Heterodera glycines
cttttaatcgtctcttttgcgtcccttaatctttcagtgagccgagttactgcggtctaaacacgtttttggtagaattgcggccagaatttaaaaatacagtttgctatggcttcgcatcacccgcttcaacgggtgctcagtgtaaatatcgactggccattcaaattctgcctttccagccttatggaaagatattatggaacttttggttccatctcagttgtcaacgccgcgactgcatcgttattatatcagtcgatagaattttcgaatcgcttttaaatcgtctcttttgcgtcccttaatcttcactctgagccgagttactgcggtctaaacacgtttttggtagaattgcggccagaatttaaaaatacagtttgctatggcttcgcatcacccgcttcaacgggtgctcagtgtaaatatcgactggccattcaaattctgcctttccagccttatggaaagatattatggaacttttggttccatctcagttgtcaacgccgcgactgcatcgttattatatcagtcgatagaattttcgaatcgcttttaaatcgtctcttttgcgtcccttaatcttcactctgagccgagttactgcggtctaaacacgtttttggtagaattgcggccagaatttaaaaatacagtttgctatggcttcgcatcacccgcttcaacgggtgctcagtgtaaatatcgactggccattcaaattctgcctttccagccttatggaaagatattatggaacttttggttccatctcagttgtcaacgccgcgactgcatcgttattatatcagtcgatagaattttcgaatcgcttttaaatcgtctcttttgcgtcccttaatcttcactctgagccgagttactgcggtctaaacacgtttttggtagaattgcggccagaatttaaaaatacagtttgctat

SEQ ID NO: 37629 - DNA, 126 bp, Heterodera glycines
gaaaaacagcgccacaaaaaaagcgacttaaaaacaaaaaatttaaaaaacaagttttggtcattttttgaataaaatctgttaacaaatccgaagacaattttcaaaattttttcggcggcgcct

SEQ ID NO: 37630 - DNA, 987 bp, Heterodera glycines
tttttccccccccccccatttttccttttttcccttcccccccccccattcccccccccccattccctcgtcccgttcatcttccaccgccaccgccctttttccgtccgtccgtctccgggcttccaaccacacacaacacaacacacaaacactcactcactcacctcacctcatttccctttcatttccagtcagctggtccgccaattcgtctggcaaaaagagagaaaatgtaaaagagcccccgcggggtggcggagggaacaaatgtcgttttgtgtgtgtgcgttgcgttgtgtctggatgggacgatatggggtggcggatcttagccgacgatggcaatggacagacggacggactgtggcaagaaattcctgtccttctcctcactcccctcgttttctctgtaatgcacacactgtttagcagtcgctctgtttctctaagtttcatactatcttgtcaccctatgacttctctcccccgtgtttctcggtccgatcattttatttcacttttttgtctgccaaaaattctttcttttctcacaatattttacacatcttagcccccctctctgcactaacttgtcactctctcaatgcctctctgctgtgctattttaccgcactttttccaccctccgtctgttcctccctctcccttcatgcagaagaagacgaaaaaaagtgaatgatgagggaggaagtgaagtgaagaatgaatgatgtgatgggtggtggtggtgcaattccatagaattgttcctcttcttcccccattttcctcctcttccgccccacccccgaggggatgtgctgctcccgcccccttctccccctccctcgcaccattgtgtactttttggcaccccttctacgccaaagaggggggtggcaggggggatggagatgaaatgagacacatgcacactgattacctgcgtataaaaaaaggtaggacaaaaaaatggggacggtg

SEQ ID NO: 37631 - DNA, 850 bp, Heterodera glycines
ctgtgaccaggacaattggccgacacattgctgaacctcatggttggtggtggcattaggggggaaacggaagcacccccccccccccccggatcatttcccccatcatgtttgtattaaagcagttgtcacacttaccgcatatccaggaataatgtttatcgcttaatgtcacaaattttgtacttgatgaaagcgcacaaccatgtgcaaacgtatgttagagaaacaaccaaaagcatctggagggtagttctacttgactgatttttgttccaagcctactttactcagtctgtcatccgtatgaaacaacacaaaggcgctctggttgacaagtgcgtaggcatattggataaacacaagcttacgacaagtatgaagtgttacaaaattagagctccaaaagaaatgactaaatattcattagatatattgtgtacatgcgtctaggtctaaattattctaagttgaggaacggactacccctgtttcctcgaacagaggaagtgatactgtatgaatgttgccagaacccgcgacgaactgtaatagtgttacactgagatgaacaaagagaagatccattattacacgcatagtcgagaggcggcacgctcttttctgatataaccataataaacatgttcataactccagagaggggacgactttgtatgaggtaagttatattgcagctactgatatactaattgaaaaaatgtatcatgaaatattactcgtataagtataagttagatagattctcttaattaattatatcgccatattatatgaatagaaaaaatgaaaattttattataggaccaagcgatacaagggatgatat

SEQ ID NO: 37632 - DNA, 872 bp, Heterodera glycines
gaatattttacgtgtcaaagggtgtgcatttaagcgactcgctgtgcttgcccactgcatttcaaatagctggtaatttttatttctccggcctaatccagaaaaaatcactatctctttttttggaatattttacgtgtcaaagggtgtgcatttaagcgactcgctgtgcttgcccactgcatttcaaatagctggtaatttttatttctccggcccaatccagaaaaaatcactatctctttttttggaatattttacgtgtcaaagggtgtgcatttaagcgactcgctgtgcttgcccactgcatttcaaatagctggtaatttttatttctccggcctaatccagaaaaaatcactatctctttttttggaatattttacgtgtcaaagggtgtgcatttaagcgactcgctgtgcttgcccactgcatttcaaatagctggtaatttttatttctccggcctaatccagaaaaaatcactatctctttttttggaatattttacgtgtcaaagggtgtgcatttaagcgactcgctgtgcttgcccactgcatttcaaatagctggtaatatttatttctccggcctaatccagaaaaaatcactatctcttttttggaatattttacgtgtcaaagggtgtgcatttaagcgactcgctgtgcttgcccactgcatttcaaatagctggtaatttttatttctccggcctaatccagaaaaaatcactatctctttttttggaatattttacgtgtcaaagggtgtgcatttaagcgactcgctgtgaggcccactgcatttcaaatagctggtaatttttatttagaagggcctaatccagaaaaaatcactatctctttttt

SEQ ID NO: 37633 - DNA, 989 bp, Heterodera glycines
taaagggcatattttccgcattaaaaatgaaattataaacaaatgtgggcctcccccccccccccctttcccttgcttatcgctgtgaatcaatcagatgattttttgtttggtttattttagttttttaagctaccgtatttggttttttagaacaaattgcaattttagcatttttattctatttttgtcactcaaaataattgaaaaataactaattaaaattaattattatttaaaattgatatttcgcttctcagcaaaaatgcagcaaattcccattctttccctctccaatttcctccccattttctcacttatttcggtgccctttttattgtcctttccttccacggccttcggttgctcttgtgcacccaccaaattcaatgagtcaatgtgtgtggccaaatggggtaaaacaaagccgagggataaacaaataaatgaatcaatggacgggtgggaaattggaggaaaattcgacttaatttatggaaatcgatcagcagaatgatcggtttgattgtaaatttctgtttttgttggtcaatttgtccggattaactcacttttttttgttttcattttgttaagtgtcccatgtgaaggtgttgcaaaacacaacaacaacaaactcccaccgcattttcactgtccgacatttggaagtgttcaaagtttgtcctaattaaccaatttggccattaaatagtccattttgacgaaatgcccccccccccatagagtcccaacggcaccgctcacaatgaccaactgattgggaaggaaagtgccgtttggactcccatttttacggcggcgtgcggagtgagagaattggacactgaaaaggaatatcttttggctggtgggctttggctccgttcatggcgaataattttcacgttcatcgccttaggcactgtggacaatttgggaacaaagaagattaatctttgtctgtttattccaatcgaagacggaca

SEQ ID NO: 37634 - DNA, 1049 bp, Heterodera glycines
ttctatcaattaaaaaaataactaatttaaacttataacctttattcatcaaaaaaattaatttaaatataattttttatttattaactcaacaaaatattttaaattaatttaaatcactgtaaataacgtaaaaatgcacagaaaaataatgtacaccgtccggattcgaacctgccccctccccccccccctcagaatccccaatcacacagggattctgagggcttaacgatgtaataattgaaatctgatcacgtattcgtgatcagcggcccaaataaccactaaagacatgtttttggaagatttttgtgaaaaaaaattttcccactcaaaaatcatgtgcacccccctttggtctcgaatctcaaaatcatttttaattttgtaacaattttcaaaaaagtgataaaaatgtaaaataaaattcataaaatcgagcaaaaaattgcggatttttgtagtattttaattttacagaatggcttttcagaactgagttatgcaattttttctgaaaattcgaatttttccagaaattctggaataactttttttcttttgaagatagaaataccagataaatcccataaaattctccttatttttctctatttttaaagctttattgcatgaaattcatcctaaattgaaatgagttacgaagtttcaaaattttacccaaaatcccgagggccaaaaaattgccaaatatttttgaatttttaaaaaattctaaaatttcctaaactgaaaatgaacatcagattcgtgctcagcaccttaaaaatacccagaaaaaaatttttcaccatatttttcaaccaaaaaaaattttccgaaaatttctagggggcctagctcgaaaatttttgaaaatttccggccatataatacactattcgatagcattttaaaagctctacaattttgcactaaggcgttttttcgataaaaccaacccctaacgagttatggacccgggactcaaatgtcccgctcaggccaaaaaaaatttctatttccgggaaaagcagaaatttttc

SEQ ID NO: 37635 - DNA, 803 bp, Heterodera glycines
tttctctctctctctctctctcctcttttctttctctctctctctcctcttttctctctctctctctcctcttttctctctctctctctctcatcttctctttctctctctcctcttgtgacatacattacgaaaattatatataggattgcttatttttaaggtgtggcagccccccgtgggcgggaaagggggcgcttgtggcgagacggatggagcgccgcgagccgccagcgagcccaatgggcaacaaaaaagaaagaagaaaaggattattaaaataatcctcatggtataaattgctaattagaaaaataacttttaaaaattaaggtctttatccccttggcggcggcccaggcggcccgcgccgccgcgaaccagcggcgccgggagaaagaggagtatcgcgactcccagcgtgagtttataaaaaagtggggggggggcaacaaaaatttgtggaattttaatgcataaaatctattcctaggcgagcgatggcttcgtgaggaagaaatcgtcgatgaggcgatgaggcgggacgctgccgcccgccgcccaccgaccccgcccccggagggggatacggtatttaaattttatttaagtgttcccatatgaatttttaaggtttggcagccccccgtgggcaggggaggtggagggcgcgccgtctgagttgaccggctacgaatacaatttgatgggcatcgactcaattccggaggaggattaactgaccaacgagtgggattttagaacattagacgatgacgaattcctcgattatccattatgct

SEQ ID NO: 37636 - DNA, 1035 bp, Heterodera glycines
caagaatttttttcgttagcatttcaaatatcgtgtgcgtgtttggtagagccagactagagaaggcaaatgttggtaccaagtttgcggtcaaatccccaagagaaaaaagagatagccattttttcggcaagaatttttttcgttagcatttcaaatatcgtgtgagtgtttggtagagccagactagagaaggcaaatgttggtaccaagtttgcggtcaaatccccaggagaaaaaagagatagccattttttgggcaagaatttttttcgttagcatttcaaatatcgtgtgagtgtttggtagagccagactagagaaggcaaatgttggtaccaagtttgcggtcaaatccccaggagaaaaaagagatagccattttttgggcaagaatttttttcgttagcatttcaaatatcgtgtgagtgtttggtagagccagactagagaaggaaaatgttggtaccaagtttgcggtcaaatccccaagagaaaaaagagacagccattttttcggcaagaatttttttcgttagcatttcaaatatcgtgtgagtgtttggtagagccagactagagaaggcaaatgttactacataaggcacctatctttttttttttttggtagcctacagtacccttttggggggcgtgcgccggggggggggggcgcggtcggcgtcgcggggggggggacgcggtcgtcgtcgtcgtcgtcgtctgtggcggggggggggacgcggtcgtcgtcgtcgtcgtctgtgggggggggggacgcgatcggcggtcgtcgacgttggggggggggggcgtacgcttgggcgtacgcgtccgaggcgtacgcattgagccttttttggggggcgtgcgccggggggggggggggggggcgaatgtgatctgtgaggcaatgttttgaacttttgtgtggtcaaatcatccattttaaattgtagtttgttttaacgagatgggcgggcggatccccgggagtgtaacaaatggatttcacgttttaactttaaatttgtt

SEQ ID NO: 37637 - DNA, 1342 bp, Heterodera glycines
caatatttaatcattgacataaaaaatttttttaaggtttaaaatataatattttcacaaaaaataaataaagtaaaaatttaaaaaaaaatcataatttttcaaaaaaaaactttttcccgttcccggcgggattcccgttcaaattgacgtgatttttgcgggaacgtgaaaaaggcgggaatcccgccccgttctttttcgttttcccgttcgggtgtcccggaaaaattttcttacagggctctagtttttgagtaacttcatagaaccgaatgaaaatttctctcacttcccttacttttctttccatcttttattaaataaaaccaggggtgccattcgtccttgaatggcaaggccgtcctggaaattgggccctctcacatgaaatttgaaagtatccttgaattcaagatgtccttgaagatgagcattcaaagaaataattaaaaattttaagttttgaccttttatgtcaaatttttattaacttattgcattattggtacataacctggtattaaattgcacaaaaattcccaaaatttttccaggcggcgctatcgacaccgccgggatctctctttatattttttaaattagattcaaaagacacaccaaaagcgttaaaaattatcaattttggaaaaatctattaacaatttcttccccccccccccattcccaaaaagtctttcggaaaaagcgctcgcaagaagtgttgtgaaaagtaaaaaatggtcatccccattatctcaaaatcgcaaaatccgcctttttttgctgaaaatctgttaaaaatggcactctaattttcaaaaaatttaatagaactttccccttacttggaaaccggtatacccatccttggaaagggaagttgcccgacccgagccctgtcttaattgtccttttgcgcttcccctccctctcccattctttcaccatttgttccactttttccaaaagtgtcttctgttcattttgcagctgcgtgaattggtcgatggaagcttaaataattaaaaagtcattttcagaatatttctggtcgttttaaatagggcccattaccgtattccctcttcctccattaccatatttcctagtgctgaattcctatattaccgtagtattcccttgatattaccgtatttgccctttgcgtcctcctcctgcttttcctgctgctccttcttttgctgttgttgttcctggccaatcttctcgacctgcgtcttcactgagctcagctcatccatcatttgctgctgcttcatctcactttgaagtgccttctgaagggaaaggccaaatgccctttttcaatcgttttttt

SEQ ID NO: 37638 - DNA, 1241 bp, Heterodera glycines
attcgcggcctcagacgggcgcttcgcgcccgttttttaggctgttaggcaacttcgcggcctcagtcgggcgcttcgcgcctgtttttcaatttttgttggccttgtacgggcgcttagcgcccgttatttaaactttgtttacctcaaacgggcgcttcgcgcccgtttttttttactgttaggctgcctcgcagccttagtcgggcgcttcgcgccccgtttttccaaattttgttggccttgtacgggagcttagcgcccgttatttaaactttgtttacctcaaacggccgcttcgcgcccgtttttaaatattgacgcggcattcggccgcttcgcggcctcagtcgggcgcttcgcgcccgtttttccaaatttcttgaccttattgggattataagaggtacaataaatggtagaagaggtaaaatagtgattagaagaggtacaacagtgattagaagaggtagaagggtaattagaagaggtacatcagtttaaattttatttttttacaaattcaatgtaaattgaaacatgatattctttaattttttattcaaaatttaaaaattatttttaataaaattttcaccaaaaaataatttaattcaaatgaaaaatttttatttattattaataaaattaaaaatattttaaatgaacaaaaattgaaaaacagaaaataaatggtagaaaattaatgtacaccgtccggatccgaacctgccccctcccccctcaaaatgatgcctcagaatccccaatcacacagggattctgaggtcttatcgatgttaaaagtaaaatctgatcacgtattcgtgatcagcgtcataaaatagccctaatgacatgtttttgaaagatttttggtgaaaaaattttttcactcaaaaatcctggttacccccctttggtcccgaatcccaaaatcacttttatttttgtaacatctctcaaaaaagtgataaaaatgtaaaataaaatttatattatagagaaaaaaattgcgtatttttgtagtattttacttttcccgaatagcttttcagaaggcagctacgaatttttttctgaaaaatcgaaaatttcaagaaattctgagaataacttttttcttttttgtgataaaaaactcaaataaactcccatacaattctccttattttttctctattttttaagctttattcctcgttaaaattgatcaaccccttccatttggtatgaatttt

SEQ ID NO: 37639 - DNA, 743 bp, Heterodera glycines
tttttttgggttttcggggcagtccccctgaaccgatgcgcccagatttatggggagaccgaatccttcgggaatagcttccctatagtctgtactttaattctgcgttggatttttgctccccataaatgtttgagtaccccaaacggacacttgaaaaaatcgatttttttgttttcggggcagtccccccgaaccgatgcgcccagatttatggggagaccgaatccttccggaatagcttccctatagcctgtactttaattctgcgttggatttttgctccccataattgtttgagtaccccaaacggacacttgaaaaaatcgatttttttgttttcggggcagtccccccgaaccgatgcgcccagatttatggggagaccgaatccttcgggaatagcttccctatagtctgtactttaattctgcgttggatttttgctccccataaatgtttgagtaccccaaacggacacttgaaaaaatcgatttttttgttttcggggcagtccccccgaaccgatgcgccagatttatggggagaccgaatccttcgggaatagcttccctatagtctgtactttaatctgcgttggatttttgctccccataattgtttgagtacccaaacggacacttgaaaaaatcgatttttttatttcataaatattttttcagaaaatgctctgaaacgcaccaaattttatttacatgttagtttaggcactctgatgcttt

SEQ ID NO: 37640 - DNA, 955 bp, Heterodera glycines
  unsure (1)..(955): unsure at all n locations
ccattttagcggaagatgggttcgactttcgcgagattaaggttggttggctctgccatatatctatctgtgataatgtgctcttttcaaggagttcacgcagcttctccattcccctcgacgagtgccgccgccgcgttacatttgccacatttgttatcagcctggccattacatcaggtggtgcagagagagagtgtatttacgaaaggctcatttaaaattaccagaaaagcgacaacccttccaaaatttaaccaaatattctttcttaagtgactgtcccgctcgcttcaacagtccctatgaggagctgacgccgtaccaaggccgcaagaagtttgtttttaggcttaaaaatatatattaagcacaagttacacaattctttcaggtgctatggcgaatttgtgagtgcttttggctctttttttaaatttttaaaataattgacaatttttaaagcaatgtgaacagtgcaaacgcaaatggacatcgcagaacagtgtggcgaatgaaggtgagggagggaggagcaaggaattctgaatgagaatttatgaataattaataattgcgtaatttcgtcgcattttagcgcaaagctgcatcaaatgccacgtgccggtctttccgcacaaacaggttgggtaaatggcacttaattgtgttcaataattaactcctcctttcttccatgttcagcttcccgtggacaaggctgtcgcattgggattggtgagaattttttgttccctttttagttgttttcaaaaacgtatgctgggtcatggttttttggaggacccggaaaaaaaatgagtggtataaattatcccggtgctttccctcagnngtaactgcagcggcttccggtcaccaacattggctccacttcncgcgagaatctcatcgaccagtggaccgccgctggcattttcattgacgacacacc

SEQ ID NO: 37641 - DNA, 1197 bp, Heterodera glycines
atatttcaacacacaaacaggagtgagtttccgaatcattttgaattctccgccggcgacctcatttttattgaaaagcgtaaaaactatgaatggttggagggcgagtgccaatcaaacggccgaaagggcattttcccgcaaaatttcgtggacattgtcgttccgctgcgcgacgaagaagaggtggaggggaattttttttttatattaaaaattggtattagaaaaacataaaaaatatttcctaattatgtggtgagttgcattgaaaaacataaaacaaaattacaaaaaaaaaatgttggtgcaagccgcaggattcgaacctgcgccctccgaagaggactgcgacctgaacgcagcgccttagaccactcggccagacttgcccttgcaatacacttaaatttatttaatataatcaaacttaccaaaaggatgattcattcttttattcgacaggtgaccactgattgtgaattatctcttcctttttcttcttttgcgaatggagccaatgttaacgaccaaatcgggttttattttatgttttttctaatccatgccttggccaaatggttgtcaatttaatattttcagtgttgcctcggctctttacgattttgagccgcgttttgccgatgaattgcgactacgaattggtgaaagtgttcaggtgttggagttggttggcacagaatgggccaaatgcaggtatttttacgaaactttaattttttttggatttccatacaaattaattaaactttcccaaagggagacaacaagcggatttgtcggcattgtgccacagcgttttcttaacattttcttcgatgcgacagccgatgaagaaagtcactttggggaatcgtcaacaagggaaaatgaaagatccaacgatttgaccggtgtttcgttttcacacgcctctaaataaatgcccttttcattttgtcagaccaactcaaaccgtgggatgttccgattttccaatcttcgaatgtccccagcatccaaaaacaaggatcattttcctgtcgctcttctctttccggttacgattccgctcaatgggtcgactcgacagacgccgccatttcccatcggccaccgcctcgtccacctccgccaaaattatgccaaacaacatcggaagtgacgtcacccagacgacactttcatcagtcccac

SEQ ID NO: 37642 - DNA, 906 bp, Heterodera glycines
agcatgggcagaggggcgcggagagcaatggccattctatttccacagggattttttaaatttattctctatgccagaaaaatggctatctctttttcgcgagaaattttgtaccatacaaatgctcccagcatgggcagaggggcgcggagagcaatggccattctattctacagggaatttttaaatttattctctatgccagaaaaatggctatctcttttttgcgagaaattttgtaccatacaaatgttcccagcatgggcagaggggcgcggagagcaatggccattctattctacagggaatttttaaatttattctctatgccagaaaaatggctatctcttttttgcgagaaattttgtaccatacaaatgttcccagcatgggcagaggggcgcggagagcaatggccattctattctacagggaatttttaaatttattctctatgccagaaaaatggctatctcttttttgcgagaaattttgtaccatacaaatgttcccagcatgggcagaggggcgcggagagcaatggccattctattctacagggaatttttaaatttattctctatgccagaaaaatggctatctcttttttgcgagaaattttgtaccatacaaatgttcccagcgtgggcagaggggcgcggagagcaatggccattctattctacagggaatttttaaatttattctctatgccagaaaaatggctatctcttttttgcgagaaattttgtaccatacaaatgttcccagcatgggcagaggggcgcggagagcaatggccattctattctacagggaatttttaaatttattctctatgccagaaaaatggctatctcttttttgcgagaaattttgtaccatacaaatgttcccagcatgggc

SEQ ID NO: 37643 - DNA, 378 bp, Heterodera glycines
ggcacacgggagggagggagggcaatgaatgttcgtcataaaagaaaaggccgccgcggcagtcgatgggcaatgaaatgccgccgtgtgcagtgccgttgtcgtccgctttccgcaagggaacagcagcagcacagaaacgggacggacggacacggcattgaattttcatcgtccggcgggcgcgggggggggggggggggaagtgcggaagaagaggtagaaaaggtaccgtgtgcaattgaaatgtatctgcccccacggcgccatcatcgtcacccctgggggggggggggcggcaaaaaagcaattcaaacagtgccaaaggcgggaggcggggggggggaggggggcaatgaatataccccaccacttaat

SEQ ID NO: 37644 - DNA, 953 bp, Heterodera glycines
ccatttcattttttgatcagcagttccatcgataagataatctcatcctcttcgaatttctttttacagtgacgcagaaaataaaaaaataataaataggaaattattgcgctaccatttgtcaattgaaaatttaaattggaaattgaatcgcaaagaaattaaaaattaaattataaatatttttttcttcattttaatcacaatttaattttttccgtttattttcagcactttgcccaaggattctgtgcccgtggaatgggaacatttttccgccaaggaagtcatcgtcgatccgaagtaaattttgggaaattgcccggggcaattcacacaaattgaacatccgaaagttctcctgctttggtcaacggactgcgaagcaaatcgttgcattaaattagctcaatttgttgtagcaattcctccaaaagtgcaattgaaattttcggggggggggggggggaaagatcaaagaatacaaacaaattgaatttaaaaaaattgttttaagaatggcacacacttatgtgactgaattggccggcggcattccgtccgctcgcggcacaaaatattcctacacttatgagtcccgagttgaggaggaggggaacaacgaattgttggaacagagccaacgaaggcgggaggagacggacgaggaggagatgaaacagcaacagccgatcaccgagttgaggagggaagaggaggagcacgagttgggcagggaattgaggagaggggaggacggcacggaaagacactgtacatctacgcaaaaggtaggcagagaagcagagcgatcgacaatcgatttgatcggacaatgccaaatcaaataagccaaccgatccttttttgcttactgaagatcacccgagtgaccaaaatcaccacgacaaggcaagtgaaacaaatcccggtgaatcccggccgacgttttc

SEQ ID NO: 37645 - DNA, 858 bp, Heterodera glycines
ctgcgtctctgcccattggatattttcaatcgcctgcagtgattgatagatgcgatttgtgttgggtgggcagaagagatatgcgattggatgagatgaatgcagcgggcttataagcaagtttagaaggagaagagccccccccccccctccaacagaagggacaaagccgggaaaagccgtttccacagagtagcagcagcagccatctgctgcagtttattactctttggcaaagctaataaagagattaatatgtggacaaaattctaaataattgagaaaacgcaaatttgattttaaaggaaataagggaaaaaatttggattccaacgaccacccaaaattttatcaaatgcaataaaaaggatgaagcagtgcgaaattttcttgttattaatttctcgagaaaaaaaggtggcaggggtcaatattaatttttgtggaggggggggggggaggtcggcgtcttttttttgttgcttttcacacgctttttgtgatgcgctttttgaaaaaaaaactggggaacttagtgggagggattcggcggtgcgatagacgccactggggggaaattttgaaaatttgatgcaactcataaaaattttttttatggatcttaaattttttttcttccaaccgatcataataagagaattacatatttttaatgaaaatttaaacataatatttttctaatgtcttctcacaaaatctaggtcccattcaactatattaaaagtaataaatataaaaaatgtaaataaataaaatttaaaagaaatatatatatatatatttatgattaatagaattggaattttgttttactgaaattttttatttacttattac

SEQ ID NO: 37646 - DNA, 1455 bp, Heterodera glycines
  unsure (1)..(1455): unsure at all n locations
gcctgcannggtccttctcaaatannttgaattttgattaaaataattcaccactttccgttcataaattacaatcccggccgaccaaatgtccagttttgtcgaaatctgtaattaaaataaattttgatttaaaaaactgaatccagttccaatttctaatttatgaaatataagttttcaaatttaaaaatgactcaaatccataaatttgcgaattttattattacttctagataatccaactttatttttgctgatagataattaaaatgacaattaatttaaacacataaaaaatattcaaatatttataaattgcaaattatgtataaacctttttgtccaaatattccggtgccatgtatcgtccattagctgtttgtgagaagtgatgatgaccctcaatttcatcgtcattaattttttcaatgtttcgccccatttccaaaaagaatgccccctccagtccgatcagcttcaatggtgtgctttcgactttggagaaaagtcttcgaacagaaacagcattgtttttattagacaccaccaaattttcggggttaaaattcaaatgcaccgcaactgaaaaataaaaaattttaacttatggcaagagaaaaaagaattgaaaaagttaaaaaatcggtatttctatttctcatgaatttttttgggtagattttttatattaaatcataaattcgggcgattttcggaggtcgctgctgatcaggtgatcaaaacacattagttagctgtgatcaatgcacatttctgaccaagaaattattttaaaatttaaaaattaattaaataattcgttgataattatgattaatagctatgaaaaataaatatttaatgtgtttaaattttttatttatacctcggtgtaaatcggctagtggcatcataatttccttgattgaatttccaatttttgtcttataaattttttgataggaatccccaaaatataatctcatttttcaatattgtaggcatcaactcatgaattgccaccaaattcaatttgctcttgccttcttcgctaatttgaccactaaaaatcatttcaattattttttaaattatttttaatttaaataattaatttcatactatacaaaaataatgccttaaaattgctcactggccaaataagtccatgatgtgctcatgtctgttcatttcatccacctttagtcgattcaaaattttaattgcattttcataaccttttttgggatatttttcgtttttgtaaattttaatggctatacatttatcgaccggcaaaaaggcggtattgacagagtcagattctgtgcccgtataaccgacatataccttaaaaatttttattaaaaaagtttttcaaattgactgagatttatgcttactttattttagtagtttttagagcaaataaattacgaaaagcttaaccaa

SEQ ID NO: 37647 - DNA, 1440 bp, Heterodera glycines
ttccccccccccccccccgccttccctcactcgaatctcaccccgggccccattggtcgcggacgccgctctcccaaaatttctcgcgcaaatacacagccgcggggtgaaacggctgagtgcgtccgcagaggaattctccggaaatggccacttcctggacatggccttcgtccgcttcgttttctgtgtgtccccgatagtccatcacgttcggactccgtgccaagtcgggggcgtcgaatcggtcggggtaaatgccggagggcgacggaggtagcggaaaaccgaggagaatggactctgaaggattctggactcaccttcccaattttcttcccttctctccccgtcccctctctccattaacctggcattttgtcataagcaaatctttcgttgaccaattcgccggagaatggcacaaattcggccgattcgtccgccttttggcccatcgtccgctgctcttccacccacacatccactcgcttattccttccctttctccccaattcgatttcttccatttggtcttccgtccatttattccgtccctttcttcccaattcgatttcttccgattgctcttccgcttcagtttcaatgatcgctctttgtgccgcttttcgttttggcagtgccgtgccctttcgctttcggcttttcgtcggcgttgtcacttcacttcccgcaaaggaaagtgccgaactcaccgacgctgtcgaatgacgtcttctggtcgctgctttctccacttggcttccgtcgctttcttccgatgcaaaaatccgtctgactctgcccaatctttgcgggtcctcctccgctgactcggtcactttccgcaccaacggagtcccccttcgacggctaattggcgtcaattgttgtgccgattcgtcagaaattggtgccaaattgcgtggaaatggggttggccttcgactacgtatgggagacaacgccggggcaattggggacaaaggcaccgccgttttcgccggagggggcggcggcgggggcgctttcgcctgcggcgctttctcttcgggttctgcgccgacggatcctccccggtcgatggccttttgccgaattgcatccgcaaaagacaccggcgactttccgccaccgcccttccacaaaggcggcggcggtggcggcggaggcggcggcgcaccgccaagggacccttgaaaagtgattggcatgagtaaaccagagtaattaaagactttaatggtaattaaggttcgcacttgacttaaacagtgccccggggggcggcggcggtggcggcggaggcggcgcaacggcccaaacgaagcacaaagagaggaaaagcacaaaaggattttccaagtgaattatcatttccttaagtcattagaatcctttttaaatgttaacgatggattttggggtttaaataaatta

SEQ ID NO: 37648 - DNA, 731 bp, Heterodera glycines
agtcagttcattaaaataatttttatcaaaaaaatttttttttgggttttcggggcagtccccctgaaccgatgcgcccagatttatggggagaccgaatccttcgggaatagcttccctatagcctgtacttaatttctgcgttggatttttgctccccataattgtttgagtaccccaaacggacacttgaaaaaatcgatttttttgttttaggggcagtccccccgaaccgatgcgcccagatttatggggagaccgaatccttcgggaatagcttccctatagcctgtactttaattctgcgttggatttttgctccccataattgtttgagtaccccaaacggacacttgaaaaaatcgatttttttgttttcggggcagtccccccgaaccgatgcgcccagatttatggggagaccgaatccttcgggagtagcttccctatagcctgtactttaattctgcgttggatttttgctccccataaatgtttgagtaccccaaacggacacttgaaaaaatcgatttttttgttttaggggcagtccccccgaaccgatgcgcccagatttatggggagaccgaatccttcgggaatagcttccctatagcctgtactttaattctgcgttggatttttgctcccacataattgtttgagtaccccaaacggacacttgaacaaagaaagttttttgttttcggggcagtccccccgaaccgatg

SEQ ID NO: 37649 - DNA, 1132 bp, Heterodera glycines
  unsure (1)..(1132): unsure at all n locations
gaaatcatgtttccactncccttctcncaggggtattatttgtaaaagtcttttttccncaataaacttttcaaaccccattttncgcaccgtgaatgttatttntattgattctgaaccggtttgagtagattagactagaaaaaattgaaaattttgaaatcatgtttcccactcccttctcccaggggtattattttgtaaagtctttttttccccaataaacttgtcaaaccccatttttcgcaccgtgaatgttatttttattgaattctgaaccgttttgagtagattagactataaaaaattgaaaattttgaaatcatgtttcccactcccttctcccaggggtattattttgtaaagtctttttttccccaataaacttgtcaaaccccatttttcgcaccgtgaatgttatttttattgaattctgaaccggtttgagtagattagactagaaaaaattgaaaattttgaaatcatgtttcccactcccttctcccaggggtattattttgtaaagtcttttttccccaataaacttgtcaaaccccatttttcgcaccgtgaatgttatttttattgaattctgagccgttttgagtagattagactagaaaaaattgaaaattttgaaatcatgtttcccactcccttctcccaggggtattattttgtaaagtctttttttccccaataaacttttcataccccatttttcgcaccgtgaatgttatttttattgaattctgaaccggtttgagtagattagactagaaaaaattgaaaattttgaaatcatgtttcccactcccttctcccaggggtattattttgtagtctttttttccccaataaacttttcaaaccccatttttcgcaccgtgaatgttatttttatcgaattctgaaccgttttgagtagattagactagaaaaaattgaaaattttgaaatcatgtttcccactcccttctcccaggggtattatttggtaaagtctttttttccccaataaattttccataccccatttttcgcaccgagatggttatttttattgaattctgaacccgtttgagaaaattagactaaaaaaaaattgaaaatttttgaaatcattgttccc

SEQ ID NO: 37650 - DNA, 1464 bp, Heterodera glycines
  unsure (1)..(1464): unsure at all n locations
tttttcttctttttcttcccatttttctccaaatatttcgtcaaatgatttctgttgcaattttttatccactgatccaacataattgatattaattagggcgctcaaaaaaacagttaaagagaataataagcataatttcatttccaagataagatatttctaaaaataaataaatttaaagcattaaaatgaatttattattttaatttgacagctattattcacggcaaatacttatagaattcataaattttctcactaattatataataaataattttaaatatattgtaatgaaataaaaataaagtaatttaattcactattaaataaacaattttatccctactgatcaaaaatatttctgttattccctactttctttgcaatttcaatgacaacagtagagtagaaattaattatttaatttttatttacaatatttattttgctaatgttaaatcgcgaagtaacagaagaaaatttttaataaaaagtcagatattttcctgattatgcaaaaatcgtgcaaaaatcatttgatataattactatttattatcttgatcgctaaaagaaaagattttaacacaaataaaattgattatattagaatagtgatttgatttaaaaagacggaaaatccattttcaattagacatccaattcatttaattctacagtttggctttatcttaattgcacagtttggttatgtttgggcaactaaaatttaaaatctttcaaaaacaaaaactaacggtttgagcagaagcggatttatatagatataaaatgtaaaactagaacaaaaacgccaaaatattgaccaattatatgtaaaagttaaatatggatcacataataatacgaaaaaatggacaaaacgccaaaagatggataaataattacaaattattatgcaccaatttttatgaaaaataatattttttttaaacttaacgaaaagaagaagaaaatatggacaaaaacttattgatgaataaatttattttttattttgaattttttattaaaataatgagcctatttttttgtcttctttaccaatttcggagtagaaaatgcgtcatgaaaattttattgtcttaaaaattaaaaatttttgaaaaaatcattaaatcttcaaataacataattaatgctcctaataaactagagaactaagatttcttaattttaatgcagtttaggctatcagagcttgaaaaaattcaacctagaatccgatttttgacataagcgcaaatgtcggggccgcgaatgtcgcacagaataatctcatttttcaatgaatgaaaattttttgggcaaataaaatttgatttttttttatttccggtattttgttcaacaaaatctttatttttttttaaggcgtcgatcggagagggactncacgaaattcttanaaatcatccgttttcattctcaaacatt

SEQ ID NO: 37651 - DNA, 1187 bp, Heterodera glycines
  unsure (1)..(1187): unsure at all n locations
ccccccccccccaaaaaaaaattaaaaataatcgaaaatatttggagtttgaggagcaaaagatgtcgtcgttgatagacgatcgtatgaaaattgggtgttggacgaccctcccccttcncctctgacattgttctacttacgagggccgaattaggccgaccctttacaaatatatgatcaataccttatctattgtcggaactttttagtttttttctgaatatggtgacattatgaaaaatttgcttcaaaaatgccgtgaattggacaaatgggctactgccaaggccattgtgctcgcattggtcagcagttacaatgaattaagggtgagaaaatcgactatcttttagattctattcgttttattcagctgattccgcaagacaccgtcgaccacgaaagtggagattctcaggcacttcccaaccaagaaaccatcgtggaccaggacagcgaacacttccaagcattgcgagaactcgccaaacgtttggctctttcgtttggagtggacagtttcaaaaacagggaggctcttgctgttatccaccacgtaaataaaagaaatgtttcgaaattaccagatttttaaatgacaattaaaggatggcatcaaatttgcgttgagtttggaccaaaacaggaagaaaacagagcggacgtatccaaatttgtcattcttcgaaatactgcaggaattttcgccaaaacttcatcgtgtggacaaaacggcagtgtgagaacaaaataacaaatagcaaacttaagaaactgcttcagtttgcggtaccttgacaaaaattgttcgccggacgaacagctaagggacggcgaagcgtggcaaacttaccaattgtacaggtcggcaatccgattacgaagccattaaccaatagccaatcatacagttttctgttccaggaactcattggcgaaggctgagtgaatgggcaagcgaacacagacttttcaacgtcattgttcgattgatctcagattgaaacgaatcacctcttttctcttctcgatttgagtgagctttacatttactcattccttttacttttcactgaaaatttatatgaaatatacatgtttttgataatttccgatgataaaattgttaaattatgcactaattttctaattctatacttttcatcggtaattccgcaatcgaa

SEQ ID NO: 37652 - DNA, 1058 bp, Heterodera glycines
tttgccgtaaaaaaatgagaaaaaagagataaccatttctgttcaagaattttttttgtttgcgtttcaaatatcgtaagattgtttgatagggccagacaagagaaggcaactgttggtaccaagtttgccgtaaaaaaatgagaaaaaagagataaccatttttggtcaagaattttttttgtttgcgtttcaaatatcgtaagattgtttgatagggccagacaaaagaaggcaactgttggtaccaattttgcggtaaaaaaatgagaaaaaagagatagccattttttggtcaagaattttttttgtttgcgtttcaaatatcgtaagattgtttgatagggccagacaagagaaggcaactgttggtaccaagtttgcggtaaaaaaatgagaaaaaagagataaccattttttggtcaagaattttttttgtttgcgtttcaaatatcgtaagattgtttgatagggccagacaagagaaggcaactgttggtaccaagtttgcggtaaaaaaatgagaaaaaagagataaccatttttggtcaagaattttttttgtttgcgtttcaaatatcgtaagattgtttgatagggccagacaaaagaaggcaactgttggtaccaagtttgcggtaaaaaaatgagaaaaaagagataaccatttttggagaatttttttgtttgcgtttcaaatatcgtaagattgtttgatagggccagacaagagaaggcaactgttggtaccaagtttgccgtaaaaaatgagaaaaagagataaccatttttggtcaagaatttttttgtttgcgttttcaatatcgtaagattgtttgatagggccagaccaaagaaggccactgttggtacccagtttgcggaaaaaaatgagaaaaagaaaaaaacattttttggtcaagaattttttttgtttgcgttttcaataccgtaagaatggttgatagggccagacaagaaaaggaaactgttggtaccaagtttgccgaaaaaaatgaaaaaaaagagaaaaccatttttggttaaaaatttttttt

SEQ ID NO: 37653 - DNA, 1134 bp, Heterodera glycines
  unsure (1)..(1134): unsure at all n locations
aaaaacgaaaaatacacccaagaatcgatttttntgggaattttaaaaatacacccctaagaatcgacccaaaaatttctaaaaataaaccccctaagaaatgaaaaattttccaaattcatctccaaaatgtatttatttattttcttgacaagaatatatgctttaaaaaattatttatctcaatactgacttggcctaatttttttacttttttgaataattttacacccctagaaatgattttttaatgcctattttgggggttttttagagcctaaagcctacctattttggcggtttttagtgcctataaatgtgagccctaataagtaaggccgcaacttttagtgaaaaaacttttttttgctctattgttttgaagaaaggagctcaaaaaacgcatttctgcattaaaattttttcatttggacgtcacttttcgtcactagaaatcactattttggggttttgtcactaaaatagttaaaaatcactattttggcgttttgtcactattttttcactatttcgacattttttggaaaattccttaacaaaaatgcaataaaaccaaaaaatacacccctaagaatcgacctaaaaaaatttcaaaaaatacacccctaaaaatcgagctaaaatttttcaaaatatactcctatgaaatgaaaaaaaattttctcaaaaatttactttcttggcaaaaatttttaattttaaaaatttttttaggtaactaatttggtttttttggtcttaaaaatcccagtcctactcatttgcaactgcaatcagtgaataaaaattattttggcttattttttggctgaaaattatgtcactatttcggactttttgtcactatttcttcactattttggcattttttactcactattttagttaaatatttcgggatttttcgtcactaaaagttgcgggccctactaacaagaactatagactcctttcaaactaaaagcttcgaatttaaattcagaaaactaaacgaaaaatttggaaagggggggaaaatggaaatccaaactaaaatgggcccttgcaaattaattttaaatcggaattaaatcgctaatttaatacctaaaaattaaaaattggttttaattt

SEQ ID NO: 37654 - DNA, 1039 bp, Heterodera glycines
  unsure (1)..(1039): unsure at all n locations
cgagaaaaataaaatatccaaaaattccatcttcattttttgcagatggattgattttattagagaatggcattgggtaattaaaactttttaattgtatcatttgggttgatttgagggtgatttcttaacagattttcactaaaatgatcaattttgtgattttaagccaatttaagaaaaaattttggaatttttaatgcatttttattaagaaatttgttcaaattttcatcaattgaccgaaatttgagttggtcattagtttattactataaattgcccctttttatttaaatgaaatttggcacaaatttgggcaggttgagccaacccgtcgccgattgatgcccacaacattgggcattgcgcttgtgcatggctaccaacgcgtggaccccgacttgattttgccaacaatgcgtgccaatgttgagcgccaattggacctaattgccaagggaaaagcggactatcagacggtggacaaatcattaattaactaactaattgcgctataactaatttaattaccaatttcaagacggagaaaaatcattaattgactaatgaattatctgactaatgttgtattattaatgagttaaggcattttctttcagaataataaataaaataattagtaaattaaatttttaaaatttaaaaaatctcaaaatatttaactattgaaattgcgtaaaatatatttgtacttattttttctaaatttaatttcagatcaagaaccaaacacttgagatttttcggcagaaatttctcaattttgtgcagaacataaatttggttgacgcactttttggaggtgaatgtcgccaattaattgggcccattaaccaattaattaggcccattaaacaatttttaaattcaccattttaccccattagattcatttacatcgctggccgactcgggcaaaccgtcagcaatgtggcaatggcggcgctacatgaagctgntcgagacgctggcccaacgattgtattgcccgatttgcgatgtgattntttggcac

SEQ ID NO: 37655 - DNA, 818 bp, Heterodera glycines
aaaataggttatttctcttcctttcagtatccctgcaaagtttggtgcgcttctgatcagtttctgaaaaaaaagttaagcctaaactttttggcctgtttaaaaaggaattaaaaatttttaaaaattttattcatctccctttttgatagaaaaagcatcagagtgcctaaactaacatgtaaataaaatttggtgcgtttcagaaccctttctgaaaaaatatttaagaattaattttgcaaaaaataaataaaaacgaaagactcagattttcgaaaatttttttgagccagctagctcggcgctcatttcagtgtaagttagtcctttaccggggagtatccctgcaaagtttggtacgcttctgctcaattagcaaaaaatatgagtgatcgaattttcactaaaaaagttaagcctacattttttggcatatttaaaaagcaattaaaaaatttttaaaatttaataatttacctgcaccgaaggtactcactcggcctcttcgcggcctcgtggtgggccttcgcccccccccccgacgaccttaatagcacgacaaatatttcaacaaaaattttgaaatcatgtttcccactcccttctcccaggagtattattttgtaaagtctttttttccccaataaacttttcagaccccatttttcgcaccgtgaatggtatttttatcgaattctgaaccggtttgagaagattagactataaaaaattgaaaaatttgaaatcatgtttcccactccctttctcccagggggattattttgtaaaggctttttttccccaataaacttttt

SEQ ID NO: 37656 - DNA, 973 bp, Heterodera glycines
  unsure (1)..(973): unsure at all n locations
aaaattctttaatcctttttaaaagtctttttttgtaaccaatttcccatttgccaatgtttactttttttgctcgagttccagctgccacttttaaaatttgatgtgattggccatctccataaatttatgatgtttgactgaaaaagggagcaaaccaaatgaatttttgacttggaactggtttatataagtaagcttcgctttttaaacttctttaaatgctccgaaattttatattttattttaaaaataaaaatttcattaatttttggacaaattgggctgatcgatagtctcggtctcgatcaagagtttagtggtcagttcttgttacccaaactccttacctatctcaataaatgctttcgggatagttaaattctcgatcacgatcttaattcttgaccctcgcaaaatttggtctcagttttactgtttccggaggtttcaaagaattgtaaaaaaaaaacgcaatttaaattccccgaattttgatccacaatttaataaataaatcaaggcgctctaaaacttccaaaaagaaaaaattccaaaaaactgtgattaattttaatagcaaagttttccccctttcttttggcaggttttcccccattttataggggggaggcgacgcatagccacacaaaattagctcaattttcgcagcagcagctccacaacacaacccaaccaacctctcatcactcacattatttattgtgtgtgtgtccccacccaaattcaatcatttgaatgaatgaatgaattaatacacccccggggggcggcgattgacgcagcgcccgccgcacacgcaaattattttcgcgcactcatcagcagcgggcggcggcggcnggcgatgggtacgccgccggcaattcattttcgttcgttgtttgaatggattaattttcgccgcgcgtccccccccccccccgcgtcggtcgtcccaaatttcaaattt

SEQ ID NO: 37657 - DNA, 914 bp, Heterodera glycines
aggaatattttaaaacgatttcgttttgttttggcattatgataccgaataacttttcggaaattatcggaaacaaaattggagaaattcgaataattttttgactgcaaatttttttccttttttgaattgggttcaaaaaaattttaagagaatttttgattattaatttgaagtcttgaatttatttgacaaatccaagacttaaaactgggagaagcaaggggctgtggctgggggcctaaaatttgggccacattggagaattaattctgatttctgaaaaagtcccagaaataactattttttctttccataccttcttgtagagctcgagctgctctttccaatggtcttatcccggtctcgatccgtgccgaactcacaaagttatggagtgaaatgtgaaatattgttttcaccacaaggcattttttctgaaaaccggattcaaaaatctggggtttggtataaccgttttagaaatagcgtagaaaacagcttcgatatcaagaaaccaagtcaagtccagaaaggaatattttaaaacgatttcgttttgttttggcattatgataccgaataactttcggaaattatggaaacaaaattggagaaattcgaataattttttgactgcaaatttttttccttttttgaattgggttcaaaaaaattttaagagaatttttgattattaatttgaagtcttgaatttatttgacaaatccaagacttaaaactgggagaagcaaggggctgtggctgggggcctaaaatttgggccacattggagaattaattctgatttctgaaaaagtcccagaaataactattttttctttccataccttcttgtagagctcgagctgctctttcccatggtctatcccggtctcgatccgtgccgaact

SEQ ID NO: 37658 - DNA, 980 bp, Heterodera glycines
tttaaaaatttccctgtggaataggattggccattcctctccgcgcccctttggcccatgctgggaacattttgtatggtccaaaatttctcgcaaaaaagagataaccatttttctggcatagagaataaatttaaaaattccctgtagaatagaatggccattgctctccgcgcccctctgcccatgctgggaacatttgtatggtacaaaatttctcgcaaaaaagagatagccatttttctggcatagagaataaatttaaaaattccctgtagaatagaatggccattgctctccgcgcccctctgcccatgctgggaaccatttgtatggtacaaaatttctcgcaaaaaagagataaccatttttctggcatagagaataaatttaaaaattccctgtagaatagaatggccattgctctccgcgcccctctgcccatgctgggaacatttgtatggtacaaaatttctcgcaaaaaagagataaccatttttctggcatagagaataaatttaaaaattccctgtagaatagaatggccattgctctccgcgcccctctgcccatgctgggaacatttgtatggtacaaaatttctcgcaaaaaagagataaccatttttctggcatagagaataaatttaaaaattccctgtagaatagaatggccattgctctccgcgcccctctgcccatgctgggaacatttgtatggtacaaaatttctcgcaaaaaagagataaccatttttctggcatagagaataaatttaaaaattccctgtagaatagaatggccattgctctccgcgcccctctgcccatgctgggaacgtttgtatggtacgaaaatttctcgcgaaaaagagatagccgtttttctggcgtagagagataaatttaaaaattccctgtagaatagaatggccgttgcgcaccgcgcccctctgcccatgctgggaaccatttgtatggt

SEQ ID NO: 37659 - DNA, 918 bp, Heterodera glycines
acaaaaaatttcaaaaaatttactttctcataattcaccgttttatgttaaataaaataattttagaaattttgccaaaaaaatagttgaaaatttcttctctgttcaacctgcaatggcatcgccgccggactcgcgtttctgtccaccaccgttctcgacctctgtgccgatgctgctgctggtgcgggtgatcttgacgtgatggcccgtgtcgcttcgccgccgctgccggcggacggcacggcactggccgaacgcatcaaagaggccgaagcgcgagaagaagcggcactgacagtcgacgccgatgaaacggttgcggatagacccccatttgttgttgatggcatcgacgaagtgctagcggacgacagcgaacatttgcgtgttgtcattgttgctaaagggaataaaagtgattagctgatcaatgatctcatgtaactgttttcgtctcgactaattcaagaaaaaaaattataaattgtttaaaaataattagcccctaaaactcaaatcgtaaatcaatgaaaagcattgaaaaagttgttgatggtttaaattagagtgccacgggaccgggacgggaattcccggtcatccgaggtcccggttcccggtcccgggttttgaaaagctcaggtcccggtcccggtagggcaaccgggaaccgggaaaaacaagcactggtaagaatggggtctgagtgaaaaattagtgaagaaaattggagtcaaagggaaaaataaaaaataataattaatatattcttttcaatttttttttttttttgtatactcgtgggtttcctataaagaaaatatgattcctcatagttttttttaaattgatacatattttatcattttttaaatgaaaatcctacccagtgagcttataatcgcaaaaccaacc

SEQ ID NO: 37660 - DNA, 1075 bp, Heterodera glycines
ccgattttttttaaattttcaactaattttccaaaacctccttttttgaaaatttcttataaaatttctaagattctttgtaaaaattctaaaagtttttggctttcccgtttcccccccccccccgccctcaagagaatttgtcccaaaattatgatttatgggagtctaattagtgtgcctatgaaagtctccaatttttgcccctaattaaaactcgcccaatccgttgttgcggcgcagtgtcggcacttcgtccgggaagagggcgctgaactcaaagttttgcaccaacgccgccaaaatggtgaacaattccattttggccaacgactcgcccaggcacattccttgggatttaaaattttgcaaaatttgcattttttttttggcactttttccaacgccaaacggcctcagccaggccggcggacagtaattgccctgtgcgtccaggaaacggtcgggacggaactgttccggcgccgggaaaaggtcggggtccaaatggacggcgcccagctgggccatcacttgcgtattggccggaatgcgccaacggccgcagagcaacacctggccagaggggagggggatttgtgatacctgtgattagggttgcactacgatccctcgggggggggggggcggaagagggacaaaatgtaccgtccggggaggacatgttggagctggggtcaggaataggcccaaaaatgtcggggtcggggagcaaccctagaatgaaaaacacttaaacaaacctcacgagaaaattttgacaaaaaaaattttgagaaaaatgagtaattttctaaaaaatttctagcttttttcttatttttcaagcataaatttcaagaaaaaaaaattgtatttgaaaagatccgaaattcattttatagaatttttttttctcaaaccgaggaaatttcaagttttttggggaatcttggtctcgcaatgactctcaaggacttcaatctcaccatttcgtctcaaaaatcactaaaaatctttctcccttcatccattttttccctaaaaatttggaaaaaatttttgttttgttaaa

SEQ ID NO: 37661 - DNA, 962 bp, Heterodera glycines
  unsure (1)..(962): unsure at all n locations
catgccatcgccttcatccccccggctattaaaagcatgctaatgagtgcaaatgagccgctctccaatgctcccatccggcctctcttttctttgtccaattttctttagtgtttctcctttcatcccattgtttctgtcctttcctagtcgaggagataagcaatagagttagttgttgcctttcagcagcaacggtttgtttggatgagggcaccgagtgagttcattttggccccactgtttaaacgctttcccccggggaatgggcggcactgtgccgtcgcccctccccccgccaacggccccggggggcggcattccccgtctcattatataaactcaaaaagggagggaggaagggaagggcacgaaatgctggtgatgatgatgaggggaaagggggggggaaagtgaaccaaatttacaatgagaaagggaaaggaaaaaagcgcacggaaggcaaatgaaaggacggataattaattggcataaaattgagagagagaaaggaaagagagctttatgttattatttaatgaaaaacatttttaaaatatttatggatgtttttatgctgttaaattgagttacaattgcttcctcttatcacttttatttattatttatttatttattttattgcatcgttgcccaattcattttcatttttttcaacgttatctttgaagcatttacgtgtaaagatcggctgattactaaattctgatcaatgttagtgaaagaaaggaaaaaaagtgcggaagagaagtcaaaaaaacaaaatcggaaataaaattaataaaatctttatttttgggtaatttttaaatattttcttaaatttccaaaatggcaggttcgaagggagggaaattatgccggagcatttgcncaaatatgggagacaaattcaattatgagcccatccatccgccgaatgccaaaatggcgacggactg

SEQ ID NO: 37662 - DNA, 1106 bp, Heterodera glycines
aaaataaaagtgattttgggattcgagaccagaggggtgtgaccatgattatcgagtggaaaaatctttctcacaaaaatcttccaaaaatatgtatttaggggttatttggaccgctgatcacgaatacgtaatctaatttttcttttgacatcgttaagacctcagaatccctgtgtgattggggattctgagacatcattttgaggggggggggggcgaagttcgaagccgggcggtgtacattatttttctttgtattttttgggttattttgactgtttttaattaatttgaagatttcttttaaattatttaaatttatttttttttaaattaaagaatttcatttttttttgaatttgtaaaaaaaataatttaatttcaaattaaataaatattcaattaataatttccaacgttgtttttaattaataaaagagtattttattataaaaaaatttttaaattaaaatgcattcgatttttataaaaacttttcattatttatttaattttaaaccatgttgtacctcttcttatcactgttggactcatctaatcactgttgaacctcttctaatcacaaatcctccaaaaacatgtaatttggaccattttatgacgctgataacgaatctgaaatcagattttacttttgacatcgttaatgggttatttttaatgttttaattaatttaaaatattttgttgagctaataaataaaaaattatatttaaattaatttttttttgatgaataaattttataagtttaaattaattttttttttaattcatagaatttcatgtattttttaattaaatttgttaaaaaatattttcattttaatttaatgaatttactaatcactgttgtacctcttctatttactgttgtacctcttctatttactgttacacctcttctaatcacagttgtacctcttctgatcactgttgtacctcttctaatcacttttgtacctcttctgatcactgttgtacctcttttaatcactgttgaacctcttctatcattgttgtacctcttttaatcactttagggcggattctaatcactgttgtacctcttctgatcaccg

SEQ ID NO: 37663 - DNA, 1422 bp, Heterodera glycines
  unsure (1)..(1422): unsure at all n locations
tgagattattttcggttcgcccacactgagacatttgcggttcgacctagcacctgaacgagtatatctcatcaattcagaaacattaaatatcgtctcaatttcgcaaaataaattttttatacgaatcgattataaaattattcgcttgaagaatacctattaatttgcttaatgataggcgtaaaccttgcttgtgctcttgaaattatagtttattttgatttaaaatattttgcaaaattttggattaattaatattgaaatttatttatttaattatgcacgaatattatttgtttgcatttaaaatatatattccttttaaacttataatcgtagaatcgtggaccagatcccttttttcttcttttgcgcttctgttgtaattttaaaatgaaattattttacaagcaattttaaaaattcagattaattattaattttttataaggtataagatatattttaattgatcatggcatatccattatcaaataatcactattcttattaagctggttttatttaaatactgattttattttattttttacttatatatttgctcaagtagcatataaatttgtgttatttattaatttttatttgagtctgaaaaaagttaaatcattttttaatattaaaaatattcaaatttatttatttaattatccgcgaatattattttgttttacatttaaaatagatattccttgttaaactcctgccgatgtagttgcgctgctggccatccaattggaacggcacgaccttacaaatcttgcttaacattatatagatttaaatagatatatttttttataattattatcctatttgtttagcattatatacattgtaaatagacaaattttataattttaaaaactcataaaatcataatacggctaaatttattaaatcaaatatcgaacgntgtatttttatattttttataactttcctacttgctactagtgaatgtttgagtcaattattgtaaatgctattttttgctacctttttaagtgagaattattttttgctattggctaaccctttttaggggaatttcgaaaaagttacctttttagcaaattaaattggtttttaaattttttttaaaacctcgaaattaatccttccaaaaaccccggggcggtaaaaaagggggatttataaataataaaaaaaatggtaaaaaaatttttggtaaattttttaaaaaaaaaaaattttttcaaaaaccttgcgggccccggaaaaaaagggcgggggcctttttttttctttttgggccgggggagcggccccccccccggattttttatattataaaaaaaaaaaaaaatttttaaaaatttttttttttttttttttttttaaaaaaaaataaatatttttttttttttttttttt

SEQ ID NO: 37664 - DNA, 101 bp, Heterodera glycines
ttcaggaactgcgtgaggaaggcatgcgtaacgctcagtgagcggcatgcaccccacccattcgctgacagatcaaaggatgaacgccatgcgtaaacacg

SEQ ID NO: 37665 - DNA, 932 bp, Heterodera glycines
ttgtaatacatttgaaaacaatttatcatatttaagtgggatataaaatgaattcctcccaaaaaatcggcatttccattttccgatcaaaaattggacaaaatttcgctgcgtggataagctttaacaattttcacgtcattcgttggcctaaacagagaacgaattgcgccttcgcgtgttgtcggtcataacctgtcgctgttgtccgtcgtcacctgtccaattttctgcaagactttcatgcccgtcgctagtcgaccaaaaattgtatgctttccgtccaaatgctgagttgggccgagggtaatgaaaaactgagaaccattggtgttgggacccgaattcgccatggaaatctgttaacggcatgaaatatggacgaattttaacagtccactcacaatgccggcccccgtgtgtcgcaactcgtcactgatttcgtctgcaaatcgactgccgtaaatggacgtgccacctctgccttaactcggattttactttgcctcccgccgcgccataaaacgcccacccgtccgtgtcggatcaccgccctaaacaaacaaaaataaaaaacataaccacagggaacagtgacacctgaaccataaaatcagcaattatccggtggaaaattgtgttgttgtaataccctaaaaaggaatttaaatgaatacattcggactaccgtacctttcctggccaattcctggaagttcatgcaagtccgcggcgcgtgttgccaatacaactcaatggacattgcgcccatcgaagtttcgaacacaacgtgagaagactttgtggaagacattcgacgaatgaaaaagcgaaataaatggaaaaggaaaggggcgacaaaataaaagaaaaaaggcaacgaaacccatttagaaatgaattatagagaaatcttctgatagtaaatatta

SEQ ID NO: 37666 - DNA, 246 bp, Heterodera glycines
gcagggatactgaaaggaaaagaattaacctgttttatcctttagcttgtcatcagtttttataaaaaattttcaaaattctgagtctcctattattttatttatttttcaaaattttgaagggcggggggggggggggagtcagctccactccgaactcatgcgcctaacaggtacctgtgtgatgaagatatccgcgctcgaagccacacaacaataacagaaaccgatgagtaaatggtaaat

SEQ ID NO: 37667 - DNA, 1320 bp, Heterodera glycines
  unsure (1)..(1320): unsure at all n locations
gacttcgaatgggcccttcgcgtggtcnaaccatcgcgaaaacgagagggattcgcgacggtgccggacgtgcgatgggaggacattggggcattgaacgcagtcagagaagagttgaaatggtcaatattggtgggaatttgagaaatctgttggccaatagagacacttccatttcattcagtaccccatacaaaagcccgaactgttccaacactttggcacttccgcacagccgcaaggcattttgctgagcggaccgcccggttgtgggaagactttgttggcaaaagcggtggccaatgagacgggcatgagttttatcagtgtgaaagggcccgaactgctgagcatggtcagtaaaaaggcaaattgacggcatttcccatttcttttcagtacgttggcgaaagtgaaagggccgtcaggacagtgttccaaagggcgcgtgattcggcgccgtgcgttgttttcttcgatgaaatcgacgcgctgtgcccaaaacggtcgcaaagagaggttattcttttaaaaaaataaaattttgatagatttggcaatcaaattcagaacagtggtagttcacggctggtcaatcaattgctcaccgaaatggacggattggatggacggagaaatgtttttctgatcggagccacaaaccgaccgggtgaataaaaatgggctaacaaattgtaggttttttttgtccttttcagacattgtcgaccccgccatcactcgcccgggtcgtttcgacaaaattctcttcgtcgattttccttcaccctcagaaagggcggacattttgcaaaaggctaccaaagtgagttttttaggattcatttttatggtttctcattcctcagaatggcactcatccgcgcatttctccatctgtccgtttcgatgccttcgcttcaaattcctcccttgattttttcacgtaaattccctaccgtttgctctttcctattcctattgtactattgtgtttcttcctcttaaggggtgccgatctcgtcgctttagtccacgaagcgactctttgtgccctccgagaacgcattgaccaaaatgattcgcgcattgactccgtacaatcgcaccattttgaagaagccctccgtcgaattcgtccgtcagtgagacaatccgatcgagaacattacgacaaattgagggagaagtacgcagcgggaacagaaacaaagccaatggacaacgaatgaatgaattggccgacaaattcgaattcctttctcctatttatttgtttacgccaaattgttntaatctcgggacccaagagctgggatg

SEQ ID NO: 37668 - DNA, 1270 bp, Heterodera glycines
  unsure (1)..(1270): unsure at all n locations
attatcgtttttctaaaattatagtgaaanaattatattttcatttattagcaaaagcaaataatcatgattaatttcctatagaaataaatgatttaccttaaaaatntattgatcatttattactttacattttatttaatntaaaattaatcagcactntaagaaagaataccgtaaaaaaattcaataaactaaattattaaatgagttaaagcagatataattatttctatttttttgtctgcttatattaattataaattttcatctataatattaaaagactaatagaaatatttacaaaaaatataaaaaacaattatgttaaataaaaggtttaacaaactattatagtaacatgaaaccgaaataaccgaaaaccatgggtaccggttaataaccgatcatgaactacaatattaattgtaggttaaattatattttatttattcggactaacgaagaaataacaataaaaatataagggataaacaaattaaaaaattttagaaaatgcgtaattaaaattgatttcaaaaacagaatgaaagtcaacaaaattttttcttaaaataaaatgatttgaaaaaaacagttttaagatattctcttatttatttaacaataaatgttataattcttatgcataaaaatctgtccattggtcagacaaaaaatatcaagaaagaaaatatattttaaataattaaaaaacagtaaacaaaatagactccgttttaattgattaaaattcgatctaaccattaatttgataacgatttaaaaggaatttttaaaaatttaaggaagagaaattcgaaaaataagtaaatataataagaaattattaaaaagtattaagcagatacaattattttctatttttatgaaggaaatatttaagaaaagaaatgaattaactaaacgtttctgaaaataaaacaatggagaaaatggtgagtatttgaaaaacatataaaaaactaatttattatcaataataattttaaaactataacattataataaataaaaacaaatgtttatttttattgcgtttgataaataaaaatttaaaaaattaaatttttttttaaattgtataaaaagcaaaaacaaatattgcttcgccagaatacgcgccagttgtcccgaagtagaacaagattgaatagattcattgaaaaattaattatcaacgctgaatttacaaaatccttcattcaatgttcgatatgggaaagtttaaaactgtaaaatattaatt

SEQ ID NO: 37669 - DNA, 619 bp, Heterodera glycines
  unsure (1)..(619): unsure at all n locations
tcgcgtaatggcatttcttttgcatggatgaattgggtatggatgagttaggtttctcgcctccccctctttaattgtaatcaaattcaaagacccccaatttgttgcaaatagcgccaaaaatgcgtgtcactgtttttcattatctattcatcataaatttgagtcaattttagcccatttatttgcctgcacataattattgaacaaacactgttgatattgccgaaaatgacgtccgaaactgtgtcaagtgaagcgtcggcagcgggcggaggggcggacaaagagaacacgaaaacggacacaaccaccgacccgagttccagcgaaaattcggcgtccatcgaggcggaccacaacaacggccaaatgcgctgcaccgaagaaaccaccgtcccgcaagaccttgtggagcgtcattttctgcaaaacacttggtcaggttttgacatggtgggacaagggagaccccccccccccctccgaaaaatagaaaaaaattccggaatttggaatcccaaggctcggaaatccccgaaactgngaccagttccatgcatgatattggatttgtagtaggattgagggacatgagtgtctatnttttccatttcat

SEQ ID NO: 37670 - DNA, 1151 bp, Heterodera glycines
agttacggtgggagaagctacgggagtgggtcatacggtagcagcggttacggcggccgcagttatgggagtggcggttacggcagtggcagttacggtggagaatctacgggagtgggtcatacggtagtagcggttaaggcggccgcagttatgggagtggcggttacggcagtggcagttacggtgggagaagctacgggagtgggtcatacggtagcagcggttacggcggccgaaattatggaagtggcggttacggcagtagcagttacggtggtagaagctatgggagtgggtcatacggtagcagcagttacgatggtcgaagctatggctagcggaggctatggaggcaggaattttgggaacgttggtttaactgctggcagaggaaccatggctttggtagtggttacggtagtggcggatatggctaattctttgtgcaagatgaaacaaggctttcttagttttagataaaaagctaataaagtggttttctcatttaatttcattgctaaatgtcacaatcggaagaataaatcattaatttcaccgtttaattttacaattctttgtgtttagtattcattttttatagtataaacagaaagaacttatttatcaaaattaagaaaaaataatttttagttttattaggagcattaattcggttgtttgatgaataattgatgcttttttcaaaaaactactaattatctgacataatcactttctatcacttatttaaggctatttaggctatcagggattgaaaaaacttaagctgaatcagattttggacataggcgcaaatgtccgaggcgcaaatttcatgtaaccaataaatctacgagtttaaaaaaaaatgaattttcgacttttcttccaattcgggttcgaattcctgaatgggtcgaaagggatatcagaatcggtctgtccctgaaaacccataaatttaattcgtcccgaaaattaagatttttcgaaaaaggatgcctaccatcttaacgattaccaagatgacgttttagcggatactcgatctatcccaaaaacgcaaaaacaatagaatactactagcaaattttgaatacaatttcagagtattctttgattaaaaaggaatcaaattttgtcataag

SEQ ID NO: 37671 - DNA, 1093 bp, Heterodera glycines
taatctggtcccatatagcgaaatcgtaaagtcacgtgcagattgcgaaataatggaagagaaataaaagaccatcaattatctcagaaaaaattcaatttaattaatataaatgaatttgtatttattcacctattgtccaattaatattcctatatcttacaataattcgaaaaattcggttgtcattattgattaattttcgcgtcatcagcatcgccgaggagaatggggcaatgtaattatcgattaattttatcgatttttttttgcgcggcggcaacatcgatagggagggtagggcggtgtcattatcgattaatttgcgcggcgatgcatcggcggggagggatgggttgggcaaaaaaaagcacccgtgcggttttggggaaagtggattgggtgggcggcaacttcaaagtggtccaatagattttggttctgggcggtaacttcaaagggacgcacccctcccataggcatgggtccacgggcggcaccttcaaagggctgcacccctcccataggctttgggttcgtgcggggcggcaacatcaaagggctgcgcccctcccataggcatgggttcgtgcgggaaacacccaagcgcaatcgtgcgcttttggtactctatactactggcccttcgtcgtgtggccaagggggagaagtgccgcgtaacactgaaagggaatttgccacggcgccgcggcacctaccgaattcgggctagccccgccttttacactgttcttcaataaatatttatgtattgtatatgtattggagaaaaaacaatttaataatttttgtaaattggtttaaaggattaaataaaggatcttgttcgatttatgtatttttgtttcccgccctcaggctgggtttaatggtgtgtgtgtgtttttttttttaaattatggcttacactagttgcaaaatttctaagttgctgtatctccttttatttgctaaatgatttagtcaatttcctgggagggactcgaaaaagcgactcttgtcctgcgattgacccacacaaatcagtgtcttatcatctaagctgtcaggccagctcaatttcaattaaatt

SEQ ID NO: 37672 - DNA, 968 bp, Heterodera glycines
  unsure (1)..(968): unsure at all n locations
ctgatcacgaatctgtaatcagatttcagtttggatttcgataaagcctcagaatccttgcgtatagagtgatgaatcccatccccttaaacacttatggggatggtcccatccccttaaacactcttatggggatggtcccatccccctaacactcttatggggatggctcctatccccttaaacactcttatggggatggtcccatccccctaaacactcttatggggatggctcctatccccttaaacactcttatggggatagatttcaatccaataatcgagtcttatggtgttggttaccatccctccaaatagtctttatggggatgtatcttttaaaaataaaagtttttcagaatgccaattttttatctttgttttttattctaacaataacaaacaacaatatttttgatcctaaatcttccgtatttttgtgtcaagtaggtaatgaattttgtgtgttcctgttgttggtaaagcgctcccaaaagtaagaaaaaattaaaatatcgctttttggttgatttgcaataacaaaaattttttagttatttantttttctttaattcttaatacantatcattctttttaaatntttttacaaacttaaaaaaattaattntaaaatttatntccattttttncanttttatntctatatctttcactttttntccatnttttctnnnccatatttcnanattattattttttatatttanatataattattttntaantttctactnttnnctnncnntnttcnattttaaaannntttnnanttnctntatcnnccaaaaattncccccttntntncnnnttcntcccccncntnnntttttnntnnntttctcnnnttttnttnctctttgagggaaattcctcctcacaaaatttnnaaattgttccccattgatatttttcttatcatttagtgtaaacacaacagaacaaa

SEQ ID NO: 37673 - DNA, 918 bp, Heterodera glycines
gaattttctggtgtttataaaggaacaaataaattttttttaaggggtggggggaattttcatgtaaactgttccctcctaaccatcttcgtttaacctgtacattttccgtctccaccacggcgaagtgatcgccggaatggaccgtgccatgacctcaatgtgcgagggcgaacgtcgtcgcgttgtgatcccggccgcattgggtgggaattatttgtcaattagttattgcttgatacgattggtcgagactaatggtcggatggatacccactaatatttatttcgttaattaaaataatcgaaatttaaagtttgctcgtgaaatttttaaattttcgacttaaatctattaaaaagtaatataaattcaatgaaaaaattcaaattgtcacccacccctttgagaaatattaatcatgctgtttacttatgcgtttttcatttgtttttaaattgaattaatcctatttatcataattaggctatggcgacaagggccgtgacaatatccccggcggcgccactctctactttgacattgagctgcacaaactgatcaaaccgagcgcggatgagctttgaaaagtcggaacatatgacaacattggcacagagagagagtcgtcaattaattaattaatgatgagcatcattcggcaatcaaacatttccaaattaacattattacttttctatgttttttaaataccaaatattttatataatacttaaatttgatgaagttttccactctctttttaatctctttatatatttgttgtgttttatgttattcaaaatttgtgaaagcataataaatattaatttgaaattgttttacagatttttttaaaagtcttttcatttataatttaaattttgaatttaacggtaattttggaaaccaatgaa

SEQ ID NO: 37674 - DNA, 1048 bp, Heterodera glycines
attttggcaatcgttgaaatttgtgcaaatatattgagttttagttttaaactaacgaacaaacaaaaaagaaggttggcacaatacgccgatttttatagagaaattgccaaatctcgttcagagaaaacggcaagaaaaaggatacaacaggggagtggtatagccctgggagctgtcttggtcccggtactgagtgttttagctcaacatttattagaaaaaataacatcatgaaatttgcaaagaaaatgttaatgattcccgaggcggaatatttggctctacggagtgcgatgaatagtggtgattatctccaaaatgaaaaagcgagtttagacgcaaaaatttctcagaatttacaagaccccggcataagcgaggacctcaaggcgaagagacatgattggctctataaagaaagacgtacggtaaaggggatacttgaaaatagaccacagaaggtagtgattgagaatcatgtacccggtccgaacgttgcaccatatctgggcctcaataaccaatccaaactacaggagaccgatgaaccccggaaaataattattcctaagaaaagacttgaagagcaaactcctgatccggaatcggataatgatacaataaatgagttaactccggagccccaaacaacatccacattaaaaacacccattccgatcaaaactattatacacccgacccttttaaacggtctttttaggtacgtaaaggaaaacaaagatttatttaaaattacggcggccggaaaggtacagtcgaacatgaatttgccgattgaaaacagtaattatagagatgttttgttgtatctcgcagggaagaaagatgaaacgccgcgcggtgcaaaatttctcaaagatcggttactgaaggatccaacagtaaaagacatggttgataaatcaaaggtcatgtggggacgtggaaggaaaaaggcaataaaatctataaaaacacccggcatagtgcgagagaagaaacccttcaaaccactaatatgggcaagactgtagagaaaatttta

SEQ ID NO: 37675 - DNA, 184 bp, Heterodera glycines
gcatggtcaagcgatggcagaatgtccatccaaacgtcgctacaaatccagctggacatttttgctcttagtgtgcaaccatttggacaacgcttggccagcagttgcattttgcccatcgtcagcaatttcatcggggcacagatgatcgttatcgatggaattcaattgatcaagatcagtg

SEQ ID NO: 37676 - DNA, 1390 bp, Heterodera glycines
  unsure (1)..(1390): unsure at all n locations
agtaccaacaaaccattggagttcggccaagccgatgtgctttcccgactgattgcgaaaactccaatgccagaagacgacataattttagccaaactttctacgagtgctgcaattgggagcttaaattctgttctgaagaatttccccattaaccaataagaatgtgatcgaatcgctcgaacaggacgacacactcaaaaaggtgatgaaatttgtgcgcactcaatgtcccgacaaaaagacgatgtcagaggacattgtcccttttcaccgacggagagaagcgttgccaatactggccagaaattgacaaaaaaattgaagaagttgttcgttcctgccaaatatgtgcttcggaggcaaaggcaccagtcaagactacccttcattcatggccaaaatccgatggcccatggaagcgagttcacatggactatgcgggaacattctttggaaagatgtttctcgtcattgtagacgcatattccaagtggcccgaaatattcgagatgaattccaccggttcgagccgctacgattggtaaattgcgctatctttgcgcacggcatggattgcctgaaacgttggtcacaaataacggtacccaattttcgtcgaaagaattcaaggaattcacccgactcaacggcataaaccatttgttttcggcaccttattgtccgatgtcaaactgacaagccgaacggttcgttgacacattcaagggtggttgtgtgaaaattaaacaatcgatttctgtattccaattaattccgagaaatttttggagagggccaattagtcgtttggcctctgggagctgggaaatggcttcgacggaattagaacaaaattctctaagtggcatggaagccttttcaaaaagcttaattgattttaaacatttctcgtttgcctctgatgggttgtttgacgaaaggaacacattatcaacataaatgttatttttgatttcatttgaaaggggggatggattttgagacagatggtgctgaatagtagccgcaaggaggaagggggatggacttaacccaaatgagactcgagtaaaacggaaaattttaagattagacaaggaaaggggggtttcaatgttttcatggttcacctggtcttgttcaaaagcgccacgttcgtttcgctgatgaagtggatcaaaacggtgccattgctcgagaccaacaacaaatcgccgatgtcgccgacaaacaaatcgaagttcgacgttcagaacgtcaacggcgtccaacaaagaaattggatttagacccatcaaaaccacgttatgattacatttcatgatcgttttactttcacactaccccatttttttttaaaacccaattcaanatttaaaccggggga

SEQ ID NO: 37677 - DNA, 1081 bp, Heterodera glycines
taaaactgataaattggcattggagttatctttttacatttgccaaacatttaaaaatcaaatcacagtgatcaatttcggcaataaatttgatcatttttaattaggaaaattcttacgcgcgtttgtccaccaatttaacgggcgaattctcgagattgaaattaccttaacgatcagcagaaacaatcaatttggtcatttgattggacaaagtgtccttttatcactttcaattttccatttaaagaatggaatttgttattttgcaaagattgtcagggaaataccaaagatcagtggggcagatcaaagaacacccgccgctgatcatgatcattgaattgaacaaatgtatgaacaaaaattacaaactccttttaaaatatgcgcgattgaaattttctaaagctaattttgccaaatgaaatcgtttagtagtgatctgatcaatgaattttgatcattctcgaacccaaaaataggccactgattggacgcctaaattggaacatagccaaaaattttccctataccctgatcattgatcaaacgctgatccggcattttcctatttttagagactgaatttgtcaggtaccaatttgtccattatatttttattgccttaaaatgtgaccaaaaattaaaacaaatatttgtgggggggggggggggaggtgccaaaataaaccggagcaaacatttgatgagattttgatgctggcaaaccgcatacatttggcagaccccgaaaaagtcaaagagagaattgagtctaggatgagaaacgaacaacaaaccagaccatttcagagcagatcaaattggaacagtagaactgagtggaatcctgaccgagatcgaccaccgaataccgtaaacttttgggggaaataggatgaatgaatttcgtcgagacaatcaaaatcagaattggagaatccatcaaacgaatcagttctcagggtctaatgccacgccattaaattctgtccaaccagataggcaaactgctgaaaagagctaacccgagaagcacaaactcgatttttcttaaacaaaaagaaaaacaggtaaa

SEQ ID NO: 37678 - DNA, 862 bp, Heterodera glycines
aatcacaaaaattcaaaatacatttaaaaaaagcctcgttttaaaaatttagcctattgtcctcaaaatggtttgtctaacgtataattttcgattaaaataatgatctatcttttttcaaaaatctaaccccgttatttcattaagctccgctgttctcgactgtctgaattcgtgtcttgaaagtgctgacggtgagcttgttttgccagtgcaacaacatcaacaatcggacatttttcctggtggcacacagttggaggactccaaagttcgacggcatgcaaattttcggtgaaacaaaaaaatgacatttttcaatacttttttgtcattcttcaggatattctttacaatggaccccaaaaatggccaactgtcacgcgcaatgcgaaaccgagcggtggaattggcatttggcatggacacagtttcagttactgctgctgcttctgctattaaaccgcccgtttggagtgccaatgccgtggatgttgtcagtgctgtgccattattaccacgggcggaactcctttcatcatcattgaattcaattgccactcccattgtgccggcttcgtcaaaacaattgcagcttgtttcgcagctgcaacacaaattggatgggtaaataaatctgacaaaacattgaatcattctgtcaaaattttgaataaaaaagaacaatttgagtccctgccatttgcgcactattgattatatttgttcatctattccgcaaatgggattttttatgttttgatcaagtccgattgatcttttggcaaattgcatttaaagggccatttatcatgaaaatttttattttttcgatttcgggacctggctttagccccctcac

SEQ ID NO: 37679 - DNA, 653 bp, Heterodera glycines
ggcaaacccggacattttggcggaccggatgaaattgttgctgagcacggccaaaggcgccgatgctcattttttggttggcaaatgtgacaaaagagaggcgagtggctaattaattaaaaactaattatgagaaaagatgatatttttagtctctaaaaactgacaaaataggtaggctctaggctttaaaaaccccaaaaataggctctaaaaaatggaaaataggcacttaaaaacagggctccgaactctgctgaattatcagcattttgctgatttcagggggtcaaagctgtttttttttgtcgagatgctgattttttgataattttctgttggatattcaaatttatggcgatatgctgatttttgagtctttgactttttattccttagaaattttattgcttaaattgtttattaattaattagttcctccattttcattactatgacttcaaagcgcaaatttttcaaaattttgctgatctatgctggttcttggaaaatcctcaaaaatggccatttatttccaatttttgctctggttcggtgcctaccgacaccgccgggcccccaatttaaaattttgaaaatgctgatttttgaccacaaatgttgattttttgtcggtaaaatcctgattttga

SEQ ID NO: 37680 - DNA, 1129 bp, Heterodera glycines
aaggattcggtctccccataaatctgggcgcatcggttcggggggactgccccgaaaacaaaaaaatcgattttttcaagtgtccgtttggggtactcaaacaattatggggagcaaaaatccaacgcagaattaaagtacaggctatagggaagctattcccgaaggattcggtctccccataaatctgggcgcatcggttcggggggactgccccgaaaacaaaaaaatcgattttttcaagtgtccgtttggggtactcaaacaattatggggagcaaaaatccaacgcagaattaaagtacaggctatagggaagctattccggaaggattcggtctccccataaatctgggcgcatcggttcggggggactgccccgaaaacaaaaaaatcgattttttcaagtgtccgtttggggtactcaaacaattatggggagcaaaaatccaacgcagaattaaagtacaggctatagggaaactattccggaaggattcggtctccccataaatctgggcgcatcggttcggggggactgccccgaaaacaaaaaaatcgattttttcaagtgtccgtttggggtactcaaacaattatggggagcaaaaatccaacgcagaattaaagtacaggctatagggaagctattcccgaaggattcggtctccccataaatctgggcgcatcggttcggggggactgccccgaaaacaaaaataaatcgattttttcaagtgtccgtttggggtactcaaacaattatggggagcaaaaatccaacgcagaattaaagtacaggctatagtgaagctattccggaaggattcggtctccccataaatctgggcgcatcggttcagggggactgccccgaaaacccaaaaaaaaattttttggataaaaattatttaaatgaactgactagataatatttaaaataggttatttctcttcctttcagtatccctgcaaagtttggtgcgcttctgatcagtttctgaaaaaaaagttaagcctaaactttttggcctgtttaaaaaggaattaaaaatttttaaaaattttattcatctccctttttgatagaaaaagcatcagagtgcctaaactaacatgtaaataaaat

SEQ ID NO: 37681 - DNA, 796 bp, Heterodera glycines
ttttattgttttaattatgtgtatatgatcgaatgctccccacaacaattttattgttagctaaattaatcattaattaaattaactaacttgtaaactcttactataatttttttttgaaaatcataaccattgttagaggtctattttcaccacattttttttttttttttttttttttttttttttttttttttcccccaaaattttctttccccaaaattttctttccccaaaattttctttccccaaaattttaaaaggcaaaaacccccccaaaaaaaaggccaaaggcccccgtttttgaaaaaaaaggataatatcgaatttcggtttgaccaatttaaaaagtttgttcccccccccaccccgccaataacccccaaatttgttgaggggtggaatccccaaaacttatttgggaaaaattggttaaaggacaacaaaaaggagcaaccccccgggaactcaaggcctttccccacccccccccccagggtttttgggggcaacccccccccccccttcgaaagggccccccaatgggcaaaaaaggccgggtggaactcggaggaaattatccaaaaatcaaaaaaaccagggtggaaaaaagaaccaaaaaaaatcaaggccgttaaatttgggggaagggcccctcccaaaggggaattgaggaacaaggggttttttaaaaaaaccccccaacaccaaaaataacatttcccttcggaaaaaaaccaaattgccagggccccttttgggaacaaaaaaaaccaaaacttttccttaaaaattt

SEQ ID NO: 37682 - DNA, 1382 bp, Heterodera glycines
ccaattaaattaattatttttcttaatagttgacaggctacttaattaaattaattatttttctaaaaaagaaaaaaagaactggaatataaaccaattttttaaaaattaaaaaaaaattatcaaaaaatctttgattttttttttgattttttttaaagatttaaaataaaaccaaaaactcaatattaaaataatttaaatttaatgaaaaaaaaaaataaattttaccctctaccgctctctctctttttctctctcttcctctccctctatcgcactctaccgctctctctttttctctctcttcctctcccgtttcctctctctctctctttttgtctctccatctttctcttctctttctctctctacacaacctctctctctctccctctctttctttctcaatctccctctctttttttcctttcctcttttctattctctcatcacatctctctctctctccttttctctagctctcctcacctcactctctctctttttgtcctttcctcttttctattctctcctcacattactctctctcctttctttctccttttctctcgctctcctcaccttactctctcatccatccttttctctcttccctcctcacctcactctctcacttcctccttttctttcttctctattcacctaactctctctctctctcttttcctccttttctctctctctctcactctcttctacaaaactaaaacggaaaaagatgaatattttgaaacatccattgttgacaaacaaaataatttgtttggttaaaattgtgtcttacttttcctctttttctttttcaaacattgtttttatttttcttttctttttattaaaggaacgaatcgccacaaattaacgccaatttaactcgaccaaaaaaggggcggagcttcgtctcgattagtatagagtaagggataggaaaaatgcttttttcatattaaaaggatctaattgataaagttcaaacaaaaaattttatagcaaaaaagaataataactttgaaaagatacataaaaaatcggtcaaactctaattttcattgcaaataattttttcttgaaataatagcaatacgcctataccgcagtttatgattttaactattaaaaagttgtagaaaaaatttcgcttttcgcatttcgcttttcgcattttcgcatattttggcttttcgcatttcgcttttttttcatttcgcatttttcagtttcgcaaatttcgcttttcgcatttcgctttttatttttcaatttggcccatccctgatttgcggacaattcctgagaaaaaaaattaaatgaaaaaaattttttttgttataaaatctctaatggaagagtgggcctcg

SEQ ID NO: 37683 - DNA, 1016 bp, Heterodera glycines
ggtcgtatgggatttccgactcaattcggtccctcgacggccccccgcgtccttttttgaattggtcctctcctttggtggaattggtcagtatcctcgcttacattttggcactttgctttgccatgatttagtgccatgtcggatgtcttgactcggatattcccccaatggcgtctcaacaacagtcacttggcactgatcagcacccatcctcgttggcatttcgccaaggtcaactctttttccgccaaactgcccctggtaatcccttcctcgcttctgctccaatcgcttctgaactacaaatcctccgagtccgacctctctgctcacagagactttcctcccccgaggaattgctcaaatcgacgccgttcagtgcggtgatggccatagacatggccaaggagagtggaaggaggacggagcagccattgcgatttgttattcagtggagacgaaaagtgagagggactcaaacatccgtagaagcagaggaggaagagcaacagacgaaagagtccaaatggatcaccgcatcggtgggtttggccattactttttaggggatgggggagaccaaaagtggcattttatgggcaaagggatcttaaataattatctcccaacctgtatggcatgatcatcatttcagatcgagttcgaccataccttccacgttacgggcatccgtgccggtcacttccaccaattctccgtccaattggtgtcccccttggggcctgtcggcccgaccgttcgctcccattggctcaacttcgacgcgatcattgagcagttcgaaccggatggcccaatgaggcgagattcgctgcagttcttcgctcgctacaacatggacaacggcgtggccgcgttggttcggtggcggagggaccgcgacggacaaagcaaagcgaaggggacaaagtgaggggattgaacagaacatctctcaaaatcactgttttagctcaaaagcgatgcttccttctcgcttaagcgacactacc

SEQ ID NO: 37684 - DNA, 910 bp, Heterodera glycines
aaaataatgaaaaaaaaagaaaaagctggcggtgcccgattttgacactcattgagtcttaagccacgtgctaggccaagcacgggcactaccgcgtcgtctcatcacggccacggacgtagcagcaagcacaaacacaccgctagttacggcacgtaagaccgggaacgaaaccaccatccccagtcagtgtgttatgtgcctgccacaacaaccgctcaacgacgcacagacgccagcacagccgttaggtcgccccacgagcgtgcatcccacattggcgcagcgaaccagccaagcgaggcggcccgccaccgacacattgccacgcagcagccatacacaggctttcacacgtgcagcactgagcggtataccacagctccaacgtatggaagcaccccaaaagcatggctcgtgaggcagctgccccgtaatgttgggcagcgtccacaagtcatctcgaacgacctgtgcccatcagcggacgggggcatttggtggtgccaacgctagcccaacaggacagcaggtaggtggtgaataggaatcacttgggtaatgatccagcagcaggttcacctacagctaccttgttacgacttttgcccggttcaagccactgcgattaaatcggttccagtctgcataccgaccgaagccggaacactaaccgtccccgaatttctcgaaatggctcagtcccgggcagcgacgggcggtgtgtacaaagggcagggacgtattcagagcgagttgatgactcgcccctacaaggaattcctcgttcacggacaataattgcaatgtccgatcccaatcacggttaattttcaccggttttcccacccctttcggggaaggacaagcaccctgattttgccagtgtaccgcgcgtgctgccccggac

SEQ ID NO: 37685 - DNA, 876 bp, Heterodera glycines
  unsure (1)..(876): unsure at all n locations
tatatccaagaaaaatgactatctcttatttngagaaattttatacgttacagaagcgctcgagcgtgagagggagggcggtgcgcaatcgccatntaatttcacagagaatttttaaatttatcttatatccaagaaaaatgactatctcttattttgagaaattttatacgttacaaatgctctcgagcatgataggaagtgcggtgcgcaatcgccatttaatttcacagagaatttttaaatttatcttatatccaagaaaaatgactatctcttattttgagaaattttatacgttacaaaagctctcgagcgtgagagggagggcggtgcgcaatcgccatttaatttcacagagaatttttaaatttatcttatatccaagaaaaatgactatctcttattttgagaaattttatacgttacaaaagcgctcgagcgtgagagggagggcggtgcgcaatcgccatttaatttcacagagaatttttaaatttatcttatatccaagaaaaatgactatctcttattttgagaaattttatacgttacaaaagcgctcgagcgtgagagggagggcggtgcgcaatcgccatttaatttcacagagaatttttaaatttatcttatatccgaagaaaaatgactatctcttattttgagaaattttatacgttacaaatgctctcgagcatgataggaagtgaggtgcgcaatcgccgatttaatttcacggagaatttttaaatttatcttatatccgagaaaaatgactatctcttcttttgagaaattttatacgttacaaaagcgctcgagcgtgagagggagggcagtgcgcaatcgccgtttaatttcccagagaatttttaa

SEQ ID NO: 37686 - DNA, 1335 bp, Heterodera glycines
ttttgaattttttcaattttaattttttagagtcaaaaaattttggaaacaaattttttaaacgaaacagtgcacaaaaagagagggagggtagaagaggagagtaatttttaggaagggacgcaccccatctgataattccccttttctgttccataagaggccagaggcgactgtgttcgttgacaagtaattgtccaattaaggtacttggactttccacagtaaaatgtggtacaaattttggaactgtccctcctcacggtgggacttaaaagcaggatagagccaagttcaaaacttcagaggagaatttaagttttgaatttttacaatttaatttcttagagtcaaaaaatttcggaaccaattttttaaacgaaacagtgcacaaaaagagagggagggtagaagacgagagtaatttttaggaagggacgcaccccatctgataattccccttttctgttccataagaggccagaggcgactgtgttcgttgacaagtaattgtccaattaaggtacttggactttccacagtaaaatgtggtacaaattttggaactgtccctcctcacggtgggacttaaaagcaggatagagccaagttcaaaacttcagaggagaatttaagttttgaatttttacaatttaatttcttagagtcaaaaaatttcggaaccaattttttaaacgaaacagtgcacaaaaagagagggagggtagaagacgagagtaatttttaggaagggacgcaccccatctgataattccccttttctgttccataagaggccagaggcgactgtgttcgttgacaagtaattgtccaattaaggtacttggactttccacagtaaaatgtggtacaaattttggtactgtccctcctcacggtgggacttaaaagcaggatagagccaagttcaaaacttcagaggagaattttaagttttgaatttttacaatttaatttcttagagtcaaaaaatttcggaaccaattttttaaacgaaacagtgcacaaaaagagagggagggtagaagacgagagaaatttttaggaagggacgcaccccatctgatattcacccttttctgttccctaagaggccagaggcgactgtgttcgttgacaagtaattgtccaattaaggtacttgtactttccacagaaaaatgtggtaacaattttggaactgtcccgcctcacggtgggacttaaaagcaggatagagccaagttcaaaacttccgaaggagaattaaagttttggattttttaccaatttaatttttttagagtccaaaaaatttccggaacccaatttttt

SEQ ID NO: 37687 - DNA, 887 bp, Heterodera glycines
tgcaggtcgcttaaaaacatccatatatttttctaatctgcatactctttgggataaatatataatctaaatgaaaatcttgcgcaatattttgacaattatttgcaaaaaaaaaattttcaaaaatttcggcgcttcataaaagtgtgaagataatgatgatgatgatatctgatcatgaaaccgttttttcatgctgcatttttgtggaatacgcttacaattggcacgaatctgccccatccatttggacaataaattcgaattcgaattagatttcccaaattaacaccaaccacttttaaattagcgccaaaatttctaaaaaaaagatatcaaatttttctcgagcgttaatttttcccggattttttcgagtcaaaaaaaaaattttttttaacaaaattcttcttgaacaaaacagcacaatcattttatttgctgtcattgacaaaactggccattatgcccattattttcctcttgttgttgttgacccgttgtgtcagcatctttttgtgttcgccgggggggggggcggatggaatttgtggggctcaaatgggcgccgaccaaatgagcgccagcttagtttttagggtataactccttcaataattgtcctaattgaatgaatttgatgtcattcaatagccttacctattcactattttactacgaaatttcaaaaaatttggtttaagtttcaaaaaagttaggaccaaaaaggttggaaaaccagttttttgaagttttctggtactaactttttcaaaacttagccaaatttttcgagatttcataggcaagtagacaatacgtagggctatctaatggtgtaccaattaagacaactatgaaaggagttatagcccaaaaactgagct

SEQ ID NO: 37688 - DNA, 1710 bp, Heterodera glycines
  unsure (1)..(1710): unsure at all n locations
tgctctttctattgtcgttccgttgatttcttactctgttcttccatttaccaagtagcacacttttatttttctgcccttattttatatttagcaatccttcaacgaattccgactgcttgcgatggcaatgttttgctacggtttggcattgaaataggcatgccataaatcggtcaaaggaagtgatggagcggatagcgcgctcctttcactctgtgccgctgagttgacgacactgctcagaacgaatttgcacgcggactctcagttggaggcggaaatgcacgaatgcgacaggaacatggtcgttggtgttgttttctttatttgtttatttatttgtttattcataaaaaataaaaaagtcatcagaagggcgagaaccacttactctgacgactattccggtaaatgtgtcgtagagtaagtgacaaaaatatatggatgatcacaggaattaaaaaaaagacaaaaatatgtgaaaataaataataaataaattgaggtcaaagtcaaatgaggtcgaagtaccaaatcacttagaaatttgttacattctagctttcccggtcttacatattaccctagtgaactttaagttttattttaaattgatttaaagaatttgtttttattagttctttatcgagttgattccacaattttgttaccctcccagcaaagggaatgaattttttgcccagtttgtattttgtgttaaatctataaaaggggatgttaaagcgtgctgatggattaaaaatagaaaatagtttcagatctgttcggccataaacaattttatgcgccatggaacagatcaaagagctttcgcctaatctcaagtgttggcagttgcagtattctaatcgattttggtatggaattggcggaaggctgcatttaaaaaaacccttttggtgaaatatttttgacacttttctattttttaaatattttttgaagagatggatttcaaacctccggagcgtattccaataaaggcctaatataagttttatataacgtaatccaaatcttagatgatttggatttaattattcggaacaaggaacgcatacgtaaatatgcattccttgttatatgattaacatgatcggaaaattgtaatttgttatcaatgtttactcctaaatccctaattgtctccacagcatttattgtatttccatcaaatttatatgtttcttttgggtttttggaaaccaaatataatataaaagttttttgaattgaaacttttatttgccatttatttgcccattcgaataaattatgcaatgctttacgcatactttcggtgtcggctcttgctttatagcatatatacaatttaacatcatcagcatataattttattttcactcctgatggcaaagcatcaggaagatcgttaatataaatcaaaaataataaaggtccaaggaccgaaccctgggggacgccagagccaacttttttactggaggataaagcatccccaattttaatacgaaaagtcctattactcaaaaagccctttatccacaataaaagtttgcctctgataccaattttttccaatttgtataaaagtaaattatggggcactgagtcaaaagctttctgaaaatcaatataaatacagtccacatttttcccataataatgcctcgtaccaatcttcacaactgntattagttgact

SEQ ID NO: 37689 - DNA, 883 bp, Heterodera glycines
attaaataaaactcgcctcttttttgtctccgtcccccaccaaaaagtgcacatccgcgtcctcgcccgagctcagcaaatgtttcatccgttcattcgaattcattattgaggaattcattccgaaatttaaattataattttgctaaaagatcggatcaatcagtcaaagtaaatgtgggaattagggaaggaagggttagaaaaagaaaagtgacaattcgtccagcgaatttcatcttataaactccaattttgtttaatccaactcgcttttttgcttagagccaatcccaaagtgacccacttttaggcgttgcaaattgcccaaaaatatttagtcgattaaaaataatcatagcccagtgcaaatagagagggatagagagacggagagcagagagatagagataaggagagagacaaagacggagagagagagacagacaaagacggggagagacaaagacggagagagagagagagagagagagattttatttttatttctttcatttgatatcccggttatcttcacctccggatctatctctccataaatattttttcattttaaattttatttttttcaatcctatttttcgcaggtgtcgcatttttcggtacttaccctttttctgaccctcccagaaaaattttctgataattttttctagggtgatttaatgcgctgatcatgaatctatctaagttcagttttggcgaatttcgaacctgaactcgaacaaaaaagtcgaaaattcacattttcgaaattaccttcatgttagaagctacatatatatacagaatgggcaatggtaaagaattgtggtcccggatttatttatttttaattttattttgtatttgggctcgaaac

SEQ ID NO: 37690 - DNA, 1227 bp, Heterodera glycines
aataaataaaaagagaattttaatagaaaaatcaatttaaatttatttacattttattataattatgtttaattgacttagccggcgcaaaagaggagtgcgtgcacatgctaaatgcagaaggccgatggaacgacgcgcgctgcgaaattcaaatgacaggcgcgatttgcaaaaaatcaaatttttaaatacaattgatggacgaattttaatgggcataagcaaaaaaaagacattattaattctttttaaacatatatttattactaaattgtcaataaatttgtttgggtaatgattcgaatttctcaaaaaaatggaaattgcggacatttgtctttggtcatggactaattctttgggtaattaattcatctcgtttattaaatatttatttatattttccttcaaaaatttgtctcgtgctgcgcgtgtcgagaatttgcggagacgcgccgacagacggacgggcgatgttcgcctcagacgcgacgttccgtccgctctttttccgtaattcttttgcttccgcttttcccgcgattgaccgattattttcttttcggcaattattcctttttctcctcatttttgtggcttttccattaaaattttgtgctttttaagctttgcttttcctccgcctttcgccccgtttcacttgtaattttttgttattttattcgtcggtttttgttcggcgataatattttgtcgggccaacaaaacgagtttcgcctcgacccattggtaccaaatgaatgcccataataaagaaaagtttcatcgaaactgactgattattattattatttataatagcgtgtgtcgtttttcttcgtcacggtgaccatacgcagagagttcattatctaattatatcaattttttaataggttattttttaaatgattttctttttatatgctttttccattttgcgcatttttcgactccatttgctgccaacaaattgtttttttattaaaaaatatttaaaaagtataaaattatctcgaaattgtcaatctctatttcagggttggatcccaacgatgaacttttgaaagttcaaataggggtcaattttaaaacaaagaaaagagaagtaacggcaaacaggcgcaagataattttcgagatgaaaattgttcaaaatcatacaatcataccgtatttcctagaatagagagcccccctggggctttgtttttcaactccccc

SEQ ID NO: 37691 - DNA, 885 bp, Heterodera glycines
cccccgcccccccccccccgcccttcaaaattttgaaaaaaaaataaaataataggagactcagaattttgaaaattttttataaaaactgatgacaagctaatgtgataaaacaggttaattcttttcctttcagtatccctgcaaagtttggggcgcttctgataagtttctgaaaaaaaagttaagcctaaactttttggcctgtttaaaaaggaattaaaaatttttaaaaatttattcatctccctttttgatagaaaaagcatcagagtgcctaaactagcatgtaaataaaatttggtgcgtttcagagcattttctgaaaaaaatatttatgaattaattatgcaaaaataaataaaaatttctaaaaatttgatcgtccataaataatttgtaattgatcaggggctcaccaaattttgcagggatacgtatcggaacactacaaatgcttactaattttcctagattttttaaacccggtgaaaattttttgcagacaccaccacttttgcacttaaaaaaatttcaaaaaactttaaaaattcatagaaaatttaaattcataggtactactgctaaatcaacgcagagacgcctttccttgacctttttaggcccctgcaaaatctggtgcgcttctgatcactactcgaaaaatgagtgattgaattttcactaaaaagttaagcctaaactttttggcctgtttaaaaaggaattaaaaatttttaaaaatttattcatctccctttttgatagaaaaagcatcagagtgcctaaactaacatgtaaataaaatttggtgcgtttcagaaccctttctgaaaaaatatttaccaattaattttgcaaaaaataaataaaaacgaaagactc

SEQ ID NO: 37692 - DNA, 1285 bp, Heterodera glycines
  unsure (1)..(1285): unsure at all n locations
ttaaacactcttatggggatggatcacatccccttaaacactcttaaggggatggtcccatccccttatcacttttgtacctcttttaatcacttttgtgcctcttttagtcacagttcctaggtagcgaagctcccaaagcgcgaagcgctttaagcacccaagaaacatgtaagcacacaccggctagttactatatatgttatattgactaggggtttcgttgccaaaaacaaaatctcccggccgaaggccgggagcgccctgaaagtagtggaagggtcttacaactttttgaggtgcatccgggaaaactataggttttttgatccgacggccaactgagtcccagggagcgatttgtcacttttgcttgcagtttaggacccgtaactttttttctaaaaccctaatcaaaaagtacccgctttgagggcacccccccaaagggtcctctacatgcttgtattttttatttttttattagagccaccccttggtctgcagttgtgagcaactgaagcgtgctcaaaaagtacacttcagtaccaggtgaataacacgccgggcttttatctgagggaaatgtgcccagcagacttattgtagagcttggaaagctcgattttttgaaatttcaaaatttcgaaaattttcaaaatttttcgagttaggcctaaaagtaggttttggggtttttgaattttaggattttttaacgatttttcccgggaaaacggaggccacttccaacacatagtttttcgagctctatcgaatggtatttttttcggaaaaatttcagttttttcccggaaatagaaaaattttttggcctgagcgggacatttgagtcccgggcccataactcgttaggggttgatttaatcgaaaaaatgccttagagctaaattgtagagcttttaaaatgctatcgaatggtgtgatatatggtcggaaattttcaaaaatttccgagctaggccccctagaaattttcggaatttttttttgtgttgaaaattggggtgaaaaatatttttcaggggttaattaaggtgctgagcacgaatatgacctttgttttccgtttcaaaatttttggaattttttaaaaattcgaaaatattttccaattttttggccaagngaatttgngctaatatttgaaattcataacatatgattgagttggtcaatttaatgaaataaagctttaaaatagagaaaataaggagaatttatgngatttatttgggtttctacatgaatagaaaaaaaatat

SEQ ID NO: 37693 - DNA, 1165 bp, Heterodera glycines
gctcgagcgcatgtgtatcgtataaatttctcaatatgagagatagtcatttctctaggatatgagataatataaaaaattctctgtgaaattatatggcgatcgcgcagcgcacttcctatcatgctcgagagcatgtgtaacgtataaaatctctcaatataagagatagtcatttctcttggatataagataaatataaaaattctctgtgaaattaaatggcgattgcgcaccgcacttcctatcatgctcgagagcatttgtaacgtataaaatttctcaaaataagagatagtcatttttcttggatataagataaatttaaaaattctgagaaattaaatggcgattgcgcaccgccctccctctcacgctcgagcgcttttgtaacgtataaaatttctcaaaataagagatagtcatttttcttggatataagataaatttaaaaattctctgtgaaattaaatggcgattgcgcaccgcacttcctatcatgctcgagagcatttgtaacgtataaaatttctcaaaagaagagatagtcatttttcttggatataagataaatttaaaaattctctgtgaaattaaatggcgattgcgcaccgcacttcctatcatgctcgagagcatttgtaacgtataaaatttctcaaaataagagatagtcatttttcttggatataagataaatttaaaaattctctgagaaattaaatggcgattgcgcaccgcactccctatcacgctcgagagcatttgtaacgtataaaatttctcaaaataagagatagtcatttttcttggatataagataaatttaaaaattctctgtgaaattaaatggcgattgcgcaccgcactccctctcacgctcgagcgcttttgtaacgtataaaatttctcaaaataagagatagtcatttttcttggatctaagataaatttaaaaattctctgtgaaattaaatggcgattgcgcaccgcacttcctatcatgctcgagagcatttgtaacgtataaaatttctcaaaagaagagatagtcatttttcttggatataagataaattttaaaaattctctgtgaaattatatggcgattgcgcaccgcacttcctatcatgctcgagagcatttgtaacgtataaaatttctc

SEQ ID NO: 37694 - DNA, 1680 bp, Heterodera glycines
gaagaggaagacggaagagagtgaaattgaggatgaagaagaggaagacggaagagagtgctgctggtccgaggcttatcacggggagaagggggggggggggtgacatacggacgggggaattgcattcccgtgtccacacagttctacaaggtttccccaatttgcgttactccccccccccaaaccctgttttattcccaaaaccttattgatatgtcacactgtttgatatttttgcattttaaaattattcaattttcatttgaatgaattaaactaggggttcacccaaaatgatattattaacatatttgtcttctttgtcaactcctttgctcccttcgttcttttggtgtttttggcactcggaaaggggcatttatgtacggaggaggggccgaagaagccaatggaaaggcgggcagtcgaagtgcattttcataggaagggggaggggacgcatcgacggaaggtcccactggggacgaaggacagacaaaaggcagcgaatctgtgcggaggaggacacttttagcactcaatcgtttccaactttgctgattgtgtcttttgttgttgtaatgtctgcagcctaaactaatcaggaaaaccacgaggaaaaggatcaaagtgaggccggcggcgatccccgaattggtcgctgcccggcgttgctcttccgcggccgagtggccgtagtaatgggcccacgacgcgggtctgagaattgggcgaatttgtgctctttctcaccattcagacagaaaggtgtcattgaatcgtgttttggtccaatttggacccgcgtttagtgttaattacctgttctgtgaatgataggcccacatttattggacaaattgaatcagaaaaaaatagtcggatcaaaaaacatttttaaagcttctcatttgacaattggaggataaaaaaattacaaaacttggtaagtcaataattacgaacttataaatatggggaacgaatgaacggaaaaaaaggaattgagaaaagggggggggagagactgccgctgctaattgaatttgaggcaatttgtcgttttaaattttatttttgaaaaatgcgcggcgcgagtaatggcagagaaagaacacagtgaagggcccttcgcttatcgacgacttcgatcactgacgcccccccccccccatcaacccaattttgaacaataggaaggcgggagggacaatgggaggcggggccatgcgtatgaattgaatggacgcgagggtatttgggacacaattggaaatgaatgaaaaaggggaccaaagaggggggggggggacagaagacatccattgattgtgctctgatcatttctcgtcgaaattcaattcgttcagtgccgagtaaggcgacccaacgcatggcaatgccaaagggtctctgcacgccttccgtcggcctgaataattattttattttacgtttccttgtttgttgggcttctcactcggataacgccgcatcagatagtcattggccacgttggccatttggactaaaattgaaaaacgacgaaatatcgccacaacggacaattggcacaaaccttccctcagctgactctccaatttgctcttttgctgggcaactgcaaagttctcgaccaccattgaaatgggaaaagccaggatgatgatgccaaaa

SEQ ID NO: 37695 - DNA, 971 bp, Heterodera glycines
  unsure (1)..(971): unsure at all n locations
ggtattattactattttatttattaaaataattttttgacataaatgttcaaaatgtttttaccattaaattagtaaaaaaaattaataaaattaaaagctattttataagttaaataagaaaaaatatttgattaacaggaggataattaattctataaaattatacacacttttttaaatagtattaaatgttaaaaatttttttctcatcaacaattttatgcccataatttttgccaattccaaaaattcaatttgaataaattgttactgcccaaaaaatttgcataaattttcagcttaaacgtttcaacaaatatttttctgtcacaatttttgctcaaattctgccaaatacaaacaagcgctttcatgaattcgattatggtaaacgattcgctattattgaacaacttcatttgggacaaaattagtcaacaaaatgagaccaaaataatgacaccatacactgaggtaattaaaaaataattactttttctcaatattattttatttaaaatgaaagaaataaaaattaaggtttttcctattttaatattatattccatgtttaattcacaaataccatttatttcgaaagaagggcccccgggggctttatttttaagcccccctcaaaggggatgctttatttctgggcaggttctaatttggggggggggctgtattttagaaaaaaggtaataggaaaattatttgaaattttattcaaaaattatgagcgagttcagatgaacttaaaattttaagctattccattcttaataatataaaagaaattaaatataaaataaactttaatattataatttatattttattttctcagtttttattcgacttggattctaaccgtttcaacggctttttaattgttataacaaacaaaatgcatatcactnggcgagtcgtgccacctgtttnggcatctattctcacttgagctga

SEQ ID NO: 37696 - DNA, 591 bp, Heterodera glycines
ggggcggagtcgttacttaaaaaaccatcattatgatttgatgaaaaattatttataaccagggttcccagatcaaaaatttcaaaagcctcatttggcaggcgaaaaagcctcattttgtgtcaaaaagcctcatttttataaagtttattaaaacacgcttaaaattttcaaatgatttatttttgattgtccatgatcaatttgagcaattttttgttcgaaataaacattttgtgaaattctaagcatgaaaaaccgaagttgattttttgcggcgcttttttcaaaaaacttttggggaaccgggggccggcggtgccgataggcgccgccgggaaaaattttgtgatttttaatacgatttgttaacagatttgtcgacaaatatggacaaaaacattatgccaatttatcaaaattaatcaaaatttaaaaaatctgacgaattttccccaaaaatcttcaaaatttctcaaaaaaccaaaaaaagcctcaaaatttctcaaaaaaccacaaaaagcctcaaagcctcattttgaaaatttagcctcattgacctatcaaaaaaccacaaaatgaggctaaagc

SEQ ID NO: 37697 - DNA, 1101 bp, Heterodera glycines
ataaaaaaaaaactaaaaatgtttaagtcgaaaacaatcagcagttgttttagaacattaatttatattattttcaaaaattatttaggttcgggccgatggtcagactgctgatcctttctctcttgttttctcctgcgcagcagctgagcaaaaagggctcaattctaacacttcaagcacagtgcctcgtgctcaaaatgctgctgctgcatcacggccgaccgatccacggccaaatgcaatccaaactgtacatgctgcatctgctgctgctgttggaggtggcgactttttaattcctctttatattcttcttaaaataaaataaaaaataacccaaaaaaatggaaaaaaataacctttttaacaatgggatttttgttcgactttcggttgggaactcaaagaaggagtcaaggcttttcagtttatttatttccaaattaaataaaagagaaaaaaaggacacaaacaattttttgagaagacgacatcataaaattaatacaattaaattcgaatgaatgaaaaggtgggaaaaaacagtcacaaataaatgaacataatgccaaacaaatatagaaataaaaataagggtcaaaaagtccaacataacatcaaaaaaaatatatattaaaaataaaaacaaaaaaataaaaaaatcccatcacagttggcgcaaacggtggtcgtggtgttgtgattaaaaacgttggcaaaaatggcacagatcttcctttgtctgtatgttttttttcggatttttgtcactataacacccaaaaatgtaacatagttaattttaggcttgattaatttttcatccctttctcaaaaactgaattattacaaaatattcgggttcaaatgatgttttgctttaggctattccctcaattctcaagtgttcgcggctaccacctccgccaagcctccagtgccttcgtggcggtggcctgacgcaacatcaaaaaaggaggtacctgtcagatgacactttgtcatctgacagtgacgttcatgcttcaacggggacaagaacgtattttgtcttctgaagatgaaaaaggaagaataagggaaaaaaagcaaaaaaaa

SEQ ID NO: 37698 - DNA, 1255 bp, Heterodera glycines
  unsure (1)..(1255): unsure at all n locations
acacttcaaaaaacaaatttttttttaaataaaaaaatttgactagaccaatcgaaagctaacggtcgacctaatggaaaaaaatccccgaaggagagaatttaattaattccattccttcgggggtccgtgccgggtgccgcggggtaagcagtgctggtttcgtttcatcacggcccccatccttttgactagtcagccagcgttgcttaacttgtcagatcggacgggtacgcatgattccaattttccaagcaccccaccgaaagtagaacgaaataaccaaaatataaggaaaatattttaaaaagatgttattcatctcccttttgatagaaaaagcatcagagagccttatttaacttttaattaacatttggtgcgtttcagagcacgttctaaaaaatatttatgaattaattttgcaaaataataaataattaatgaaaaagtcagaatttcgaaaaattttaaaaacaacaagcgttggcattttttcaggttaagttagtcctttacaatggagaaggcctgcaaaatttggagagattatatcgattttagtgcgctaagttcgatgaaactttttaaaatataagcctaaactttttggcttatttaaaaagcaattaaaatttttaaaaattttattcatatcccttttgatagaaaaagcatcagagagccttatttatcttttaattaacatttggtgcgtttcagagcacgttctaaaaaatatttatgaattaattttgcaaaataataaataattaatgaaaaagtcagaatttcgaaaaattttaaaaacaacaagcgttggcattttttcaggttaagttagtcctttacaatggagaaggcctgcaaaatttggagagattatatcgattttagtgcgctaggttcgatgaaacttttaaaatatacgcctaaactttttggcctgtttaaaaaggaattaaaaatttttaaaaattttattcatctcccttttgatagaaaaagcatcagagtgccttaattaattttttttaaataaaaaaatttgactagaccaatcgaaagctaacggtcgacctaatggaaaaaaatccccgaaggagagaatttaattaattccattcctttcggaggtccgtgccgggtgccgcgnggtaagcagtgctggtttcgttcatcacggccccatccttttgactagtcangcagcgttgcttaacttngtcagatcgacgggtacgcatgattccaa

SEQ ID NO: 37699 - DNA, 1449 bp, Heterodera glycines
  unsure (1)..(1449): unsure at all n locations
taaaaagaaatgtgcgaaaacatcgtggcaaccgaaaggaaccagaaatgggcacggtctggttcatcttttgctgctgttgttcaaagttgaaaatagcagccgagttcccgatatattcatttggctaacaataaaaataaataattgttntaataaatggtttgccgtatttgcatttacctgacgaaaatcctgtccacatccggcacatacgccgcgcatcacaaccgaatggacacagggagtggtcttaaaaaatgttccttttccctcttttactgaagaattatgtaccaccttctccgatttttctgactttccatctttttcggtggtcaaatccacaatttgtgccacataaacctcggcagccggttcttgtccaacttccttcacgaattcgtctgcctttttcggttctacaaataaatacagcaatcaaaatgaagcatttgagggaaataaaacactaattgtaaatggttttgtcatgtagaaagttcgagcatattcggctaaaattgtgaatatcttttaagttttaaacaagagactcaattattggactaataaatttattataaaccgtaaattcagttattttagtagaccaaattgaacttttcataatcccccaatttttaaaaatttcctaacttagaagttaaaaaatcttcgaaaattatccccctcccccaactcaccactctccgccgtcaatttctcatccacgcgttcatcggtgcggttgttgctgttgttgtcagccatcgttgcctcgcgaaattcgcgttccaattgttccgcgaatgggtcagcggcgacggtgccaccgccgcactccacgcgacgacgcttctcgtagaagtcgcacaacttcttgaacgactccttcttcaccaccatccaaccgtcgtcacccgcgttggtgccactgtcctcctcgtcctcaacggaagacatagtagtcgtggaggagcgggacgagaacgaagagacgtatgatactaaaaaataatatctattgaattatgagtggatggcaaagggaacaattcatcatcgactcccaagcaacgcgaagaaacggaaaacgatttgcaaccaattaagactaggtatatagctaatgttgtttttaagtgaattataccatttccattgtcaactggttcctccgagttgtgcgtgctcaacttcataaggtcttcttcgccgttgtctttgttcactccgtctcccaatttgcgcttgttgcccaattggatgggtgccgttggctgcttttctttgtccaacgaattggcattggtctngaagtgaatcgaaaaatatttaaattcataaaaaatgtttccatttatacgataacgattagttaaactttaaaaaagtataaattagtagtactaggcactggatcaatctgtattttatcacaaaaat

SEQ ID NO: 37700 - DNA, 1412 bp, Heterodera glycines
  unsure (1)..(1412): unsure at all n locations
ttttttttttgcttttcataagtgaccaaatgccgtaaatacaggggtaggtgtttaaaaaaatccctagtgcaagatgagtatcacagacaaaaaaagtataaaatttgttacaatggtttgggtaatagttctataatgcttctccgctgacaaaggaaggtccccgggtgtccgtgggatttccgaatgaaatttggtgggtggatagagcacccatgggttcttaagaaaagtggttatattttttgcggaatgagcccgagcgccgagttatgactgcaaactctttttttttttgcctttttaaacaaagtaaattacaaaaataatttctaagaataaaattttttttaccattttaacaaaaagatattcaataaaaatattagataaaaattatatttttttaacagaaaggtaagtatcctttttaaatattgcatctttatcttaatgcctttttttggttttaatgaaataaaattaaaaataaaattttacttcataaacaaatatttttaataatttttttccttaagaacccatgtgtgctctatccatttggattactgtacttttcggaattattgatttttgacctttcttttctctatgggaggattcgtagagacatgagattttttatatattgtagcaaattttaggctctttttgctgtcatatttgtctttcacgaaaaaacttttcagccctcctagggattttttaaaatcatagtcccccaggggtgttaaaattctgatcactcgatcacactgaaggaatgatatggtcactgtggtgcaattgactttttcgaccaacattgaaagcttcaatttttaagggaaaagtttgtttggtaaaaatttcagcccgattggccaattggaagtaggtatgtgaaatatcaaaagaaactccttaagctataatcttggtaatactgtatgcaaattcgaaaactggtgaatcgactttttgttcgaattcggatccggattcgaacttcgccgaaatggatgacagatttgtgatattctctaaaacccgtgaaaattcgtctttatgaattttcaaaaaaagggggggggattaattacagtattacatatagtaacctttatgtacatatgtatatgttagttcacaattatggatttttgttcatttttcgtctatgtatgtatgtcccccgttgcttggcagagataatcccctgcgattaattttcacactctgaagccatccaattggcattttgtcggcctaacagaaggagcgataatagcacagacacagcagcagcagatctgggcactgttttctgctgttggcttccgttcattcggccttaaacaaccnaaagacagagtcttctgcccattttgttgttaagctctttctac

SEQ ID NO: 37701 - DNA, 944 bp, Heterodera glycines
cgtccatttgctataggacagcgatcatcgaactatacatttgccaaattcaaaaatgcagattataatttattacccgccccatggccaaactgatcatgtccgcttccaccggttccgtcataatttgccaaatcgttggcaattaattgcaaaattcactctttgagttaggcaattccgtgttttactaaaatcgatttgtgtcaggcaatttttgagtgaaggaaaagattaatggccaattctgccgcggtttgcgtgcgaaatgccttctcttttcctttttttcatctctataaaagccattcattgccaaatggtccatcattttattaattgctttccctttgctttttctttgcctttttgacaccaaatgaattttgggcttttattttaaaattattctcgacaacaaatcactcgcggctttttgcataaaaagctttatgcatattaatgagttcaaattgaattgagggcattaaaagtgaaaggaataaatggaggggggggagggaaaggtcggatgtaatttatcgaccggataagcggaggaggaggagtaacggcgggggaagtgcctccccggggtgcttctccctccccctccctccccccgggggctttttctcttccgtcacggggaatttcccgccccttttgctttgctttgctttgctttgttgctgtttgtgtgttctttatgtgtacaatgtgtgaagaggaagaaaggaaggctaaagagtgttgggatggggggaagaagcaaaaaatgaagcgaagtgaaaacggcgacagttggcaaaggcaaaggcattggcatggaaaagtcaaaaaaaggaggggggagggaacggtgaaggggagggggacgagggaatgtgagcggtggaagcaagcaatttgatcagtcagtcgatcagatcagtccatcaatt

SEQ ID NO: 37702 - DNA, 869 bp, Heterodera glycines
gcatcggttcggggggactgccccgaaaacaaaaaaatcgattttttcaagtgtccgtttggggtactcaaacaattatggggagcaaaaatccaacgcagaattaaagtacagactatagggaagctattcccgaaggattcggtctccccataaatctgggcgcatcggttcggggggactgccccgaaaacaaaaaaatcgattttttcaggtgtccgtttggggtactcaaacaattatggggagcaaaaatccaacgcagaattaaagtacaggctatagggaagctactcccgaaggattcggtctccccataaatctgggcgcatcggttcggggggactgccccgaaaacaaaaataaatcgattttttcaagtgtccgtttggggtactcaaacaattatggggagcaaaaatccaacgcagaattaaagtacaggctatagggaagctattccggaaggattcggtctccccataaatctgggcgcatcggttcggggggactgccccgaaaacaaaaaaatcgattttttcaagtgtccgtttggggtactcaaacaattatggggagcaaaaatccaacgcagaattaaagtacaggctatagggaagctattccggaaggattcggtctccccataaatctgggcgcatcggttcggggggactgccccgaaaacaaaaaaatcgattttttcaagtgtccgtttggggtactcaaacaattatggggagcaaaaatccaacgcagaattaaagtacaggctatagggaagctattcccgaaggattcggtctccccataaatctgggcgcatcggttcagggggactgccccgaaaacaaaaaaatcaatttttt

SEQ ID NO: 37703 - DNA, 1029 bp, Heterodera glycines
gaagcggcggaaatggggttttttgagaggggaggcggggcaaatgggagcgagaatacaattgttccaaagaatcagtttccgttgtgcattttgatgggcaacggaacactgcgcgagaacgacgaattgggcaatatttatagaaggtttcggcagagagacggactttctgagtctcataaacgaaaaggcgagcgaagctttgccataatcccattgaattacggttgggaatgggtacggtaccgagatgatcagtgaattgtttggtcaaatctttttcatagagataagatcagattagtaatgtaaaaatatgatcatttatttagttaattctcaaatcatattaaggtaaccgcctgtaagttgaaatatgatagatctgagcttgaatagactcaatgctttttaatgataccaaaaagatagggtttgttcacacatgaacaaagttattgtataaaatcaggtattgtcagttgattggactcataaaaatacatttggactcataaaactcgattggactcataaagtgcattagagccgaaaagcgatcacggaatgatcacctgaaaaggaaatggtttatcgttaatcaatgcttttgaatctgaactaccgaatctggttgcttaaagcgaattttgttgggcagcggacggtctggccaaggaaaatgcacagatttgcgaccaatccgtacagataattctatttttgttccattcttgtcaattttgattgttctcaaaattggaaattctgattggccatcgaaatgtttgtccaccaacgcatcaaaatgtggcgaaagaagtgccattttgaggccgagttgtggacggtcaaagaacaggagagtgtccatccaaatgtcgttgcaaacccatggaaacatgttttcatgatttatgaaaacgaaaaaaaatttcgaaaaggggggggggggggaccaaccaaagtattacctagaattcaatgctacgtgaaatcttgatctcctttttcattttgactttt

SEQ ID NO: 37704 - DNA, 940 bp, Heterodera glycines
ctatcatgctcgagagcatttgtaacgtataaaattctcaaaataagagatagtcatttttcttggatataagataaatttaaaaattctctgagaaattaaatggcgattgcgcaccgccctccctctcacgctcgagcgcttttgtaacgtataaaatttctcaaaataagagatagtcatttttcttggatataagataaatttaaaaattctctgagaaattaaatggcgattgcgcaccgccctccctctcacgctcgagcgcttttgtaacgtataaaatttctcaaaataagagatagtcatttttcttggatataagataaatttaaaaattctctgtgaaattaaatggcgattgcgcaccgcacttcctatcatgctcgagagcatttgtaacgtataaaatttctcaaaataagagatagtcatttttcttggatataagataaatttaaaaattctctgtgaaattaaatggcgattgcgcaccgccctccctctcacgctcgagcgcttctgtaacgtataaaatttctcaaaataagagatagtcatttttcttggatataagataaatttaaaaattctctgtgaaattaaatggcgattgcgcgccgcacttcctatcatgctcgagagcatttgtaacgtataaaatttctcaaaataagagatagtcatttttcttggatataagataaatttaaaaattctctgagaaattaaatggcgattgcgcaccgccctccctctcacgctcgagcgcttttgtaacgtataaaatttctcaaaagaagagatagtcatttttcttggatataagataaatttaaaaattctctgtgaaattaaatggcgatttcacaccgcacttcctatcatgctcgagagcaaggaatcgtacaaaatttctctacaataagagatagtcatt

SEQ ID NO: 37705 - DNA, 867 bp, Heterodera glycines
ctgctgctgttgttgaagcatttgctgctgattttcccccgctgctgctgctgctgtcgacgaatgagtgaataaaaatttcaatttttcacgcatcgaatactttaaaagggtaattaaaaactaaattagttattgaggaaattcaccactttctcaccggaaaatttagaatgaaaatctcggtttgttctttgagcgtgtagccgacaaacatatatttgaactggtaaagcaagtcgcaaatgctgtcctcgtagtgagtcggccgaccttctgcaccaaatcggcaagaacgttgtaaatggaaatgatctgaagaaacccaaacaatcaaacgcaaggaaaaggacgagcaaactcgaatcaattaaatctaatagctgaaatttgcagctgccctaatcgaacattgtgcccatgggacacctcgggcatgtgtttgttccgctccttttcgtgaattctctgcaaatacggcaccacaatgcgaaggaaatacaccagctgtgcctcattgtccactttgtgagcaagtcggttgatcacgaaatcgggaataatcgaaagcgaattctaaaatgatttgatttcaaaacattttgtttgtttccgaacattgccgccatgttgacaaaatgaatggattagggccagcatcgagagaatgcgactgtccgagtggaggtaaacttcgtggctaagcgactcgaacaattgcgaagggtcagcgtcggcagaggcgatttgggaccattcgaaggactcctcaattcgatccaagaagaaggcttggaaggaggaaggaagcccagtcaacaacaaacccaacgcattcagagtgtcctggaaaatagtccttattta

SEQ ID NO: 37706 - DNA, 966 bp, Heterodera glycines
ttttattctttttgagtatatctgatcaacgccatactcaacagggtctgggatttttaggtgctaaaatgacaaaatggttgatagggcttgcaattatatggaaagtcatatttatttcctgggattgtgggcctgaaacgcacaaaaagcatgttagctttattttttcatatttaccctatttttagggttttgtcttacatttagagaatttgaagatatatcgagaatctaccatttggaaaatgttctccatattttagcaattttatggccatatttcgcaattttatatccatattttttccccatcctacttattaacaaaatgcaggtcaaaaaattatccagtttgaagcctcgaagtttttgtgacaaatgatatttaaataatttttattgcttaaataaaaaaagccatttcttttttggtccgacttttggcttttcattatcgtataaatttaatcacaacccaaccacagttcactgggtgcgcccggacaatccacaaagcggacaatctgtctgttgacaatccgtcaataaagataatccttgcgtgagccgcacacacacgcctttccccgttttgaataactttaaaattggatgtattagcttggtaatgtccagaagaggtgccactgctcggatatatgccgcttggaacaatgtttagtggaattagtcaagaaattttttttttattaaactaccgtacttggtggcactccgtcacaacaaactcaccgacaggcggcacatttttccattttgagaattataattataagaacacaaacccatagccccccgccccacccataacataacacacaaattatttattctgcacacaaacacacacccaaataaaggacggacggattgtcgggttgggttgggttgggtattgggtgttgttgttcaacaccgtcaccaccacccaggacataacat

SEQ ID NO: 37707 - DNA, 709 bp, Heterodera glycines
  unsure (1)..(709): unsure at all n locations
ttgagtcacattgtttggaatgccggagatttgagtcccagagattgaaatgctggtgggttgagtcccagcgattggaaagtctgataattgagtctcagagattgaaatgctggtgggttgagtcccagagattggaatgtcattaaaagttggtgggttgagtcccagcgattggaaagtctgataattgagtctcagagattgaaatgctggtgggttgagtcccagagattggaatgtcattgaaagttggtgggttgagttccagtgtttagaatgccggagatttgagtccattgtttggaatgccggagatttgagtcccagagattggagaaaaagccaagaaaatgatgcgaggccgcgaagcggccgagccagtcgattttatcattcttaattctataacacaatcgtactgcctagcgggggatgcgccgaaggcgctgaccccgctagtaattgacaaagaaaaaagcaaacgtactttttattatttttcatgaatttggtttgaagcttgaaactaattaagagattttttgacattattcgatattttgctcacattgtacatttttcaaggacagttcttgaaaacgacacctcttgaccctatttttggaaatanaaaaacaaaaagacacaaaaattaaaaaaaaaagttggattgtctaatccgcacaataagtgaattactttatat

SEQ ID NO: 37708 - DNA, 1420 bp, Heterodera glycines
  unsure (1)..(1420): unsure at all n locations
tgcaaatgccccattcgccgctgaacagaagggacagcaaaccccagtttggaggctagcaggccaacgtacagcaacaaacgggtgaatgcagtccagatacgccagctctgtccgtttccacctcatcggtttcacgtcctctttaactctctcttcaaagtgctttgcaactttccctcacggtacttgttcgctatcggactcgtccccccgaaacccaaaaaattttcagtaaatttttcggcgtcatgacccccctgccccccccccccttgcacagagctatgactcaaaaatacattaatgagacttataccacatataacaagttattttaaaacaaactttactgtcgagatcaccactgtcaaaaactaacagcaccaaatttcaaaaaattcaacatgtttaaaaaaagttatggcatttcgtgttttgaagtggtgaaacccagttttttaaattactttgttggcaataacgattagagaccgacttttgaggatatgtcttttttgtgcactagttccgatatattaagcataaaaacgcattttccacttggtttgaagcttttacgttgacttttattatgccctttttgccgttttggtgccttttttggcgatttttccaaaaaagttccattaaaaatacaataaatcgggaaaatacacccctaaggaaggtgtaccggggacccagagcggttccccatgggccccccgggcgaaattccccccaaaaacggaacgggaaaaaggggccggggcccccttcacaatttttgggaaaattttgtggggggggggaaaagaaaaaaaaccccccccccaaagaaaaaaataattttttttccgggggtgtgtggcggcggaggaggggtgtgtgggggggaaaaaaaaaaaaaatattatttttccctccccctctccctgggagggaagaaaaatattttattttaaatattgtgttttttctcttccccgccccccctcctttgtgtgggggggcgccccccccccntgttttttttttttttttttataaaaaaaaaaaaaaaaaggagggggaataatatttttttccccccccaccccaaaaaaaaaaattttttttttttttcccccccccccccccccccttttttttggggggagaaaaaaaaaaaaaacccccccccccgggggggggggggggggggccccccccctccccttaaaaaaaaaaaaaaaaaaaaaaaaaaaaaaaagggggggggggggtgtttttttttttttttaaaaaaaaaaaaaaaagaagaaggggggggggggggggggggggggggaaaaaaaaaaaaaaaaaaaaaaaaccccacccccccccccccccccccccccccatatatttttttttttttttttttttttttttt

SEQ ID NO: 37709 - DNA, 1466 bp, Heterodera glycines
  unsure (1)..(1466): unsure at all n locations
tcatcgcctgcaactgcatcggtgatgccttcctacccctcaatgccgcggcggcagcggcagtcgcggcggtgacccctccgtacgccaatttcggcggagcaaccgcgtgagtgaatggacgcatttccatcagcagaggaatcggcattggcacctcattcaccctattttacctccttcagaggctttccttttgctggaattggcggagtgtcctcaatgatcgccccgtacgcgctgaattcgatggccggcggatgggcagggatcgacctgaattcgacacaccagggaaacttggacggatgaccgaccgttgggggaagggaaatgtcggaaaaagcgaaggacaaaaggacgacgtatccctcgccattctcacaaaacaactcattcattctgctgaatacgtgtatcatctgtcccctgtcccccctcccttttttgacttttccattcgtcgctttgtctttttttcgttttttaattttgacttttccgctttttgttttccttacttttcgcccatttttcagcttcgcattttctcgaattcgttcgcaaattttgtttgttttttcaccaatctgcatgcactttctgtcaatctcttgccggaagcaaataaataataaaatttgtcgataaatatttgaaaatcaactcattagccgtcctttgataatgagttaagtatatattagtggcatttgcttagaagtcgaatttaacgaactcaaaaaacaattatttccaaacaaatgttaattgtaggccagctacggaattatcacttatttttggtccctttcttgggaatggcattttttgttaattttctctttctgaaaattcccctatttgcctcccttttttggcatttcgttgcccgtggaaacggaggggaaaagagagagagagcaatgactttccaactaaaagtcagccgtcacaaaagttgctgcttttccgggctaataaaaaaagatcagcagacgcgcaaagtggtcaaaaagtaatggccgaagtgcaaagtgcggggcaaaagggcggagggggtaatggcagattggcactatttgccattggccgcttccactccatggcacggcacttttaccattcattcattccgtgtggtcattccccgccatttgggcttttttctttccattttaaatttttgtgaaaattccaaagtcagcagcgaaaactgaccaaataaatggtcgctttaaattcaaaagtcaatgccggcgaattgcttttcacggcattggacagcggcgacatggaaaagaccaatgaaataatggacaaacancccggagagtgtggacgccagggatgaggaaaagcgggtagggagggggaagtgatcagaaaatgccanaagagggcgcgagggaanagaagatcaaatagaaatggcagggataaatcatgagaagggataaatgatc

SEQ ID NO: 37710 - DNA, 1137 bp, Heterodera glycines
ggtgccactcaaaaaacaaaaaaattaaccggggttttcggggcttatgaccttctcattggctaataaatagtgctgctcatatatatatggttgcgcttcactcgaaaaagggtgcaacatttgaccatattgatcataattatgattttcaatatcaataatagaatcaatgatttttgcaaatctgtggtaaaactgaaaaataccgccatttcgattttgtatacaaaagatatatcattcgattcctcacgatgatcgaatggtaccatttttagagcgcggcgataagtctgagccgagttacagacccgggactgaagtgtccttacaggacagattctacattcattttcagatgcctataaatgtgtttcagaaattaatgaaaataagtgttaatgggttctcgaggtcgctgattatgaatccgggctcagatcagcgctaccgttcatgccaatgagaatatcatccatacaaatttattaattttattattcttctagttcgggtcaggggttcggaattagcaaaatgggtgctatattcgtgatcagttgcgccttacttttagaatcaaaaaatccaattttcaatttattaaagctcagaatataataaataacaaaaggattggtacaataaaacagaggaggaaaaaacattccaaagaaaagaaagagaatgcacaaagaaagaccaaaagggaaaagtatcaatgctaaacaaaccgaaaacgaaatattaaacaaaaagaaaaacaatcaatcaaaatccatccatcactaacttatcaggcgttgatgcgcagctccctcaggtaggtggtgttgaggaaaagaaaggactttggtcatgtccgcataagtgcgcagcggccattccacccctttgttctttgcgaagagctgcaaatttttgctgttgtcaataccgttcttggcgtagtgtgagtagatgtttcgaccgcgtttcgcctaaatgatttcgattctcggtctatatttttattgttatttgaattgactcacatattcatcggcgatatacaccggcgagggcaatgaggtcggcttcctgacaatttgatagaagagcagaggtaatggaccattgtttgaagtgtgtcca
